United States Patent Application Publication US 2021/0254056 A1 - sequence listing, part 33

SEQ ID NO: 64542 - DNA, 4127 bp, Homo sapiens
ggatggccggcgggagttctggttgcggccacggctgtggcctcgttgtgaacggtagcctttgcggttgcgatgcctaaacctttgtttcttggccaaggaggggcggggtgccatgcctgagatgtagatgcggccagccatggctgcgtccacttgccctggcacaccgtgccagtcccggctaatgaactggggctgtctggtaccagctgtggcagggaaggggtgaatgagaggtcttgggggtccgaatcttgccccttccagcggggccattagagttcatctgctgcaccttgcccaaagacacacagcagcgaatggcagagccaggcctttgactctcagtccaattcccttccccctgtgctttccctccaccatatcactggtgtctcgaccccacccccccaggccccctaaactcctcagccacagcccctccctctgctggctgtgctctcagctgtgctaggcaaagtccaaggtgtggggtccaggtagagctgagctttccccaaaaggtcaacagaagcaaagtctggcctgagcaaacagactttgatcgatagctccacaaccacagccccctccagccggcctggctctaccaataccaaggggtttcagcccttttgagggagaagcaagacttgccctctctccataccagaggttctgccccagaagagaagctcgaagatgtcctcccagctgtcccgctgcatcatggcaaagtgttcaaacacagccgacagggagctgccttcacactcctcctgactgggctggtgctggaactggtactcccagtactgtttccctgaggagcagggtggtgggcattaggagggctgggccagggcaagactggagatcccagaggctgttgaagttaggatctcccagcatgaggtgggggtcaggggtgggcacatgctgaggcctgtccccagtgaaatgtgaaaggaatccaagactgctccactgcctgctcagtctcccaccaccccctgagtacccttgaagaagtagacccgctcccggccactgtagctatgggcagggagggccaaggctgcatccacgttgtccgggatgccatcgaagccgtcagagatatttcgggggtaatcagggtccaggacaccatcctcaaagcgccagtactgactaccctaagaggtggggaaagtgaaaaggggtatggaggccgctggctgggcacagaggcagagtcccttgccctaaggcagccgttcccaggtccaggttcactgcccaggacctggagtcttggggctgccctgtgctcacagagctcccaccaggtcctgcagggccctgggtccagcttccctgtccaccctgtccctgggagcaatagctctcaaaccctccctagatgctttctaccctggcccacagcccctggcaccttgaagaggtaggtcttcccctgacagttgatgcgggtgaaggcggcatcgatggggccctcgatgccccagacatctcggatgagcttggggtacccaggcctcactgccttttcgtccagttcatagcagtactgccctagagtggaggagatggtgtgagagcagggacgctcctggggcagacccgcatccccagtacctgccctggattcacctcggaaggcaaagagggaaccgttcttgaggtcggtgaaggcgtcgaagggcttcccactgcacagctcctcctctgctgggggctgaggtctccctggatgaagggtctcaggccttgagtctatcccctcaggcttagaggcgcccacctcaggcgcaggggcctcttcctcaggtttcagaacaggtgtctgctcaggattccctttggactgggcctggaggtcagaggtcagggaggggccccccacctgttcatggacagtggcattgtttttctcctcgccatcgtcatagaccgtgtactcatcctccggcatagtgaacacatccccgcgagtcactgcagagagtggatggtagtgagtctccagcagcagggggcaccccagcccacccacctgggctctgaacacaccttggggcttgcactcagccgtatagtctgtgcagcagctctggtagtaagagcagagctcgtcacactggcacttcttgtccacgttgaagccctcagtgcagcggcccttgcatgactctatgaggaaggagtgtcagtcggtgccaccaagcccagaccaccctcgccctccctacattgacccagatggccaccaacactcccctgtaccttggtcagccagagcaacccatgccagcagggccagtatgagaaggggtctcaggggtgccatggcagggcttctagctcagtgcctggcaagctgggctctggtctccctgaagtctccgctctgatgcctgaggaagggagggagaggcagagacagggaaggagggcactggagaagaggaactgccttttctgctgctctgtttgctcaacctccagcccatcccctctgccccctccagcggctgctgcagcaaaggtcacattcctggaacactgggcctgggcgagctgggagataagacctttgccaagctcagaatcattaggtcatcggaaggggaattagcaccgtggatctggagggcagaaagaaggctcattgggcaacagctttatctctctgagtcttagttcattttcagtaaaataggattaacaaagccttgcttcatggggtgttgggagattacatgaactggaccagacaaaatgcccagtagctggagcagccacaaattccttctccaaacatagctattgatccatgattgtttgatcagacacatccctggctgggtgctcattcgccattatttatttagggcaggaaaaagggagtgggaggagagattgtaagcactctggggaattttattttttagcataaaagaacaaagtttcatttctgggttcttctcttgggtgcatcaatctccccaggctggaaatttgggtaaatatcaacccactggactggatttaatttctgagtcttttctgagcaggccactccctgtccccaggctcagtctccccatctgtaaagagtgggcttgttcaacacacttttagactctcgagagaaatatgatccctctacctggaaaatgcccactggcatgaaacacctgattttgtgcccaatttcaggtgtccacagaacttctgaaatcctcccatcacctgaaaaaagtgatcctgagattttagctgactttttctgttctgtaatcagaggggactgtgatttgggccaatttcttcctcatgggcttcagtggagtcagctgtggaatggaacatcaattcccaccccataggcatgttgtgaggtttcgctaagaaacagccataaaagggccttaagagttatgatgattgttttaaccatttagtagggagggggcatccagcggtgttgctcccacgtaccgatgtcacgtggggcggggaggcggggcggagaacggagagcgtcctctcattctccacccccttcctccaagtccagcgcagggggaggtggctgcgactgactgaggggctagggaaggctggccaggggcgtgggcgtggctggggacggcttgggggtggggctgcgcaggaggctggaggagccccgcgggacccagaggcggggcgtcggcccggggaccactgctcctccggggcgtggctgcaggaggctggaggagccccgcgggacccagaggcggggcgtcggccggggaccgctgctcctccggggcgtggctgctgccgagcatctcccagctcagccgagcccgtgcccaggccacgctttgttccagccgccgcctcctctaccctacggcgtccggagccatccctcgcctgctcgctctctcctttcgcccactccctgcatctgggcctgcatcacctttgccaaccgctcccccgatcctgccgacactcctcccccaaacttctgaccggcacccttgcctggtacccttctctccattcctccccctccatcttctttccccgacccctctcgggtccctcttttcccaaaaccc

SEQ ID NO: 64543 - DNA, 1159 bp, Homo sapiens
agcctcgatgctttggttttgaccccacctgatcctcctttcctcatgcagcacaagtgctcaccggggccagagccagggcatggatatgacaagcagggcagcctggacactgccctcacaggacagcgccaataacaatacagtgtctgagtatctccaggggatgatttctggctctttgtctccaatcagtcccactccctcctgaggtccccaagggcagtattcagagaggtttcctgcgttttatttctatttggtataccctccactgttgtccactgccctgtgtggccttctggttgacctctgcccgatcttctgtctctctgagggaatcagagtccagcatccagccccagctggaacagctgaagtcacaagcctcctctaagccaaggccagtgtgttcagaggtgactgccacccatactaggacaaacacagctcagatcaccaggtcaagcacctaggcctggcttctcctgagacagaggactcagaagtggcctttcctccaaagcctgctcagacacaggtctgtagggccagggtgttctgcttggctgggctgcagctgctacccctcggttggggctgagtcagccagatcctccccctacttctccccaagggccaagaactgctcagggacattaaaggtcaaaagtccagccacactcattcatcctttccccaggcccatgaagagaggcatctcattgtagaatgtatgaggaagtgggaagtatctcagagaatcagctaagtttcctaacttgtccatccaaatgtgatcaccacgattcaacaatttggggcattgctgatctagccgttcctagtggggcttgctcaaggttgcacagcgagtcagtagaagccctggctggccccacttggtaccaatccaccaggcagctcagggctcctgcccagcccagcagcttctgttgtctaacgtatggcaggcagactgggagcaggaaaacagagggccccaaagcccaaggcaccagaaggtttgtttcagtttgctgaagctgatttgtaatgattggcactcttcagccaggggagtgggtaggccatagccaaggatcgattccccaaccacagcaaaggcaacactcttcctccagagatcaccaagccc

SEQ ID NO: 64544 - DNA, 2112 bp, Homo sapiens
gggcataactatgtttccaaagacacaggaatgaaccacatctgggggcagtgagtggccggcccccagttcttacccagtgcctctgggacaagctgtccctgagcccacacactttacctgtgaacatgagaggcgtgatagtggcaaaggcaaagaccaccatccccaggatgttgaaggccaggccgatctcagctacccaggcatcggccaggcagtactgcaggagcttcagggccagcaggctggtgaggtaggggagatgctgagctgcagaaccatagccgattagtttggagtcccagcagaggggtgtgcttagttcataaagggttaagatgtcctgggccccaaagtgcacagtgatcaccacgaagatggccagtgagtagagggctaaatgtttcctggacttctctggggcgggagccacatagagctggacaatggatcggtggtgacggaacgtgaagagccgggtggactttggctcctttaaggtctcaccaaagcagaaagctgcatagagagtcatggctatcagcaaggccaaggccagccagaaggggttggcataaccctgggcccggagccagtggcccccgaggaggcttgccagcatcccagccaccccgatgctggcttccagcagggccatccggaaggtgcggctgcgactggagctgacatctgccacggacgcaaagctagcagccagaaggccaccgaagtcgccgaggagggcacaaaggatgcgacccagcacgaagtagccgacgtggagctgcagctgcaccacaaaaacggacactagggcctggagcagcaggcccagcgaggccagcactagcagcgggcggcggcccacactgtcgctccaagctcccagcagggtggacgagaagagccccaccaggaagccgcccacgttcatgtagagggtccagtgggaggtaagggtctccacttcctgtaggggcacaatgaccagggtgcggttcctcactctgggttccacaatccccaaatcctcgccatcccgggagctacagggatgaggacttcctttggagccctaaacctcagagaatcttagcacagctttcaaaatctgccagtggagagggggaaggacatggaccaaggccccattccctttcctttccccccccttttgttaacctgcaaggccagactttagctcagcttttcgcatcccacccgctgaggttctcggtcaggcccctttgctctggtcccgcccaccatccaaaatgcaccctccctccagttacccgccactaccattacgcaggccccgcccctccgctgcccccacgctccagaccagggccctccacctgccaggctcctcgccgccccgctacctgcatggtggggtccgcgctgcggttgctgcagccccccctttggcgggtgccattgtagccgaggtcggcgctgaagcggtgccacagatactgcgtggtgagcgggccctgcaggaccaaggcaaagttggccaggaagaccagcggctctaccgggccccggcacagcacggcagccgcagggcgggcgcggggcttttccggggggctcgcgctcccctccatgtgcgtgcgcggcggagctgtcgccaggcgggcggcggggcgcgcgagcgactcgctgcctgggaccagcgacgcgtggcgtggggcttgcgctgtctgcgcctgcgcccggcgtccctccttaaatgtccggcggggaggggcctgtgacctgaggccaccggactctcgccgcgggtgcacctggctgggcgtgggccagcgaggggcccggcacccccagcccgcgggatgacctcacctgtaaagtgtgcgtagacaccgccctgcagccctccctcccggcccagacacaccacagataacaagaatatcaacaattaacatgtattgaccacttactatgtgctgggcacggtattaaaccctttttgtgcgttggtctcccgataactctacaggctagccaatattaaccatcgctatctaccgctgaggaaacgaggtcatcgggtactcaaggcagagctggaagagcacatgactcctgatg

SEQ ID NO: 64545 - DNA, 804 bp, Homo sapiens
ctacacgccagacactttacatgctgatcacatttactcctcacaaccatcttgtaagggagacatcatcagtgccatttgaacaaatgaaaaactgaggctcagagagattcaataccttatccaaagctctccagacaataagtgcaaaaacaaggatttgaattcaggactgtttgattccaaatctggaactttctggaacctctgacacacacacacacacacacacacacacacacacacagcaccatgtcctgagctgctgcctcctggactcccgccagactgcacctgacagacaaagccaactaggagggaggggagtgagggagaaggtcccacaggtgaccaatgcctggccccttcatgacagcaggggctagggctgtcccacagggactagagagaggtgtggaaggcagggactttcccataatgctccctcctctcagtgcacaagtgtgctatgttgagaaatggggcaaaagaacaaacagtccttgccacagagggagacaggcagcagccttatcaaacaagataaggagacccggatgatgtgccttttgaggcccctggtggtggaggaggattgagccaggtgaatgggaaaggaagaaaagatgaacccatcttggagtgttgtactttggttgctggagagccaacagtggagactggagacaaatatttaagtcattccggcaggccccatgtacgtgcctcacaatctaacaccgcccaccttggccagaaaggaaggcttcctatggaggtgctgccctgctcagtctgtcttct

SEQ ID NO: 64546 - DNA, 1255 bp, Homo sapiens
ctgttcattcagaggtctttcaacagtaagtttttaactgcgtttatggtacacccccgctcctcccacccaactcagctctgaactgagctcagaggcgaaaagcagccctgatccccagtaactcacatttcagaggaatctctctttcatgcacaacggtgaagggcagcttctcctggtcgtccaggggcactgactcccgcgtaaacacgacagtgacaggcaccatgaggcggagctacaggaaggagcatcagggccgtcactgagtctccaccttgccgggggggctgtcccccgaccctcccgcacagcagtctcacctgaagggcattcaggccactgatctgggagtaaggcaacgaggcccggtaggtctccgtggtcttccaccagagcggtagccccagcacgatggccaccgcagcgaagaagagggcggcgcgcttgccccgggccacctctgagggcatggggaaccgactgaggcgctggaaacgggctagggtaccggccccatccccgacgcggagaagccccaaccaccggcctccaggggcccgcgttcattgggatctccgtgcgaagggacccggcccaagcctgaagggaatctcgtctgaagagacccccgagccccccgtccgcgggacctctcgcacaccacaatccccacccctgctattcctcccttgccatcagctagctgcaggccccccacccgaagcccaccgcacctaggtgtgtagccgcagccccggcggccgccatgctagcttccggctgctccggccaccgtgggggcagagcttcgtgagcctcacccaatcggaatctctgcaacgagggggcaggaccgcggcggtgatcggggccaatcgcgagcgctactccagacccgcagacgggagcaagcgggcgaggggtgggagggctccgctgggagcttcgctggggatctgaaaggaagtcacccgggcgcggagggacagcctaggggccgtgcgggtttcggcgctgctggaacgaagttccccgcttccctgtagaacacacttctagccccgcaatcaagagcgcaacctctgcagtccttaaatactagctgggcaactacaggcagctccgaggctcatctgaaaatggagatatttacataaatgaggccgttcttgtaaggagcctggcacacggaaagccctcaacgtcaactgtcacggtcttattatccttatcgtagaactcctcttag

SEQ ID NO: 64547 - DNA, 2079 bp, Homo sapiens
taaaaaaaggaaattaagagtttaaattcaattggatcaaccctacacacatatccagagtttcccagaactcaccactgtttgctggtgttgctgaaacttaagactgacattctggatccaaaaaaagcggaaggagccaatctttagctccgcctgcagcttccgctgacaccacttggtggccaaccggaccacaagccacctgcagaaaaattcctgttaattcataggacctttttccaatgatggtttccctcaccccttgctggtctttcaaagccttgcaaaaggtcgttcctgaaactggatctgagcaactctcctttcttccaaagcaccactctgtcatatacattcagccacgctgatcaagatcctagctcccgactgacccctccacccagatgaaaccagaaactgcaccctctaagttgaagacaaaaacaaaatccctcaaattgttatgaatcccagaggcagagagagaagaccccagcaagagtcaaagcggaggcggctctgtcacatgtgccatcacactccccagagggtctgtctgtctcctgctcccaccctccagacaggtatccacgagaaggcactttgaggtcagacccggcagctcgaatgctgttctccccagaccgatgctgcaggtgcccatcgcgcttggcgaaagggacatgcaggggtgggtggagggggaaagggaagccactgaaccaggccccttcctcacactcctattcagttcctggcctcagcatttcctcagaccccgcccgcttcctcagtctccccaactcgcagcccatccctgggagctcgggccacgcgcctcctcacgatccctcccctcgccgcgcgccccctccctccaccctacccactctgcctcacgcgcctcagtaaggcgcgcgccccctcctcagtctttcttcctcctctccgccccctccctcccgccgccgccgccgccgccggcgcggccgggaaccctcaccggcctagaaagagggcgctaagcgcaactagcagcaagaccaacagcgcggagaagaacagaggcatttaggtccgggtccggcccggcttggccccggcccccgccatgccgggccccgacgccggatccgcgcagcaccgccgcgggccgaccagctgcgcgcgcaggagcaacgctgagcgaggacgcgctggtgcgcacacgagccccgccttccgcagcccgccagccaaccaacggcctcccaccccagtcccgccctgtcctacgacgctgcagggccgacgggctgcgtgcgcgaggagcgggcgtggttccgggaggagggcgagggggagcggaccaagagctgaaacacgccccgggcgcacaccacggtgcccggaaccgcggggctcggggacccgcgggggtcggagtccgggcccactacctgggctggcggtggacctggctgactcatttcggtccggggagctcactttgaggggagttggagtccgcctagccacttaggcctggactcagggttctgcggaagttacacccctggtcagacgtggtagcactcccatcttattcaagatcctgtttgaaaattactgaggcagaaactaggaggtaattaaaaggcctcaaaaatctcgcctcattccatccacagaggaaactaatgaggttttgttttttttttctttgagacaaggactcgctacgttgcccagtctggtctcgaactcctgcaggctcaagggatcctcctgcctcagcctcctgagtagcttggactaaagacgcgtgtcacggttcctggccaatgagtttttacttcatttactgtttgaacactgttctggtccatctacttatggcacgaactgggccctgatggaggagaggaggagatactgcagaagtagtgaatattgttcttgccctttagcaaaaaatagtttatctgggaagcaaacataattacataaagtagacaatacatagtcagttttgcctgcttccttctgtgtagtttatctgggaagcaaacataattacataaaatagacaataca

SEQ ID NO: 64548 - DNA, 2109 bp, Homo sapiens
aggagcaagtgtaagatgcagaagagctggaagacaaagggttgtagtcaacgagtgagctcttggagtttaaagtttcacagacagtacttactgtaactttaaaatttcagacacagcacttactgtaattttcttgtctctaaagcaggctttgaacctggatagatttggatagaaccccgactttgtcatttgctaactgcaaggctttgaataaacgatttaatttctctgcgtctgtttcctcatctgtgaaatgaggataacaatactgtccaccttacaacaatgttaataatcggaaaaaggacataggtaacgtgcctggcctgtagctcaccaaatattaggtggtgttgcgattaagatgccttagaacaattcagttctccgactctctagacctgaggaaccttcccagggaacccctaactttcccagaccacactgtcagatattctataggccccgcccctccagagcctccgagtcctccctagcccacccgagcccggtccccagcattacctgacccatagcgcacgtcgtgtgagtgcagtcggacgttgtggcgcgtattgagtagcttcaccacggagccgcaagtaacgacacccaggctggacgctcccacagcgctccacaaaccccccaacaacagcagaggtactacagccatcctaactgtatcgcggagccccaaatcttcgaagaaaactcggcccctccccggaaccggaagctaatggcgaaaccacggagagaaggaagtgaagaagcccgagtctgatctttatggtttatttgactagagcggcctgagaaaccggctgagcctggttacttacgatactctcgctctgttccaggggctcagtgacagctgccttcctgagccgcttcggttacctttcgcacccacgagacgaaagcttccgagagcgggagagagaacaagaaatggcccgcccactcccggtgacagggagccggaaatgacgtagcacgttgacgcagcagcggcggcggtggcggcggaggggccgtgcggtgggtccgtactatcttttcccagtctcggttcgacgactccattttcctcggtgggggcttagcgcactggaggagcggcgggcttcagacaggtaaagttccgactggagagcgtgtttctcgcaggagtcaggtggggaaccgggctcctagggcctggtcacgtaagggaagaggcagtggggagccgtatgcgggaagaagggggagcctggccttccctgctctatggggggaagggggaggaaagcgctgtagttgctcagagtccgaaagcttttcccagcccagtgacacccggaacccgtgaatcgggtggcacgttgaatcaacaggcttcctggcatcccgtccttctctccgcaggtttttaaaactgggccacgcaaaaggattggggatggaagggacctggggcttctgagccaggatcaggtgatcgagttgtttgttctggggatatgaatcctgtggagctttcagcagctcggccatcaggctagagggcgatgccaaattccagctctttacatattgctgaataatacaaatagaactttttgtagatggttgcatccttcatccctttctaaagatcgaaggtcttgtagaagtcctaaagcccgtccattctctatagattcatttcctcaaacgtttgccagaggcctatcatgaacatcaaaattagttattaagtcaaaactccatcttctagtttctacctttctcctcaggcactcctttgaaccagctggagaagttaattttcctgggttgttgcaagaactgatacttatttcagagggctaagatctctgaaaatacttccgtggaaattcactgtaatatcaaaagtaacaagggtgtatgaagctacatcattaatgagcattagggagtgtaaacaatattgaatttgattaatttcttcggaaaaatgtctggttccactgtttatctggaagttaccagtttgtaagtcttcagtgttttgattacagaaacataactgctcttccatcagctgtgaatttagagcccttttttacg

SEQ ID NO: 64549 - DNA, 2026 bp, Homo sapiens
ctgtgagctaatatatctggacatgacacagatggataaactgaggggactttgctatggactgagaagcccatcccctcccatggtttttcttctggatggatttgatcaagaatctcagctctggatatgacacatggggcctttaccttcttcccacaggaattcgaagatttggatgagattgttgctcgctatgtccagcccatggcatcctttgcccgggaccttctgaatcacaagtattatcaggactgcagcggtggggaccgcaaggtaagcccagggccctctgaggaatgacacttgccaatcacttaaggatgtacgctttcccttcagtataggggacactcaggcggtgaaggaagtgtacatcatgtgtgcaccagacgttgtgtaccaagcatgctgctatcccaacctctccccctcattctacccccagaaattagaggagctgctcatcaaaactaagaaggagaagcccaccttcatcccttatttcatctgtgcctgcaaggaactgcccggcaagttcctactgggataccagccccggggtaaacccaggtgagcactagtgctgagaaggtgctgccactggggttcataggcaggctagaaggcagggagaggcccggagcagtgccctctctggctctgctggactgcctttctcctctcatctgtttagaacagaggtggaggttggaggtgggaaaagagggtgatgatttcaaggcaaaaaggcaaggattcacataagaagggcgctttccttaacaccgtgagaaaggagttcccttcacctcctctccctcccacagagtgacaggagtcaccagacactcttcacctgattgcagaaactgggggccagtacactggtctctcctgtccaccacctgcctcaccctcaccagggcttgcacacagtggctcactgttgctgtaatgtgctcactccgcccgcactgaagcggtggtcaggagagcctgtctcctgttctgctctgtctcctgctctgcctgctgctctgcctgcttctgtgtgactaacaggctggccttcctgaggtattcctttatctgagtccctctagcgcttaccctgaacctagaggacaaagtccagtttccttagactggcgtctttgtgtctgtgatacagactggtaatcacacttgcttctctgcctaagccctgcccccatccttccattggcctttggccatgtgcacttctgcttttatccctgtactggctttacctgatgcacagctcaggctgcattagtaggggctcagtggccagatgacaggaagccctagactctgtaccgtgtgccatcttgggcacatctggaatattgtgctcatttcttgagaagcctgttgactcaccagtgtgcttccagaggccagcagccagggctaagtggggctggaaactgtgtcctgtgtggaacagttgagcaaactggtggcgggggtgggggctctaaccaggaccaggtgcagcatgatagcttctggggaaaggagctgactctccttgtgtggcagaattaacacttacggaagagttaggaggcaggtgtcagcctaatagaaatgagaactgtgtactatgtagcattatctggttgccattgatagctggccttcattgagcacaacccagctttaggcattgtggaacgtgctctgtgcattctcatttatcctcacacccaccccataggcttcagtgctgtggtcctcactggacaaatgaagcagagattcaagtttggtaacttggtgcagcgtgtcatatgtggtgaatggcagagctaaaactagaactagaactggaactaacccagagcccctcttaacaactatctgctactctcagaagtgttgaacaagggcagactaccaccttccacagccactgcagaaagatgcctgctttaggggagttgcgatttgctgctctgggaggccccttccaaccctggcactatgggatctcggt

SEQ ID NO: 64550 - DNA, 1165 bp, Homo sapiens
tgcgccactgcactccagcctgggcgacagagcgagattccatctcaaaaaaaaaaaaaaaaaaaaaaagcacacatgcagggtcagagcctgtttactctccactcactagctcccccagagctcggacacccatcagctctgtttgtgaaggagacgaggggaggaaggacaaagggggagacgaatttagtaactctcttcagagctgagaaaagcaatctgctctttagttccagaggacaggaggagacctctgaccagcagcagtccagagttcctgcagcaggagtgactgacaacacacacaatgaatgaggagggtgatagggtgaaagaaagtgggaggcttatggcgtctttccccgtgaggcgttaatcggcgcacaaaggcctaactcaaaactcacaagttatgctcatctgtacagaatcctccccgtcctgcggggccgaggagctctcctcgacctcgaggcactgggggtgggcaccagagcagccgaaaggagtagggtgggaagggagggaaggagtagggcgggaagggagggaagaaactaggagaggaaggagggaagaggaggaagcaagggaggggcagtgcgcccgcgtctccttggaaatgcctctctggcctcgccgccgcggaggtaattgtgatgccacgggtggaaccctcagtctccttggtccaccctcagggtcgatggaaccgcccgctcccgccccggcgtccgggtgggcgctggtccacgggctccagccaaggccggcgcttcaagggcagcggcctgcgcccggtgccacccagtccgatagccgagcgttccagctctggctggaaccagacttcccgcccatcccgcgggcgacccagcagggcctcaggaccccagtcctcaatcattggcccgcggctcgacgcgagcccgcccccggccctagctccgccccggccctagctccgccccggcccagcactgggccccgcctctctcgttggtttgcccgtctccctcgtcggtttgccggcttcccgcgtgcgccgctcggggtctgcgagccgggccgcgccctctgcccagcccctgccccgcccctcttaccgcggcatctgctctcatcccacgagcgggccttgggctcggtcttttccttagtc

SEQ ID NO: 64551 - DNA, 2021 bp, Homo sapiens
gtgctgggattacaggcgtgagtcaccgcgcccggccctgacttgatttttttctgccaccaaatcactgtgttattgataaaccacattcctctctggacctcagttcgaccgagcaaatcctgctccagcactctagaacttagctgtatctaactcccgagtcaatccaaatgtgttctttcctcttggcagcgttcctgcctcctggcatggcaatcctcttccctgagactggcagttgctcaagataggaagctcccgggaccagacccgagcgccagccggctacgccgtccgctggcctgagcaaataaacgcgtgtcttcaaaaaactacaatccccatggtggcacgcgcctgtagtcccagctactctggtggctgaggcaggagaatggcgtaaacccgggaggcggagcttacagtgagccgagatcgcgccactgcactccagcctgggcgacagagcgctcaaaaaaaaaacaaaaaacaaaaaacaaaaaactacaacccccatgaagctttagtgcctttgaggggaggagtggcgcatgtttgttcacgcacgaaaaagaaattaaacctaactaccgttcccagagggcgccgctctgcaaattacccaatcagctctaagtacaaagcatcgcgagtctttagtgctctttggcgctataagcccgtgggaacgagcattggagacccttttcacaagatggcgccgaaagcgaagaaggaaggtgtgtgttggtgatggggccgcagctggtttaccggggattgccgcgccgcagagcgaacgaattgggaacacggctgctgggctaagccctgagggctctgctccggggctgctccctgcgtttcggacacgctgcagtatacgtgggccgcgtgggcccagcctcgtgggctgagttccggtagagggagttgggggggggcaacgcggcaggcatcatccgccagggagggccagacattcggttctgggaagctacatgcatccactggttggagctccatgtccccgggcctgtaaggaattagtgccctcagctttaaccattttccttctggttcatgttcaaccgggctacattacccgcccctctctccgcagcgtggttttgcgatggggtatgtgtaaaattcgtaggacattttctggaaagtatcaagcgttcattcagtgctactttgtttcatagtcgtatccctggagttacttagagttggtcgctttcgcctctggtatcgtgcatatgatggaaaagttttaatctcctgacacttgtgatgtcttcaaaggaaccactgatgcacctgtggccagggtggcccactgcagttcttggggccggaagtgaccgatttctaaatcccgcacccacgttttctttccttttctcccagctcctgcccctcctaaagctgaagccaaagcgaaggctttaaaggccaagaaggcagtgttgaaaggtgtccacagccacaaaaagaagaagatccgcacgtcacccaccttccggcggccgaagacactgcgactccggagacagcccaaatatcctcggaagagcgctcccaggagaaacaagtcagtactgccccctgtacccatgaaaagatttgggtattctccattggtaatttggaaattcactcactctgcgtgatggtttctcaaacgcaaattgtgtccagtgtgcttctctaattggaagtatgaggagattgtttctgctgcatttacaaaactggcaggatcagcccagaggccgggcgcggtggctcacgtctgtaatcccagcactttgggaggccgagggggggcggatcacttgaggtcaggggttcgagaccagcctgagtgacatggagaaaccccgcgtctattaaaaatagaaaattcgccgggcatggtggcgcatgtctgtaatcccagctactcgcgggaggctgaggcaggagaatcgcttgaacccgggaggtggaggttgcggtgagcggagatc

SEQ ID NO: 64552 - DNA, 4616 bp, Homo sapiens
acccatggcctagagggaagaaagaataggagttagggaacccagatgcagacgctttcctggaagtttggggggtgtggctatcagattgagggctggaaaatcccaaatttccccctggaataatagtttatagtgggtaagatgctttgttttgttagttcaacattactagattttgattgctgctcacagctggctgtgggtgatgttcagtctaaagaggcagtgaaaccatgggttgctggcctcagtgaacaagtacagactgccaacctccagcatcctagcataagaagtagcacacaggtcgggggtgggtggtaagaaaacacggccttctcccagattcagaaagacggagctgagactagattactgacaccaggcctataccacatagtctgcttctctcttaccatgacgtgatggacaaggtattcccaagaggctcgcgtctgtccgctagccacgatgtccaccgtatcgtggatgaaataccctagtggagggatggggcaagagatcatgaactgaacaagcagcttccttctccctgtccccaatttgcctcccgcttcctgggcaagacctacccgcagagaagcaaacgagcaaatagccagaaagtgaccacgccgtctcaatctccactaacatgtcaggagtctgccatacactggaaaggagggaagaggaggctctgcatttcggcaccctcaaggaccatcaacttctcggttacccttcgcagccccgggggatcctgggctcgcgctagtggctgactgggaagctaagagtggctgggcaaaacccaagagcctccagtttcccaggggcgatccccctcccctggggccactgcggcttttggttggataggataccaaacgggatcaggtgagactgcgtggcctcagcccgccagtgagcgatgggggtagtaacacaagagccggccccggctccccgctcaggatcccctggccacctcatttccacagtcgctcactcaccacagcagtgcccagatccccgacacaatggagtgagcgaaggagacgagcaggttgtgccagcgccaggtgcgcagggggtcggcgcgcacgtgcacgggtaggggcaggcgacagagcgcgcgccggagcgcccggaaggtcagcgtggcgcccaggagcagcggcagggcggggtgcagcagtcggggcatgctggccctccctgccgtccgccctcgaggccgcctcctaggtctgttctgggaaccgggatccctctcgggccagtccaggccggccgcctctcccgccggccgccagccccacacagttggcgaagccctctaggccccttggctcctcctcgccctccctgcgaggcctctgcccccgcccccagccgcccgcgcccccgccccgcccgcctgcccccgccccgtccgcctgcccccgcccctcaggcgctgctgccgcgcgagccgggtgtccccgtggcctctcggccaccggccggctcccgcggacttcgggtaactaggagctgtgctgggggcgtcgtcgccgagacacccctcgctggcgcctcccgactgccgacggagtccccgctgccctcgctcgcctggcctcattaacccgcgtccccacttttccccgggccaccggctaccccgccctgggcgggtaccgcgagagctctctccgccctctactttctgcgcagagctggacgggacccgacacgcccacgccccctaagtcctggtcctggggtgggctccggagccccgcgtccgacagtggtctccgtgcagacccagtgcccctaccgcaccactcgcagtcttctggccggagtcccgtgtttacctgtccctcccgcgcccgcgaggtgggcacttgggaactgctgagtaacccatcgccacctcttcccgccggctcttaaactcctggggccgggcggctgtcacagtcctccctcagacagtcccggccctcggcccggctccccggaggctgggcaagcaagacctccgatttgccgggacagctggagtgacccgcgctctccaagccggtagcttgcagcagttgcggctcctagccactaggtgtcagcctgccctcactgtggcgcgggctccccctcccgcctccgagcgaggcagctgctttcggggagagtttaggtataaactctgggcgaaaggaggagcagctgagagccagcgagggaagttaagcggagatgagagcggggagggagaagagggtagtaatagaggaggggcgggaagaagcgggggaggggaaaggtgctgcgggcgggaggaagaagccgagaaaacctgaggcgcaaggacccagggaccaagccgtttgagtgttttcctcccctatggctccaaggttacacattaacccctgtgggactcttaagtcaaccaaagcccagtcggtttctaggtgagaacacgggtgtcctgggtgagcggctttcccgcccctccccttggctcacagagctgctctgtccgccggccgacaccggcctgagccagcgcccttccagcagtcattccacgtgggtgggtttggatacccttgcgagagccaggacaggggcagaagataaaacgcccctttcctcacaccccttgcccactctgatacagggacgctaaccttcagctagtgaccatcctcctcctgaatactgatgttttctttctttctttttttttttttgagatggaggctcactctatcgcccaggctggagtgcaatggcacgatctcggctcactgcaacctccgcctcccagattcaagcgattctcctgcctcagcctcccgagtagctgggattacaagcgcgcgccaccgtgcccaactaatttttgtatttttagtagagacgaggttttaccatgttggccaggttggtctcaaactcctgacctcaggtgatccgcccgcctcggcctccccaaagtgctggaattacaggcgtgagccaccgcgcctggccgaatactgagtttttctagagctcccgcagagcaggagcccgggagaacctggaattaacctcacttccggtaaagagcctagctggtcacactaaccagccccctgcctctaggcttttgccttgagctcatttcggcgaaaccgcggtctttccttctccccttgatgctttcaggtactgacccactaccgcccccatcttcccccatgggaagatgagcactgagggcagattaccctcctgcagcgcgtgtgtgaaaggggagttgagagtgctgacgagcgcggcgctcactagtcgggacggcccgagaccgtgtcatgtcctcttcaggtgaatcaacttgcacgacttgggatttcccccgtccctccccaggcaaacacgaaaccaaccctgctgccttctcccaggagcgctggtctcggtcgttttgggtgtgtttatcgtttgcgtgccaaggagaacccgctttctcctgaaatagcgtcactcgtgggcaagaagggggtcaatcttctcttcccaccccttcccggcctgtggggtttaactctcgggaacgcgacatccttttagtctagcaagctttacaagggctgggtatatgtgtgggaggggcgggtaccgtgcccgccattgcgggcgcgccctattttcttgccctattcttggacactgcgtggggcagggtcgtgaggggaaaagtgacggcgtgtcgcagcgggaggtgtgtggtgcaggcccacaaatacggacgcgtggcggaacccacacctagggcgctggctccgccccgcaagccgctcgccgtgaaggggcggggcccagagtgggtgggtccgcgcacgcgccgcgtgggggacggaagtgaaactctaagaaatgagatggagaagtacgagcggatccgagtggtggggagaggtgccttcgggtgagccagggctctgggggaggaaactgctaggggatagggaaaataagccccaattccgcccgcgaagtcgccgcccgcctaatcccgccccaaggcgtgagcgccactctgggaagccccgcccaagcttccggtcccagtcccccggggagactccgcctctacggaggccacgcccctgacaggcccattgctccgcccactgagttatgttagcttctttattcattcgttcaacaaatactgagtgccagctatgtatgtcaggctttggccgctgggtatatagttagaaccggaacgggcgtggtcttttccctcttggaacttactgactgtgggaaagttatacaataaacaaaacattatgaagtaagaagttatagcagttatgaagtgttattagcaggttgtgaggatagagtacattaccagtgagaatacttatatgagatggtcaaggaagaattctctgagaagggagattgcttgcttgcttgattgatttttaagacagagtctccctctgtcaccccggctggagttcagtggcacgatcttggcacactgcaaccaccacctcctgggttcaagcaatcgttgtgcctcagcctcccgagtagctaggattacaggc

SEQ ID NO: 64553 - DNA, 4477 bp, Homo sapiens
atcacttgaggtcagtagactgaggccagcctggccaacatggtgaaaccccgtctctactaaaaatacaaaaattaaccaggcatggtgacgggcgcctgtaatcccagctactctggaggctaaggcaagagaatcccttgaacccgggaggtgaagtttgcagtgagccgagatcgcaccactgcactccagcctggatgacagagcaagtctccctctcaaaaaaaaaaaaaaaaaaaaaaaaaaaaaagtatttggtgcttaccgggactctatctccatactttggagcagggcaagccagggcctgcctggactggccattaggcctgcctagcttctgcatagcccggggctgggcggtccccgggagtgctgccacctcccctacactttcatcctgaggcaggatttgctagacgtcggcttgcctctcttccccagcaggagggcaggagtcactaagtgctgcagaaaagatccgcgctggagattgcccgtcccccccatgcctttccccagaaacagttgagagaatgggtagctggtgggaccagaccggtttcccagaggacaggaaggccaataaaaatatcagctgcctgcctggagtgtggtgtcttcaagggtgggggtggcgaccaggcaccccaggactgggctgggcccgacctcggtggcagggctgcggccaagggaggaatgtgggcgcagccggaggctggggccgaggttcctctggcccagcgcccagtccagcctccccgccccagctgggctccccggagctggttgccaggcttcggctgcctagcacctggaagctggggccacggttcctgggctgctcacggccccggaggccgagctgttgcctctggagaagaaaacctttgtggcgcggcccgtccccttttccgacccgcacttccccggggcccgcgggctctggggagaagcggagccacgatctctgtcccccaggggaaagaaaagcccatgatcccgtgggtgggcgagactggcggtcaccagacccaaaaaccatgcactcgggggtgggcggggccgcgagggcgcgcattaggaccgcgcggccgcggtccgccctctcttccggagggcgggcttcacagccgagccctggccgcgaccgccagtcggcgccgcccggagccgggagcgccgctccagcgaggcgcgggctgtggggccgccgcgtgcctggccccgctcgcccgtgccggccgctcgcccgccatgcctggcttcgactacaagttcctggagaagcccaagcgacggctgctgtgcccactgtgcgggaagcccatgcgcgagcctgtgcaggtttccacctgcggccaccgtttctgcgatacctgcctgcaggagttcctcaggtgctggccggggagcaggggacagcgggggcggggcggggcggggggcgccgcctggggagggtctcgggcccggggcaaggcgggcctttgtctgcgctgcgaccctgtgacctcaggggcgccccgtgacgtcacggggagggatgacgtcaagccccgagggaggccccccccgcaggaatccgaggggtccgggcgggtcccaactgcccggcccggggcggaagacctcggcgccttctcgtggggtcaggaggggaagaggcccttccccgtcacctgagagccggcgcggcctcagccttgaactttgaatcctgggggaagaggacaaaacccgctcccgcgtggcagtttgagcctccggagctttcccccatctaacctcttctgattcttcgaacgttcagagaacggtagctattgttctcccatttcacagatcatgaaacgagattcaaagaaaggctgcgacttgcccagggtcacatagttacttaaaggcttaactaggatttaaacccggactgcttatgatcacacaatggaggaaggactgaatcctcccccgaagaaggacccctctaggcggctcccctctctcccgggggctggagtaaggcgggtggtccataagtcatgaagaagggggtcgcactcgtgttgttactgaactcccgctgccctctcaggacgcaggttagcccttggctcttgggcatccatcaagtttctgggcgccctgtatgtcttgaatctcctgctcacgcagggaacccctcaggcccgggtgtgggaagcagggtgaaggagccccgactcttcggaggtcatgcccccagagcgcaggggaaggccgagtcggccactgcctggctgtttgctgggacgaggggatcgagggcctggcagggatagtacctctgagacgcctgcctccggtgctccctcccgccgtgcctccctccctcgctcggtcctccgtagctcctactggcggaaatctcagcaggccctttgttttctgttccccacagcctgggccggctcctgccctcacatatgctccggcacaagctgcaggactgccccctccccctcggcagtgtacacatttactctcctacagacacagccccattgtctccgccactgctcttccccggccctctgggttccagatgaggccagctgagccccccgacccccccacagctgacccaccctgactgcctcgggaaaggagcgggggagggggccgtcaggccggattccttccaccaccttcttggcccccctctctgccactccccctcccggaaatcccctcttcctctcccactcccacaccccctccccccatcctgtcttcttccctgggccttggcctccactgcacagcctggagcagcctctgccctgcctgtcccccatcccccagtgcctgagctgtgctgctgaggcttctgaaggggagagaggtggttgggtggtccctgctcctcacccgccacggtacaagcacaagtgagggtgtccacagccctggctgggccccaagctgcaggctaagcttctgcctgaagcctagggacttgcctctgtcccctccctttctccaaaaccactcagtcagcacattcctgaagcagccaagtggaccccctccccctgggcccacccctctttccccactcctgcctgagctgttaggttggcccaggaaggctggttgccctgtgggcagacacaccccttcagtgcctgtggttgtattgtccttggcattgaagcatggccagtggtagtgggatcaaggggaggaggtgggtgctagaaatccttggggcagttggggcatggactgcctgggtcctggagagtgcctctagaactgggctcccatgtgggctctggttccgcctggatccctgcctgccttccacctacctgactcagacctgccaggaatgccctgccccagggccctgagtcctgctgggtgagccattgctctgcctgagccatgccaggcatgtgtgactggccctggctggggtcagcaagggcatgtcgacagaaagaagcatgccaacaggctccttgggtgctgacggccaggtagggtttggtgcaggagaaggcgggcagctagcaggaggggacggtcaccaggcttcagaagcccactgagcagtgcccagagtcttagctgtgcttgctggacatttttccttgccccagcttctcttccttgtgtgtgtggtgtagtagagcctgtctgagctgtggagtcagacacacatagccaggtgctgcttcacctgtaagcctcttcgtttcatctgtaaaatgggggcattccaccccttctcagaggcaggtggcaagggccgggtgggaatgtaaacaggtgccaaggagcatgcctttcctccccttttctgtgggagacacaccctcaaaggagcagggcagggtaaggtggccgcaagctgacctttgccctggttcttggcagaggaccttcctggggactgggcagccttcgcacttaatctcagcccatccctgttccccctcccagtcagctttcagcgcagccaatgaaaactaacctagggggagggggtgactgtgcagcgtgttcctttcccagtccagctgccatcctgggggagggggtgccagctgccacctgttggccaagtcctgactgaggcagctgtctgtgcctcctctaggcccagaccccccttcccaggacaggggctggggtcttctgggatcctggggaagtagagcccctcaggcctctgcttgcccttttgtctcatctaggctggttgggaaccggtctggtgaggaagggaggctgcctcagtggagggggtggggccaggcctccctttcccctaatgagaaacctttttcctgcccctcccccatttcagtgaaggagtcttcaagtgccctgaggaccagcttcctctggactatgccaaggtgagtccacactgccaggaagaagcccaagcacagtctgttgcccttggaggccggagctg

SEQ ID NO: 64554 - DNA, 486 bp, Homo sapiens
caattcaaatgtctggtttaaaacaaacaaaaagatggattaaaagtttgtatcggaaaggtaactttgttttgaatggttttgacaatctcatacctcctgcagtatcaaatacagtctgggtaattaattcagtggactctttcccttttactgccagactgaacagctctgaggataatctccctcactctcccagggctcagttggaagattcattatttatgccctcaattgtttactctgtcctatttttccacacgtccagcaggcccaagagctgtgttaccactggcctgtttccaaaatgaatgcattactcattgccctattagttacaaaaccaaaataatcaaacacagtggtgtcttaacgttggaaagcaaccccaccaaccatttgatctaggagagaaattaataacaatgccagcccaggttaccaaaagctaaattgtcctggatgaagagagaaccatacatcatt

SEQ ID NO: 64555 - DNA, 844 bp, Homo sapiens
aacagataatcaaaataaactgatgcgatccagagacattatttcccgttccatttccccttttcttacaaggttaagtcggctgaagtcggggtcgcgttagaaaaagcacacacacaccttgcgccctggaaaggtgaggttcgctccgcagcgctccgtggggctcctggctccgccccgcccgccttgggcagctgagcccagctcacccccgccccgggaggatggaagagagggggcttctagcggtctaggcagggggagggggaggcggctgctccgggtgccaggctcacggagcgcaggactccgcggtgcgccgacaccccctcccccagccggctgccgcttgctcccagccgccgccggaagccagccccgccccctcacctccaccctggctcttcgcgagccctctcctgtctgcacagccaatggcgagccagggagccagcagagcgactcgccaaacagccaactggggaggcccacagggaggtcagccaccgggataggcccgctacccgcggacccggcccgactcggctcctctttgttagcgctgcccccatctctcccggcccctaccccaaagccaggagccaagcatcccgtagctgggccaggtgaagctgcgcccctttgcaccccttctccctctgtccccttgtcccctcccactttctgcctgggtactaggagacccccccccacccacgcgatacctcccagagtgcctcagacttcaacagcaattgccacctggagacactcgacagtaaaaagatgctccccaagcctctctgcctctagtctaatcaactgcactgcactgtaacag

SEQ ID NO: 64556 - DNA, 1210 bp, Homo sapiens
ctgatggctaatttatcacattacagaactggtagttctgcacatggtctgctgtgcccataaagaaagcacatatgtgtctactgaggttttacaaacaatacgcttcttatcttaacagagaaatcagtcattccattaacaacggtaaggtctaaattccactaacattgttggtgatacattaacatcaacatagtacttacaattcacaatttgcataaacaatctcaattacataggtgatgcttgcaatagcccgtttgaagcatgacatcttcctggtgttcagaaaggttaagtgggacctgcccaaggttacctaacagctttatcaatggtggacttcctttcgaacctgcctgactctaagcccctagctcttttccctagacccctcccggctttcaaaagagggttcccgactcccatcctctacccagagcagcctattactccgggagaccgacccttcccctgcctggttcagaggtggcttcttaagctccagcagagctttcatcctccaccaccctccccccgcaatcattctctgaaagaagcggaaaggagaggcgaccaaaagctcctggaggaagggatgatacaaatgggctgcttcactccacagcacgcaaccccgtccccctccaccaagctgtccagctctgcggccggcgaccgggccacccgtgccccaaattctcccatcatcacctcaaactgtacctcccccacgcccttccgtctcccacagtcagagcccaccccacaaagtcatgtatccttccgctaagttaccctcttcccacgcgttgtccactccccctccaccactactcacggtcggtgactgggcccggccctcatggctgctcctttgccgcccgccgcccgccgccaccacttctccactgcccggcccctcagtcaccggcgcagctgtggggactacccggagccgctcctgcgcctgcgcagcgtgtagcgcctgggccctttcgggccgcacgcgcctgcgcagcccctgccgggggcgtcttcctcagtgcctgatggtctggacccctgggtctctagtggacatgggagctggccttgaagaattctgaggcttagagaatttggcggctgcctcagggtacgcctctggagtaccgtgcctaggttactaaacccttggatcgcgcttccccaaggagccacagac

SEQ ID NO: 64557 - DNA, 1311 bp, Homo sapiens
tctccataaaggaatgacctcagatagtagacagtagccaaggcttacaggagggaaatccagacctgctcttcatcccaaacaccgacccaaggaccactccttccaggaacctagcctaaagcaaaggtgcagacagcccggggccaccgctgacctctagggcaagccaaattaaggctgggagaggatcctgcaggccaaaggatggaaaggactaggaacaaacaacaacaaaacccttacggggacaggcggaacagtgccccctcccactcccacaaccattcctccctcgatgggaggacgatttctgctatttggcctcatgggaaatgtagtcttttaggagacatggccagaagggccgtttacaaaactttggcagaagaaaaaaatacgttgtgtatgggagtccaaaactaccgtcatgcttgcacagactctaaatacacattttcccctttccttagcctccaccagtctccagagcaattcctcctcccgcccacatcccatgtgtctcggctttcaatttgggcagacctacctctctcctactcgctggttcgtcagccgctctgttcaatcgtaggagcgctcctggtcggttcccgcagtgccttgcggctgtaatggctgcccccagctggcgcggggctaggcttgttcaatcggtgttaagagtctggcaggtgggccctcatgtcgcgagggagcgggtgatccctttttcctcactcttaggcttccaacggaggtgcgtgtcctgcgtcgcggggtccgctttctctggtccccgcttggcctcggcttctcgcagtaatggccagggctctgccctggaccacttcctcggattctctcagcccgacagttcggtgactccttgcgtccccgcggtgtccatgaacagaggtaaagcgccctgataggtttgctcggaactgtcatgtttttagtattgaaaggtttctggggatactgtctttgattctattttatagaaaacaattttgaggccctgacagggaggagcagtgaaaaatctctcaggagagaaataacagtttgagtgggagaaggaaacgatctggtcacaaccagagacgctcactaaagagcatgagattgaagggccacaaagtggaactatggctctgcaccccgacatgggaagcaaatttgatccagtaaatgcatgttgggcctcatcttcttgttaagacacagttacacctggaaaacagcacactttattcttcaaacagtgtccggtattggagactggacacaaactggtcattgcaa

SEQ ID NO: 64558 - DNA, 2302 bp, Homo sapiens
ttctctaagggtggggactgggagacaggtttaggtcttatggaggagcaagtctgcatttagtgttctctgggagtctcccttctgtcctcaaggctatttctggtcttcaggggggtagggtacttatctcccacacactggggatgtcccagtggagagattgattttgagatccaaagtgagcctgaagccatgttttggaatgaaaattcccagtggatttatcacccctctccaagggttggcagctgtgaggcctggctcagggcttctatccccttctatctcttcagtaaccagttctaccaaatctgcacgcaggctgaaaaaatcagcactgatagtgggaagatagagaagagaaattcctccagctccaggcctccaagctgtcaggcaccaggacccccgtcccccagctcctgagagcaaggagctgcacaacccggtggcttgcaaggtgtcagccgcttctcaaagcgccccaaatataaaatctcaatagcagttccttttccccagtaccgcagtccccatgccccacctagatagaaattctggaacttgcagcattttgcaatcccaaactgcactgcccagaaccgggtttcccaacctgtagaggccgcatccgcgtctcctgggcgggcagtgccggtaatccccaacaagccccagcctgcttggaattaacgggtctgactgtgccgagaaacgacctctgtttcagggcccctccccatacaggcacctgccctccagggctgcgcgacccgccccccatcccgggcgctggaatccagccaaacctctgcgttcccggaaccaccagttccctccctcctggaaccccgcggcttcagttcgggacccccaacctcacagtagagcggcggggaggcccgcctagggagggggaggagaagcaaataaacacaggaaaacccacagcgggagggggagcccctggtgggtgcccgagggtgcgcagcaaggaaagcgtgagcacgagatctctcttggaaggggcctcaggtgcggcccgggggccagcgccctgcgccgcgcggtggactcaggcccagctcttccccgtgcactccccagccctgcacccaccccgagcaccctccacagctcccaccttcctcgccgccccctcacctgaaaccaccagcgcctcgttgggccccaccgtgtggcaattgcccatggcgccggcggcacggagggccctcgggaccgcacagacccggacaacagcagcgggtctgcagcgccggccgcgcccagcctatcccgccacccccagcggccggccgcccgctcgctcgcccgcgcccctctgcggtcgcagccccgccggaagtgtggcggcggagggcggggccggcgcgttgaggcaggagtgagcgcagcttcggcggtcaacgcgctttattccgaggggcttcagatacagatgaccccagccctgcatccgcccggaaggcgtccccttactcccatggggcacctcgataccagctgccctgccctgactcacttctcagcacccatcttacggcagtcggccctggcctcagacccttgggttcagatcccaggccctcctcctactcactgtgagaccctaggcgagtcccttagctcgggagcctaattccgcttcattaacatgggggtaatttaactacctagctagacggttgcaaagggatcagttcactaattctcaatgttggcagtgcatcacattgcaaactccctgcctctgctccagagctgatcagaatcaataagggtggggcctgaaaatactacatccaaatttccgagaagcacagtgtctagcatacccctatctctccatctggggttactgtcactctcaggaagaaataatcacccattattccttcaaccaggaaaagagatgtccagggcacagcttggggccccagaaagtaaccacggaggtcaagatcacaaacccgtcagtgtccagggcatggcctcgcacacatccgaggttttcaaggaccatgaagtgccatggcaagcatcctggcctgagggttaggagagctggatctcaggctcaactttagcctgaattcggtgcgtcatcttagacaaatctggtgagctctgagggctggggtaaggttgagaaactgtgggctcctcagggtggggggtgcttagagaagatggggcctctgagtcctcagactgggggtcttcatcgggttcagcatcctccccaggcccaagccctgccagcctcttgctggcc

SEQ ID NO: 64559 - DNA, 1277 bp, Homo sapiens
tcatttgcccatcttcctcatactttgtgctccagcctcattaaatctttttctcagtttttcagatcagtccagctctctttgcctcagagcctttgcttatgctgtgccctctgctgttccctttcctactgatcattaacccaacttctactgatgcttaaacgtctcagaactgcaattacggccttcaggaagcccctcccccactcggctctggtgcgccttcctcgggtgaccccagcgctccgtgcactccctcttcgcgctcagccgcccgcgccgcgctctcctccctggacccggatcctccgcagcccctttgctggcttctctgtgtcccggcgggttctcggctcaccgtcccacgcgcccccgctgcctctcacctggcggaggtcgaaggcagccgcctccccgcgctcctggctgcggcaggccagcaccacgcgcgctccccggcgcgccagctccagcgccgtcatctttccgatgccgctgttggcgcctgcggaccgcgggcgggagccgagctgagctgagcccggcgggccgctgctaccgccggcccggcctcctctccgcgcgccccgccagctcgcactcacccgcctccgcactcacccgtgaccacggccgtgcggccccgcaggttgcccatgccgccgcacggcggggccttcaccaggttgtagtagacaagcacgtaagcgcccagcagcaaccccgcgcccagcagcagcgcctccatgccggccgcgcctcccggctcccgcccaggccccgcaccgccctggatcgccgccaggcggctgccgatccgccctgcacaggcctggaacggcgcccgggcgcgtcagcctccgaaggcggaggcgggcaggaggctgggcaggggcgtgtgcgcgtgcgggtgcgcgccggccctgcgagcgccccctaggcgtgcgtcggcgtcctgggggcgtgtgcctctgtggacacctttgaggtgagtgtgtgcgcttgggccctgggagcgccccctaggtgtgtgcctgtgtgaactcctgggtgtgtgtgtccacgtacaccctgtgagtgcacgctaggtatgtgcatgcatctgcaacgcttgtatgtgaatgatctctaggtgtgtatgtgcccatgtccctgaggatcaccctttgggttgtgtgcgtgcctctggatcctgtgtgtgagctcctgtaagcaccttgtaggtgtttgtgtgcattctggcagagtccctccaggtatgtgcctgcatctgt

SEQ ID NO: 64560 - DNA, 496 bp, Homo sapiens
gaacagattcagtgtctctcccagcttcctggctggctcacctgtcccgatgtagagggttcgatagcacatgttcacagctcctcccaaccctaagagggggtagaacacagctcgggcctgtacctcctttctttgcactacaagacaaacataggaataggatcattcagaaactcagatcctgtgatccaaacataaaccaacaaaatctggacctttggctcatggcctggagaaaatcccgctggatgactcatctttccaaactcacatccaacactgagctgcggcagggtaaggctttctctccccacccacagcatttccaacacagggtacagaggaccatctttgaagatggtcagagaagtcagagatgacagtactgtgtaagttcctgggctcctggctggctaatccgggatattccagctggtactatagggagaatatggaaaaacagacggcatggaccagtgtttctcaaacttta

SEQ ID NO: 64561 - DNA, 438 bp, Homo sapiens
attaaagagatggaaggagaaaattcatagggtccctcaaccttaatcccttatcctccttcatcctggctactgactcaaacaccactaatgccacaaagtacataaaaaggtacaaggactgttgggtttctcatgcaaagcctcagtgagagtgttaacaaggaaacaaatgaagtgccagaacattacaaatgccccattgagaaacttagctagttgcgtcacttccacaggcaaacaatccttttaaactggctgactgtgcccccaagttttatcgccttctatgtagagctggctggtggcatcttcccggtaaaggacacctggatacgagtgttactagttagtacagggaaaaaaggaagcagggagggtagagcactgacagttataccaggtgtttgcctctgctaacttttctacaagctgagc

SEQ ID NO: 64562 - DNA, 4440 bp, Homo sapiens
aaatgtgaccagaaatatcttctccaggtggattacaccttataggaagtaaaggctaaaaaccacagacccttagtcacttcataataaaaattttaaagccagcagcaaaacttcctctacgataatcatttttgtcccagcaattttacaagctgggatggggtgccctcctgggcaaaagtatcttgggaatggtaatgggagtttcctacataacttctgaccataaacttaatttgctcagtatcagtcatctgtctaataagtgttcccaaacctgcaattagtacaaatatacagtagacactactccacaaaccgagagatggaacgtgaatggaactgttgagagaccttcggtgaaatttcacttaaaacaaaataaaaagagggctaaaaaaggcaacatcaaacaactggtgggaacacagaacagcccccttttcctctctccagtctggctcctctctcaaacccctgcctcagtcaactgttgcagaacaacagaacgagacccagtagaacaagacgaaatctgggtttgctgccgcagatgtgggatttttgtggagggcagaggtgatttcggccggcagaagatggagtttaaactcttctttgccggattgtcctgggctgagccgctgaggaggatcacgcagcgggcgatcaactcaggtccctccctctcggttcggtctctcccctcctctcatgtccagtaagggggaaaaagcgtacggctttccagctctcagctccttaaaaatgcctttctagtgccaccgcacacaatcctccctctggcagcaaagaattttgcagcgaagggctcgccgatccggagcggagaaatgaaatcggcgcccaagggcaattttaattgtctaacccggcccgatttcctaagaggcagcggcgccgggagggaggagggaagagggaggaggaaggaaggcagctctgagaggcaacagggggcaagcggaggcagagaaaggggatcaaagcggcgagatcccagacggggcccccgaggagcttctgcagaaaggactctggggctgtccccaccgttcccccgagagacgtttgcaaatcatatatgcagccaaaatggcgctgagaataaaaatataatttaaaggcaggtcgccatattgtaaacagagaggcaaagaagaggcggactcgagagacaccctccacgattttttctacagccacaagcgcccggttgccggggtctggaccagggcaactcaggtggccgagggctccacgcacccaccccgaggagatcccggccgggcaggagccccgagggcagcgggcgcgcgggcaggcaagcggcactgggcccggagctcctccccttcctcccccgccactgccggctgtccccggccggctctgtcccggctccccagcgacttccaatcccatatggggttctcttcactcgtcccaacccccacctcggggtccggacccaccgctgctcctccccgctaaactgccagaacccggcggacacctgggggcggggaggtgctcgccccggcagctgcagaaagtcagctagcggctgcaagcgcccgttatttcggcagtcaggggcaggccgggtgaaggaatgcgcagagaagggtccgccaagaagctccaaaagggtccccagaccttaccagcactggaggtggaaggcagccgggcagtggtcgcagcacaggagatctccaccttccttgcagctatcgcagctgtcgtggttggtggccctgccgcttctccggggctccttctcaggcttccgactgcgcttttctgcctcgtccgtcttggggggagccagcagagcttggatttgctgcacacacatacaaacggcgtgtgtgcacactcggagctcccgggcggtccgtcgcccccccggcgcggtttctccgtcacccacccctctccccccttttgtccttcttcctcccatccaggctgctcccagaatctctcagcccccggaaccagggggagcccaccctaaccgcgttcctgcagcacaacaacgagaacagcttcttccaaatggggaggatcaagggtagggggatgggaagagggtgcgcggttcccttcttgccacttccttgtatggacagtgggggactccaaagacccgctcgggagaggcccaaagcccggtacccggacgtgctgggggaagcacaaaggggccaacaagaagggggtggggaggcctgccggtgcaacgagatggagtgggctggcgcctcgggagagcgaatcgagggcggcgggtaggtgaaactgctgcaaacgtcctcggaggctgagctcagccccctaaattgcaaagaggggagggagaggctaggtgaggaagaatccccctccctcggccatctaggcgcttcgagtttaggactggctttgtggggcggagggcggaggttccctcccggcgctggaggaaggagatgaggagggccactcttacctccatcagcccccctgatgtgtccaagtcgtacacgatcgtcttggtctccattttctcccacattcatccacctcccgggctgggtgctctctgctccggcccccccaaccccggggggaggggggaggtgaggggagggggcgctcctgaccccggccccgcttttttcccaatacgggtcccgacttcctcgccctggctcccccccaccccccggcccccagtccccgggacgacagcgtcctcccgacgggccgcgaggggggagcggcccctcagtcccggcccggctgctggctgcacagtgggtcccggctccgggggtcaggcctcggcggggcctagtcccacaggctaaagccggcactggcgacagccggtccggccgggaaggctggcgggcgctgccatcccggggctgggggtatcggagggggggtgagaggttacgtgaggttgtggtacgtgaggtgactggggggagggtgatggggggtggtccccgggctccgcctctcgccgccgccgccgtctgcgtcccggctgccgcgcacttggcgcaaacttaccgcgagcgcccgcaaagccacccgcgcaggcgccccgggatcggcgctcgccgcgcgcaaccgcagtgacagccggcggcctggctcccgcgcagccgcggtgagggagtaccccccagcgcgcagccgcgctggcattcgtctggaggaccgaagccccacctttctgccctgcgccagcgcactgagacaaaagggcgggacctgaggtctcgcgcaggcgcttgagaaagcttgtaggggtcaaggcgcagccgcaggaagctagggactgttcatccattggtgtttgtgtgcaaactaagacgactctgttctgcgcaggcgtgttgggggtgctcccccttcctctccataacacagacgcctcccgcgcaggcgtattgccttccgcaggccctcacaagaaagctgctcctttcgccattttggtaatgggatatgggctatcatgcccttggagtcctcaggcatgaacagaaaggagcaaggtgtggtgttggatggagctggtcgcctgtcggtgacagcagtattcctagggatgttgtacttgaccgtttggttctaccatcgggtgtggctggaccaggccaccatattggtaaagagaaaagccatttgagacagaaaatgacgcttttggaggcgtgtgggatgactgtggttcctaattctctcccgctcctgacagataattttatcagttaattgtatcctcagcatccctgccttgcgtggtggtggcactggagagttccgcctgcccgttaccaccctctcttcaccactgtccctgagatctgctcttcaagaggaagcctaaagtggagagtttgtaatcctgacaacgcccagctacctgcgtaccccggactccaactcccagtttgcaacgccaaagggtctaaagggcgaacgggggcgcattgcatcctgggagcaagaatcgcgataggtctgatggattgtgggaactgtagttccatgtgcgtgcgatgcactctatggtaggatagacccggggaagagtcatttgccggccaggaagggatacttttgagagcgtcagtgctgcatgccgggatttgtagtctgagggcccgcctcgcattctgggcggggattcatgctccttttcagggcgcccgctcctccccttggtattgccgtcagagatgggcggttggttattgctgcctgatggtggatgaagcagtggaaaagagaattgtatcgttgtgcttgacactaggggtttagttggaattgttgcttcgtagctgtgctcggcccacttttaatgttaagggacacagcattctcagagtcgtcaaactagcaagg

SEQ ID NO: 64563 - DNA, 789 bp, Homo sapiens
agagttaagatggggtgtctgctcccctcctttcgggtctgggaaaactgcggcttgggattggcagggagagatgacaaggagccctggacttcttcgagtttttcagaaaggcctcggggaactgggcgtagcagctactcattcctcagggaggattcttgtcatccaccgatgaggtttgcttcccaaacttggccgcgcacaggtgctctgagggttggatgtatgatgggcaattctggaagctcagagccagtttaggaggattttatgggtggaggacagccaggaacacttagcttcgtactttgccctcacatgtgtgttccaggggaacgtttgctgcgctctgttggcttgcccctgcctcactgcccagccagcagcaccgagggcagagtatctggcctggctactaccccagagcagctgcctggcctcgggcacaggagaggcactcacatttactgagcacctgctatgggctagccatgcacttcacaaagagctgtcttccacctagagtggcagccctttgtgcttggaatcaatagtttatgcttggcctatgaagaaactaaggctgagaggcaaagtgaatcctcctagttcacacagaggaaagtgacaaatagagtttgaaccgagtctgcctgttccatagcctgggatgaaaatgtctactgccttggctgctgcttcgtgtgagcatgtgtgcacgtgcgtgtgtgtgtgggcgtacgtgtgtgcatgagaccgggtgtgtgtgtgtgtgttcaagtgcat

SEQ ID NO: 64564 - DNA, 1552 bp, Homo sapiens
ctggagaggtgatgaatgaggcctctgctcctgcgtcacctgctgcactctacaccgtcccctgcagacctgtgttcccttctcctgtttgcctgctggccctggggaccccagccctgcctgcccacagttcctcagactgggcaggtggcactggagctgggggcctggagtgggggttaggtgagagggagggactgaccttgaggtaggggcaggaatcgaccccagcctctggggtaggatggaaggaatggtcttcttggcatcacccctcaccagtctgataaataatcaatctgctgtacctcaccctgcttatgccacctcccaggagtgtggccagggcagagtcctaggtagggctggagctggggactgggcttcgttctctccctggaggcgtttctgtccatcagctccttctgtccatctgctagccccaggccccttctcctacctgctatgttaggaggcagagaatgaggagctacccactggccccaaggtgggggtgtggagcaagtgggcagaagtatgtggccctgagctgggtgcgtgactcacagccctctccctgtgccagccacttctaccaccaccatatcagcagcagagaccatatttctctgaatggaaaatcttggaggtgtcagctgggacaaggaaggatgtggaggcaggagctgcattctccctagagccagtaccagggtcagctctgcccagtgcagtggtgaagttgggggacaggggttgatctagggaggaatagcatcccctccatcctttgccctactgcctcgctccacatacccaacaaagacagtccttcctagccatggagcccagcaagacagggccatgaggtgccagggccggagagtaggttccttcctgggccccaggccagcatctttggactactgccccctcccagcctctaccctgaggttcaaaaggccacaccactgaggctgttccagcacacgtgtccacttttgagctgaatcaccggcctggcagccccaagcctctgtggcctttgggttagatgaaggggcttgttttgtgcaccaggaccaaagttacctccctgactttgtgacctttgccctgtggttacttttgtctgctgcatctgggaggagatgaagttggagagcttgactgtagatggaggggccctaagcccagacccctgggctaccctgatgctgaggtgagctctggccactccctaccctgaaagtccctagcatgtctgttcttaggtgtggaagctgaggagcctggtgaggccttattagaaggcctcgagcatggatggagctctgccactgacaggctatgcgaccttgggtttgcccggcctctctgggcctggccggtttttcacacagtatttggttactgactttttttttttttcctttttggagacggagtctcactctgtcacccaggctggagtacagtggcataatcttggctcactgcaacctctgccgcccaggttcaagcgattctcttgcctcagcctcccgagtag

SEQ ID NO: 64565 - DNA, 1731 bp, Homo sapiens
ctttttctcaaagagtaccctcgaactgtatgacaatcaagccctacccaaatgccagtatcagtacttactaagcatactgcctgggacagagagatgctcaacacggggcccctccaggcactgggctggcctggtcccctctctgtggctgaggagagggctcctcctctcactctgccctttctgtcttttcaggatcatttcttctttcttcaaaatgaaagtaaaacatgctgggaataatttcataattacaaaactgccctcccaattggcccctgcctctaccccctgacctcaccacccaccagggaggtgggtcttattctgggcatcgtgccaagttcttagcggggccctctagaatctctaaagcaaatcaggctgaagaggggaaaaccagcagggggaggcagcattcccggtgcccagtatggtctaggaggcattgaaattccagggccgaagtcctgagacaaagatcataatgagacaggaaggtggcaaaggaaggagcccatttgcatgacaataattgagccaagaatagaaagccacagggatgcaagggtgaggctggcggctgagctgggctaaacctcacaaatcagactacccagctctgctccgcaggggaagggagactgagccctgggccaggcttggcagagagggaagcgggaggacacgaccccagggcattgtgggaacactggccaggctggactttgccttcctcctcgtcctttagccgggagcctgtctttgcttgcctttgcctttgaggctctgtggctgtggggctgagtggcatcatggcggctcagaaagatctctgggacgccattgtgattggggcggggatccagggctgcttcactgcataccacctggccaaacacaggaagaggatcctcctgctggagcaggtactgtgtcccttctgcacccccagctgtaaggactgtcctaccctcctcccctgcagaagggttttcagagccagcaggctacagggcaaggccaaagggactgaatcatcaaaaattctgtgtaatttgtatcttagctgcctagtgtgtttcatggcaattcaaagaagtttcacatccctcatacccacattgggtttctaggcacatttcctctttctactgcttcccagttcctgcccttgaccaagcgtcctaggccctgttctcttccttctcactactctttcccttctgtgcccaaatggttgatccccaccccagaaaaataattggttctgctctaggtaacctaaagtaaagataattttgcctagaggcaaaggttgatttatcagcctaagaggtaggattctgtcttgcatattcctggcctctcacaccagaacccagcagaagcttctgttttttttttttattttttattttttgccacctccagataatagcagcctccttgtttgacacatgataagtgagactgaggccttatttttcctgctacgcagtgcagtctgcagtgaccactgcatatgtgggtgggccctgtgtgtctgcagggtccttcgaggacagggccacccagctatccactgcagtggactctccctttccattctgcctgcagctacccaggctggctatggtttgctcttcttggtaatgagccagagtagttagaaaccttcttcatttctctatcagttttctcaaagcccaagggattcctggttca

SEQ ID NO: 64566 - DNA, 1790 bp, Homo sapiens
cgccatggaacatttggaatgcaatgggagggacacaaggcctcaagaagtaccagatgcatggaagagttctgctgtcatggtggtcaccccacaggtccagctgactctggccaggctctgcgttgcaggactgggttcagaccatgtgtccaaggctagcagaagcagtactggaaagcctgctggcaaggcaccgtgtggcagatgcccagagtggacaggagtctgctggagtgtgtattttcaactctgtggaggcctctgcaactcttttagggcaggggttgagatagaggaggaggctgctttcaggaggattcttttttttttttttttttttttttttttgacagagtctcgcttttttgtcaggctggagtgtagtggcgccatcttggctcactgcaacctccacctcccgggttcaagtgattcttctgcttcagcctcccgggcagctgggactacaggtgcgcaccaccacacccagctaatttttgtatttttagtagagacagggtttcaccatgttggccaggatggtcttgatctctcgacctcatgatctgcccttctcggcccccctaagtactgggattacaggtgtgagccaccgtgcctggcccaggattctttatagtcaaatcaacatcctaacttttcctgaggggtcctcaccccctttagcagccctataaacccattttgttctctctgagtaccttttcctgtaggaacaaaatggggacgttccccaggctggattgcttgccagggagtgagcctccacgtctttctctgctgccttcatggctctctccaacccttgacctttcaaacactcatgggaaagaaagccaataatctgtgatgcaatgggaactttaaccatcccacctccctcccacctcctctgtgactcttaactgaacttcctacaaaccctggctctacctgatagggtggtggttattttaatggccaggaaccaagaggttagtgttctgttgcaaaaataccattaacttaagaacaaagtgaaatccattatgcaaatcagccagggcagctaattacagatttattcagaggcagctaatgcacccagcacccaaataaaggagcatgtcttgctggtgggtggcccggcagagggacccctctctgtcagttgtctgtgaatactgctgagcatcttttgctaaaagaatcgccctgggcctcagagggcacacttcctcctagcacacaatgaggcaactaagagacgttagagtgtctggaatctttccgagggagacgattctggagtgagacaggcttaggtttgacattgtgctctattccacaccagttgtgtgatcttggaaaagtttcttgacttctctgtgcctcactttttacgatagggctctgagaggattaaatgagacttttgtgaaatacttggcccaatgtctagcacctttcaataaggggcagtcccttattgacccattctgggtcagctgcattctgttccattgagcaacagtgggaggaaaggcaggaggagacagatgggtgcaacaaccacagataccaaggggagtggcagcaggaaagagggagagggatccttgggtaggagactctcagaagcgcacaatcctcctctttgccaggaggacaggaatttggacgggctttggaactggacctggctctaaatctcagctctgacacgctcagctgtgtggtttggaacgagctgttgaacctctggtgagactcagcttttttcatct

SEQ ID NO: 64567 - DNA, 1436 bp, Homo sapiens
aaaaaaaaaaaaaaaaaggcaccagagagtagctgagaggaatcgcgcattggctaggtgctggattcctggccctgcctcttaggatcatgtgaccttgggccagtcactcaacctttctgagcctcagtttcttcacctttaaacagcggccctcgcacttatctcgaatggtagtcatggagattaaatgagaaaccaggtaaaaagcacagtgtgactcacttggttggcatttaataaacactccttttccccctctgtccactagagcaggacatgagaaaggctgccctccttgcctcaccctgaccttgagtcctaggccaggtgaccaaaaagacttgtagattctctttccctgaagagtgtctgggcttcaggtcaggggaggtgtgacctgacttttggcttggagcaaagtgggtcagagcagtggctagcaggaagtgaccccaagtcaccctgatcttaccagagcccagggtggagggccacgaactccactcccacaaaatcacagaatttcaaaccagaaagggatcttaagccagatccaactcatctttcagacacagaaacggaggcctgggaggagcgactgtcttgctcaaggtcacaaaggctgctgctgggggcagaactggcttccaaacctggactcctgacagctagccaagggcatgctccacagcaatgacgggctagctggctctgggaaaccctccagctgggaggtgaggctgatgcatgtgcctgataattgaaacaggaggtgggggctgctgaggggccaagacaaagtgagctattgattgtatctgaattgcaattaaattgatgggccaggatagcaggtctggacgcctggcatcttaattaatcatcagtgctatagtgcggtggctgggggccgggtgagggaaggggggcctgccgctgctggcctcatcgatctgcttgtttgagtaacgcacattgattttggttcagagcggtaacaatctggttttgaaataataaacaccaactccatatcaagacgtggggacagatcgatgatttatttagagcagggcagggagcctgtttcctggcttgggctgctaaggaagttttagtgcccatgggaatgcctgaaggggacctggctgtgggtgggtgggaccctacctgctcttctagtgaaggagaaaaacagcagaaacccagcaactcataacttctcaggcaaaaaacaaaaaaaaaacaaaaaaaacccaccctacttgagagacatgagacatgactctacagccagcctgcctggtcaaatcccactctgccactcaggagctgtgtgaccttgggcaagctacttaacctctctgagcctcagtctcctcatctggaatgataccagtgtgctatcccggcccccagccaccgataacagc

SEQ ID NO: 64568 - DNA, 2094 bp, Homo sapiens
aacctcagacccacaaaactgccaaccacgcagccgagggagggaaccctgaagttaggggcggggtatggaggaaggaaagatgcctaagctctggacactggggccaggggtttgtgctggagcccaggagctggctggcctgagtcagaggggaggagtggagtcgtggaaacagcagataccatcacacatctggaaaaagggcagatgatgtggaagctctgaaggttctttcagttcagaaactggctcacaacagattcagagaggccaggcctcaagttttaaaaagtcttctcctttcccctcaccagtatctctccctccaaaagctcaggcagtcctatggatttaatttctcctctttcccgcgtcacctaggactacaggaaaaagacagccctgttaccaaccctacctcctcctcagcgtgcctctccttcccagcacaatgtgggtaggagcatggcaagaagtccttgattcctaagggaaaaaatctttagaaacatccagaatcatttacatgatccacttggggggactctccaattttaaccagggtctgtggctaattttgagctcaaattagcagtgccaggggcactggctggcgtgatggctgctgcagttttaaagctgcatcttgtccacagagctatctgcaacgggctcaatcttcatagttagctcacaatgccaaggacgaggggaaatggcaaatattcaccagagtggagcctacttctttaagaattggaatcggagcagagaaagggaagggagggactggtggacagagggaggaagagtggcagggtctaggtctgtgcctgctgccccccaccaagccatcactctcccccttgctgccccagggatcacaccatgcagtagttctggggcacacaggttagtgggaggacaagtgttcgcaaaccacacagacacactcattactgcacgcagtgctgttaacttgggtgccggggtggcccagattccaagtccactctgtgttcttcaccagctccaaatctgtcctccctccagtggctcaagtttgggaccccaaatgtctggcccaaggtgtggcattggggaaaacactgggtgccccccaagtgtctgaaacactgggcccagctctgagctcagctctggatttagcatcaggctgactcactcctccctcccccatcagaagggctctggctgttgtaggtcactgcccagctggggactatgcacacgcataaaggcacacacacaggcagtcccaagtctgtggcctgaatcaccctctggacccaggtggccaactggcctgactccccacccttggccccttgtcctcctaacccactgcagcccccaggatcagggagacccagttccagcggtccctccacagcagcccacgttccaggggtgagtcaaggcagcagggtggtgggaagggtgtggaggggttaacccagagggacaccagcaggacaaaaggcagctcaccttaccagaggtggggcttaggggagaagcatgactcagtgcaggagcccatccagccagaatagggagttcaccagcccccgtcattctccctgccacccccaattatacacacatgccccaatccatctctagcttccaaagctccctctcccacaagccagtctcctgcctgcagatacaacatgccaagcacacaggaaaaacataaagattttaaaatccaactttccttttgctcccagaaggcgaaccttgatgaaaaggccatggcgctgaaggtaacctgtgccctgggtcagagaagaaatggggggcagggtctctcagtgtctctgagtcttcccaaaggccagaacctgccaggataaacactgtgggcaacaaggggaaaggagggatggagtggaggaggaaggattacaaaactcaagagggcattggagtaaggaataaaatattaaaggaaaatgaaggaaagtaggcacagaacatagcactccctacccttggaagctgtgtgcattgtttttatttttttatttttattttttgagatgcagtctcactctgtaggcc

SEQ ID NO: 64569 - DNA, 2293 bp, Homo sapiens
atatatatatcttaacaaaatatatcttaacaaaagaatacttctctgaccccatttgtccctctagttcccctgtaaatcaaaactcctaaaaaaaagtctataagcactgttgccataaatgggtactaattatatgatccttgtattacaaatttgcggtgtgtaaagtgtcaataatagaactatatttagggagttggggagagtcctgtttaaagcactcagagctcagggccaggagggcctggagcacttgcttttgaagtgggagggcccagccactagggtggcaggtgcacttccaggatgaccacttcagaggtcctcagcaccagccctagggccagtactagagtctacacctgtctcaaagaaaatgccagcgcaggagtcccttccctttcttgggaggaattatcctttattcttttgtgtgtgtgtgtgtgtgtgtgtgtgtgtgtgtgtaagtaacaaaatgtcacctcgtatgaaacagtagtgttaggagacagcgattggtattgaggtgccaagattttttatgaaattctaccagtgccgatagccagtggattctgaagggttatagggcagactccctttaagaagcctagggatggtctcagagaggagaaggagggctgagaggaaacctggagtgaccaacggcgcatgcccagggccaccccagccactcagcaccctacgcacgggtcaggctctgtgagggccgagtcagccccaggcccggggcggcacttcccgggttggcccaccggccagccggagcctgggcggggccaagggggtggggccaagcccagcacatgcgcctagagccctggaagctccgccctgcagcgccgctggcgcccagcagagggtggcagcccccttctcatctaccctcccgctttgctggggccgctttcacctccgccaggccggcctccaggccccacccccaggaggcgtcccccaggagctccggcccgagggggctgcggcggcaagatggcctctcgccgtccccaggacgcgtagggcaagaagaggcagggatgagctcggtgcccactttgtttttatcaccgctctatccccagaacctaaaacagttcctacatatagtaggcattcagtaaatgcttattgatggaataaatgaatgaatacatgaatgcaaggtcaaaagacgccaggaaagcctgttctagagaggggcttgtctagagacaagcaatcaggaaggtcagtgggtatgggacggcgagccacagatcactgccccagaggtggtcgccgaggcttggggctctgacactccccccagcccctacacccacccagtccctgcattggcacacccatcagtttgctcagagccatgtgccaccacaccttttcgggcacagagcccaagtagggacgcctgggcttgtcctctctgccaagaccctgagtcaatccccaaagactaggcaggcatatgcggccgactgcagggaccacctgactggcccgacagcaggcctgctgctctctgaggtctctcagctgctggggatttcctcatggcccccggggacttccaaattgcctctgctttgccaagctcccccaaggcccaaagccatgagccagccttgaggatcctttcccaaaatcctccacagccctgccccacatctcatcaggacttgggtcacttctgggtctcctaaatgtaccacatgcactatgttctcctatccaccccctctggtagacaggagggaataaacataatgaagcattgttctctttttcatataaatgacaactcttctccatttccacagaagaaaaaaaaggaagccagcttaagggtcagccacagcaatttaaataaaatatcagtaaggtcttcctgggtgtgagagatggaggcctgtggtgcttattctcaaagtcagagaagttcttctagacaagcctcaggttcctcgtaacactggacatccaataaatatttgagaatctgtgtgttcacctctggagcccctattgggcctgtttctaaaaccctctgaagtaaaaaataaagcacaaaccctatgtccatagaaacaggaagaagcaaaagcctctaccttgcctaccaacccaccacctctgtgctaacagcctgggccaaatccactggggcatgtgagtacctgtgtgttacaaagctgggcagaagacatccttggcgaggaaaggaagcgctgccccagttgtggtggcacacagccagggacctgctggc

SEQ ID NO: 64570 - DNA, 3175 bp, Homo sapiens
aaatgggcgggacaaagggtagaggaccctttataagatgggtccctctttcagagcacagaagagagacctcaaaatcagtcatcaaaggaagacaagggggctgggggaggaccccaaagccctgattaaagcaggaaaactgattcccctaccccagagacaaagtcctctggtgcgaagccagctgctttcctctggacagagaaggtaagggctagaagcaaatggcagaaattggaggggtctgggagaaaaggacaacccactctaaattctgcagagtgtgtgtgtgtgtgtgtgtgcgcgcgcgtgcgtgtgtatgtggcgcctaggccattcctaagctgggtgtcctgccacagaacccagttctgtggttctcttccccaggtcgaagttaggtgatgatggatggaggcaagagtgatcaggcagccctgggagaggcgtgtagacaggcctcagtgtgcccgcacagggtggctcacctccctcgagggagggcaagggcatttggggtgaggtggtcaggctggtacccctaggagaaggcttcattcctgcctgcccctcacctcatctaagcaagaaaccccttttcttgttcagaaatcctgaggccagaatctcaggctgccagggcaatcggggctctgccaggcaaagccaagtgctaaggggaatagggatgtttgctggtcaccgattccaggaagacaggccacagcagtccccccaggcttctcaggcagggggcccagtttccctcttgcctctgttgatcttgaggcatggccaagtgagtggggactcgacccagcctgtgcccgtgtcctttagggaacataggtgcctgctgagaggaggcagggctgtgccaggctcagcacatgctgggttccccccatgcctgaagtgccaggcacactagctcccacagcctggacagctctggggagggcgaggcagaagatgccagcccagccggggaggaaatcttttactgctctgagcccagtgcttctgcaatcagctccacaaccaaagcagtccacacatgagggaggggcaggggcatgagggaagggcccccagcaggaagaactaaccacacaaggagatggtatcagacccttcccctcgccatgtccctggaaggttctactggaatctctagatactttccccttgatgtgttggggccgggcatgaaactgggtgtcacggagagtcatgacagtctcacgctgcctgacggtgctgtcactgcctggcctctagcccatgccacccagggctgagatagatcttcctgcacacgtcttctgtccttgcagaagcacaggctccatcatcacagggtgctatcttcagcctttcttctccacagaaccaggctcaggggctgacagggagcagtgttcatcaaggtgtcctgacgtcccaccctgattgcaacaaggctctggggacatccacatctggcctttcctacagcacagagctctgcctcctccccaccacacatgcagccctcttctgccccagggccggggcagcctcagtcctgctgccagagaagagctccatgggaagaacctgccgccctgtgtggaccctgcttgccccagggcctggcagtgagaggtgctggggagggagggaggaagtgagtcagctccctgcagaaatctgagtgggagggaggagccagcagaaatgagatcgggggcaaagggcacaggagccagaaaggtcactaagagagggaaccaggccccgaaggtgttgcgggacccacagagtacaagacagatacaggtgatgaattcggcagggccacctccaaccgaggctgggtggccccagtaggccagagaacctgggtccagaggcctggccccacctgaggatggaatccgaggcggctcccctccctgactcatgttcacaccagaggtagcaaggccttgtgggacatggccagcctcattctctcctcagagatggagtctctgggctccaaggcctcccactccctctcctgagccctacagctccagaagcccaggttccccatgacctggcctagtagggacatgctaaggtcctacagacaagtcacctaggccagtcagagcgggaaggttccaggaaccaaaactgtctcccagaggggatgggagctgagcctgggccccaggagcagagcaactggggctgccttagcacccactctctcctccctggtagggacatgtgggagctgtccccaggctccagctggaatccattgctgtgactgggtaagatccttgctgtgaaaattcccatcctgctgacattccagtatgaaggcagttcagggagagcagcggaagggaagaggaagccccactgggccacattccagcccctcagagacctacagccagtgagacaggcgcattcctccaaggtctgagacagacactgcgtagcccccatgtaatcctgaatcttcttctcacccaagcctggcaccttcatgtgggctcctgtgtgggggcaggaggcagcctgtccccaggacctcccttcccaggctcctgctcctggatgcccacagagctgcctctcctccagtcctgtgagagatgccaggccccaggcatgcaagaaacagtccatgggtggagatgggacacgctaaggtcctagagacaagtcaccaaggtcagttagagcaggaggggtccaggacccaaaactgagctaaagttttggttctggtctggaagaccgaacagagagaatgagaaaccagttcctgagtacagaaccatctctttccttcaacaaatatcccctgccctcatgcagtgctccagcactggagaaggaatgagataactcagtaattaccatcttgtgaatgctatgagaaggctggggtgttgccaggtggggacctgacatggtctgggaggatcagggacaagtgatattcaaactgaagccaatgtgtagaagtgtacaagggagggcagggaaaggggctacagacaaaaggaacagcaggagctcaagggtagacgccagtgagaagcctgcattgcccccaccactgctaggccctctgccaggctgtgctccgccactgtttttccacaacacacagaggaaacaacag

SEQ ID NO: 64571 - DNA, 649 bp, Homo sapiens
cgtccctcttccacccttccctctcccggctcccacaagattgaatcctgcctgctgccacttgggctcacttcctctggctaaccctcaggagacactgagagcaatggtcacacccttctgcagcacaccaccacagctcaagagtggcccatcactcctggtttccttctggaaggatgacaaggaggtgaagaggcttttagtgacagggcagcaggagtcagaaggtctgagctaggcagtggatttatatggatatccggatactgccttgctctcccctatacagcagactagtcaagagctgatggcctgagttcaagtcctggtgagtcacttaatacctgtgcaaccttacacaatttgcctaactttaacctctcagtaatgcagtttcctcactttaaaacagattgttatgatccttcaaagggttgttgagaaaattaaataagtgaatatatgtaaacactgagaacagtgcctaacctacagtgaatgttagacgtgatcctcaccttgccagaacttttcatgcccttcccccaaggcatttctgtttagttcagtcttttttttttctttcgagacagggtcttgctctgtgtcccaggctggagttgagtgacataatcaatggcataat

SEQ ID NO: 64572 - DNA, 607 bp, Homo sapiens
tggggcacaaccatacccgctgcccaggactgacaatggaggcgccaggctgcctgcccaggcagcaggggagccctcacctcagctgggtcaccagtccccaccgtccccccaagactgcagtgagtagaatacagcagcttagtgcattggggtggcgggagccctgctggcaggcagcgcgtgcctgtggtttctgggaaatgctgtagagatttgcagcatttttaaaatacttgtgttcccacccgccacacactccccttcaccctactccccactcacccccagtcagggtgtttgcatatctggtattttccagaaccagtccaatgtaaataagagagattagaagggagcagagggcagggtgacttggggtgtcagggcaggcaggaagggaccatgacaggaagaggcaagggcaggctacctttaagaccctgcccctgcaccaaggctccaagctgtgcccacagaagcagccatgaccatgtcatgtacccatactcaggtcagtgcagcctgggcactgtgcccaccacccacaggctggatggccacggtactccagggctgcaattcatcgagcatctcataaggaaga

SEQ ID NO: 64573 - DNA, 470 bp, Homo sapiens
agtcctcacctccacctgtggcgagggggcggcagagtgctctgagggcgtcgaggtttctgaggcgctctcatcccggctacgctgggagaaggaaaagcgcttgacaatcatctgtgagttctgcttggccagtgagccgaacttggctgcccgctgcagcaccgagccacggaagctaccctcctcacccttgaggtcatcgctggagctggctgtacttaggtggcccgagtccaggatgacgctgccccggttactatcggagtcaatgtcagtcaggtgcaggtcagagccgctggccaccttgatggggatggggttggagatttccaggcgcgtcttggattcacgcttggaggagcggttcaggttgaagaagccacgtcgcaggctcatctcctccaggctccgaagctctgccgctgacatccgctcctttttctcctttttctccttcttctccttcc

SEQ ID NO: 64574 - DNA, 5198 bp, Homo sapiens
aaccccggaggcggaggttgcagtgagccaagattgcgccactgcactccagcctgggtgacagagcgagactccttctcaaaaaaaacagcagtctggaaaaattcgatccaaaaatttatcagtggtcatctctggagagtaggggagaagaagggtaacactttagtaacgctttagctttctacctaatgattcaacttttttccagactaaaaaaaaatggacaaactagtaggcaatccaccagcagtaaagctgcaaacagggtaatggtcagtttaaggattgccttcatgtcttgaaaaagtttcagtggcttgggggacttggttaaaatagagttcactggtgtcttgtggctgtaagtggggacacatttaaatgggtcacctagcagctggcaaaagaaaaaaaaaacccaggaaatggaaactataacgttagagtcccaagacaagggtgcccagagttggctgtggtggatagatacttaggtcagtcctcccacccccacccccagaccacactcataaataaatacaaaggaaatactttcccgagagagccggcctctctcccttggcctctgacctccctgagcggccgtttcctccagccccgggaccccggctctctccccgcgctctgcccctcgccaagggttgtagcagcggccggaggggtagccagcacctggcctggccccgtgctccagggggagcctcctcccggccggctgtgctgagctccgcagcgccgggtgactccctgccaggtcacacggagcttatctggctccaggtgtgctccctcacgccgactgcacgcttctcacgtgacattagccagccctcacgccgccgcgcggggagccgggcggcccttggcgtttccccgcggctgggccggcgcagccgcagccccgcggcgcctcccgctgcgatcccatctcccccggaaggcagcaatcccgcgggccatggaggaacgcgagcgggagagctcctgcggcctcgccaggttccctgctgctcttccaggtgcaccgcctggcgctcagttccgctaacatccccttccgtgtgaccttgagcaagtcccctcccctctctaagcctccactatttcagctacagttatcttcaagggcctgacagctcagatttggccctcagcctctgctggagagctattctgctcaaccacacactgcaggttgtaatcccgctctgcctctgacttgctgtgtgaccttcagcccatcatccaacctctctgaatattagagaataatcacaataatctcttgtaagtgatgataaactacttggcagacagaaagggccctgggtcctgtaaaatcatcagtctaacaaccaaaactgctgcctgactctaaactgtttaaaatgtcaagggaaattgacattttacaagccctgcaattcctacctcaaaagaagggcagggaagtgaaggtgggaagtggaggctcaccaggtctgctcaccacccctcccaatccagctcctacctcggcacctccccaactcctctaattcaggccaccttggaaaatgctagggggaagaaatggtgatggggtggggtgtgcagatcttaaagcacccgggggtctgacccaaagcagaacttaaactccatcaagctgccctaccaatcccaagtcctgtgggaacctgtcaattacagcagacagtgggctgggccctcctactgccccaaacctttaaactacaaccagccagagcccctcagttttcccaccacactcaggcctgggaccccaggccaccaacaaaacccagctcacgtggatgctctggctcctgcctgtggcgtccaccccaggtgagaggatctggctgaggagagacctctggtttgaaggattaagaacagccctgctgccctgaagacctgtgacacagcaagtccagatgaaggcttcctgagttccaacaactcccagctccacctcagcagggtggattctccctttcacatgagccccagttctgccccacccagtccacctttaggtacctgcctctgggggacccagagttttcaggcccagtttctgaagacacatgcagtcctcaatgaatagccactaccagggccagtgagggggcctccagggaactggctggctacccagacagcccaggagtgaggctgagagaccaggtgggagtcaggaagggcataacccacatgaggaaagtctggggcgcaggaggaagccctcaggcacacactctggcacctgggccaggccaggagagagtaaacaaactagacactcagagctaccaggcaccaggtcatcaactgttcaaagttcaaagctcccaaaggaagtgaccgccagcctgtggcccctcccatgcccaccctccacccccacctacaacccttctcattcccctaatccctcaacacaatagctgcccccaaagccatggttttcctggaattgaggccacaacccccatgtcctcaacccaaaatggacaagcacacctccacccgaggctatatataacccgtcatgtcaaatccagaaaccaggaggatgtttcctggaaagacttcatcacaaaaaaacagagaggaagctgaggaggtgggaagccatggacaaagagccagtgaggcttgtcaggaagccagagacctcaggagagcaactttcaatatctccagatagaaagtagcccctgaactaaaaagggtggggaacattaggccaggcctgttgccacaacaacagggcaccaacctgctcaagaaaagggctccaaagcacaagggaaaggcggctgattcaatgggctctgtactcaccgtcctgctcaggtgatcttgctcttaatcacccaggtggcctcccctcccttccagcacaccccagtgcatacacacttcccagagctcacttgccacaggggcactgatgaggccttctcggccacagacacgccaggggctccaaaagacaagacgaacccacactaactagcccaagtcattggcagggtgaagcagggagggaatccaattctttaattcggggtggccatctgagggaatgaaagccctagccaggacagtccctctcaggaagcattcccccagccctccccacacaaatacaaactatgaggccagcgccaaacacatgccccattggcaaagtggtcaggcaaaatgaatacccgctcaaaaacaaactggctgtcttcctccccatctcccccaccccccacctctagctcattctggccgcaacctttccaactaatcagcaagacacatgtgccttgcagtagggcaactcccccatctccacccccaaaacaaagccccaatgcctggcctgtccctgcgggccttatcgcacccaggaacatgacccacactcctggccgggtttgggaccaaggagcgcacccccactaacaaggggcagggtgagggggcagccacccctaccacctccccttcccattggcgaaacaactggcatgacaggttagcagggcggggcgtcggggcggtctctccagaggcctggggcagcttgtccgaccttcccacacgcaccccacccctctgcagggaaaggtgaggtgagcattcagtctcagggcacagcctgcactccctaatccccaaagcctgccaccattcaccctctcatcttctgtcccaagaggagggggcccagggaagcggggtctccattgttttgccagctgtctagcagctgctcctttgagaggagcccgcagtctgcccggcagtgaaagagtgaaggccgctgggagggataaaagggtcggtagaggtgctccccttccccgctgccttcctcagcgccccgctctctcgctcgctccatcgtggggcctggacgggggcaggagaagtccccccaccctcgaggctgcagcccccaccccgcagctccgggccacctgggcgcctccaagccccaaatccccccacactgaaggccaccctgtcctgcctccctgcgccccccaggttggctggaagggccggtggttcccccttccccgccgctcccgatcggcccccacccccgggcgtcgagctccacggcgccgccagggacgggagccgggagtccgggccgctgcttccaggggacgggggaggaggaggaggagccggcgggccccgccgcccgcccgccctccctcccggccggagcccgccccgccgccccaccaagccgggcccgccaccgagcggccgccgccgccgaccggcactcaccggccaccggagcccgcccggcaggcagcagaagcggagacgcggcatccagcagcctcggcccggtcagggatggagcagagcgcagcgcggcgcagctcagcgccgcccccagcgaccgcgcaggccgagccgaaagggagctccctgctggcggctgtggggataaacgcccggcctgcctggcagcgccagtgcgcgccgccagacgtgggccaggcgggccgggcgctgccctggcagcctccgtccgctgtggactccgaagcccctctcgctgtgtctgagagaggccctgcctggagtttctgtctgcactgggcactggaggctgtccgaaaagggtccgaaaggggctgagtggcactgcctaggacaggcaccagggtcatgatgaacgtatagaagaggggctgtccaaggcaggcaccgaactctgcaggctgtgttcaaggtagtgctgtctaaaggaagcaattaagtcttactggccgcctcctcccaaggtggctctgcagaggcacacacagggccctgctggatggtgccccaggctcagtccagaccaggtactgcctgccatgtccgagatggcactgccagaatgcactccccaaggtaaaaacagactcccaatagcttggtctgatacagccctgcctcaaaatggagtggatcaagaggcgtaccagggcccgggagccatggctgtaagtgccactcactccctaaaggagttcaccaatgccaagattaacactttcagaagctctttggaatgcagtctgtccctgggtccactgtgtgctgtaaatatcaagtgagctgctgtacccaccaagaagacagtttatacttcctgg

SEQ ID NO: 64575 - DNA, 1416 bp, Homo sapiens
gcctgggcatcatagtgagatcctgtctcacaaacatttttaaaaattacccaggcatagtggtgcacacctgtagtcctagctacccaggaggttgaggtgagaggatcacttaagtccaagagttcgaggctgcagtgagccatgatcgcaccactgcacttcagcctgggtgagatagcaaggtcctgtctctaaaaaaaacaaaaaagaaaaatcagctgagtcaccaaagtggtagatattagaagccaaagtagtgagttgtgcaacagaccattatgcagaaatttctttttttttttttctttttttttgatacacagtccactctgtcacccaggctggagtacagtggcgcgatctcagctcactgcaacctccacccccagaatcaagccattcccctgcctcagccttcccagtagctaggattacaggtatgtgccaccatgccctggctaatttttgtatttttagtagaaacagggtttcaccatgttggccaggctggtctccaactcctgacctcaagtgattcacccgcctcggccttccaaagtgctgcgattacaggcatgagccatagtgtgtggcctacccttccttcttataccaagaatataaaagaattggagacagaggcagaaagaaaattttgggagatagctgtgttgtgaatcccactgcccttcaggggaaggggtgaaggagcttcactgcaaggcaaaggagaaggctacgaggggcccactctgaaagcttaagatgtgtcccctgcagactagaatctaaaggtcagaagttaggctgggcaactgctgagggatgaggccaagcaaaggaggctgattgagtaagaacaagcccacatgccagaattggccacggcaaagcatgtgtgagtgcttcccatggatgaaagggaggtcatgcctgagagggagctggaatggggttgtagcgacttagacctggagcacagatgtgtccttagcagaatgacactggaggtgaccaccaggtacctaggagctgtagaaggaacaggtagccagagtggagatgcatagacctagatcaaagttattgcaggtgggggctctcccaagaaccattaagtgcccacaaaactgacagctgtgaagagttgccagatacagagtagtgtgaagccatctaaccacaggaccagtcaagtaagaaattttctgccctcttcctctcttgttccttccactcctggaagggtcagaaaccagtgaaatagtgggagaaagaaaaaaggttcatgctgggcatggtggctcacgcctgtaatcccagcactttgggaggccgaggcagatggatcacgaagtcaggagattgagaccacggtgaaaccccgtctctactaaaaatacaaaaaattag

SEQ ID NO: 64576 - DNA, 1594 bp, Homo sapiens
tgtagtcccagctacttgggaggctgaggcaggagaatcgcttgaacccaggaggcagaggttgcagtgagctgagatcacgccattgtgctccagcctgggtgacagagcaagaccgtctcaaataataataataaaaaaataaaaataaaataaaagtaaccatctaactttttattaccaacaagtgtcaagaaaagccatgagaccattcaaatttacatctaaggcaaagaagagaaactagccccaccagaaaaagaaataaataaaggggccgaggagatgagaataaagttgctttcctagctactctgttgttcacacgagtcaagaggaagagggatgcctataagcaacatgataaaaaatacagacttttgaaacaaagagaattgagtttgtaatgtggctctgccacttcctagcttatgtggcctcaggttgataacataagttctctgagtgttttctgcattagaaaatggagctagttaggcatatctcccagggttatttgggagcactaaactagataacatttggaaaaagacttaaaaacatattggttttcttcctttctcctctttgttataggatgctgtggttggctggtcagcctgggtaagccagggaagatttcctgcaggtggtgactctttacactgtcttctccaaaggacaaaagagaagcagattggcagaggcggatcatgggatgctccagacaaaagcaagaggagactagggttggcagataaaacgcaggatacatacccaattaaagctgagtttcagataaacaacaaatattttttgagtagaaaaaaatgtttgagatctactgatactgaaaaaaaaagccattatttacctgatattcacatttaatttagtgtcctatatttttacttgctcagtctagcaaccctgaatgatacagagttggactgcttggctacagtggagagagtgggctgagtgtcacacaataggacaagtcccatccttgtacctacttttctagctgtttcataggggttctagttgagaggaagtgactaaatctgcagtattgagaaattcacttagactgagttgaattgagatgctctgagtcatttacacacagagcaagcaggctgtggaggctgggcccttaggacaacagctctcccagcaggttggcatccttttatgcctggaagcagaggaatggatgacctcagaaagggttcagaaagaaatggaggcaagttctcccccagtgcctgccctgctgccttttcaggcccagccaggccctggctcccctgcctgtttgaagaggtagaaaggcacagggcaaaaaaacaagatcctgcagcagcagcccctcatgggggaggtgggtgcaggctgaacgctgactgggccctttgctttgtacccatcctgcttattcccacacaacaaaagcgctgctcagccgcctggccagctccattgtgcacttaccacaaagtgctgagtccaagggcttccctggccccatgacctcactccctctcccccggcctagaggcaaggccagggagtcaaagccatccacaaa

SEQ ID NO: 64577 - DNA, 3888 bp, Homo sapiens
gaaacaaattactcaacacatttggccttctcttgcgccctcttctggattaaaaaaaactgttcctctttaggtttgtgagcaatggattaccaaagcctacctcaacatgttacagataaatttcaaaaatattgtaatgttttcttagttattagcattatgcatgtcaaagcaacagtactgtgaccaaatcatacactcgccccaaactgtttacattctgtcaaaactgctaattccagtttcctcctctttatccaccccttccaagacaagaaatatttggaggaataccaccttgaatggttcagcggttgcttccacatgtagagagaagtctggcaagagtatattaacctgaccgatgagatacaatttttcaatctcaacagtaatattgccttatgcagccataatatggtagtattttctcatcttttgaacaagatctaatgctaaaaaatctagttatatagtccctaacagtttttaaactgttccaaatctttaggattaaaacacctaactcgtgcgtatgtgttcacttctattgcatactatcgggtccctacgaagtcccaaaatggaaaatctgacattctaatttcagtcttcaagttacaatctgcaataaaaaagcacttagtatttctccagctctcaacaattccttctatcaaatttgatacgctgggtttaacatacgctttcttacgcttcatttctcttcgatttataaagagcccttattttttaaaatctgcgtgggttataaactattaaactcacttctcgtgaaatactttcttacatgacttttaccctcaatttctcgtttattaagattagtttggggatcaatatcgattttaaaatacgaaaaacacctttctttttaacacggagagaagcctcatccgaggcaagatggtagtagtctaacctcatggatgagccacttgggttcacccttaaggacaagaaagaggggtcaaaaagctcgcactcttccccatcctaacattttttaaaatccctcacctcaaagacactacccaagctcagaaggtaagtgctgggtcgggaggggaatggaacaaggtttttggattttttttttttttttgtagaaaatgagctgctagaaggaaaaggcccaagtgaaagcctcagaggcggagtcgtgagcgaacctggcaggagacgaggttcctgtggcagagaaactcgtgaccggggagctgggttcccgctgggtaccccacccggcctcaggcaccgcctctacccgaaatgaatccccccgccgcccccccaggcctcctgcctctaggagcgccgcggccgccgcccgcggcctccttccctctcagctccgcttcgaggccggctccccgccccgactgcccgcgcctcccgccgcacccgggagcgggaaacgcggccgctggcgcgcggggccctgcgcaggccgctcccctcgtggccgcttccctcccccaccccaaccgcccccgcccctcaccccagggacccgcccggggccgcgcgccgccaccgggttacacaaccccggccggcgacgggggggggggcggccgcggtgcggggggcgccggcgcccccgcagtgcagggggcgaggctgcggccggtggtgatcccgggtcacccggctccgccgccccgtgtggccctcgacacccttccccctccgctcctcagtgggccggagtcggtgacaggaatcggcttccaacatggcggacaggaagcggccccgcgaggaggagagaacattccagccgcgccggctctggggggagcgggcgcggggcgccggcctcgggaggagccgcgggacaagactgcggggtccggcgcccaaaaagggcgtttagtggtggaaatgacccgtgagatgaggggtcccaacagccccccccaccgagacggggagccccaaggccacaggtgggcttggggtggcgggtgaggggcacttcctcaactcaccctacctacccactcctcgccgcctgcaaaagggtctcgcgacaccatccgagtcgggattcgctaggccttcctgagttacacctcgagggattttttgggggggtaggtttaccccatctcagggcccccaaattgaggtaactccagggacgcagggaggtgaatgggaaaagaataatgaggttggacttgcaaggccgacccagcaggtctcccttcagccggggccggggccaggaaggtcacgctggcctggctgggcctctcccatgctggagggaaggagagggcgctgcaaaccccattgctcagcccgagctctagaatgaaaggggcatccccagagccggaggggacacacacacacacaccccgaccccgtccgcgcttttcggatccagccccacccccatctctcctgtcctccacccccaacccccttcccccacccgtcctccctcccagacctgttttcttcttcggcgtttcctggtgctgctggagggtgtgtttctgctcatgtttcagcggctttggctgggccttggggctgccctcggctccatgctgcaggtattggtgaggctgctggtgatgatggtggtggtggtggttgtggctgtggttgtagaaataataatggtggtggtggtgcggctgctgctgctgctgctgagggtgatggtgcggatggtggtggctgtgatggtgctgaggctgtggctggccgggcttctcctccattgaaagcggctgggactccctggctgaggctgcgggctgctgcaccgtcaggatctgagactgcttctcagggctcactcagtatatctgagcgcgtctcgccagcgcactggttaaccgagcgattctgcgagattggcagccgcactccaacaatcaggagccacgctgtgccgcaagccccgcccccagctcaaatcctctttccttccccttcgccgctgccgcctggccaacgccacttaccctgtgcaacctcacagggccgggccttcaacgtcagcactatggctctctcttctgtcgctttctctccttcaccacgcagtctgtgaacagcactttctacactcctcgccggcaagcaggctcgtgtcgagggtagcagattccactggcgattccactggtgctgtgagccatctgctggctttgcacctcttagaatctggtgtttttttgttttttgttttgttttgtttttaatccttttccgggtaaccagaaagggaagctcaattcccttaaccccgagaccactaaaggggcaatacaaaaagaggaaataaatacatttttaagcatacaagagcttcacaatccagtagatcattttgtattctggattcattttgctttgtattcatatgctaatctcttcctttccacgaagggattatagggttccacaatggggtatctgtgtaattttctaaaagggcacaaagggtttaaatcattgtttctttgtagttggaggcaagggagagcaggaggaatgaaaatttacactgaaggtttttttttttttaattaaactctgcaggtgaggtcaactgtggaaccaaaataggttttagaatgagaagtttcaagagcaaaggaaggggagaaagagcacttaaaagttattaagtgggtttgttttttttttttttggcacttatggaaaaattgaaattaaaagaaatattctgtagcgttttgtagtgtagatttaacttatcctgcattaccacatcacagtatatgattttcaaaagcaaatgttagagccatgatagtggttactcaggaaggaagagggttgtgatggggagggacacaggttactctgataata

SEQ ID NO: 64578 - DNA, 1980 bp, Homo sapiens
tagggtggcttagatctgtatttccaagtcttactgtcgttccaagaattagtatcaactattagaatctcaaaaactcaactgcatactgattgcgctgcccagtgtacctctgaatcccacgggggagggggtgtagaaccgagttgtgcaggaatgggatattccacacttcagggcaaacttattcgcaggatcagtggcgggctttggaggtgggaagcaggaaggaaggggaatgcagataaactcttcttcttcagatctccggggtgaaatgaatgcacctgacgcccgcgtggcattagaagctccgcgaactcagtgaggccatgctggacagaggctggaactccgggccaccgggacaactctgcccgtagcaagccttgcgcgctcctgtgagggcgcgcgcgcgcgcatgtagtcgtgtctcgcgcagggtccggcctgtcaggcggaaaatctcgcgagatcggagacgggggatgacggtctggaggaggggagtggtgtcgggtaaagggggggaagctgggcagcggccgggctctgtggcttcagggctcggggagagagagggagggtggcaaagagactgagtcggtgccgccgcctgcctgaggagagaggaggggtcccgctcgccctgcgcccttcgcgggccgaaagcactaggcactcgcgaacatctgaggcctcccggccccgggggaccccgccccgccgtccgccggccggcccgcggcctctcttccctttgtgagcgcctccttaccaggggtggtgttggtggcggagggctgcgcgtgggcccgcccgccgaggggccgcggcgggggaccgagagggcctcggctgtgtgaggactagaggcggccgaggcccgggccggttcccccgaggcggcgacggagacggctcccggcacttccccgcgccatcttaactgagcccaagcgctgagggcgcctcctcgaccccggtcgtcccctcgcccccccccccaccccccgccgccgccgccccttgttgcagagcttgggctgggcggcttgctggggctcgggggtggggggcggcgatctgtcgccgggccccctcctcctcctcactcctcaccctccagggtagcggctaccggagcgctgcagggggctgcgcctgcctgctccgccccagacctgtcggcgaaagggtaagggcacctctgctttgggaaagggggatatagaggggggcggggaaattcggcccactcgggcctgtgtgtggaagaagggatgtgggagtggggtgggggagggagaaaaggagggtctgtgattctgtgggtggggtgaagaagctggtgagctgggcgccctccggttttaaggggcgagagcaattccattcctttttcctgagggtcaccggaaggggtggtggaagggggatgtttcgaggaaggtgtggccctcacagggagactgggttgatgtgcaccccggtttaaaggcgcgaggtccccttcccctctggtgcctttgctcctcttctcctttgtagtgtctgtgtattcttgggaagggagactgctctgggtggcttgctgggtggattccaccccctagcacaggaaatctatacccctcttctgtaggggcgatggaagcgtttctctccccgtacccttcccccttccccatcctctagtctactgcaatgctgcagaagtccaaggcagtttcttcatacacagacccatgtatacacagaagggagggggagcaggagagggaagtaatggcgcttcccttgaaaaggttactctttttcctttggttttaaatcgacgacagtatcgttttaatactcttcccctgagatctgtccatgggaagtgtatctgttctggtgttattgttgggggatatggcctctcgagagggacacctctcctgttagaacagttttgatgtctctctttttgagaga

SEQ ID NO: 64579 - DNA, 954 bp, Homo sapiens
taaccctcctgattacactgtgaagtagattttttcctccttccttcctttcccttttcttttctttcctttcctttttatttcctttttcctttcctttcctttctttcatctaacaaacagggtctctctctcttgcccaggctggaatgccatggggtgatcatcactcactgtaacctcgaacctctgggcacaagtgatcctcccacctcagtctcccaagtagctaggactataggagcacaccacaccacccagctaattttgtaatttttttgtattggaagatcttgctgtgttgtctgagctggtctcaagctcctggccgcaagtgatccttgcactttgacctctcaaaatgcttggattacagatgtgaactttcacacctggcctatagtcattttacagattaggaaaatgatactacctaatttcagaactagtgttgctgggattcctatccagcagtgtcattccagagtccaggttccaaagcctcttaattatgacatccagttttgttttgttttgttttgagacaggatctcaccctgttgcccaggctggagtgcggtggtgtgatcatagctcactgcaaccttgacctcctgaactccagtgatccttccgccttagccgccaaagtagccaggactataagtgcatgacaccactcttggctaattttttaaatttatttttgtagaggcagggtcttaccatattacccaggctggtcatgaactcctggtctcaagcgatcctcctgccttgacctcccaaagagctgggattacaggcatgagccactgagtctggctatgacagccagtattaaaactgggtaatctgatataaaggaattgataggacaactgccaggaagttttctggttatctgtatttctacttatttaatgaaacagttgataaagggcatattttaat

SEQ ID NO: 64580 - DNA, 649 bp, Homo sapiens
ctgaggaattagagtcttggagaatgggatctgtttgctattaagtatctcattatatcctaacagaccttataaattaaggcctatacacattcccagtcttttcatatggaacaactcataaaataactttctcagggtcacttaagtcatagatgaagtagaaactggaacccacatctccaaactattacttcagtatcctatcaacacacaaacactgtttgcccactgaataatatatttgttgtaggcaccatcaatgatcagggaattgtgcgcctgctgggaaattattagcccagaacaggagacctggttattgattaaacagagctgctgctggttagtgttaggccacacgaggctagatctacaaaagtgaggcaacatccagtggctagagaatgtgcactgaggctctgctaaacgccacagtaggcaagcatggcttagtacacagaagacttcagaagacaaacagcacatatttgtttctggagatttaaaaaataataacattccagtgttactgggagactgatttactattcagagacaaataagttggagagaaattttttgttcaaccatactaaatactaaggcaaggtattgcattattacaaggtaagactagagggactag

SEQ ID NO: 64581 - DNA, 868 bp, Homo sapiens
gacacagcaagaccctttctctaaacaaaacaaaacactctgggctgggaatggtggtggctcatgcctgtagtaccatcactttatgaggctgaggcgggaggattgcttgagctcaggaggttgaggatgcagtgagccaagattgcaccactgcactctagccaaggtgacagagcaagaccttatctcaaacaaacaaaaaccacagacacacacactcactctggtcactttggcagggttattttcattaaaatttatgttatctctcaactcccaggatcctagtcaggtctgtggttttctgatccttgagcccagaaacccaccttaagttgttacaaacactaagatcattagcattatttattttaattcacagaccttagatgagaagaaactggatatctgatctagttcatcctcatttcttgccacatgttctctccatgatatgtgccaaggggcagtctagcttgaatatcccactgatgatgtgagacttactgtttcctgaggcattcatttaatctctgagtacttggacactccctatgtataacttctcaagccttcctgaatgcactcttatctctgcaaattgtgataatgagtcaaagcaatttctggtgtcatcctttctggcttgactgaagaatcacaaatactccttttattggcattgttaccaagttctaccagagtggccaagtgtatctgcttgtttaagcagggagaggaattcatgctaaaattcatctctaaaggaagataccttggcattcattactaaaggtgactgattgagaaaggaccttgtggtttgggatggaagatgagtacagaggagtttctgactctaggt

SEQ ID NO: 64582 - DNA, 3812 bp, Homo sapiens
tctgattcctgtcacctccaggctcagagactgtgagtaaacattctgggcagataatcgtttgcaattgcttccagagtgctctttgctgagctgttaagctgtgggctaagtggtaaatgtcaggtatctctgctgtcgtgggccaggtgctcagattgctaggatacagcagggggtgccgagatgaggcaaggggccgggttaggagtccctgctctagcacagcgatactagctgagtccatcgatgacctttaaacccgcttccccggttctgtctagattacagggtttggaaggctttggaagatgtgttcagagaactttgcccaaactggcccacgcctgttccaatgctatgcatagctgtttctgattcttagccagctcaggccctctattctttccatgctggtctgcggcctccgttacccacctgctgagggcgatcttctggtggagcagaaagccccgctcgtagggccagggcaggccggcctcgaaccactctcggcagcgcagcacgggcgagatgcaggcggcgcctgtcacgtagctggaggagccgcactcgcccaggtaggacaggagcagcgccgagcccgagccttcgctcaccgcgaacagcggcgccgccgggtgtcggaagcggatgtatgtgaccgcctccttgaggtcggacgggtccccgaaaggctgcagccgggggctgaccagtgggcaaccgtggtggccgcggcgatggaagatgaccgggtagtagccgcgctccagggcgagcaagcaaaggccgagcacgttgcgggtgaggcgaccccacgcattggggatcaccagaagcaccgcaggaaggcccccggcgctggtgatccggcggccccgaacacaaggtcctaccacccagtccagggccactagcccatcgtccgccaactgcaggtactcccgggccagctcaggcccaggcgctacgggcaggacgaagtggcagagggtctgcaggtggggcccggagaaccaggagcgcgggccggcctccagcgcctctgagcgccgcagggcgcgcagcaggcactgggccagggccgacggcttgcaaacaaggctgcaccctcccggcagtggctcgcgcccgtcgctgaactggtccgccgggcctccgccgtccgcctcctccccgtcgtctcggtcttgggcccccggcagggtcctctctccgacggcgcgcccccagggtccccggagccgcgggccgagcaggccgagaagggcgagcacggccaagatgagcgcgagggcggcgccccacggcggcatggcgaagctggagagccccggcgggcagcgggcggcggggccgtctactcggcgagctccgcgctttgcccgcggctccgcccgccggcggcggctgcccagggccctcccgcgcgggcgcgctctggattggccgtggccgggcagaggcagccagttcgggcccggctgccctcgcccgccccccacccccgccccggccctttgtacagcaattgcaacaagtgggagcagagggtgagaggagccggggccaccagggagggagggcgcgccggcagccggaagggagtggggagggcacgagccggggagagcggtgttggccatggagacgtggggagactggaggccgaggcttggggacccgactgtcatcagggtcttccgccagaccctgggcgctgcgccctcagaggccgatgaaaagaagcagaagggagaggtgagtaagtcgcagctccgggcgccggctcccgggaccccgtggggcggcggccgcgcgcgcgctctgccctcgggcggccctgctctcccccgcccggccccgcaaccccgcaataacttggctgggcggggtccggcactgggctagagaggtcgagcgcggcgtcttgagccgctggcgggaggctgctgcttccccgcctgcatcagtgcgggtcccgtggactcctcgcccccgtccccgcgagctcggggctccacatcaaggaaatcctcagcccgggagtggcttccccagaaacagcagccccaagcctccgagagtcagtcggagaaaaggacacactcaggcgccctgcgacagggatgcccgtccgacctacaaggaacgcctcgtaaaccggggtgcatgggagaccacggaaataacacgttctcgctgtttccaagctttgggataggcatctcgaccctcgctctctacccacgtttcccccccaaatcctggagagggaaccagaaccagcgccccgctgcggggcgggccggccagcgcacctcctgggggtgaggcctgtggcgtccccatctcgcggcgaccaatctctttctagacgcgcgcctgccaccgctgggcgacggcggaggtggggaagacagcagcctctcggctagctccggcctcccggggcttctgggtttggagagtttggggagcggagacacctcccgaggctcctccgcgttggaccctatttgcgagggcgggagcggggtgggccgacggcgaagctccagaggtgggaccctctcccttcagcagctcttcctgacttcatgattctgcccctcttctcattgcaggtcacaccgacaaatctgaagcgggtttgccaggggagtgtacccgtctccccagcctgggccacccggtccacagggattccatttccggccttacactccgctccacgatctcatccaggcgctgcagctgtgcagctgctctacagactgcagggacctgctgagacgaatccccggacgaggaaaggggccccccgcctgccctactgagccttgcgcgctgacccggttcctacacttaacttttccggcttcgggtttaagacgcgtgcgcgcacactccgctgctgtgggcgggcattggggcggggcgataccgggggcccactgtctggggaggggcgcgcgcgagcccagggccaacggacgcgcgggcggcgcgggcggcgcgggggcgctggggctggaggggcggggcgcgcgcgctccctcgctggcggagcggctgggcggcgggccgggcccggggccgcttggaatggcgcctcctccgccttcgccccaactgcttctcctggcagccctcgcgaggctcctgggtcccagcgaggtaaggtgacccgctcctgggaaggcctcggcccgcgagctcaaagcgctttgccaaaagttcgtcctggaaggagtggcgcgccgagggggacgcggagttcttccgctggcgggctgggcctggggagagagagggcagggcctcgccgcgtccagcgccccaactcttcgctttggacccacaggtgatggctggaccggcggaggaggcgggagcccattgtcccgagagcctgtggcctctgcctccgcaggtaggagccctggagggcccagggagagagggatgtgaaaggctagcccagtcccgctctgttctcgccgcaccctccacagtcaccatctgaggacctctgccggttcctcagtcctcagtagccaacttctccatcccagcctggcgcttggggcctgccgtcccctccccaccacacacacacggagtcccccaactgccctaagctctgttctttccccatgtataggtgtcaccaagagtgacctacacacgagtgagcccagggcaggtgagtacaagcaggggcccaccacccttggtgtccacgcctggagacaggcgctcctagcaggcttcgctgcctgttctgctgatcggccccattcctt

SEQ ID NO: 64583 - DNA, 1000 bp, Homo sapiens
ccagcccactcgctcagccctgaggtttccctctgcttccccagggagcttgaaggccaagcagtccatggcgggaatccctggtagggagagtaatgccccatctgtgcccactgtctccctgctgccgggggcgcctggaggcaatgccagctccaggacagaggctcaggtgcccaacgggcaaggcagcccagggggctgtgtctgttcaagtcaggcttccccggcccctcgcgcagcagcgcctccacgggcagcccggggccccaccccacgcactgaagaggccgcctgggctgccatggccctgaccttcctgctggtgctgctcaccctggccacgctctgcacacggctgcacagaaacttccgacgcggggagagcatctactgggggcccacagcggacagccaggacacagtggctggtgaggagttccctccctaccctacccgaggcccccgccccacctcgcgtcgcccgccgccccccgtagcttccctgccctcccgcccttgactgctcggcgcccggcccacagctgtgctgaagcggaggctgctgcagccctcgcgccgggtcaagcgctcgcgccggagacccctcctcccgcccacgccggacagcggcccggaaggcgagagctcggagtgacggcctgggacctgccactgtggcgtgcggctcctccccgcgccgcgaggccgcgacctctgccacgtggaccgcgcgcggggcgctccctggtggcgatggcgcggcactggccgagcactgcgggggctttcctccttgttggttgctgagtgggcggccaaggggagaaaaggagccgcttctgcctcccttgccaaaactccgtttctaattaaattatttttagtagactctggagttgagcttgtgcatctgccgcacagagactcccacccggaccctcgtcctaggccatggaggtggtgtttgaggcagcccgcccccgctggccaacctgtc

SEQ ID NO: 64584 - DNA, 907 bp, Homo sapiens
gagtgtggcagcactaagggcacttgtgccagtggctctgttggggtggggattaatgtctggagtggcccagctcctatggccagtgaggtcctagggtgcaggtgagggtgtggggagagaggtcactgcttcttctctcgggtggtgatggtgaccagctgcttggcagccttggcgatgtcataggcgcactggatcacctgctgagtcagcagctggaagtccactggggcgccgggctctgggggcactgtcttccggcactcactctgcagccggtaggcgctggcgttgagcagccgcagtgagctccgcactggctccagggctggcctctggagggggcaggagtgaggctggaccttggactttaagccaccagctgagatcagggcccagtttgtctgtgtctccacccaggtagcgatcagatgggattctccacgcctgccccagctcgaggccctcccactcctggtcctctctttggcccctgtacctttgggaagagggaggccatctcggtcacagccaaatggatcttctctgagcagggcacgaagctgcggggagaagggaggctataaagcagggggctctcaagggaggttcccagggacagcagaacccagggcccctcatgctctctgcaacaccctagaagccaacaggaactgcatccccctcacctccccctccactcagtacctgtcatgcttgaactcctgggctgcccgcaacagttcctgaatgttcttggtgacctgctctgtcttcaagatgacatcctctgtgctgggaagcccaggatctaggtctccatccaggctttccagctctgggtggaagtcttcctctttgcccagctctagaaacctcttcccttccagcctgaggcccaggt

SEQ ID NO: 64585 - DNA, 1671 bp, Homo sapiens
gagctgttcccagtcaccaccagcaggcctggggatgcctcccgagaagacacccgggtctagactggccctgaacgccaggcccggcaaggagcgctagccttaggaacccgaggcagggagtcctgggagtagccaccgctcatctgctcctgaggagacggtattcaggccccactggcgcatctgcccggccctctgctccttgccctccaccaccccggcaggcgtaccgaccacgcgagcagcaggtgcaagacgcgggggtggcactgagatgacataaaaccacactcgcccccacctcccaagccctgacggcctccgccacggccctcctgccaccccaggctggcgcttccgtcggatacagagatggaggtggaggagcagccagctgcccgcctccctcagaccgaggagcgggaggcggcgccgggaacgtccttcctcgctagtccacggcctccagggagcatgggcaccccaggccggccctcccgccaagggcgcagctccgcagtggccgaggcgggggcccagcctggaggccgcagccccccgccccgcccagccctccggccccgcacagcgctcttgccaggccccggcgcccgcccggcggcggcctggctgtgcggtcccgcccccggccccgccgcgcttacccggggcgctgcagtccgcacacacctccgctcgcggcccctttcgggacatcctcagcggcgacgcggccgcagccctctgggccagcgtggggggcgcgggcggcgggcccgggcggcggcggcggcccctgctgcccggcccggctccggcgaggccccggcgaggctccgcgcgcccggccaaccgtccgccccggggctggcccggaacccgccgtgcccgcctgcccgctcgccctcgggcgccctccgccccgcgccgccccgccgccgctcgcggctcctctctccgccccctgcgcggctcccggccgcttctgcaggaagcggcgcaggccctgcccacagggggaggggccgcacccccgccccgccgcgcgctgccggccgcgccccctagagaaaggaagcccgggcgcgggcaggagggggcgggggcgcttaaaggggccgcggcagatgcccggccccggcgggcagcgtggcctgcggccctggcctccgctgcagcgctcgcctggcccggaggcaatgtgagtcaccctcacagccccctccccttcactttccgcgtggggtggaccgggggacgctgggcccacggacggcgagggtggggattagggaagaaggacttggaggcccaagtcccgctccaggtcaaaggggctgtgccttggggtacccgtctatctctggttggggtgaggtgtgcgtccctgtcccgtaggtgtccacatctgtgtgtccaggggtgtgtgtgtatgtgtcacactcttgctgaatacgcccactgctaacaatatggacgcccaggtgccagaaaggtcaggcagtgtattcccctgcctccggactaaaaatatatctatctctccatgcatccttccatccagagaggagagaatctgggcggtttttaaagacctcccgaggagtgaccactgtgcctgtgtgcactcacatccacttgtcatccgccttacacacacccacggtg

SEQ ID NO: 64586 - DNA, 995 bp, Homo sapiens
tccactagagggtggtggccgcgggccgccctggagcctccacgccgtgtcccggccccggccggtgggtgggtgcgcccgggagcccgcgacattccttccccacccccaggagcgccccgcccacgccgcagcgccagcctgcgcccccggcgtcagtgcccagccctcggcccagctcagggccaggttccggcggccacgtgttccggagctacgacgagcagctgcggctggcgatggaactgtcggcgcaggagcaggaggagaggcggcggcgcgcgcgccaggaggaggaggagctggagcgcatcctgaggctctcactgaccgagcagtagcgccccctgccgggaccctcgccagcgccacgcgcgccacgcccagggccaggagccagacaaaccccggcctgcgcgcctgcagagcggcggctggagactggagccaccgcctcgcgggtgcagcagcacagcaggcacggttcggggagggattcggcatggccgcggggtaccttcccaggccagggccctggaggcaactggcacggcctggtccccctgctttgctgtattctgattccccaacccgctcccctgggctcagatctgtcctgtcctagggcggagccaggcggtcctgagggggagatgaatccttagaggagcgctgtccctatcccttgctccttctggccggtccgcatttctgttcactaaccccactccaggacactgcccctgaagcctttgcatctctgctcttcactcctggggggcagctgagctccccgcgtgctgtgtcactgctttgttccagacacaaaccagcacgtctagggcccagcccctcccccaccccggcatttcagcgtcaagtgcacttagcggggtacccggctcccccagcccccacacccgtcctgggtctcagggtggttccagcttctccttgggcagccagaagttggagtcccatcccccaaggcacat

SEQ ID NO: 64587 - DNA, 797 bp, Homo sapiens
aaaggataggccctttcagaagaatctctgggtaaaaatcattaagctaaggagacacgtggaaaaagcaggtgggccaaaggaagactcccctccatcaccattttatgaaagaggtctgaggtagggaggagatttcatttcaaaccacacactcttaaacagttcccaaaaccccagccaaaaagagaacggtggcccttttgttggtcaggttcatctgcccaggaaacaggtcactaagtatggtccttgggggtgtggtctccatgacttacaagctgatgaggagttaccaaaccgcagggtggaatgggaaactcagcccaaaacaacttgccctgggctccgggccacgcctgggctctgccgagtcatgctcaggcgcctgcactaatgtgaccccctgtttgttctcaactctgcacctgctctcagctccccctgcctgtctgctgcttgggtggggctctctctgactcatgcctgcacagcaaaggggtgctttcctgggaaggagcaggtcaatctttttatgaagacaagctgtaatcaatcagctgggtataagatggggttttcaccctttccaagctgcatgagctccagccacccctaggaggagacaacatatcacgcatctcaagtgagtggctgtggggaggggcaagctgactgtttggataggtggggcctaagttgtacattatgaccaactgaggccagtggtttccttttaaagtttcttctcttatatgcagacatccttgtttcctgaaataaatatgagtgtattc

SEQ ID NO: 64588 - DNA, 671 bp, Homo sapiens
atccactagggtgattttcacgtgtatttgacttagaaactaaagagttgtacattgcttatatagaacattaaatacattaagccattaattggcaactaggccattaaactagtaaccaagccaataacaacaaggaaaaatagctatcagcacacccttccccttatagctcactccattgtaaatattataagccctctgtgtcatgggaataaccctgcctacgacgtgatgctgatgtaataataatatctaaagctaagcacctggaggaagaagagaaagaagttttgctttggattacttgagtgtgtgtgtgtgtgtgtgtgtgtgtgtgtgtgtgtgtgtgtttaaataaacaaaccataaagccactagcagatagtttaatgatttctgttcttgtgttgcctgtggggatttcacattgtgctcacagtcactggtactgattcaataacaatggccttgcaaaattggcaaccttcctaaataaactatgtaaaatctgcaaacactggttactgtgctatgtgcctagtagatactccggatgctctgcccatatgatatacccaaagtatgctcaaagtaattttcttttcgtttttctttttttttttttgaaacagagtctttttctgtcacctaggctggagtgcagtggc

SEQ ID NO: 64589 - DNA, 831 bp, Homo sapiens
cccgcactttcaaagtccctcaaagttaaacggaaattctcccaaaggattcttccgtccacccccaccccgggacactttccgcctccatgaatccccccaccgttctaccccagcatccttccctccagacgcacggagacctccaggcaagcaggatgcgcgctcgccctcgcttgattgtttgctccccaggatgctggggaaagcggctgctgaaagagcaaactttctgagcgttcgcggaggcggagggcgcgcggcggactcacagctggttgatggcgttctgcgagatgaccgcgttggcggagaagtaaggaatcatgtcggggccaccgaggctgcaggtgcaagcgaggggcgccttcctcttgcgggccaacgtgctcagggtcatggggccggctcaaagtgcacaactccgcatcctggcctctgctctgctccggcacgaggcgcaggctgcgcgtgcacccggcggcggaggcgggcccgccgggtcgcgcggaggcagccgccgaagccccagggctcggcggtagagtccggactgacgggcgtcgccagcagttcgcccccacccgcgtccggggcgggacgggcgggtcctgagagcggagagggtaggcccggccggcgccccgccccagatctcgggacgcccgcgcggatcccgcagcgcgcgtcacagcctttagggcatccggcggccccaagacactgctgcctcggtaagggagtgaagctactcaagggtggacgagaaaggcttgcatttctctaaaggaggatgtttcaacagaaaagtcctgcctcttaaagattggc

SEQ ID NO: 64590 - DNA, 692 bp, Homo sapiens
aatatcaatctttctacttctactgtaagcttcctgaggttagagactaactggctgctggattcccagcagtggtataaatgagtaagtaaataaatatgtctcagacacaaaaaaggtactaaataagtttttcagaaaattaaatcaaacagttccataaaaactaagctggaacagagtattatctctccccatctgtttctaagcacatcctttcccactcaataaatgaagtacttccctctatctttcaggaagtctagggaaccatgggacctttcattacatttcagagccacgagtacctcaccagactttaccttgagaggaaaatgaggggcactgtgatcagtagctttgctgctcagatgggcaagaaaatgcagggtagtttataaaggtatctgaagagaactcagtgctgagaaacaaaggaagggaatgtatgagatcacctgcacaaaatagcactcactaaatacttctgattaacaagattcttaaggttttactcatgtacatccagcctctggcatatttcaggttgggcaaaggggctcatcaagaattacactttttttttttttaattggaaatactttccctactactaggtttactgaatggaaaaactacagctaggtgttttttttttttaatggattaacaaataaacataaaacatggac

SEQ ID NO: 64591 - DNA, 2997 bp, Homo sapiens
ggtacagtgtttattaaatacctttttttgcaacctgatactaccaaatccaccaacaccgtttttaaaattacagttctgtaggaagttcaaggtggttttcccagttgctcgcattttcactcagtttatttctctctaaaacatctggatgttggttttttaaagcccatttgccccactggtgcaatatattgtttttaaaaataaatattttcaaaaatggagcctaagagaatggagtgtaaacgaatgggggtggggcgaggagagaaggcaaagacgggcccagcggggaaaggctggttactgggtattttccttctgagagcatgctttattggcataggcatctgaggtaacgagccatacaaacacgaccttagaacaagaatgatcacgagcaatgagtgtaaggcataaatatctgtaagacggaaataatttgacactgatcactaagcagcaccagatgcttcgggacctcataaaggaaaggtaagaggtccaggaaacagagatcattgctaccctctggggtggggggcaggcgggagaaaccaaggaataactacggttgggcagttcaaagcctgaacagtacagagcaaaagaaagccagcaagtgactaggggaaggcacacaccctggcgagtacgaagaagggtgtgcagtgtgcaaatactgaacaggtctatgaaatggtgtgggtaagagatgtgggtgtgggtaaggggcaacgcaggaggctcacggtcccctccctgcagcagagcaacagagggtaaaagaagggggagggtgaaaagcaagaatgactcattaccaaaaggaagtgctcaagccatagggaggcatgccacaggggatttcagggcgaggattgtgaggagctaggtgctcagggtgatgggggcaaaaatcaacgtcttgtagttcctgctgctagtctttaacatgggggtgtgggggggttcgcggcagccgagtgccaaggcctgggaagcggcgcggcgcgtgcgcagtggcgttcggcgggacccgctgaggcaaagcggagccgcagtgacagaagcaagcggagcggccgccaggaaggactcaccgaggcgcaggggctggaggtggtgctgggggtaggtgaccgctggaccgtgaccaaagccatctaggcgctgctgggttgttccgggcagggcattcttgtcctgagtgtgggggacgggagggtgacggagccgggatggggaaaggggtgcggggtgggggtgaagggaacggggaggaggaggaggccgcgggaacggccgcagactccgcacccaccaccagactgtcgccgactgacgctccgaacgggcggcgggcgggcggttccgcagctgcggggcacaatgagcgctcccagtgcgcaggcgccacctgtcagctaccgcctctcccctcggcgcgcgccgccgcctggtcgtaacccttgagttgccggaagctggccgagtgcgtgcgcctcgggccgccgcaccctcctgggtttcctccttcgtgctggaatcgcgcggtttgccagcactgggtgctgtggagtggggtgggggaaggggccgaagggagccagcccggtgaggggtcccagggcggggggccgctggagtcttcactcctgagagacaaccattttatgaggtggggcggcgcacagcttaaccaaccttaaaaaaaagcagctgagatgaaaatcctgaagcaaacacgttttctattgggaaagggctccgcggagtttcaaaccctctcactgggcgcagacagaactgggctagaccagtttactcccttcaccccggctctcgggggctttttcttaacttttcccccccttccgtctatgttttatgatgagacttctggaaagaaaaccattttccgtttgataccctggaaaggtttgtggtaccctcatgcttcctctattgcctgtctaaagacttattcattattcctgaggagaagagaagctgagcgcgcctgggagtccgaggaagccggttgtgagggtccagcctgctattgacctctcacttgcctcctgctgtgaagacagtcttttaattaaacaggatttgctcgttaagctttcttctccttcgtctctaaatgtcattctttcatagacctatgtaaaaatgtagattaaaagatattttaagggaatggttttctcaggggtaaattgtctgcagaacataagcaaagaatgtaatggaaaatcaagattaaaaaggaaaaaaattgcacaatgcaaatatcactgattatttacacaaagaaagagagttgacaaggctatttctcagcttgagtggatgagctggtaaataccaccgtacatatcaaagctgtagaaaacacacacacttgggagtttgcagttattaaaacccaccccctcctgtttgtcactcaaacactcttggatctcattgcttcttttaaactgacagggctgtcatgagctctttctggctgctgtacggttaaacgccacaagagtcctctgtgctgagcctttgttctctccctggggccctgtggttgaaataattagcagggaggttccatcaagaatcagacactgagggtccctgtactgtacagtcctatgtagagtgtagtgcagagaagccagctggtaggcttttgccccctggtggtgatcaggagtgcctgtgagacaaaattaaacaaagatgtatggttcacagattaaacaatctgactgtgttttccccagagctccgtagtaaacaggaaaagagaaggcaagtttcagaagtaagaactttgaaccaatgcatgggagaccaaagaggaaactagatacatagccaaaaaatacacatagctagaagctgaatgaactcaaataaatgaaatatatgtgctttatgaaccaaagtatcattctagaaaaagtaatattcaaatctgtaggtctt

SEQ ID NO: 64592 - DNA, 876 bp, Homo sapiens
tgctgcagttaccaccactgctgcagactctacaacactgcatctgagaaactgtcccttctagcctagggaaaatcccatgactgcttcattaaaatgtcccaaaggcaatggaagaatacagaatataacaattgaaaaactcaaattatgtaggatattgagttctcccctgggtaattatgggtaactaattccccattcagtctattcaagcaagaggcaggcagccctggcagggggctttattttttactctttattttaagcaaagtaacacatactcataaaaagtcattctgttatacaaggtctgttgagaccacagcatttcccagccccaccttacctttattttccttgcttctgagtcagctactttcaattctttttgctcaggagttggtaaacagcccattggccaaatctggccagctgcctggtatggtaaataaagttttattggaatagctatgcccatgtctgtggctgctttcacattaccagggcagagttgagtagtggccacaaaaaccatatgggtcacatggactaaactatttgctatctgactgcagaaaaagtttgccaacccctattttagctgtggttttgacatttacctctatattgttaaattacatgcttgtgtggctacttttgtttttccgatttaggcaatatctattaatctcccagtatacaatacaaagatttagctccttcctcagcatatatacacacacgcttcccatccattcttcccaatattattacatggtaatgtaatcagaatagatcaatattcagtgtttatattatcatgattatgtatgctatttacagcttagccatgttgtaaattacaattatttt

SEQ ID NO: 64593 - DNA, 1777 bp, Homo sapiens
cgagtcgggcggatcacccgaggtcgggagttcgagaccagcctgaccaacatggagaaaccccgtctctactaaaaatacaaacttagccgggcgtggtggcacatgcctgtaatcccagctactcgggaggctgaggcaggagaatcgcttgaacccgggaggcggaggttgaggtaaccgagttcgcgcctttgcactctagcctgggcaacaagagcgaaactccgtctcaaaaaaaaaattttttttttaataataattttggtcctatgtaaggtattattaatacacagattttcatttttcgcctaattatcctgaaccagttaaagtgaacacttggaagggggtagggggaatatcgatagccatggcagtggttttcaaactttatcagaattacccgctggttaaaattcagataactcgcttcactccaaagtttctgattctgcaggtttggggtagggcccgagaatttgtcattttaacagtatctccggtgttgctgatgccgctggtcccagaaccacacactgcgaacaactggcctagaacgttgtcattcctttctcctacagattttgaggcagccggtgggctccgaaacaaaacagaggtcactggatccgattcccagtaccatagaagtgactcaaaccagcgattcaaccgacaagcaggatccgggccacccaaagccgcgcgagagtttacgtgacgacatcggcgtcagcgtcacggaggcgtcggccacgttcagcggacacgggagcaagatggcgattccgggcaggcagtgagtgatccgggagttagggtcaggctgggggatgagaaactacggcgactgtatctttggccgaggagttttaaatgcgctggaagtgaagggactgtgtcgtcaagggtagagacgggaaaaaacgagaagtcctgaggaacatagattcccctcccccgtacattttcccggatggaagcccgaagtttgagggagaaacttgtgaggaaataaaggaagttaggctgaggggcagagagcgagacttttctattttccaaaagctcggtctgaggcccctcagtcttgcttcctaacccgcgcttgagtttctccccgcttggatgctctcaggggcagtgtgaagagagacagttcctggcttccttagagggccttgttctccttggcagaagctcaagtcctgattcccgcccttccttctcgttttaggaatattgttctgagaagccacagaaaaagggtaggcatataggaaattggggtatacgttgccgcaaaagagacaaatactgtacgtacttgaaagttttacctttgatgtgtaatccttacttttgatgcggcctcccgtgatctccgcatcttaaaggccaaaacgtgagaaactaaaggagttggatctgatgggatggttctctcagatgctccgaggcaaagcacatgatcttaataaagtgtaatgcgaacttgccccatggctacttgggtttctcagttatcttttaaaaattttcgtgagttacactatccagtcagttcttagaaactgtgtaagtacacagtaggaaaaaaaatctagccattttcttgactgtttagaccacaaggatagttgaaagcattttaaaatctttagtggacatgaactaaactttccactacacatgttttttttttttttttttaaatgttactgtcacttcgccatcttaaaacatttctgaacttttcatttacttctcttct

SEQ ID NO: 64594 - DNA, 596 bp, Homo sapiens
ttaagtcaaatttatcaatctttttcttttggtttttaactggtgttatgcttataaacatttttctgctattataatgaaaaaaaaaaacaaaaaaaaaagaaggataagtgagaagaaaacatcagaaacaagactctcaatgaaaaactccattactcactaaggccttggcatagtccccaactatgaaacagataatttcaacagataattgagtagtgacaatttgtcaaccgcttctgttaggtatccactgggtgaagcatgacctaatacctccttgaatttgtacagggtatgttgcaaatgtgcaaaatgacacaatgcctatggaatggtgtccagagatgttggatctgtccttttcagtatctagaaaaattacaaatgcacttaccctcttcattaagcagtgtcatttctgggacttcatcctatagatacacagtacttacatgcatacaatatgaatttatgtgcaacaaagctaatatttattcggcacttaccgtgtgccaggcactattctaagcactgtacatatatatagtaacccactgcaatactgtttgtaatagcaaagactgaaacaa

SEQ ID NO: 64595 - DNA, 2604 bp, Homo sapiens
ttcccagccacaaatgatgctctaggggccttttctcccaatgtcagacatttacataacatctccaggtccttcatacagttttatatcccttcatccactctttctggtcaccaatgaccatgaactgacctgttatttcttgagtggacgacatgctactagaacagggaaggtgagagaaagcacagtttagtggttaagaaaactggctctggtgtcaggccatctgggttataattctggctctatcatttactagctaggggatctgcaggtcactttggcttagagattaggctcttctcagatgaatttctgactaataacgagaggaatcaaaggtgacttccttgattttaaattcttaaatattttataaaatatttttatcaacttttcaaaatgaaagataatatatcaaatcccgaagtctgttccctcacctaattgtgaaattcatttctgatatgatccattaacaaggtacaaaatggatagtcaagtattttaagaagcaggggagaaaagaaacccaggttggtattacatgttagatatgcatccaattttcagtacaactgactatgaatactagaattcatcaacttgaagtaatccaactggtacagtaaagcaaaaactgatttctccttttatgtcctcctgctcagaagaaaccttctgtccatttttggaatagtcaggttatgtgttacaaaagagtttctgggcaggagagccatgaacatgaccaatggggagaaccaaagccagggctgggcaaaggggaaaggcagcttgcccaggtatctttgctctgtttatctccagcatgtattatcaacactgctttttcagaaacatcaatcttaacagtcagaaatcccaaagagaatagcaacaaactgttaacaatgttatctacagaaacaaaatcccagcaatgcttcttaaggttgtcatatctcccaagagagcataaacagaggtcctacctcagacctgccagccaatgtccactaggatgacagacaagaaggccctgctgggataaacacatattgccaacataataacatactatgcgctctcctgaggtcaggccaagtgtgccaattaaattagatcatgttttctttccttccttcctgttaagttagaaagaacattaccaagaaacacatgagaataatttattttggcttgaatgaacgactccctacccccacttcagttctatttcttatcttttggctctctactgaaatgctttgctgtgtatagtcacaggcatttcagttatttgagaacaacaaaaaagttaatctttactagatagctgcagatttcactaagaaggattacaggagagttacagggatagcaagatcccatattttacagttctctaagcataataatgaaatgagtaagttagcaaaagcaaaacttttattgagtaaaagtaaagaggtaaagctaaatggaaaaattatatacagtaaagtgacctaaaattatctttaagtatttaggttcaaaataataaagacattaactcacactacataaaacacattttcctgattttacaagtgtttatcctctcttaaccagataacactactatcttcaaactcactgactattacagatggaaaaatatcgcagcaagctgacggatccaggctcatctaaacaaatataactttagttcttttcctaggtgctaacctatatgataacaaatccaattataggaaccaaattagaccagaaatgaaacagaagctgcagggggttcattggaagcaacaggaaaactttaactcagtatcttatgtttgctagaaataatcaaatctttcaaattttaagacaagtatccatctcttaactatcaccaacttacagatataactaaactgtgagttatttttactctgctaactttgctgaggtttaaacccttctctacttgaccctaatgtgtatttgtcttaaaataaaattcaccttacaagaaaccaccaattttaaaaagtattctaattcgtagtagttaacttaataggcacccctaaaatcacagaacaattatagaaatcacagaaggtagacatgtaactatctgatgatgaagagaaatgcagtaacagcacttgtatttgtttacatataaacactgggctgctgagtatcacagcatattccagggacagtcagccaaaatccaccagtgattattctcatagagagatgaaaagccctcgaatgacaaataaatggtcttcagattttggctatcacatacaagcctgtgctgcccaatcagcatactaaaatgctgtcaagttcaaaactcagcttaacaggctcttctaaaacagcaatttttcaaataggagctatggaagtcccatatgctcatatccaaacctccacaccccctcctctaccttttacccttggaaatcctacggctgtgaggaacatagctggaaaatcacgattctaaacacagagaggggcaacaacaaagagttgctaaaatttctttttctttctttttttaaaaataaaatgcctggctaattcctg

SEQ ID NO: 64596 - DNA, 914 bp, Homo sapiens
tatttatgggtcaagtgtcatgataattgcaactacctttcaaatgattcagcaagaaaagtaaacacataaacacacagcaaatatagcaaatgttaacatttattcaactaaataggggtctatagatcttcattgtactattgtttcaacttttctgtatgacatttttgtcatcagaatgttggggaaatgtattcagcagatatttattgagtatctaccatgtgctaagtattctaagtattgaggatgccagttgcagccaagccaatatggtggctttgtcatgaattagggaaaatatggcttctctagtcactctactgccatctgtggaaaattgttataataactctacaaagctatgatgtctataagatgaatgatgcttccagcttaatgcttccaccacttaatgcttccataacattaagtggtgatacatagatgaataaaacaagctctgcgcttttgaaggtcttacatcgtagagcagaacgttaatgatgatcaggagccatgcagagtggcctcaggtgctgagcagggacttcagataagaaaaatggtataatggcgcccctgctggagagtcaaagaattttgtcatatgactcgtgcaaggtcatataaatccctggaacagtcctctttcctagaactgacagaggggagaaatcatttttctgtaagtagttaagcccagtagttaaccattaagcctaagtagtttggctgtttggagtatttacagagtccaatactccacagcttccacagtggcttagaccaagagggaaagaggaaaaagcaccctcgagtctgaacattcctgggaataaagaccaatctggcagggtgcagtggctcatgcctctaatctcaacactttgaaagctgaggcgggtgga

SEQ ID NO: 64597 - DNA, 1234 bp, Homo sapiens
taggaatactttgggtctaagaaattggtggatacccttggttctccactgctataattggctcaaaataccttggaaatgcccctatgggtgccctgaggcaagtgattttcttggcatgctatgaaaaggagagtgggagctgagcacagccctggtgtaagcctgggtatgggtttcactagataaagtcactgacaccacggagcagaggcagtgaaagaaaacagtcatggcctttgttttcccagggcctctggctggcattgcacacacaacgcaaacactgtccacgttggtgctttatacagattttttttaaggccagtcaagtgaatcaatgggaatagggaaggaacaaagaaatctgtaactggtagtgatcgattcgttgtaaacaccactgcacttgcaccagcctatatagatttttttatttgtgtccattgcctgcctactttcagaactcgtttgtcttttatctgcacttcctcatccctggccactcctactccttgtttttaaagctacctgctggatctgcagatctcagttagacagggacttaatgtacaggtcttgtaactgtcaggcctttggacttaggcagcacccagggcagatggcaggagaacttagatcagggccccacagcctcttgctcgtcctgttacctgaagaggaaccagaggactagcccctgccccactccagggccaaccctgtggttcagcgggagcatacagctgtctgcaaattgcaacatactctggacacagtccatcaacacatcctggtccttacccattatcagtggaaacctggcaatgtttgcataacttttgtcctacacttagagacaatacgtcctccactagaagcagcatctaggaggaagtagtggggcagctcaggacacagcaagactagatttgaattgcataagtttaggatttggacttgaacaaagccacatcattaggtaggattacattcagttaggcatagtagaaaaatgtagaaatggcttaaacaaaaatgagaatgtattttctctcttatacttaagaagtccagagatagtcagcccaggactggtatggcaacatttgtccctaccatggaaggaagaacaagcttacagccatgccagctgaaaaaggccgggggaaacccaccagctctgtaatagacgtgtacctgaggacaccagccttttaagtcacaatccagc

SEQ ID NO: 64598 - DNA, 2100 bp, Homo sapiens
gtcgaggccagcacacacagggacctatttgcagtaaaacaacgtggggtgacgcctaagaaatagacaacattaacacaaagggagcctactacgtagcacatttccgctaggcataaaagagacacctttccagaaagcaactctaaaaatgaatgcaccgcctagtgaggtgcgagccttcctccccacgaggcgtcccgtgcaaccgcacgcggacagcggggctccagcggaggcggggtggatgcggagacaaggcgcctaggagactgggctaaggctttgagtgtccgaacgaagattctttcgaacctattgattttttctagtcttatgattctttcgaaccttttgattctttccattctcggttctaagcattaaagcgcagctgagaaaggcagcaacaaagatgggaagagaactagcaggagttctcagagaaaaatgggtgataatttaggggagaagccataaagaagagactaagcgagaagcggagcacacgcagaagacgaaacaaggaggaggagaagagaagaagaaccttggcgaaggaagagagtgaccaaactcgtcccggacgggaggagggcaggcccgcccagagggaatcggctgctttaagggaagccccgccccctggtggtgacgctccaccaggcccgtccgcgattggctgcggccagagggcgggatggggttgctaggcgaggaggggatccggcgggcccccgccgcccggagcgctgagccgcgggagcggagccggggttagcggcgctgctggaagatggcgagcggccgggacgagcggccgccttggcggctagggcggctcctgttgctcatgtgcctgctgctgctggggagctcggcccgggcggctcacatcaagaaggcggaggcgactaccacaactacgagcgcgggcgccgaggcggccgagggccagttcgaccgctactaccacgaagaggagttggagtcggcgctgagggaggcggcggccgcgggcctccccggcctggcccgcctctttagcatcggccgctcggtggaaggccggccgctgtgggtgcttcgcctcaccgccggcctggggtcgctaatccctgagggcgacgcggggcctgacgctgccgggcccgacgctgcggggccgctgctgcccggccggccccaggtgaagctggtgggcaacatgcatggcgacgagaccgtgtcgcgccaggtgttgatctacttggcccgcgagctggcggccggctaccgccgcggggacccgcgcctggtccgcctgctcaacaccaccgacgtgtacctgctgcccagcctcaaccccgatggcttcgagcgtgcccgcgagggcgactgtggcttcggcgacggcggcccgtccggggccagcggccgcgacaatagtcgcggccgcgacctcaaccgaagctttcccgaccagtttagcaccggcgaaccccccgccctggacgaggtgcccgaggtgcgcgccctcatcgagtggatccgcaggaacaagtgagtgttgcctgccccctccccgtccgtgtgagcctccaagggccgaggctggttccggcacccagtaggcgctcagacaatgctggcataaggggtggcggtggtgaaggtgaagggagacaccctgtaacggggacagggcccaggccgcgtagcctcccgtcctgctaatcatcaaagaattgcctcctagaggctgtcatttgttcaagggatggctggaggggacactcctttctgacatttctggtccctattcttacaggggcatagaatatgagcgagaagagatcttaaggataacctaggtcagctcacacattttatagataagctgtcaatgttgttatcttatatcaaaagtgcctaatgttataggcgctgtgctaattttttctgtgactgcagtatctcactttattttggccacaacctgatgtcatagacaccatcagttttgcatacggggaaattgagggtcagattggttaactgatttacataggagtgtggctgggacttagaattaggcaatctgattcccgatagtcctct

SEQ ID NO: 64599 - DNA, 1011 bp, Homo sapiens
agatgcccaccaccatgcccggctaatttttttatatttttggtagagacggggttttgccatgttggccacgctggtctcgaactcctgacctcaggtaatccacctcctttggcctcccaaaaatgctgtgattacaggcgtgagccatggcgcctggccagttttttacattctgacttgagggacttccattctgaattacttataactaggacactatattgaaaaatctagtgaaagcctagtttttcagtatagttttctttttcatgtaatacataaaaaattattggacatcttggctgctaagagattttagaaaaagcaatatggtgttatctactttagcaatctgtgactacagaaaagaactttgactggggtgtgatggctcatgcctgtaatcacaacacttcagggggctgaagagagaggaccacttgaggccaggcgtttgagaccagccagagcagcagagtgataccttgtctctacaaaaatttaaaaaattagctgggccttgtggtgcacacctgtaatcctagctacttgggacgctaaagtgggaggatcacttgagcctagtaggtcaagactgcagtgagctgtgattgcaccactgcattccagcctgggtaacaggctggaatctcaaaaacaaacaaaacaaaacaaaactttgacccagaggcttgggcacgtatgattaagcatcctagttgtacgttgcctcagagaagggaaggaaagagtgaaacactcactaattggcactgtccatagtggacttaggaaagggaaaaagaactgatatttattgaatacatattttgtgctgggtaatataccaggtattttatatacgtcattatatcctcaaccctgtgataatgattatctccattttataaatgtagaaactgaggcagtcccacagctagaaactggtaaaactagaatttaaacccacgtatgtctactttgaagcccagtgcagttctgcctccc

SEQ ID NO: 64600 - DNA, 1446 bp, Homo sapiens
tgtgggtttggacagcagattttatcaggttgagggctcaggccgagagcatgtagaagcagttagctcactctttctagatgtggcggctgacaaggacaaagagggctgggactagaactgctgtagacaaggaaagcagccagtggagaagagcgcatacgccaaagaacgtggatgatggagcacaggcggggaggtaggatgaaggaaatggctctgggaagaaagggtctctatgtctgagaaaggaagaaattggctgaagatacaaattagagacaaggtgagggaaattgagggagttgcctgaggatgattctcctcccagtcaagtaggcacctgctgagagaaaggataagccgagatgagggagatgatgatggtttggggcgcagaaagcgggaatgaaagacaggagctaaagccgaagttttttctctctcgctacttaaaagctgtaagataacgaattgatcagcaggtggcagtgtccgcggaggctcgcatcccgtcggccctggctctcaaggcggaaacacgcaccatggtgactttccggcctgcatcgcctctgctcccctatcccggctgacgttggacgacaaagatggcggcagggaccagcagttactgggaaggtgagggcgagaaggcctccgggtgcgtcctacgagggtgagaggggctgagtgaggacagatcttgggagaagcagcacaggaaagaaccagactcccggagcggccgagctgagcagcggggcttgcctaagtgggatccccggggccttggggataccgaacggtctggggtaggggtctggcctggccggggcgtgtgagcgggacgtggggcaggggttgggcagagtggacagagcggggatgtagaggaagagggctctcaatcgcctgggtagaattgtgttgagggagtaatggaactcggacgaaggggcttggggtacgaactctgagaggaaacgaatgttgagggagaagatccagagccccggagactggaggagtcagcgcattggagctgaggtcactattggaaaactgagtgggaaaagagaaggaggaacttgcattccggtccgtcggaggaagtatgaagagaataggagacagaatgtctcttattgggtctccatgacaactacaggttggggacttccaggactgggtgtttgaaggaggagaaaataacttacccttctgctctagagtctagaatcggttttattgaaaaagttgagagaacctgtgtgaattgcagttacatttgctatacttctcccaccaaaaaaaccttcctgtgatttgacaaatgcatttgtttaattcctgaaactatagtcggataaagtgagcttacataaaactcattcgtggattatgatgatcaacaagagcagagaaagctcacctttttctccc

SEQ ID NO: 64601 - DNA, 1446 bp, Homo sapiens
tttcagatgttatcatctccctatccttggctgcacctgaaaagagcaggagccggcaggtaacccgatcgcctcccccaggtgagtctccgatggaggtgtcaactacaagaccaggagcagagcagtcctggggctttgctggaaccattggcgtgggaatgctgtctcttccctcgcccgagagacgccagattcccagcgggcagcggactcggttctaaccttcctcgccccagcctctaggagcgctctgcacgcagtgggcgtctaataaatgcagtcggccctgcttggacaaaagctctccttaagtggaccggacactatgcccctccaggtgccagagttgtcgcccccgctgccactttgctccctgcgcgcgttccgcgtgagaccctcggcggcacctcacccactccctgacggccggtgccagcccggggcaccctgggtactctgcgcgcgcccgctggccccgcccggccccaacggccccaactcccgtctcctcccagtcccccggagccgaccagtggtggcggcagccccaggtcccgggtccctcagacaaaaaggcgggtggaggaggagtagccgagcccagagtcctgctccggcgccgccgagcaccgcccgcctcagccgaccagccccgtcggctactgggcctagcctagaggagaggagggaaaggccgcggaggccgcgaggagacggctggggcgccagcggccggctgccgcctagttgtgctgcccggaccaaggaaggagaagtgggaggagcggggagctcagcggctcaggacgacgacgctcgccacatccgggaccctccggccgtggcggtcgcagcgccggcagctcgggcctcagcccctgcctctgtggtgactccgccgcgcttcgacgtcgcccctgtccccgtcccgcccgccgcccccgccaaccccgccgccggggacatgtccaacccctgaagccggaggaacgggccagtcagactgcgcccgacaggtgatggggagcggcggccgggctgggcagccgccgggtgggcgagctggcgcggggtacctgttgacttgggaagggccaggatcgcgatcaatggtgagttgggggtcggaggagtaggaaggcctagttcagggagagtaattggaaagccactcgctctggtttggacattctttaaaaagccgaggatgactcggggaggcggggtagtcttttgtggaggggaggatacacccgttcgcatcgcagcggatttcgggctgaaaagtcttggtcaaggagcccgacgctgcctcccggggctcggggagcagcagcccctgggctacggcccaggtgggctcgtgaaggggattattgaatccggttgcagactgcgcgcagtaaacactccttaaagatggagcgcttaacgggagggtgt

SEQ ID NO: 64602 - DNA, 1541 bp, Homo sapiens
agcattcaagatcgtatgacatattattcaggcattaaccgcatttattgtcaaatgctactgcttctcaatccctacctctccctcactctcgccccttagtcctccccttccaatatccattttgtctccactttcagctctcccaggtcactgtcccacctcttcctcaggctctctaaaatcaatgcctccccgcctacccaccgcaggttttttaccagtctcctcctcccccgactcatcactacccgcatgaccccctcggattctgctctggtccctcactctcccaaacttcggaggccaccgctactcccatcgctgccccacagtttagtgaacgctcctcacaccctccctccacccccaaaacttccccttacgacctccccaactcccaccttccccgttcccagactccattaggtctcctttcaaatgaatgcctcttccctactccagagttttcggacagtcccacccctcaaagccctcccagccttcgcccggcatccgcgccacccccgggcccacagcgcccctgtgggtgtggccctccgacctgcctccgcgcctcacgcagcccctcaagccggtgacccagctcccgccggtagctctgcgctgcctccacgttctcgcgggcctcctgcaacagcagctcaggctccagctccatcgcccccctcatctggccgcgcggccggcgaaacctagcgcgggttcccgactgcaccgggcgcctccaagcggcccggcgcggcctcgcgcaggcggaagcaccgcccagccccgccgccccatgccccacgacgaccttgattgacgggcgcacggcggcgcctcgcgcgggtggcgtccgggtcccagcgccgcccgccccgcggctcaccccgcctcttccgtgctgcggcacagcgccgctggttgggcctccttgggaaacgtgctgaggcctggcaaggttgataacccgcaccttgccaagtgcttctcacagctcatcgcattcttgcctgaccttcagccctacctgtatctccattgctcagatgaggaaattgagggataaaggggggaatcggccgggcgcggtggctcacgcctgcagtcccagcactttgggaggccgaggcgggcggatcccttgagctctggagttcgagacccagcctgggcaacacggcgaaaccctctctcaccaaaaatactactactattactattactactactactactgctactactagcaacacgtagtggagcacgcctgtggtcccagtggatcgcttgagcccgggggccgaggctgcagtgagctgtaatggagccactgcactccagcctgggcgacagagcgagaccctgtctctaaataaaaaatacttttttttaaattaaaaattttaaaaaatagcgaatcgacttttccaagccgcagaatttgagcccagatctgatgacaaaagccctggtccttaagagcagagcaggccttaggggaatttactaagacccaggtgtcagcggggagc

SEQ ID NO: 64603 - DNA, 864 bp, Homo sapiens
gttcgagaggatggaatccacagaaagaaatgccttcttagtcgaataggtacttcgacttttataggtataaaagtcgaatttcggatcctgagaggacgtatattgaggtggaaagctcgcccaaatattagcattttattgtgcatggtaacaatgtaaatcaattatttcctttttctgcatttttcaaatttcgcctttaaagaggggctagcctagggcgttaaaagtctaaattttaattctgtcaacaactgactaggtgacttagtgaaatcacgtcctcaacggtgaaactgataggacagaaattcaaatttccaaactcccgggttggctttcaattccacggtgcaatggttccgcctcccgcgggttcgccgagggagtcattttggccctctcggctcaccgtccgcgcagcctcctgaagcagccgtaaactccgccccttgcgcgcaggacggcgcgaaaacccaattgacaagaattccctccgaagctctgtggtccgatctgcggtccgcttgctttccctgcccggtcccgagcgctcagcctgaagcgccgctttcgagggcaccctgcatacactggccgcgcctcagggatctcattgcccgcgctttctcattgcctctttccgtgttcgattcggctgatctgggcccagcctccgctcccgctctctgtcggtgggcgcgggggaatccgaaacggctcagcagaatcccagcagcttgctgctactggagcgggccgcctccatggcctccaggcaggccgggctggaccgcgtgaggtcctaggagacgggattccgggaagcggggagtatggtgggggtcctggccatggcgg

SEQ ID NO: 64604 - DNA, 1680 bp, Homo sapiens
gcttgagcccggaaggcggaggttgcggtgagccgagatcgcaccattgcactccagtctcggcaacaagagcgaaactccgtctcaaaaaaaaaaaaaaaagggttttgtcttcacttccattttcacattttagtatctcatctggtggaactaaataaaattaaattttgtacgtttataagaaatgtttcagctaagtgatagatttaagggcagttttactttcttccgtacacttttcaagacttctacatgacgtttttgcaagtatgagaaacaccatacaatgcataactttgtaaaaccagtgggaagtcactctaacatcgcagccacaggaaagtaatgtggccagaggtaagcaagcggctgtgagaatgtgaaccatccgcccactctgaggagccacccgtggaccctgaggccggggaagcacaaatgttccgaaaactgccccgtcagctaggctggggccccaagagaggggcctgaacaagggacatgaggaaggaaacactctaggacatgagggacatgaggaaggaaacactccaggttcctccagaatacctccagccgtattccattagcctctagggtcagaggctaatgacagacgggaaatcaccccagtgttccaagcaccctacctcccgccgtattccattagcctctagggtcagaggctaatgacagacgggaaatcaccccagtgttccaagcaccctacctcccgccgtgaagaggacagacccgctcatctccaagttgaatcagtaggtccagtcttcctccattgacttccggttcctgcgtgctgcgcccaaaagcgctcggcctgcactcggcggaaaggttgttgtccaagcggcgttccggggcaaggcccgaggtgtgtcccgctgagcagtgggtcgtccgcgtctgggctgcgggcttccaggcgggcgcctgccgaggccctgtccccggatcccgagtccctggctggcccgcagtcttcttccactgcaccggggaaacgttcttgcccctaccgactcctgagagccgctgggccgaatctccaggaaggcgattccgaggccagttttagtctgtagtgggtaaagtgcctccttcgtggagactccctgggtttctcctagacacttagattgaggagctcctgttggggcccagcctgtggcgccgggagcgggatcaggtaggggcagcgtagacaaggtcctcaaataaccttttcaccaggtagactggaataacggggagagatgcgaagtgtttgaggagctcagcggggaaacagggcaggcaagggattaggtaaaggcgagggaggaggagattgcgttggcgctggagcggtattcctcttagaagggataaagggagatgaatgtagcgccgaatttagttggtccttgaataatgggtggagcagttgaatactccaccagataggaagcctgaagtccccgaggtttatgatttgcagtcagactggagagtgttcctagaaaattggccatatactgtatagcgaatgtgaggctggattgcaggtgaagagcctgggagcaatgagaagtcgcgaagagagtgtatcttcccaggtgagaggcaagcgtaaggaattttttttttaacagtcttgctctgtcgcccaggttggag

SEQ ID NO: 64605 - DNA, 608 bp, Homo sapiens
aggaagggcgagggaggagcctgaggagactcgcccggctcaaccccgacgtccgcgccccggccgcctgttggccatggcgggcctgggcctgggctccgccgttcccgtgtggctggccgaggacgacctcggctgcatcatctgccaggggctgctggactggcccgccacgctgccctgcggccacagcttctgccgccactgcctggaggccctgtggggcgcccgcgacgcccgccgctgggcctgccccacttgccgccagggcgccgcgcagcagccgcacctgcggaagaacacgctactgcaggacctggccgacaagtaccgccgcgccgcacgcgagatacaggcgggctccgaccctgcccactgcccctgcccgggctccagttccctctccagcgcggccgcgaggccccggcgccgcccggaactgcagcgggtagggaggccgggcccgcagctcccctggctcccccgggctgcccgccgcctgaccctttcccatgtggctcgaacccctttcctcagccgttctacttttacgttccttttctcagtctaaaagtcgagttccgctcttcggaggcactttggaaagt

SEQ ID NO: 64606 - DNA, 1003 bp, Homo sapiens
tctcctctcctcttgtccaacttttgagtcctctcccaacccctcccaatcttggtaactccactcagaacacaccctttcctgtcacatgatggcatctagagggagccagccctcctccagggtggtccggccagtgtggagtggagttggccgtcacctttctttttctggaagctctgcttggtccagacttgtctgaggttttttggcctccacatccttcagctgactcatgctgggcctgcaggcatctggactgcaaagtcatttttcacacgtgctcctgggaaaccacatctcttcgtactttgtacttctgctgttgttttgttttcacaatttttcatgggtgttttgaagttcaataatttgatctatgcaaactgctcatctcagctcctggttggcaggggccttgtggaagcaaattgagccaccaaaagaatccaatttagaacacgccctggaaacagaaaccgtctgtcattctaaggccattgtggttgggagtgattcagactcattgcagctccttccagccttcaaagatctcaccggataagagcctggcttggatttgaagacaccttctatgaaggaaaggctttggcagggggtgaggggggtgggctgtgatactttgtaggagctgagcacagacggaaggaaattggaaggggatgtttgtctggctcccaccttcccccgtcagggagaatcaggccattgtctaggtagaactcttggcttgtttatcttctcagacccagcttagaacaaggtttcactcagttttctttccacccaaaaaatgaccacaggaaagagtgacttgcgtttgctaagtgtccagtccgtactctccgttcccatttctctgcctctttctcccattatcggcttctaacagaaaataagaagagcaagcttccctttggtcccatcaaagataacatgtagacattcattcatgcgttcattcctttaactagcatttatt

SEQ ID NO: 64607 - DNA, 1029 bp, Homo sapiens
cctttgcattcttaaggataatctgattgtttccacttggacagcttggcgaggaggagtgctaactcctagaaagctcctaattactgccaaggtgagcgaagtgaaaagttggttccattttctgcagaaagggtcagttcatttaattccagcaaaaaactggcttccaggagaaaaaggactgtttaaaggtctgtgtcaattatatggtgattatgaaattcatgctatgactaatccagtggctcaatctatgattatctgacacgatccaagaatccacagtgtaacaggctctatgactccattaaagaaaagtcagtttaattctgtgctatgctccagattacttctctcctttcctagatctcctctatcaaagagagtagacgtttataaaatggtgtctgaattcaactcagtgtcctggaagccatatgaaatatttttttcatggatgactcagagcttgggaattccagtgtgttgctttatataatctgaagtaccataaagacctttgacctagaagacttcctttgttgcatgtgtatcttttcctgtaattagagtctatgattagactacaggccatcatgacaagcctttgctttccaaagcactctatttttggaccttctaatttgatttcttaggaatactatattttgtaaatattaaccaaaatccatttttaacaagcacctacaagcatcccagtttcaaaaatcaggaagcaaaaaattttgcccaaactctgtggtcactgacagtgttttggagaagagtctaacaatctctgaattgttgcaacttcccagcgcctttcagagacaaaggcccgtggttcctgtacacattttgtgtcttgtggcccagctttcctggctgaagctgagtggaccaaggattagtgactgatgaaaaagctgccatctgtaggttagacagcagccatgagatgtcctcgtaaaagagccaggcagaaaaggggcgccctctacaggatgggctctggctgactca

SEQ ID NO: 64608 - DNA, 1796 bp, Homo sapiens
taaaaaaaaaaaatcacggaatctctctttggccttccttttttgtttctcagcagtctaccaagctacgaagaacctgaaaatcggaggtcgtgtaccttattttttctgagagcttaagctgagagcacagcctccccaggagattagcggcagagatccgcgcgctgggagaaaggctagccccagggcgccctaacttccaactccgggagcaatccaaacccggaggccggcgggggaggggacagctgtagggggcggtggggatgggagtggatgctcccgggtcagctctggcactcgccagctgagcccagcgccagtctaggtgagccccacggcggtgagggacgctcgccagacggcccagaggagttagatgacgtcacctccaggaggactcgctttttcattaatgaaaccggccggcgcgggcgcatgcgcggcaggccgccttccctctcgcttccccctcccctttcccagccgcgctctcaatctctagctcgctcgcgctccctctccccgggccgtggaaaggatcccacttccggtggggtgtcatggcggcgtctcggactgtgatggctgtggggagacggcgctagtggggagagcgaccaagaggccccctcccctccccgggtccccttcccctatccccctccccccagcctccttgccaacgccccctttccctctccccctcccgctcggcgctgaccccccatccccacccccgtgggaacactgggagcctgcactccacagaccctctccttgcctcttccctcacctcagcctccgctccccgccctcttcccggcccagggcgccggcccacccttccctccgccgccccccggccgcggggaggacatggccgcgcacaggccggtggaatgggtccaggccgtggtcagccgcttcgacgagcaggtaaccggcccgtggcgggcgggaggtgggagcggagtgggggtggggacagagtaggtgaggggaggtaggagcggccgcctcccccgcggctgcctcaggctctggaggaaaggaagggaagggaagagaagggaaggggggataagtgggggtggccaaggcgggaggtgaggggtaggaggggacagctgggagcttgggcaccctttccctcctaagtcggggggtggggccttgtccctgaccagcctccgaccctccatcccctttatcccagcccttccgcttggaaatggggatgagtgacctgggggcgcctttaggggcgcgccatctggatttaataattacccccttacttttgtttttgagcagaggtgggtaacgtttaggggttctctcttcctcttccctccgtgaccctcctaactggggacgagcgaaccctaaggcctgtcttatataccctcaataggagaacgataacattccgcccctcccccagtttcttcagcttcctctcctggagggggaagagcagaagaaagcaaggaaggcacaggttttcttactttctgctccatcgtctcatcctgccccgagagcttcaagtgcacactcactgcacatctttgtgatgccctacaacgtcgtcccccatatcctgatgacacagactgccttttttttttattgccgtttgcagtggaaaccgtggttctgaaatatcttccccttccttgataattgcagtctcttccccccccccttttttttttgccagcggtctgaggatgtgatgcattctcgagtgagaatgttggggagtaaaggggagaagggtgaaagga

SEQ ID NO: 64609 - DNA, 616 bp, Homo sapiens
ttaaacagtatcatctgcagaacatctgtcttctctggctcttaactctactttctttgtgtcggttttattcccaagcagctgctccctagctgtggctggtaatggtttgtgttctcccagcttaacaatcccagaggaaaaacacctctttcccagttttgtggtttcagcaaaagtggttggtcttactggcctggtgtgagtcacatgccattcctaaggcagtcactatggcaagggggatggaatttcttggttatctaggcctggatcatgtgccccttcctggaatgcagtggtaaagccagccctatccaaattgcatgaactaaaaggagggcatgggggcagggttttcacaaaggaaaattgaattgctgttactagaatgaggcaaaatggatactgggcaggcagaagtagcagaagtcctctacatccagctttaaaaaggcccagaaagatgactctgacacttaccttacaaggtacacgacagtgtgtgtgtgcacctgcacatgtgtatgtgtagactgagaaatgtatgaaagtatacatattaactgttcacattgcttatctcagaagtgtgattggaggagatagaggacca

SEQ ID NO: 64610 - DNA, 1551 bp, Homo sapiens
attattatgattttaaaccaagtaagtgtattaaaggtgtctgcgttttccttagaacatctgtacatatgtttatagggcagtttctacccatggttattttgaagtttaaaaaataattcagtaatacaacatttcaggtatttaatttttggtaaataaagtaaccttagaaaagaagttaaacttcattaatatgaaacttaagaaaaggattacatatgaaagtgatactttttcatactgagtttacaaacttttgtgtgtttgtgtatggttttttaatgtattaaaccagtcaccttgaagtgcataaagtaaattttttgaaggaattttgtcttttggtcagccgttttccatgataactagcatatagggaaattgggttgtattctgctaatgttttcatcatattggccagcacactttaaaaattgcaggactgtgaacaatggtgttgacatacaaggaaattgcaacataaatggcagaagtacaagccagtacatgttcctcacttgttttactgtgctgtgaagatcatttttcccctgaatgaataaaccatgaatagaaccatgcttggtaaatcttatttatatggtacatataataacttcacttaactggaggttaatgtggtcagatctaagaagtaaacaaacaaaaaaaaactacttggcaaccagagtagatattatgaatcggagtactgcagtaatttacaggagtttgtcattgtcctctctctgctcacttgctcattctgtggatttctttggggggtatatagttggtaatagtaatagtaatagtaatagtaatagtaatgtttcgaacttgagcaaactgtgacttattctatttttctaatcttgaccttttgagtactacacttacacaactctttattgatgcttcaaacacctcagtctcaacttgtttaaaattcagaagttagtgttttctccttcctatttttgtatctagatatattcttctcataatctcttggttaattgtatcatcacctagccaaatgtttctccaacactggatttctcattatcttctctttcttatttatcttaagctctccaggcctcttcatgatgattaagtaaaatttaaattctatttagtactcaaatgttcccaaacaaacaatagtcaatttgccattattcaggtcttcaaatacccaccaactttgtatctttgtgcagcctccccaacttgcccaaagtgtaataatagccccctcttatcctaagtttcactttccatagtttcagttacccatggtccaccatggtctgaaaatactcaatggaaaattccagaaataaacataagttggatgtatcatgaggttaatagtagcctagcactgtgtcacagtgctgcattagtcaacccacttcatcttatcacataggcattgtgtcatatcacatcatcacaagaagggcgagtatagtacaataagatattttgagagagatgccatgtgcatgtgcttttattgtagtatattgctataacttc

SEQ ID NO: 64611 - DNA, 1071 bp, Homo sapiens
aataataattactggctaagggcatggagtctggaaccaggcctcttgtgttcagccgtcttctacgaactgtgtgaccttaattctgaatgactttgcctttctatgtctcagtttcctcccctgtaaaatgggaataataatggtatctgcttcccaggtggtggcgaggattaaacaaattcatatgcatagagcgctcagaacagtgcctggcacaaaggaaggctcgctaagcatttgctttgattcccgtgagtaatggctgacgtttattaggcaccttgccttgcagacagcttcacagcggcaagataagccggcttatctcacttgctcagatgaggcagctgagatttcagaaaggcaaatggcttgcttgagtccatctggccttcagaccttgaaattagggaggcgtgggtggctgggcatgggttcagggagtatctggctggtaatcaatcagacagcaacggcaacgaagctttttaacatcatctggtctgagctagaagagatgtgacccaggggactgagtggggggaaaaaatcagctcaaagagaaaggcaacagaaatagaaggggaagcctggtaattgagtggccccaaaaaggaaagatcaatattttacttccagtgaacaaccaatttccctggcagcaagctggggcccagctgtgtgtgcttcagtgacaacagctgcttctgcaatgcctgccaggcctggcgaacccgtctctcctggcctgggagccagagggggagccccagggctgcccagccacgcatggtgtgtgccccagggtgggggcggcccccagctcccctgcctggggcccaggctccccacgaagaccacatggggtggctatttgctatgctccctgcgtgaccttgagcaaacccctccccccgctgggacctcgcttcaccaactgtgaaatgacgggctgggtcagtggaatgtgtctggccgaggaccatctgtggcaaaaggttacctgatgtccaggaaggtcgagactctttgtgatccaaggcgaggggtccccacgtagtgagtaaa

SEQ ID NO: 64612 - DNA, 1067 bp, Homo sapiens
tgcaggttggtgtgtagagctggtggggaggtcactgggcatggtcactggctgtgagtgagtggtgggaagcagtgctggagatgagaagacaagaagagaggagagtcagcttaacctgcaagtctcccagctgcaaagggcactggtgcgcttcaaacctgactctgggcttcattcactggaaaaagcacaaagaaagacattctaagctgtcaagacgtggtaggttcagcaaataatactagttacagtaaaaagatgtgagctgttgctacgcttaagcattcgtcgtgcattctttcatttaacaagccatccctcaaaacccctgtgacacagatacagttggtccttattacttgcacattctgtatttgcaaatttgcctgcttgctgaaattcatttgtaacaccaaaatcaatactcgcagagcctttgtgatcatttgcaaacattctcacggtggtgaagatgtgagttgcccaacgtgcatgttcccagctgaggtcaaacaaggcgacaagcggccttcttgtttcagctctcatactgtaaacaagtgtcctcttcacggtctagttagtgccacgttttctgcatttttgtgtggttttttttttttttggcgattttgctatttgaaatggcccccaaaggctgtctagtgttcctaaatgcaagaaggctgggacgtgccttgtggagaaaataacgactgagtgttagataagctttgcccaggcatgagctacagtgagttcaatgttaatgaatcaacaatatgtattaaatatagtgtctttaaacagagacatgcttaaaacaaggttatgcattgatcgtttgatgaaaatgttgtgatcagaggctcacaggaattgaaccagtatttcccctaggggcaatggttcagtattcacgattctgtgtttgtagtgacttcatagagcataactactgcaaataatgagaatcgactgaacttttttttttttttttttttttttttttttgatacggtgtcctcctctgtcacccaggctggagtgcagtggtgcaatct

SEQ ID NO: 64613 - DNA, 1403 bp, Homo sapiens
ctcattagggggtggaggcggcggcggaccgtgtggggcggggtgcgcagtgtgagccggggagcgccggccggaatctcacagtgcggtgacaaaaaaccgtgagggtggcgcagaacgggcaagagactacagcgcctacctggcaggggcgcgagctcacacgccgactcctggagtcccagccagggctgccctgagctgggcgcgcccaggcgagctccacctccggaggcggggccggccgcgcggccattggtcggcgccctggagccacctgcccctaccttgggggcggggttacctgggccccgccccgcggctcgggttccggggccgcgtccctgtcctccgcccccgcccccgccccgccccggcgcgaggccccgcccccgagtcccggggcccaggcgcctcgtgatgtcaccgcagcttgatacaaagagcccttcggcccacgcgggtctcccggcaacgggcgggggcggggccgcgccttccactggtgcccagaagtgcgagcggcagcggcgcggccgcgattgttcctgcgcttcggggctgcccgccgcgtccccgcgcgccgccgacccgcgcccgctggcttccgcgcctctgccggggagcggcccgcggatgcgcaccccgccagctctcgggagccaggtaagcggcggccccggggctggcgctcgcagggctccggcggcgcgcacctggctcggcccggcccgcggccccgggaagttggcggagagcggacttggcctgggaggtcgtgttacctgagccatctcgttcggccgcgagtagaagccgctgccaggtgcgcgggtggcggctccttccccagcgcagttccaggaagtgcttttagtggactaggaagggggctcgtctgctggggcgcctccctggggacccgacggcgggccccacctccggccgcagcgcccctgccctcctgcccttgcgggatcggcgtggtacccagcgccgtacccttgggccgggtccccgagggggctgagcgccgcgaagtttttctgtagctcttggcggctgcacagagcctgtttcctggcttcccccgtccctctgggatggtggaggtggggagtcctcggggccagcccaggtcgtggtgtggggccggggccctgcctctccccagccgagaagctgcagtggtgggaggtgtgttgtggcccttgaggcggccggtctggcccggtggtgggagctgttggcacagccgcttctctgtgcgggcgacaagtgtctccaaggtcctggcggcgcagtctctggagagcgtgtctgtgctgtggggaactgggttccgacacagccccgcaccctactcctcgcccatgcaaactctccagtgccttctctttccc

SEQ ID NO: 64614 - DNA, 801 bp, Homo sapiens
tggctttcggggactgttgattatgttcccagggaacattacacacgggacacttccctgccttcaaggtgtttgcaagctcaggcagtctgaatactgggtctgctctgggcctgcccagctcttctaagttgattgcaagttgcctgcagttgtctttgaggtccctgtcacttcacaggggagagtgtcgcctggcggggtgagggaagccgctagggttcttcactgcagaaggcagcaccccttgggcaaatgcgtagtggagaacagcttcggaatttgaagggggggcctggacttaggcgaagggggtggagtaaatgactaaggccagtagaagagataagactgggccggaggcgaggggcgggactagccaggccaggtgagccagctggaaggcatgacctttgccctaagggaggtctgtaggagagactgcctggagcctgccctcggaagggacttttaggcaagtgggggaggaaaagcagaagaaattagagggcccattgggttctaagccacctcctttggggttccaggggcagcctgcactcggaaggctctgggctgcagcttgagatactccaccggccctcactctccctcccgaccatctgtgccacttctaaagcatgctagtgccttcctagccccttcccctcctggtaggcaggctgcttcagacccaaggttttctctttggccgttcacctggggcccttgcaactccctccttcatctgtacccgtaggtatctggcagtccccgatctgggcagcccgttatgctgag

SEQ ID NO: 64615 - DNA, 698 bp, Homo sapiens
ggagatctttgtggcttcaggtaggtgatgggggactgaaagctaagaggaaaagcctcccctgacctgcagcttctctttgagctggcatgcctggaattcttggggctggctgctgggtttgttttccagatgtggaagcaatttaagttctgttttcttaatccccaacagtttgcctccgaagtccacattctcatttgaaaatcaaggccgttggctctgtttgcagggcagagggtaggctagatagcctcttcaaaccctttttgtttaggaaatgggcttactggggcactcagatctgggacccagggcattcttgggacagtcacaccccatccaggacttggttaaaaggtgagttcactttctctgtgggttttccttggagatgattcactgagctaaattcagctgcaccttggttacaaaccagctctagaccgctgtggagtggcgggggtggggctcgggtttgggccatgtcacaggccagctggcgtccctctgagcagggtgcccacgtgtcccgggggcagtagcggccctccttcccacactgaccacaacagagggaggaaaatgctccagatgtcaggtagccagaaatactgtctggcacggagaaactggtaatatcttgttcagttactgagcgctgctggtcacagaggcagcctgacccaggataaaag

SEQ ID NO: 64616 - DNA, 2026 bp, Homo sapiens
gctacttgggaggctgaggcaggagaattgcttggatccgggaggtggaggttggagtgagccgagatcgtgccattgcactccagcctgggcagagcaagactctgtctccagaaaaaaaaatctgcacacaaataaggcttaatttggcagtggtggtggcagggtggctgtccccagcgagcatgagccctgccctgagataagggcttctcttcccccacccatgcagactcacctctctcctggaacagatgctgtggccacaggccaaacaagaacagggggacctaattcccccctttatttaatttaaagaaaataaaagatttaccaaaaaagtatacagtatcctaataggcactcgtgttcccacctctgcctcttccatagactagaaacaaaacaatgccaattaagttaaagtcccctttgtcccccatccccagtcccaggctccctctctgtttttccagtaaattttcacgtgtgtttctgggctctgcctaagctgacaatcagtcctttgaatccgcatggttccttttcatcgtgacctactgttccgcggtatgagagaccacatgattctgccattcgggtcgccatgtcatccctgggggcctctcctagcgtgcccacctcggctcctccggggcaaggtcatccaggctacacagatgctcagggtcctccttgccaggggctgcaaggggagcgagctgaacccgaggaaggtcgtgcttcgtgcagggccagcgagggaaggtcacctcccggcgccccgagcctggccccatgccccaggctccccgcgtcttcctcggagcgctggccccgtcccagtccccgcccccggccgcgccgcccttcttggcttgcgccctggtccccaccaaccccgcccgagcccccacggaccctgcccggcccgacggaaatgacccggccagggtcacacacggcccctgcccgctccgctgcggccatctccgcttccgcttccgcttccgccgaggcttctttccgactcaggcacggctctgtgccgtagctttcgaccccaccgccaggccgctgcccgctctaggcgtgggctgggtctcggggcatcgctcgcggcgggcgcggggcgagagaggagggaggagggccgggcttctcaagacgccggttcgggtcccgcaggcggcgggcgcgggacctgcccctgaccgggcgggagcggtgctcgcagagtcaagcccgggcttgcgggtggggcttgcgggggcgggaccgggggcggggccgaggccgcagctcccagccggtaccacctcccctccactgagagattccaccggtccctgggctgtcaggcgcggtggccaagtggtaaggcgtcggtctcgtaaaccgaagatcgcgggttcgaaccccgtccgtgcctgagacccgaggtagggctttggctgtggggaagtcgggttttctccacgtacgccgtcccttctacgtggcattttttccattttcggattctgctcagtcgccctccagttcgtctcctgccccgggctccgcggtcggcgggggccggtgcacctgggcttcgagactccagggtccaccttacaggtgagctcggcccccgccgcgccgcgtgcgccctcgccgccggtccccgcgtctcctttcccccagccgcatttcgcagagccggagtcgtcttcactgcttcgccaatggggacactaaggtccaggtggcccgcggggactcgggtcccgcccgatttgcgagtgttatggcggggcaactttccagagagggtgcctgagtttcccgaacggtggtttctggattgttctttggaaggtgaattatgcaggccatgcgcactgcctgtcttcctgtctacaaagcaaaccagattgttcaactggtgggtgcttcttttccagtcctggtgaactgatcctttgaatctgcccccagccagttatgacactccccacatcatctctaggataaacagtctgat

SEQ ID NO: 64617 - DNA, 4609 bp, Homo sapiens
ttactcagcctcaaagcttttctgtcccactccttttccacagtctccctaaaggaactcagcttttcaaacagcacagccaggaagagaggttgtctgcaggccgctggaactgggagttgaaagcacgaaattttaacatctcaagaaagtatgctgcccggtactatgcttggcactttaatttataatctttgccaccaaagccctgccagaagtgcccggcggctccaggttctagatggggaagttgaggccggcggcaggcgcgctccaccgggcgggggcgcggcccgggagcggagcggccggcagggggctccccgcgccggtctccgcgggaggaagcgctggcagctgctcggacgggtcaaaggaggaaaagggaaaattactgggctccggggcgggaaggactgcgtgactgggaggaaggcactccagactgtcgagtagggccgcccgcgtcgggaccccatccccggggcagtgcgggccacccgggacctgggaacccgggccaccccccaccgccgtcagggtctctcccgccggtgccgcaggctggagcgggcgtcgcggccgggggcggtgccgcctaggggcgggcgaagggcgggccggggcggggcgccgtccgctcggctccgggaggcggtgcgggcgggcgctggccgcgtccgcccgccgggagccgcggggcgcgcagccttcctgatgtgtcaccagcacgtggagccaggtcgggccgcggcgagcaagccgacccccccaactttcgaggggtctcgccgccccgctcctctcccggcttcgtcgggctcgctctcctagcggagggggcggcggcggcccccaggtcccgggcaggtcgagcgaggccacggcccccggccaggagttcgaggggctcccggaacgtcggggcgcgggccccggctagcggctatggcccccgtgcccaggcagcggtgcgggctcggccttgcgggagggtgcggcctgctgcgagaggtcggccacggctcctgccccgcgccccgcgcccctcgcccgccgagctgagcgcaggtaaccgaggcagagcggagctgggcctcgcaggcgcggcgtgggagcgtggcgaagtttctcggcgcataactcttgcgccccactcgggagtggggctgcggtggggaggctttggtccccgcacctccccctcccccagcgctgtccctcggcctgagccgaggcggcccgggggtggcgtggaggccgccgagcgtcgtgtaacccttggagggctgggtttggagcccgcgacccgaggtcgggcggggcggtggactttcccggggaacgccgcctgagggacacccagagcttcggcggagcggagcgcggtgcacagagccggcgaccggacccagccccgggaagcccgtcggggacgcaccccgaactccgaggatgggagctgagggctgggtctttgcgggcgagatgagggtgtcggatcaactggcctacaaagtcccagttctcggcccccgggaccagcgtcttctccccggtcctcgccccaggccggcttcctcccgggctggcgtgcgctccggccaggctgcctctcaggtccacgctggagaaggagtggtgaggtgcgctcgccccggctgcgtgcggtgattcgggaaatccccgcacttcgctggagaaatagcgacgctctcggaagtgtgagtcggtcactgcttggggtccgtaccctttgggcagacgtggaccgcgccccggcgacctgggttgagtggacagacgggacccggcttacccatgggccaagccctgccacttaccgaggcctgccctgctgtgctttccagggcggcaaccttgagcttgggggtggggagaacggggcctgacttctagaattgcccctggggaggtgggaagcggaggtttggcccggtggcgcaggaagcccctgttcctctcccaaacaccatttcattaaagatggatctttgtggatgtgttcccaatggccggtcttttgttccctgaccgatgcaacataatgtggacccactctagtcctcttcaagttttttgctggaattccttaaactctcctttaaagtctcttatctattcctctagtgcgtttgcttctactccccgaaaacaaaaacccaccaacccctgaaacctcgggtttgcctggtgttggaactttggttatttgtcctttgtttgtgttgtgtttttggctcttggccgtggaaaaacatctggggacatgcagtgaggtgacttgaactgtgtgaagaactggttgacaaaatagggaacgtctggtccctgtcttacttggctttggaaaacaggagaggtttttaggagctgggaggagggagggtgagagggaggaaccatcacggccaggttggcccaccccttgccaggtcgtgtaaaaacccattcaagaggcattttcccacaggctccctgcctctgcaggccacgtgtagagtagtcctttgcaggcgtcctgcccatactgttgtccctgttttgggggcatgtgggagccaacacaggggagtcaggtgtgtggtaggcagtcaggtgtgttttggggtcagggaggcaggtttgggcctgggaggccaggaagggacataccccgtcctgcagttggcctgacttttgtccatgttagctttgtcctggaggcttacccagtggaacatgcagatgtcagaattatgggagaaaagagtttggccatggggtagatttctgaacatcttgacaaattcttagtttggagacaaaattgtctaggagtggaactgatgggagcttcaactggagacctcgcccctaattaagaaaaatgctctttggagcgctgaatcagcttgggaaaacaaagttctccctttgaaccaatgcctctcccagccctggggatcagtgtctaaaagtaaatgaagtggaaatctccagaatattgcgtggtcataaaacatcccagaagtgggctggagcaatgagatgccgaaaagcaggcctggctggctgccctgcacccaccctggaggggaccggctggggaaggtggactcacagggctgggaatgaggcctgaggagcactgtggtgcccccggcagtttccctcaggctgtgccccattctttctgggtctggccagggctttagagatttttaggaaatgacttggtgcttcgtttctttgggggaagtgagtgattaggtttttccttcttgggtttttttcctttgcaaaatgtgattgaatcagctatgcagtaggctgggctagcctggcctcctgcaactgatttatgcttccgtgtaagccgttgtattgaggaattgtgttgtagtggagagctttttgattttgctctctcttgaattcatagtttcctggagcagaggcctccttcctggctcctacccccacccccagtccctctttcaaagatgggtacctcaaggtttcaaggggaagtagcttgaacatagactgatttaccctggagccttcttcaggaagcagctaaatgcaaggtagaaagctggtaggagggggagggttttagcgagacctgcagggagactgacggaagactcctaaaaatccagctggactccctgtcctgcctactgggaagaaacttgcattccctcaactcttaggtaaattgcagactggtgaataattaaccttgcctttttggctttttttttttttttttgaaaaagaaaaatcccaacctatgaaagattgaagatcagtttttgtccagcaggatcggaatgacaaaggaagtattgggagaagccagtcctctcatcttcactcctagcaactctggaagttctgaacctcagaagaaatccctccggggttttgttggtggccatccctgccgagcccctggctgcttccctgggtttcctttggttcctctttgcccaaagctgagctgtctgaatggtgaggattctctcctccactttgtctagcaacagcttggcccttgatactgcaggaggagttaattccgctgctgggccagtctacagccctctgcgcgggctggtaaatatttggccagtctcagttctttttacacaaaagaacagcactcctaatctgtgataagtccctgaaagagagttgtctcagaagcaagggatcattttggtttccgtgaagggtttttttcttgaagcagcccagtgtgaaggccatggaggcgcactttgcgtccagatgtgcttgggttccaactgcggctcaccagctgcatggctttggcccagtgacttctctgtgccccagtttcttctcttgcgggatgagggttatgatacctaccttgtaagtgtgtggcgaagcttacgaaagatgtatgtcagggtgtctggcacaaaccagtagatctccgactggtagtctttgtcccctggctcttttttttttaataaagattttcaaattattattttatttctttttcttttctttcttttttttttctgggacagattctcactctattgcccatgttggagtgcag

SEQ ID NO: 64618 - DNA, 1635 bp, Homo sapiens
gattcgctggcactgagtccttaaaggaaccctgggtagcagatgtggccgccttgtacatctgctcagcagtgcatcactcctaaaggcccaaagactcgtccggtcctgacactgagcacgtttcagaaaaggtcccaggaaagacatttgaattgccacagctgctcaaggcttgctccctcactcatgctgtgggcaaactaaacatcctctagtgggaccaggcaagcaggggacaaaatggaatgggggtgcgggggaggagaaaataatttgatattccaaaaaatgctgcagagtaatcattttgggggtgaaaatcagaatttcttgggacttagacttttttatggctcagtggtgtttttctttagaattttggactggaggtagggatagaccataatcttttcagcacccaagagccttcagcaggcctcactggctctgggcagggggcagggcttacaggacccagagcaggtgacatcttacccactgtggatacttcctccctcctccctttggcacggtctgaggaattttgaaatcaccccatagccagaccccttgcatttgctgcccaggagaaccgggcagggaggtgccatgcggaaagtcccgctgcctgattttcctctgagctcatcactgcagcctgagagcccccttctctgtcaagtgggtgactgaactgaatacaccagaccccccttggcattcttctaagatcctaaggaggaggagctgaggaaggcacggggtggagcctggggctgtggtttggaggatgggagggctgggggagggattcagagattgcagctgggaaatttggatcggcctatgaagactttgtggttcattctcatgaaactcgcttcctctcactggatttctgccctgggggatgtggggttcaagtgaaaacactggcttttccttcttggtgactgaggcttaaattctggtctcccaagcaaatatttaagaaataactctcttttccctccttgtccattgtaaaacaaaccctctttttcgcccatgtctcccaccctcctgaaaagaattcggttgtcttgctgcttactagctggtagcacctggctttccagcaggctggttgaaaacagaaaatgcttctctgcttaagacagggaaagggcgtgggctttggcatcagaaacctggctttcctgtagactagctgtgtcgggcctggggcgtcttcccaagactcaatttccctgtctgtgataatacgtgcctacttctcagggcattataaggactgaacaagaatgtctgtgtgaaacaccaggcgcatggtcgggggtggtacatggtagttcttcccgggtgacaccatattcatcccagggtccatgggacaatgaggtcaaagaaggaccagctgaggctggtgtgcctgcttgctggcttagtatctggggagaaaacactggaagaaaagcaaatccttgctggtggggtgtgggggtgagtttgtgtgggtcctgcctcttcagtgagacatgtctaccacttgggaggggcgtagggtggaggtggggggccaggagtcacagccttttccgggggttgggttcatgcggccgccacttaagc

SEQ ID NO: 64619 - DNA, 1538 bp, Homo sapiens
acatgacatgagagccttcagaagtaagacccagagaaccagggaaaactatttttatgcttagattggaggaagaagggacaaccatctaggaatgtgataggacaaaaagggtacgacctaatgtaatagacagaggggaccacccagcaaggcctgtctattcagatgctttttggcctcactgtgcagcatgtctggggcgtatggggcaggacccctttgggatgaggggtgagaagggagagagtgacctttgtagatactatgtcttgctttgggggagaggagttctacttcctatgacccaccttggggaagaggaattctggtttctgtgcctggctgctggggagaaagaggggcaagagacagaagggtggaagaaggtcagagagaacttgctttctcctttagttcaaagtgctcagtgtaccaaagcgccaggctctggggtattgtgttctcagccccatggcgtaaagcctgttacccggtcttcagagaaaaacagtgtcctcagaaaaaaagaaaatgacaaggaacacttctaaagattttctctcttgtcatctaaagaacattttctcccttcagagtgagaagtgacccagggggaaaaaccagaaagtgaaactaacttgacaggccagtggcagcggcagcccctggtgcctgccctctgcagtcctgtgtcggcccaggccacgcgtgcccagcatggtcgatatttgtcagacggatagcacgtgtccagccaagggccagagaaaatgcccccagaggatgcttgcatcctttccacaaagagttgtggtcagcccactggggtctccaccggggtggcagggctgcagatgctggtgtgtgcaggtggcagttctcggcctcctcctcattgcctccctgtgaggggcagtcagccctgactacatatagccctggagcttgcgggcagctttcagctcgttgggaaggtgtgctgggcctgcgacattgaccggacagttcttccaggcatgagagggatgccctgcccaggtcgctgtcacaggcacaccccctcccaccagccaccctcttgccttcttaccccaagaccatgttgtcaggcaggccaaaagcatttcccaatcatggagtcagatgtgtcccagaaatctgccctgtgcccaggagaggtcgaaatcgccagtggaatcaagaacctctttcccaatttggggtttagaaatctctggcaatgaggaaatttctggtagtcatttgtaagagttactctattaagaaatagagatagagggtatgacatttcagaatgctaaaattttgttgcattagaaagggggaaaatccgtttacttcccaaacatctggtgggagttatcaccaaaatatattttcagatatcctctaatgcagaaaaactgtattttataggacgtggtttatctgtttgtagataatgtgattaaaatacttctgcagtgtcgctactatcttaaggtgactctttttaaccttcatactgtaggctt

SEQ ID NO: 64620 - DNA, 1478 bp, Homo sapiens
ctttggccagagtttgctgatgccttgtcaaaacgataaatgcatccttaaacatactgttttcttccacagactttagccctgccatctgcctgcctggtctgcttgtcttgttccccacccctggccaagtggagttgccttaaagagataaaagttgtgcctctagtgtcagtacccaccccttgcttggctcctccagatggtctggaaacatagatggaaagcaggcgctgccctcaccgacctggcctcggtagcaggagtgtgtttttgtgtggacaactgcagttgggcccaggtccagccttgctgacggctactcacttgggcctccacccactgatgaattttgggggcagagccaagccccaagatatgttggctggcagcctggggccaggcagggctgctgttgtgggagcccagtcccaggtgggtttgtgaggtgtacggggagtgaggggttgagaatgagtgttttcagagctgatgtgttcttagcaaaagaatttctggcagagagaggttgattatcgtaaacccagcggctctgatggatgagtttcaggtctcctggcttgttcattcccagcctcggaatgtccagcaagggcggggccagcctgcgaggccaagacctcttttcactgcatcagaagtttaaatccagttgagccctctgacttgcacctctgtagtggtctggcctggggaagactggctggggtggacagaaggagggcgggaccctcagagcccactcttctagtctgtgtgctggaatcacccctgtcctccccaacctccaaccccgtcaagctgcaccaaggatgtttggcctctgactcaaagaaggcctggcctttccaggctgcagggccagatcctctcagccagcccctgcagcaggccccagcatcccagagaggcagcgggtccctgtatgtgctcagcaccttctctctgtaggcggtttctctcccaagacatttgagacttttgccctctgcctggtcaccttctttcctagccaggatagggctggtggatggttttgtttttttttttccttaaagccaattccaaacaagggctgatatttagttggcctttctttttcttctctcatggttttgtgggttgctggcactttagggactctgttcagagtggagcctccttactctacagctcgctggtaagccctggtggcccatcagcccacagaagggggcactcactcaggtgagtatgaatattcacactccccaggataaatatagactcgaaataatagtttctagtcagtttgggtcagattttcccactcagtgacaaaaacaactttcattatccagagttttgtttgagttgagaattttgaataaagggtggtgggtctgcatcaaccacagttacaatatgcaagagctgggtcgtgacttcatccctttggtcttggtgggacatcaccc

SEQ ID NO: 64621 - DNA, 2123 bp, Homo sapiens
agggtttcaccatgttggccaggctggtctcaaactcctggcctcaagtgatctgcccgcctcagcctcccaaagtgctgggatgacaggcatgagccaccacgcccagtgcctggccatttaaaaaattttttttgtagagacgaggtctcactatgttgcccaggctggtcttgaagtcctgggctcaagcttcccaaaatgctgggattataggcatgagccaccacacctgaccagttattatttttttttttcttatgttcctcaggtgagtctcttaagcaatcagaggagaactgttgggttaaatgcccacaagctagagatggaagaggtttcctccagctttgccttcagagcccgatcaagggatgtgaccatttgcagttggccaactttcatttccgttactgtctctgctgctcagtcatcttttgatcctcattttgcaagcagaaaactgaggctaaggggatcgggggacttatctgaagacacagaatatggcagagatgagatgtaaaatacacaacttctgaccctccagattagtgctgtttcagtagtactagtcattagtattcatgatgagcatatggatcataagaagcatattcttgtgcttaataataattggacacttggtcatcacagtatgctgaggcgtgggtaggggctgccccagcagggtgagtcatcatcccctagtttcccaatgctctgtgtcccctgccagccagcctggacccacagctgcccgcagcctgccctgttgcactaatcccagctgtgggcacggtgagatttggccccattttacacatgaggaacaggctcagaacactcaagaggcttggcccatgtcacccagctctccttgcctggacagaggcatctaggaaggaacacagccctgcatggggcttgcttgtctgagtcctcagggacagagctctactgggggtgcccaggtctctagcagactgtccctgcccctctctccttcctgcccagctcagctccagaggcctggcctgcgggcaggctgggcaggcagccagcgcagggagctaacgatgggtgcattgtcggctccaggaagtggtcagctgttccctggcaggtctgcagagccggaggaccagcctgccttgctcgtggagggtagagatagaatctgggagctcagaacaccattttcccggagcccagtggctctgggccagccctcgggcttcctttggaagggagggccccgtgtactcctccgctccttccttgcttggcattggccctctccctcctcagtctggctctcaccgtcccccggcccagcactttgcagcagagtgtacactcttggcagcgatgtccattaaacctgcttcccagaaagcagcatggctgtacaggcagattcagccagcaccttagtgggagatggggcagtgggcatcagctcaggcttttcttgcccaggttccctggggagctgggttggaagatagccctaagctgccttggcttcctgcttcctggatcagaagtgccctcagctcagtcagcagcctagccgctggacaaggctgagacaagcgctttgacctcctggagttgggctgggacgagcctttgcctgggagtctgatcaaggcggtcactgagctgagaacctggggtaaagctccctgctgagcctgttgcctcatttgtttgatgggtgccatagttccctgtaggaatgtgggtactttctaggcttcttccaaatagatacaagaaattgtggctgcctttcccttcccggccaggagtacacttcagcagagaactcagtgatgcctggcatggggaagatgcccagtgaatggtggttgccccacacggctcaggaaatgaagtttgggtcacagcctgaggatggtgccttccatccttgaccctgcaaggacaacctttcctgacagtctcctccctgggtgaagtattgggacagtggctctggactggaaaactgaagctttacctctttgctctggattcccatcaggtctagattgctgaggcccagcgcccacagaggcatcttcccctctagggggtttgtcctataagcccgg

SEQ ID NO: 64622 - DNA, 2222 bp, Homo sapiens
tgtgtgccccacacatgcaggctgctcattcattcatttaatacgtgccagttgcacagggaaaggtgaacacatcctgacctggtcctcgtcctcatggagcgtggaatccagtggatccagtggaggagaaagaaacaagaaaacaaaataaaacacatcccaaaagctagagtgcgaggcagctagggcgggagtggggaataatgagggccggtggggagagcctgctggataggtgggtgtctgatggccctctcagagcagagcatggatggtgggcatctgctgagcctggaccacccaactccctttcctcacaggcctttagtttcttttggggaggaactgcctcttctctgctggacagagtctaccaggctccctctgccctgccctgccatagggtggacatgtgacccacctagccagtaagattgtccactcctctaattcatgggcagaaggacaaggacagtcagagtctcccggctgcctcctgccacgcattcctgctccccacccccaatctatgcgcttgcccttcccgccttttggccctcaggagctgtcttggttcctgcccttgcccaggcctgtttttccagccttcccaccaattttctgagctcctgtgggtgtgcctatcttgtgtgggtttggttttggcttttaaatgagcaaaggcagaatgagggtgccatgagcacagatgaggcttttgggaaacgccccccttccattgcactgttggaagggagtgtagaggctgctgtgtttcctggggccggccaccttgacaccgtgcctgcatgcacgcagccccccagcacgcttcttcaccagccagcctgagtgcagggccctggccagccttgccgggaggaaatgccagccccgtttctttaagcctcagtcagcctccccagggactcttgactgccctaatgcttcctcctaggccttgtcagtggtgcaggcctggtctgcccagagcagcagggcctccggcaggggcctgtgactcagggctcagtcaggcggaggcaggatgtcagtgccattcactgggccacgaggaatctcactcttctatttataggcagcgcaactgctggcccagcctggccagaggaagtggctgccactgccagcgagtcaggagctacgatgagggaggcatggcgctgctccctctgcctgctgggggggatttccaggttaggaccagctcttccactgcagaatggtcaaggctgggacaggccggaacaatgagctcatgtggcttcatgacccatcaactgagcaacagggtggtggacatggggtggcttggtctgtcatgagcctagaagggagggcaggatggggacctccctgaccctgcagggggaagaggtaaggtaaaggcagtgcccagagcctggcatcctgaagtttggccccagacaactcaccccactcttcctgcattggggtcccaacttcatctgtcagagacccctgtccccacctgccatcttgccccacaccaagacggctgcttgtgcttaggaagctaacactggatacctactgagaggtgagccctgtcacatccattcctgcatccagtctcacaacagctacacaacataagcccatttagcaaaagtcaaaactgaggtcgagagtggttaaggcacttgcctggttttgggtgtgtgcacaaatgtgccctctatgcataagtgttgtaaaatgtgatctaccttcccatcacagaggagctgtgaggggaactgagatggctttggccattgtgaatctgttgccatctctgttggagtgcccgtctacatggttgacctctgtcctcagttgagtgtgcatgaagcatgaaggattcttgtgtttgtttcctgccctggacaaggtgtccctggaggtcaggaagggagtcttgctcctcctgtgaccctagaccccagcttggatggagcttggcaccaagcaagtgctcagtagactacctaccgcatgggcccgcagagtctccccatcctcagacgtggcctcttgcaggcagcagccctactggatgctctgctgcattgggtctgcacaaggggcaggtactcaaagaatgaggatggggggacacttcttcccgagaggctgcctgacggggaaccccaggccttcagtcctcatgtcaggtgagaaccaatttcttgaac

SEQ ID NO: 64623 - DNA, 1650 bp, Homo sapiens
ctgaccctgaggaagctgggagcacctggtgagcctttactgaaaggcccaggccattgttccaaagccaggcagaatgggagggaagaaggaggtgggggaggcaattggggttgatacaagatgaggtctccctgcctggagctccagagggccccttctggcctcttctgcagtccttggctcatccccttcacctcctcctacaggaagccttccctacctccccaaccaaagttctcacccttccttcctaccccaccacatctcttcctaaggtaattggcaaaccccagggcccttcctgagtcttgcaaagtttgcaggtctggcagtctctacatgtcagtggctttccttttgtgggcaggaccccctgagggggagcacaggagggaacgtggtaggggaggggttggctctgaagggctcccctgaggaagggaggatgagtaggagtacagtcagtgtgagcagaaaaggggtcccaagggatgaagatctcaaggaggggaggtaaagcttcgagaatgtgcaaggagctccagagggtggaggggggtaaagcgtggagtcgcagggtgtggggggaagtattccaaggcaggagatcgggggcagatctcgagggcctcagggcaggccaagctttcttctgagcgcaaaattagagtcagtcaagggtctcaggcagggtgctgctttgcagggtgctgctttgcaggctggggtaaaggtggaggagatagggtggcagcaggagggccagctgaggatggggcggtcttcctgctgagagatgacagcagctgaacttggggaggtgggggcagtggagtaaatgggaggctgggagagaactgagaactctgatgtggccttgatgccccctccccaaggcccacccatactggtgaggattggggtgaccggtgtgaggagagggagagcccctgatgaggccagagtccaggcccagagagaccccgtccgctgtgccacacatgacatcatttttgtgtacttaacacaaggtaaacagggctggaaaaacccaagtactcattatctgacttagtggctgctgctggctccttaacaactggtttcctgggattctgcagttctcctgcagaacggacccagacagaggggcttccctccggtgcacagagaatccttgcccagtccctgtgctgggggctcgctgacctcttccttctgggaggctttgagtcgttccctaccagttcatggggctgggcctgctgagggccaggcgccagggtgggcgttgtgggagcatgacggagagcaaagcccaaatgtggtcaggggggtttggttctagtgagcaggtgggtttgagaccccaggagcacaggagggcagtgggagcccagcagggaggttgtggtaagcacccaagcatgagctggccgagtcctggaatcccagagggcacctaggaggttatccactcttttcttttttttcttttttctgaggcagagtgtcactctgtcacccagggtggagtgcagtggcacaatctcagctcacggcaacctccgcctccaggttcaggtgattctcctgcctcagcctctcgagtagctgagattacaaacgtacaccagcacacctagc

SEQ ID NO: 64624 - DNA, 1107 bp, Homo sapiens
cctggctaatttttgtacttttagtagaggcacggtttcaccatcttggccaggctggtctcgaactcctgacctcaagagattcgctggcctcagcctcccaaagtactgggttacaggtgtgagctgccatgcccagccaagaaaaactttagatgaattaattttaacagcgtttaatggagcaaagaacagtttgtgaattgggcagccctcagaaccagaaggggttcagagaactccgcaacgaggtccgggagtatttatgtacacaaaatggaaatgagatacagaaacagcttgactggttacagctctgagttcaccttgtttgaacgtggtttgatctgttggcatcctgagattggctgaagcttggctgctgtgattggccgagactctgacaatcgttacacaaaatatttactcataagttaggattttggtttgtttacatactgttaggttgcagttaattatgggctcaaggtacagagaaatcctcaggctaaatttagtttaatttgacatatcactgcctctgaatttcagcaaagaatttgccaagtcactcagggtgtcaggcctctgagcccaagctaagccatcatatcctctgtgaccagatggcctgaagcaactgaagatccacaaaataagtgaaaatagcctgaactgatggcattccaccattgtgatttgttcctgccccaccctaactgatacaatatattctcccccacccttaagaaggtactttgtaatattctccccacccttgagaatgtcctttgtacgcctatcccaaacctgtaagaactaatgataatcccaccaccctttgctgactcctttttcggactcagcccacctgcacccagttgaaataaacagccttgttgctcacaaaaagcctgtttggtggactcttcacacagatgcgcatgacacagggtatctttacaggcaaatggaaaagtgtgactggttaatagtaaaatcatgtgaggtcaagggaggcagaacaccttcaaagaggaatgattaaggaattagtgtaaactttcaaagcgggtgtttagtggtgtgccctcaaatattcagttc

SEQ ID NO: 64625 - DNA, 1077 bp, Homo sapiens
cattttacaagacacaaaagcacagagaggttaagacaattggccaaagttaaccagcaagccaatgcaaaggtaaaaagttaaatcatggcctttctaggctggctgcagtgactcatgcctgtaatcccagcactttgggaggccaaggcaggcggatcacttgaggtcaggagtttgagaccagcctggccaacatggcaaaaccctgtctctactaaaaattcagaaaagtagttggacgtggtggttcacgcctgtaatctcagttactcaggaggctgagtcatgagaattgcttgaaccagggaggcaaaggttgcaatgaggtaagattgtgtcactgcattccagcctggagcaagactctgtctcaaaaacaacaatcatggtctttcttgatcccaaacccagcagctggccattatcacattctccccctcactgctgaaccacatcaccatcagctctgttactcactggtcacaggaacttgtgtgagtcccttcacctctctgaacctccacatccacagttgtaaaataggcaaactactgtaccaggctgtttgttcattcgacagtcattgactgaacccagagccatacttacggtgaaactattaaagcttcctgttcagggcctctccttcacacagggaagggcctagtaagcatctcacttttcttaaaaaaagttcccagccccacaaaacctgggcctgcccctgctaactgtggtgtgtcagcatcatgccaagctctggatgtaggacaagataggaacaaaacggccaggggagttccccggcctggtgcggtggctcacacctgtaatcccagcatgctgggaggccaagatgagaggatcccttgagtccaggagtttgagaccagccttggcaacatggcaaaaccttatctctacaaaaaacacaaaagttagccgggcatggtggcacatgcctatagtcccagttacacaggaagctgagatgggaggatcactcgagcccaggaggtcgaggctgcagtgagccatgatcacaccactgcactccaacctgggtgagagagt

SEQ ID NO: 64626 - DNA, 2677 bp, Homo sapiens
tttgggaggctgaggcgggcagatcacgaggtcaggagatcgagaccatcctggctaacacggtgaaaccccgtctctactaaaaatacaaaaaaaaaaaaaaaaaagtatccaggcatggtggcacgtgcctgtggtcccagcaactcggggagaaaagcttgaacctggaaggcagaggttgcaatgagccaagatcgcgccactgcactccagcctgggcaacagagcaaaactctatctcaaaaaaaaaagaaaatacaaaaaattagcgaagtgtggtggcagctgcctgtagttccagctactcacgaggctgaggcaggaggatcacctgggaccagggaggtcaaggctgcactgagccgtcgtcgcactactgcactccagcctgggtgacagagtgagatcctatctcaaaaaaaaaaaaaaagggtggttaaaacgctatattttgttatgtgtgttttaccacgaagaaaattttgaagttaactacaaacaaacaaaaaaagacattggacagctgtgtgacaaacagccatggctgatatcaatcactgttggtgaataagtaaataaaggcattaggcagagacataggatcctcagacccacagtagtaatgaccagtcactgtttaacctttctcagtttactgagcattttcagcgtactttgtacttcctgctatcatagctcacaccacacaggaggactgttgtttacgtaatcacagctcatttgtgtgagtatttagtgtgcctggtgcttccacccattatgtgttactcctcactgcaacctggaggtaggtgttgggtgccggtattgctcagaagcagcaattcatttgttatacttggggaggggaggctctcggaataagtcaacagaaatagagtgtgaagttagcaaattcaaggtaaagatccagaagaaactatagaaaactaaagaaacagagaaaataagagagaaagttcaacatatttattttttgtgaccacaaagtgagaagcctagaatagcctgaaacacagagaaatttaaccaaataggcataggactaaaatgctaaaactaaaaactaaaatggcataatgccctacatctggtagccctggcaacaggcctcccaccttagagtatgatgttataatgagaaaaaaacacgtgcaaataaagtaaatagtcattccacggctgtggagagaattggatttgatgaatgtcaagtcttcgcacatttccaggcccccactaaaggagaatcaatcagcaacagttctattcccattttcagatggaaaatctcagcctcatatgagtgaaggaacattgccatttgctatcaaagacagatcttgatcctatttttttcaaccccaaattccaagcctttggctcatctgaaggtttgggtgggagtgtgaggaggactaaatacagtggacctgtattttaaaaatcaatatagtctggatgcggtagctcacgcctgtaatcccaacaccttgggaggccgaggttgggcggatcacctgaggttggaagttcgagaccagcctgaccaacatggtgaaaccctgtctctactaaaaatacaaaattagccggctgtggtggtgcatgcccataatcccagctacttgggaggctgaggcaggagaatcacctgaacccaagaggtagaggttgcggtgagcccagatctcaccattgtactccagcctgggcaacaagagcaaaactccatctcaaaaataattaatttaatttaattaaaaaatcaatattattttactgagaacaagactgtgtgcctctactccatggaagtaactatggcaggcactgcagattggaacaagatgagcgggaaccccctgtcctcagggcagtggtgtcgccaatgaaatgggcctgatgccatgtttatagcgtgagctgctttcatttctccttccgtcaggggaacaggtttggctaagccagcgattctcagcctgggctgcaccttgttttgtttgtttgtttttgagtccgagtctcactctgtcgcccacgctagagtgcagtggcgtgatcttggctcactgcaagctccgcctcctgagttcacgccattctcctgcctcagcctccggagtagctgggactacagacgcctgccaccacgcccggctaattttttgtatttttagtagagacggggtttcaccttgttagccaggatgctctcgatctcctgacctcgtgatccgcccaccttggcctcccaaaatgctgggattacaggcgtgagccacctcgcctggccgggctgcaccttgttagctcctggtctgacttaagtggtcaggcatgcagccagggcattagtgaatgggcagccaagtgaagcagccccaacctaagctgagataagctcttgggccaactggggcatggaagggaggagggagtgtggggacttttgtatcagggaagtaaatgggccttccaggagaatggccagggctgtggtctctgtggctgtagatacaagccccagggaactgacagaaggaggagcggggagccctgcctctcagcaggcacctgcagaagtcacagccacaacctcaaacatcaggctgctctcagggtgaaaatgcttcccgcagcctaagat

SEQ ID NO: 64627 - DNA, 456 bp, Homo sapiens
gagccactgcacctagtctattttataagcaactcttaaaagctcctgcagtgtgtgagttacagcagagacaactagtttcatctatttattttatgtgtttagcacttaattcacatgagcatacattgcaagacactcagctgtaacacatttttactatgctatgttcttacacattaaccagatttcattgattactcacaaccaacatttgtgagagcagctgtcttgtttccaagaattcctctctttctcaacattttctgtccatctttgctattgtgaggtttggtttccacattgaaatctcttttatctccaatctttcactagtatttcttctgtagtttttcagagttcttacataccttttctaccatttttgtacttctttttttgttttgttttgttttgttttttgagacagagtctcactctgtcacccaggctgaa

SEQ ID NO: 64628 - DNA, 1743 bp, Homo sapiens
ccagtctgggcaacagagaaagactctgtctcaaaaaaaaaaaaaaagaaaaagaattcagctgagagaccgtctcctttgaggggtctcctttatcccccaacccttctaggttcccccacaccccgggcttaccctctccatggttatggatggtgttgtgatgacctgtgtgccattgcctccccactccactccgagctccatgaaagcaggaactacagcctctacctcttcctcctcagtacacagcatatggcaggtgcccagaaatacgttaatgaataaagatcacacctacactaaattcccttgcttttctaaaactaagttcatcctagactctcgctgaatctaaatgtttcccacctcagtacggcaagcatacaaggctgaaaacttggagtcagctgacttgggtcacagcctatctttgtgacctttggtcagttatttcacctccctgagcctcgatttctctttctgaagtgggaattataaaccctacttcataagaaaaacacctggcatgtgacccggtagagggacgcagcacaatgccttccaccttccttcccatatgcacacactttggctgatgtcggcaggcatctgtgaagcgcttaccacgtgccggattcaggcaggtgctgggaggaatgatgatgaccctggccctagatttcacagtaaccgcttctgagaaaactcagctgtaaatccggagtaaatcctgaggattcgcaggtgggtttgccagccagcaggaagccagctaacaggaaggtaacgctgaaccagactcagcctctcctccaaagcccctggatgtgggtcgcaccagagacagcagagtcggtgggtcctacggagacagcggagtcagtgggtctttactgccacctgctggacaaacagaataaggccacaggcagcagcccagagaaattcaggcgcctgcctgaattcagctgccaaatgcacggctctaacttgtatctgccacatttgttcaacagctaatgagagggtatcagaggagattgcttttgaaataaaaaccacctgaccagaaaaaaagaaaataaaaggaaaaccaactgcaccttgcaaaggttacaacgtggagcgtgcctccgggagaaatttctctttctgactcaaaggcgagaaggactagaaaaccctgtgaggtgggaggaagtatcttcttttaaaaccatggtcatactttactccatgggccatcacagagggcagatcctggtgacattctccaaaccttggtgcgcaggaatccaactgaactgtcctgcccataaacaatgcaggatctagctcagtcctggaaaactgcccaaagcagggaggccgttctttccgaaggccttggctttgcagccagacttgctaagtcaacaacgtgggagccagccctgcctcctgccttcctattccaccctccaacttctcttccctccacccgatagttctcctccttggcctgccacactcaggagtgcacacacacacacacagtcctccattccattattctcatttatttgggtggaaaatcttttctgggaaaactaggaggcagaatccagatgggccacagccagggttattttttctctttctccatattccaaccatcctgtgaaaagttgggcccaagaatgcaaactccggaaaaccaagggcagtgcagcgccaagatatttacttagcccatgagtt

SEQ ID NO: 64629 - DNA, 1207 bp, Homo sapiens
ccctgacaaaattagtcccattctattctgcactccaaagtaattttctttgtaagtgtcgctgcatttttcatatcttactttggctaagtaccatctttgaggcatcattcatccagtcggtatgtctatctcctgtgccaggcactatgctaggctgtgcaaacagccctaacagagggttcctaccttcaagccgctcagcacctagccggtacagactgtaaacaaggacaggtaagaactgtaataacggtctgtaacgttctcgggaaaaccaggagctgtctagcttacatgaaaacaagtttctggaaaccctgcgtcaaacagggcctttctggtttcagtaaggagaagggggagcgcgcatgtgacatctggggctcagggttagctggcatccccaccaacggacagaggtccacaggtctgtaaagtcaagtccctctcctcgccgccctcacctggccctcgcccaggctcctggcagcgggccccggctctcggtcaccagcgtcacctcccatttaccaaatccgcagcggcgcccagcgggcggacagccgtctctgctgacccagagcgcccacccacgccctcggctttccccgccccgcagccccgcggccccgcggcctggccgttttcagctcgagcgcgagcccaaacagcgctccgtgtcgcggggcggcccgaggccggccagaggcgcttccccggccccgcggcccccgcccagcccggccccgcgacttcccgccccaggctgcggctggctgttgctcctggcccccacgcggcgctcacctccgggctggggggcgccccccgcgcgctaggcagcggcgggccccgagacggctccgcggccccctgcgcctgggccccggcggcctgaaggtccatgccctgcggcccgcggctggtcgccctggacgccgtgggccacgtgacgcgccggcccggctgcccgcccgaggatccgccgcagaagcgccaatcagcctggggagggggtgggtaccggccaagagggcggggcgcgggggtgtcacgagcaagcgggggcggggcggcgcagggggcggggcgcgcggcctcgcggagcccgcccctccctcccagcgcgaaatctgaaacaatctcggagacggattttggaaactcctctcggtgcatatcctaaggctgcacgactagctgc

SEQ ID NO: 64630 - DNA, 1377 bp, Homo sapiens
ctttgttttgtgtttcattaacgaatgcttactttgaagctctgagtcacattactacattcagacgttgcaaaacaaagcaacagtcacagaaaccattaaaaactattaaacataattttaacacgctactgaatgtctaccatgtgccaggcgctgtagttaggctctggagtagcatatgaaactgatttcaatggtccccaccttcaagtctagttaggaatttatccactccccctgggctctcacagcactctgttcccatccctacagcagtacaaggtactacaatcaacttacagtacactgttatcaaaatatttaatttgtctgtctcccccaccacactctgcccaattagctcctaatgagcaggaatcctgggtttatcacctttacagccctaagacccggctccatgaagggctgtcaaaacgtctgatgggtaagtagacggacggattaccttgcaacgaatgaaaaattaattctggacatcaccgaaaacgagaaatgggcttccaccacgttaggaaaagtaaacacaggtcgagcgtccccacatctagcccctgccacacactcccaacctcccctcaggccgcctcagctcttccctctccccaaccctctctcacttaatctccgcatgactgaacagtccaatgcgctccagctgttccaattccgggagccgatcttctatgcgttcctgaattatctctgccatgaggtccgaggtctacaaccccgcgggtagcttctcaacagcgaacacgagcaggaagctcccggtttcaggttcggagacccagccctaccaccgacgcgtccggacgtaacgtgctccctaggtcccgccttttccgcttccgccacctcctacttaggggaaggcccttcggcttctacagccaccgtcccctccctgtggccgattgtgggattgcagcgagaacccgccctggtcttgggcaggacgactctagcggacaggagttgaggggcggggctagacgggagggaggggttaagtgcgcgcgccgctagacttggacagccatcaggaaaagcgcctccaggtgtagagaggtgggctgctcaagcctgaaagggacacgagatgcattttcttcagaatattgtctcccatcccacgtcctgacttcccaacaccaagaacaacaacaaaaaaaaaagcaaaggaggaggatattgtacaattaaacatttttgaaagccggtcgcggtggctcatgcctgtaatcccagcagtttaggaggccgaggcgggcagatcacctgaagtcaggagttcgagaccatcctggctaacatgatgaaaccccgtttctactaaaaatgcaaaaaaat

SEQ ID NO: 64631 - DNA, 1040 bp, Homo sapiens
cccggcaggctttgggctccagccaggggtccgcggagactgtggtctccgaaggccttagacgcggggcttgtcaggagctgcgggcctctttcagccgcgccacccgcacccggagcgccgtgctgcgccaagtccaggcgccccgagctctccgcccccgactcaatgctcccgcgctccccctagcggccgccgcgccacctcgcccccttcccaggctgggcggcggcgcacctcacgtgaccgcgctcctgtagagggaagaaacaaggtggcggttgaaggcgatcttgagtggggccccagcaattcggttgagccttctccctccactcgcttccgccggccgggcccctcccgcccagcccctcgggcctcccaacccggccccggcgctccccaccgccgccactgcgcccggccctccccgtcagctttcccttctcccgccgcctgggctccaacaagaggggccggcggggcaggccgaccaagcagcccgcggctcccgctgcggagcgctgcgccccggccccgccgccgccgccgcccacgtccggacccatcgggggctcccctcgccgatacgcggtagtagccggggcaggtgggcagccgccaggctgaggtggcgcccaagacgcggctgagctcgcccagggtgggcagcagtagccggaggaagccaccgccgccggcccgccccgcgccggcaccagcgcacgggcccggcgggggcgcgggggcagccacctagcccggaccaccgcagcccggagggctgtcaacagagtggtgtatgatgactacgagagcgaggaggaggagtaagaggaggggggcggcgatgccgaggagacccaggagtctgaggacaactaggaggatgacatggaggaggacgacgatgactccgattatccggaggagctggaagatgacgacgaggacgccagttactccacggaaagcagcttcagcagcactccaggtacccacccagcgcagttgctgcagactcattccccacctcctct

SEQ ID NO: 64632 - DNA, 2095 bp, Homo sapiens
cctcaggctcccgattagctgggactgcaagcatgaactaccatgcccagtttatttttgattttttgtagagacagtgttttgccatgttgtccaggctggtctcgaactgctgggctcaaatgatcctcttgcctcctaaagtgctgggattgcaggtgtgagtcacagcgcccagcgggatttgtttttttatggctatttcagtaagcaacatgttgacatgagcaatttggataacttctttgaattacgttactgttttatacacacagtatttttggaagttggacactggggaaagtcctggtggatttgtaatttgtgtaactccacaggaagtttcacagggctcttatttcactacgagcccattctaatgttgaccctgtcgcaggccttactttatataaattatgcttcccttaaaagattgggactcactgttctggttcactcactccagccaaaacttgagggtctgaagtttaggctgtacctctggaacttgtctttgttcatgaagacaaaaaatgcttaaatcactttgatctgagtagctccatggggtctgattaactccacatgggtgccaactgaactgtcccacacaaacccccactcccatcacagtgttttattttttatttttgtattttttgtagagacggggttttgccatgttgtccaggctagtctcaaactcctgagctcaactgatccgcccacctcggcttcccaaagcgctgggatttacaggcatgagccactgtgcctggccccatcacagtgttttatattgggtatttcagaacctcttgcccacagagaaatgggcagaggggaccacactatgagaattgattgtatgtgctcagaaatgggatcatgggccgggcgcagtggcttacacctgtaatcccagcactttgggagcccgaggccggtggattgcctgaggacaggagttcaagaccagcctgaccaacatggtgaaacctcgcctctactaaaaacacaaaaattagccaggtgtggtagcagtctcctgtaatcccagctacgtgggaggctgaggcagaagaatcgcttgaacccaggaggaggaggttgcagtgagctgagactgggccattgcactccagcctgggcaacaagagggaaacttttgtcttaaaagaaaaaaaaaatgaaatgggattacggtgccaacatggttgccagacagaccaggcgtctgccagggagtggtttcatatcagatgacctgctatctctgtgaagttaatattgtaccatggccttatccagccctgctgcagttctttactgtgagtaataggaagctgtgaaacagcacttttcataacacaaatggccagttacttggcctgtctctgtcccactgccattgcccaggctctgagctgagtgcgagtctcagctggatgtctgtactgcctcccagacagcctcctgcggtttgtcttacctcctccaatccctccgcctctttaccactcgagtatttttatgacacacaaaacctgctttcttactcctctgcttacagtccttcagtgatgcttcgcactgctcaggagaaagtctgagctcctttgctggaacacaagggcctccagatcagtcccctgcccacttctccaaaccaggcccctgctgcttctccagcacccagtgtctaatctccttggcctggaatacgaggcctccagactgggaccctgctgcttctgcagcacctggtgtctaagtgcctccttcttgatgtctgctcttcagtcacaaggagctgctcatctctccctgaggacacacgtgcacaaacacacacacatgcacacacaagtgcacacacagagaggagcgtgctcttctactccttctccctgcagtccctggaatgcaccatctgtcctaaaccaaaggcccaccccctccctgaagtccaccctggtctcaccaatcacaggtccgatatgcaaaaacacagatataacttagagtgctcactctgtgccgggcacggacttaagtacctcacaggcattagctcttttaatcctcacaacaa

SEQ ID NO: 64633 - DNA, 2400 bp, Homo sapiens
caaaacaaaaaatctgtggattacaactttttagtgactttttaatataataatgatagctgagatcagtagagcacacgctctgagtctggcactgtaccaaatgcttgacaagtattatagtatttattactcacaaccatctcaagaggaaggtattatcatcattatttccatgctacagaagaaggaacagtggctgagggaagtaaaaataaaagcacttagtcgagatcacagagctattatgtggagcctagattcaaacccaggaaatttgccagcaactcttaactgctgcaagagaccacatgacttctcctaggagaaagggaagttggtattacgcacatttcattccctttaagtgtttattgtgtaatatttaagatagaaaaaatgtacattatgcacagatagtgcttcctcattaatttatgtattttatatttcccactgtgtgccaagtattagggatgtgatatatattcgcacgcgtatgtatatatatatatttgccattgtgtaccaaacattaagcatgtaacaacaaattcctccagatggagagggtcacgagaaaattaaggcaatgttagaaaaatcatctagagtttattatcgagtgccacctccgtgtctagcattacgctgggtaagcctgagtaaagaagagtgtccgaaaaccctgccataaaataaactacatagacagaaaaaaagtcacttagtttggttataaagaaaggagtcttgttcacacagcgtaaaaacgaatcttataatcgtattttataagcatcagaggcaaaagcaactagggtgacgggctttggggagtggaaagcgccggatcctgggagccagtcgccctactcgatcaagcattttctgacggccctatccaataacgtggggacgcagctgaaaaccatgcaagctgatcgctgccctcccggagtttatggtctggtgagaagatccctgctctgagtcactgccaagctctagctatgtgactttgaacagggaatttctgtccctatctataaaataaacggggttaaaccagggaatccgccattcaaattcctggcccaagtgtctccggggtcgcggtgcccaaaggagggtgggcgaggctccctgggcctgcgctgcggcggcctgacagcgggagcgctgttccggcgcagagcgcgttcgcgttccgaaagcgcgtgtccctcgccgcgtgccgtcgtccccgccgccgccgccgccgccgccgccgccgccgccgccgccgccgccgccacagcccgctgggccggaggaggcggagctggcgctgtcccggctctcttgcggggaagcaactgagggggcggcgcggcgggccccggcggccgaagaggctggcaggtggcgccgtggggtgggtgctcctggtgagaggagtccactccgtgcgtgcgggcggaggccggcccccgagagccgccgacatgaagaaagacgtgcggatcctgctggtgggagaacgtgagtccgcaccctctggccggcccctgagtccctgccctccctgcccctgcagcccctgtcgcccctgtcgcccctgcagccccaacctttgcagccccggcccttctcgcgcctcacagctccgctcgcctttctccgcgttcctaggccttccagccccttcactcttctcttttggctggccgccggcggccctcaccctgtcacctcacctgggccctccagagatctcctttccctgttccccagccgtcctcccaagccatgtccctattagccctaaccgcccgacctcatccctccgaagcttctctcctccttttcctcttcgaaccctgtccttctgggcctcacagtttcccaggccgcctcctttcagaccttcttgtcttctggagattcccttatcactgccaggcaggtgctggaataagcagactgaccaatagggattgcgtgaaccggctcccggggaagctgggggaggggtgcagaactattcgacttgtgggcaaggtcaggtttctgcatttttttggcactcgcagtcttcactctctctatgtattgacattaagatatgagtagtggaaagggccggatcctttttagcagtacttgtactttgcattggactaactcctcgtactcgagatatttcatcaaaaatttttactcaacttcgagttatgcaagcgctcaatgaattagaattatctggggagggtccaattgttgttaccctaaagcgtaatctttgccctctttttaagcattatttattccatagttacttcgtagttaacttattaataaccacaggcacacagacatttgatatctccccccacccagaaatttcatacatttcac

SEQ ID NO: 64634 - DNA, 1805 bp, Homo sapiens
tgaggtgagaggatcacctgaggccggggaggttgacgctgcagcgagccaaagtcatgccactgcactccagcctgggcagcagagcaagaccctgtctcaatttaaaaggaaaaagaaaaaaaaaggatttctttttggctaatcaccaagcacactatcagtatgtggatttgtttgccccagccttgaatgaaccagccaatgaggaaatcaggatgaggttcctaggggataggaggaattgacggtttgactcagggaaagctcagtggaaatagagtatccactgacatgtacaggccagagatgcagggaagatgaaagcacatgcatgaattatgctgaagctctttttacctgaaatcatcaccagagggagtttctgcatttgtgccacttgggcttccgtcctcactgtcccctcgttgctgtgccaatctacaagccacaaaaccaatagtgctatcaattatgggctctaaaccaagaggagtatgggggcctggcaagcagggtaaggcaaggagtcaactaaaaatgctgcaaggtggaagtgcactgcctatcctcatgacaaggaaaacccatacagcagtgctgacaagagccccttctctctccaggccacttaacgggtggaggaaaggctaaatacccagaaggttcaaggaaactcctttaaaaaccaaacttgacaaggccaagaaggttccaggaaagtcagaaggaggaaaaagaggaatcaagaacagaggaaaaccagagggtggggatgggggtgtgtgtgacagaaatgggagaagtggggagataatgacagaaaggagaggggacgggaactgaaattattgagcatgcggggcactgcgctaaacaaagggcagccgcgagagtaagaggctgggatgatataggggcagatgaagggcacaggcatggttgggccaggcatacaagtccacgacgggggccaggaagagcagcgggaggcgaggagcgcccttcaggccagagaccttggctgggagaggagaagatggcttttaggagcggccgggccgctgggccgggggtggggtgcaaggccgggcggcgggccgggggcggggccgcaggggcgggcgggctggcaggccgagctgggcgccagcacctgcttccgcgatagctgtaaagacagtagtggctgctggacggcggctcgagtctccgctcctcggctgagcctccctcttcgctgctctctagttccttttcatctccatccatcgactcctgcaaagaggggagcattgcggcggcctctgagcggccctgtgtctccgccaaaccgctcccctgctcccgtgcagccgtcggtatcagggctcgtccggctcccggccctcgcacacctgcgttccgctggtttccccgggttcgcaggcaaggactggcctggaaagggagtctcttctccccacaggggctgacaggcgtactgagttcgcctttactgacaagcttttaccatttattttgaacttattttcctttgagacatctgggaaactttctatgtgataaaggtggcacaactacctagccacatggaaaagaataaggctactcgtctgcctccttgcgcgcgtgccagcacgcacagacacccgtttgatcaaaaagttaagaatttaaaatgaattttgttaaagtgaaaatatgggataattttgttaattcttgaagagggtctttccaaacataacaaaacacttagaagtcatacaggaaaacgtttaaaaaaatgactacgtaaaaac

SEQ ID NO: 64635 - DNA, 2882 bp, Homo sapiens
agagacagggtttcaccatgtcggccaggctggtctcgaactcctgacctcaagtgatccgcctgcctcggccttggcccatagtgttgggattactggcgtgagcaaccgcgcccggctatcagctccagtcttaccacgattagtttttcacgtgcccagcctcaaagacttaaactctttgctcccttacggagataccctttccttcaccttgcttgctcccgttgactcctcaagaaacctttcttatgtcgggcgcagcggctcaagcctgcaatccagcactttgggaggccgaggcgggcggatcacttgagcccaggagttcgagaccagcctcgctaacatggtgaaaccccattctactaaaaatacaaaaattagccgggcttggtggcgcgggcctgcagtcccagctactcgggaggctgaggtaggagaatcgcttgaacccgggagacggaggttgcagtgagcagagatcgcgccgctgcactccagcctgggagacagagcgagacttggtctcagaaaaataaaacaaaacaaagaaaaacaaaactttacttgacaacccaacgaccactaccactacagccgccctaggactcccgctctctgaggtcctacagcacttcgcatttccctcaacgccgcactgagaactctgcattgtgtactcgtctgtcaccaatctgcgagttacaaagcagagactaacttatttggtttagcatttaataggcacataatcaacatttactgttcaattgaaacaaaattaaaattgggcgctgtctctatctttatttgtgatcggccctaactgcactggcaatcttttccgtttttttgttttctgttttccattcgcatgccccttagcgtacctggggctccggctcctttacaaatgaaacccaaagtgctccgcaagcacagccagcgaaagcgaaaaactctgaaacggacaagatggctgccacctcttcgcgcctcttagtcccacccactcagggcggaggtctgcgtcatgtgaccctccccttcttggctccgcctcctaccgcagtgcttgacgggaggcggagcggggaacgaggccgtcggccattttgtgtctgcttcctgtgggacgtggtggtagccgttgggttgggaaagtgagggatttttggcctcgtttctcctgcttcttttctcctcccttttactttgccggtagaacacagttatgggtcgcaagaagaagaagcagctgaagccgtggtgctggtatcctttgtcggtttgaagtcgaggtcgcgttggggtgccggttgttggggcctgggactaggaggcctggatttggcttacggcgtggagcgtttgtatttaggcgtctgcgtgggtggcctggtggctgggattggacttgggaaggcttctaggaaaatggggttccgaggtcgacaggcttttgcagttgtgggtcgtgtgactctgtgactcaggaggatcttgttcggtgcgaattttggactccgggaggcggcctggacccctccgccagggacagtgtcccctagggactattcagccaccttccgttgttttggtgacgattcaacaagggacttttcttcgagtgcgataggcttattactttcatggagggttggggacagcttcacagtctgtcacccactttttctgtttttatttactttatgtgtgttttgtgtttattttttcgaattggcggtttagtaaagaaccaagttagtcaaccctggtttcgaacctttttttttttttttttcttttcggggcgggaggagaactagcttccgtgtctcacccagaggcgccttaatcttcaggaagcgttctcacagggcggagtttctgttacccaactttgtaggactaaaaagtgcctatcttattaggaaaactcttactacagtgtggtattaatgctttttctggaagcgttaatattctttacattaaaattgattttatttactgttttgtacgtaaaggcggcttgttacagtactgcgtttatgtaacagttttaaaaatagcttaaatacggttacgaattttgtaatgtgattttaggaaaatctgagtagtgaggtaagaattctgttttattgatgtaagaattctgctttattgattttattgatctgtgaatttaaatacattgcttggcaacataaattcatacggaattggaaacaactttatggattgttcattcgaaattatgtgattattgttcaccatatagttactcttagattctaaatattgctaaattcctaatccagttattgctatcgtcttcatatctagtgaagtaattgtcttgacagaaccttagggatttcttaactgaactctttcctgtcctcagtgtgcatttgtaaatgttgaaatatttataacaaaagtttcaccgacatctctgttaaacacaggaatttgacaaagtatattgctgattattgagatgtgttttttggggtggtgaagagagctggccttctaggaaattgaaaatactgaaataacatggcaagtgtagtccctaattgtgtaataaatataaaaagcagagtttctatacagtaccattttggttttagctgttcccatattgtaatgttatccatatgtttttattataggcagtgtcatcattaggctgtctttgtgccttaacagtattgatcaggtattgtaatagagattttgatgatgagaagatccttattcagcaccaaaaagcaaagcattttaaatgccatatatgtcacaagaaattgtatacaggacctggcttagctattcattgcatgcaggtaaggatttttcttctg

SEQ ID NO: 64636 - DNA, 2124 bp, Homo sapiens
cacttatcgtcccgaatgaatggttaaatcgtggaagccgcaaagaaagccacgcagctttgactcaatacctagcccagtactcaggaacccctctcaggggtgcgcgagcggggccggaatcaagaagcctcttttggggtgggcggggaccgatctagagctcccactgcggggcaccgcctcttttcctcgccggccgcccgctaggaggcgctggggagcttgcagcccacctgcgaggcggtcccgctctccccacccctcagcccgcgcccggcggagagactacaactcccggagtgctctgggaacggagccacgggagctacaggcggagggacccgagggcgggctttccgggtgtgtgtttccggcgtcggcggccgcggccggggacggtgtgagagcggtaagatggcggcggcggcggtggtggagttccagagagcccagtctctactcagcaccgaccgggaggcctccatcgacatcctccactccatcggtaaaggtcgccgcgccgcctccccggccccgccggcccagctcggcttatgtcggtcggcggcagcggagaggggcccggctagccggctctgatgctgctgactcactgtgtgaggggggccgggccgggggcgcaggccgctcggagctccccagagcctcccaggtctcactcttgtgggagggcttgaggcaatccccgggtcccctcgccggctgctgactcacggggggctcagcgtagggtgggagagtgggccgagccgggcccccggggatccctccctagccatgtccccggctctggcccgcacgagctggtctgggacccggagcagtgccggccggcgtgcttgtcacggactggtcctagagtctctacttgaaaggccttggcgaaaccagctctggacaggcatttcccgccgttgtaatcagcacagcctgctccgggtgggagcgcgagcgcttgctcttctctgggagtttccttccacgggacgctgggagctgctactcctcagccccacggcagaaagctccactaagaggagggtctctttcagaatgtgggaaattcaggggtgacacacacctcagattggcatttggtttgtggaggtggccgagacgctcatctgctctgtgtagggtgtaagagtgaggtgttggagcgggaccgcctggctagaggaggtgactaatctttccagactgcctgtaggggttggaagtgagttaagggagttagttgtcagccgcggagttcagggaattctttggaacgggtcggctgcatgttgccggaaaaattaaaatttcttaacgctgtaataacgatggtcttacacctacacacaacaggaaaactgaaatgggaatcccagccagtcgcttccggcagctttctgttgggattcaagtgtgaacagaaatttattacgacagaagaagacgttaatgttcactcataaaggattcaattagggcttggactagctcttcactgcacatgtaatggcatctttgtagtgtagtttgggaagatctgaattggctcaacaagtagtatgagaatgcacctgtatgtgggacttgcaagatgttggcatttgacttagtgtgttgaattttggtattccagacctgcacggagaaaggacaatgacaagatcttgatactttatcattggggatactagagaaggagaggaagtgggcgtcaaggtgtatctttgaatgatattggtaaaaggtgtttcattttaaaagttctgatcttaggtcagttacttctacggaaccagagtcatctcaatcaccgttacatggatattttattctgagtacacactattatttagaactaatgtgaggagcatgaattttaatagtctgtgtctagtgtctaatattttttctttcataaagtagaaattacgtcaaatattacaattagagtatttcctgttggcccactattctaggggagagttccctgaaagcttcactgttagagcaagcttgagtcatggtggttgacggccttactttttctggactccatcatggtttttgtcaagtcatgatgctttgtaagagtagtagtaacta

SEQ ID NO: 64637 - DNA, 892 bp, Homo sapiens
tttgtgacgggctcaggcttggctacgggccacgcttctctggcttggatctctgaggcccacttcggccgcggtcatctacccatgatgagggaacggaggccccggaggggtggccagaaccgattggactgtccactcgaggtgcgcgtggcactcgggaggcctcagtaaaggcgtcgcctctccccgcccagggccttcttccccgcgctccctggctgctttccacagggacggggatgtcaggtggaaggagggagctccggaccctggcctcggcggagggctcctcaccaggccagggcggcagcctcagagagggcgggccgcgcgctgccagggcagggactcggccgagagtgcccccgcggccggcagctgcgggcgccgcggcgggaacaaaggcagcacgtgtctgggcgggacgcgggcggggtcggccctcggctccgccctgctcggcgcccgccccgcgtcggcagagttgggttgcgcgggcgccgaggactctccggcggccgggctgctgttgggcggcggcgcggagcgggcggcgagctgtgcgggaggggcggccccgaggggcggggcgggccgacgccgcgtgtcccgccgcagccgcggagtccggctcctagatggggcccggcgcgtagaggtgcctcccgctcgttgccgcgtcctacccgcaccgtgcgcggctcgagctgaggacaccaacggccgcgactccccggcgagaccaggccggagcgtggacggcgcgcgcgccccgcgagggagggcgctgaggcgcgcgccggaagcgggagcgggagcgggagcgcggcggcggcggcgaaggtgcgggcggccgagcggggggcggggctgcggtgcctgcagaacc

SEQ ID NO: 64638 - DNA, 962 bp, Homo sapiens
gcctagatgaattatcttacctttcctctgcaatggaaaacaactgtttttgatatatacgtttttaggtgatgcttgctttttcaaaacacaattcttttatttattatggcatgcctaattttaaatgttattgatgtatttaattgtatttgtatccagttgtttattcaatcaatcattagttattagcactcatgttccaagcattgtgctgggagccacaagcagaagaataaacagcagactcatctccaccctaatgcaggcaatgataaggacagacactaaatggaggtccagggagagccaatagaatgcactgtactggtggagggaagcagcagtgtttgaggaatccagagcagggcatgtgactataccacagcagagagagcatagggagagaggtgtgggaggagggccagagcgcgcaaggccttagggcttgtggactttatccaagggtggagctttaagtattgatcacatttgcttttttgaaagcttccctttggctgcagggtgtaaggaattgagtgcctgctaatggaccaattaggaagcactacgctggtctcaggaaggaatgacgggttctctggttgggatggagcagtagagagacagagaagtagacaggctttaagagtagagatataatctattggagacggtaacttactgggtatgagaggcaagaaagaaggaagtgtcagggtaagtatctcacatgagctactgagcagaccgtgatgctccattaatgaggatagggacaggaggcaactgtgattcagacagactatgcaatctgtttgagacacctgagagacatccaagtgaagatgtttctcacacttctttctctcatagaattaaacccgatcccctgaacacaaagtgaacaacaccaaggatggcaaacacagatcatcagcagtggagagagcaagcagata

SEQ ID NO: 64639 - DNA, 671 bp, Homo sapiens
gttgtggggtagggggaggggggagggataacgcgtccagcgccgtccgtccgttcgtcttcctccctcccggcctctcccgccgaccacgggcagtggtggggggcggggggcgcgcgtccccggtcggcgcgccgcttcttcggttcccgcctcctccccgttcactgccggggcggctcgggacggggcccggggagcgtgggtgggaaccgcggaggcggccgcgccgagccgggcccgtggcccgccggcccccgtcccggggggtggccgcgcgggccccggtggggcggccacccggggttccggccctcgcgcgtccctcctcctctttcctccgcacgggtcgaccagcagaccgcgggtggcgggcagcaggcggcgaggcccggggcgtccccgcacccggccgacctccgctcgcgaccgctcctcagtcgggcctccggggtcgaccggctgccgcccgcgggcgtgagactcagccggcgtctcgcatacctaatgtaaatgacgagttaaggggtgcagcacaccaacatggcacatgtatacatatgtaacaaacctgcacgttgtgcacatgtaccctaaaacttaaagtataataaaaataaataaataaaattagtggttttaaccatgacttttacttggtctggtaaaat

SEQ ID NO: 64640 - DNA, 1574 bp, Homo sapiens
agccagtgtcccggaacagacagctcagggatcactccatagcatcctgaatgacaggatggaactacgccaggaggaaaaaaaaaagaagggcgaagaaagaaagaaaagaagcaagtgtaaagccgggatgagacgccagcctctctccaaaataatcctccagtcctcctagggccttcggggccaccgcaactctcgttcaagttatttcccttcagtttccatgaggtcaccggcccgcccacatccctcacctggcgcggggaagcgcgccctcccgcgcggcacaccctctgcacctaaaccccggacagcgcccagggctcccctctcagggaagcgcggcccttgagctcgacacgccccccgcaccccaaagcggccgcaccccaggggcgtccgctctcgggaaagcgcagccgcggagcttggcagacccccggacaccgcagcccggccgcgcctccatccctggagcttgggcgctcccgacaccccggatccggccgcgccccgaggcgccccctctcgggaaagcgcagcctcgcgcccctgcgcgcggccgctccgccctcacctgagcctgaggttggccatgaactcgggcatggagacggtgtccatcagcacgaagtctgccttgccgaattccaggctctcctgctccgccatggcgccagcgcgggggctcaggtgggcgcgctcgggcctccggggccgctccgtgggcccgcgatgagctcgggaggggccggggcgaggccgcgccgcgaggctacggggagggggcgcgcacgccgctcggcgggtccgggccggacagaggccgcctcgctgctcctcggcgccttctcggccggcgcggctccgaacgggacgcacccgacagtttccgctcctcccgccgcggctgccgggcgctgtaggggccgggacaccgagacggagacggcagcggctggtcccgcctccagcctggggctcgtcccggctccgccccgcccgggcctcccggctccgcccctcccggcccactgaggagcccgccccagccgcggccctggccgccgcctcttcacctgggcggcgcgcacgcgcgggtgggcggcggggacgcgcgctgggccgggcggcggcagctgggtggcagcgccccctggggacaggcgctgggatctcaggcggccaagaggatggccgcctgccgcccacacttggtagctgccaacaaagttagaaaagtagttcgtggagcttttcgcgaggacaattcattatgattctgtcaccctgctccaaaacccactcccgcctctctactcacaccctgcccattcttgaagtggtggttcaagcacagactgagaggtaataataatggctaacatttttggggcaccaaaaatgcccagagctgttctcagcgccttagagaacttttaagaaacttgccatacgactaggaagtggagcagctgcggtttcacgcaggtcatttgacttaggagccgcagcgttcaaccacgtctgactacctccattcttcagtggcccattttctcttccactca

SEQ ID NO: 64641 - DNA, 1279 bp, Homo sapiens
cctgaaccagtagacccccttcagtatgtatgggatggagtcgtgtgggaatagaagcagcaagactactagcaagggctctgcatttgtactcttgcccctggctaggcagtcgccaggggtgggcctgcttctcactgacccgtgggtcaggctgtaaataagagcgaccctcgattcactctttaccctgggccaggcagtccgatgcatcctgcatcccatcattcctaataccaactctgaggatgctgacaagcagcagccccgttttacagaccgaggcacaaaggctgaactaagttgtccatagctagtgagtggcagaggcagggtttcaatgggacagtccgtggcggagcacactggctccgccgccagcccccctgcggtacccatccgcgctcgccgcctgggaccgccagcccggggcggggcgcaggcagggaccctccgctcccctctccgtctgccgcccggacgggccaccgcgggggcgcgaggaaggggtgttgggtcgccagggcccgcctcccagctgccccggccgccggggggcctggcggtgacggcggcgcctggcggcggggatttggcgcgggccgggggccgggggccggggcgcgggggcgcgaggctggattcctagggccgcggcgcttcccggcatgctccgctgcaggcccgcgcccgcgcccggactttgccatcggcggggcagtcgcgggatgcgcccgggagccacagcctgaggtgggtgagccccgccgggccgggcgggccgcggcgagtcggggaaggggacgcgggggcgcggggcctggcccggctgccggggagaggggaggcgggtgccgcagctttgttcttgccgcggggccgcgcgcccgaagttggggaaaggagtaggagccgcgccccggagcgctccggggcccgtgcggcgcgtcccgggcgggctgggggtccctccctcccggggacagagtgggcgtcctgggtggacgagcacggggaagcgggtagggtcttgggtctgttctgtccttgtggttctggaaccggaggggaagggggaaagtaagggagagagaaagagacggagaaaaacaggaaaacttactcttcagtacgcagggaagaatagagaaagaaaaacacaaagaaacgccacgcagactgcagagaaggaccacgaacacacgctccgagaaacacactcagctcacacgcactgagaagcacacttaagataaacactcaggtcacacacacaagc

SEQ ID NO: 64642 - DNA, 568 bp, Homo sapiens
ggacttagctgtgcatgacacagcaaggccccaatgaactgaaatgaaatgcaccactgagaagcacacgttcatggccctgccttgctgatcctctccttcctccatctccccatcctctcttccacacccccctcaacctcatcgcggtccttgccttcctaactggtaaaattgagaaatttggggggaatgtgggaggaattaggaacaggccaaaggggaggggattgtagagggaaagcattgtttttggacaggaggccaacaagacaaatggactcctacattccgagcatttcagagccacctgtttggacttctgtcctgcccttattgatctttccagggcatttccccagtgaccaagaattacggatctttttctggaatgggatcccataccattacaatagatcatttaaggacttttatgaccgtgctgctaggaactaggattctaaagtttaaaaagatcacgtggtcttggaaaggcagccttgtctgtcctctacctcatgggctactccaccttcttccctgattcatggctttgctcactctctaa

SEQ ID NO: 64643 - DNA, 2185 bp, Homo sapiens
ggaagaaggggcccatccagcctccctcaccatacctggccatggttggccccagcacccagcactctacccacaagggtatctataggggaggggcttgtctcagcagaggtacacagatattcacaccctagagcgcctaccattcccacccttagtccctgggaagtagaaaccaggacaaattctctcacacaagtcctttgaaaaaggcctactcacgcctgtggagacatctgaccacagggccaagtcttatcccagacaacctctacattctccaaagcagccatctctttgaccttgaaaaatcaggcagtaatgtactcttttcagggtaacactgaggcttagatgagatgctgtatttaaagcacgtaacacagggctgtgcacacagtaggagcccaataaatgaggcactagtatgatgccactgctataattaactgaaagcacagctgaatgcagagatagacacccagacagggtgttcctgcagcctctctgcatcaagactggctaggggaagatgttctggaaagcaggcctggaagggttttgctcagctaaagctgacctgggaatcagacaagaggaacagaggcagggggaaggaaggaagatattagtccagggcaggggctgaagtgtcccgagggcccttctcttcactaattcctgatgaaactggagctggaaattcaccgccaaactctgaggactctgggaatgcccctcccacctgctcccttttccacattttcacatggccagattccctgtatgctctgagccttcaagataaagtcagtaatttcctcccaggccctgaaaatgggaaagtcccagctatgttgattgtccctacaaggcaagacaaagcctgtttacaggcctgacctctgagccctgaaagcaggtcacactgtggcctctttccaacccagctctggagctatccagcagccataggaaggcctgccagctacatccttcatcctcccagccaggcctgcagtcatttgggaagtcccagggattctccccacccagagagataaacgaattcttcccgggtactccagtggagcttggcacttgctagaataagagggaggtcaaactgccctcagtgtgagggcatcacttctgcagcctttgtttctgtacccctaaaagagcagaaatgagtgacttcacagagctgtggactcagatttcacagatcgagtgcagagcaggaagtcaggggtacagggactaactgcgagctcataccttgttggaggaagcagcctcaccatccccacaatccatatattcttcagagggatggccaggccatgtgggcaaccaggctggtctacacccccaacttggagtgggaaggtccaggaccgccccccaggcttgacatctctccagctctccagctgtgcagtcttcatcaaggcttagcctctctgggccttcatttgcttgcctgctgactagtaatgactgaaccctgagttgtgaagcagctaaggcctgcgacacccctgcctctgtgcctggcaggtgggtccccatcagtgtgtgccattctccctcataccctaaccctgggtcttactctgcttgctgcaccaactgccctttcatcaactcctctgcccaccagcagcacattcatgtggtttttctgagaagattcccttctgttttgtgaaatagccagcaaataggggctgtcctgtcccagtaaaaggaattactccagccccagggcctttccccacgttaacgtgaagatctctatacagccacacagagggcctccaaagaggcttctcttactcaacgttcttctaggggacagcagtcaagccccacattccccatcccccaagttctgccaagagccacagctgggcaggacaagaccgagccacatttctcttgggacttcctcattactgcttatcacaaccttggcacgccaagcacaccatgccatcaacccactataccccaactctgccatggttgctcagcctggcaaggcccaagtcttctgcactactccagctgccctcagcagaatgtgtgtgtcttcagaaggtctttttgccagggcatcagctccattaatccccatggtgtgctaataggggacaatcactctgctaaataccccatg

SEQ ID NO: 64644 - DNA, 2079 bp, Homo sapiens
agtgcctgtttctacttgaataaggtttctataaactaagaagtgttccttagggacacaagtaactggcactcctgttggaaaatgctaagatctaggtcacgcgcacttcccccaacagacacatacacacattcacacacacacacacacacacacacacacacacacatacagcttgtctgcactctagcactggcactgacgctaacgctataatcctgggcaactttatttccccatcttacattaagcagtggtgcagggattttcaactctgggatctctatcacacctcccagctctgattgcttcctaatttacatatttattgagcatctgatgctaggtcctcatgctggtgatgcaggagtaaactagacagacaaaagtccgtgccccacattgtctgacacctacacacctgctgttcggactccattacaaacagctccaaggggaacagtgcacttgtaaagtttctctcattaccatggccacatccgtgagcaataaataagttgcatagttgaattatttgataatgctttgtttttaactccctgcacttaagtcagagatgtgtgtgctttggaaaactatttttcctgactcattagacaaatactatttgcatttttattcagcttccttcctcagactctaatttacagtaaaggcaagaggatttttgaatggagccagtgctttgcaatgtggggctccaccagctagccgactgaaatcattaataaagaagcctttttaagtggctgaagtttcccctttttggcatgcaacattttgcaaccaagcggaagaaacatcatccgcaaagaagaatccatgtggcccctgaaaatcactctctctgctacaggctccccactccccagtgctccccttagccctgccactatctctcctccagatggaaaaagtgaggaactcagggaaccaaaagtcttgcttctttactaatttccctgtctgacattaaatcatcctacagttcagatatctgggggaagtgactagagattcttgaactgttaataattaatttaaatgatatttgttaagaacctacgacatggaagatactgtaccaggtgctggggtccagcatgggcaaaggcctcaaggtggaatggagctatggtgtgttctggaagcagagagtggggctgagggtgacatgaggtgaggagacaggagagggcctggcagggtgggaccttctggtgagagctggctgctgtgtgaggagctgaggccctggcttgattctggggttacttctttgaccttcagctttttgtcatgggcagacagaatggggatgaaaaaaagcttaggaaatggaaacctccctatgcattatataataaaaatggccaacacattttcatagcaagatatcacagcagaagcttgtactgggcatcaggactgtaggcatccaatgcccagaaactggcatgtgccctgggacatcccctgagaaggcatgccacgagccctcagactgacacagctctttacaagttgcttacagagcactcttggtttattaattcatacaagtctcatgacaatgtcagaagcagctgtcttactaatcccctttgacagaagaggcccagagaggtcaagggacttgctcaaggccacacagctagaaagaggcagagccaggcctttggccctggtgttctgacaccacctggggctccttctgttattccatgctacctcttctttctcttccgtattcccttctcgttcccttccttcttgtgtcttgcttcttatctgcctgtacttattcctgttggtgcctcccagctcagccagcatagctctgtcttcaaataccccatgcttcattctggggtcccatacacagtctgacaatcatctgagggggctgtgggaggacatagaaaaaatacagctttacatagaaaaaaatgcaaattgtagccaggcgcagtggctcatgcctgtaaccccagcactttgggaggccgaggcaggtggatcacctgaggtcaggagtctgagaccagcctggcc

SEQ ID NO: 64645 - DNA, 1763 bp, Homo sapiens
aaataagcaaaccagcacaaatgtagccattcgtcttctatctcaccttgagcctgtcactaacctgttcatggcctcagtctccccatcagagaaacaggtagatggtctctaaggtctcgttcattttctgacattctgtgaaaaattaaggaaagattttcatccttgacaggaaagggattgcagagtagcggccctgggaaaatgggctctattctacctggagctagcctggaggagaggccttgagtgggggttgtctagaaaggacatggtgagtgcagagctacggtgcatctctcttgaaggctgagtgaagggagcaccagcaagggagcctgcactaggtggggagggacaagtgaaccgcagaagttggtgggagcccaggcagtggcttcagatctttccagagagctcacttttacttcctctttttttcacccctgacactgagtgggagtctgcagcgatgaccaaggttcatgcagaggatcttagtggtggggtcagaccccgggaggaatgaagaaagcattattcaccaagaggagcttttccattctttatctatgagttgatagagaggaggccccggggtaactgaggattctggacagcatcagagcattgaccctcattttccccatagcccctctgggggcctttcccttgtgtgtccccaagcgagagtccaacccaggtttgtgccagagcctaacccaggcttgtgccgagatgttcccagcacagccccatgtgagagctccctggctccgggcccagtatctggaatgcaggctccagccaaatgcattctcttctacgggatctgggaacttccaaagctgcctcctcagagtgggaatttccactcacttctctcacgccagcactgacctcccagcgggggagggcatcttttcttgacagagcagaagtgggaggcagacagctatcactttccagaagactttcttttctgattcatacccttcaccttccctgtgtttactgtctgatatatgcaaaggccaagtcactttccagagatgacaactccttcctgaagtagagacatgcttccaacactcagaagcctatgtgaacactcagccagcaaagctgggaagtttttctctgtgaccatgggctaattggtctccttctctggattgtggctttatcagataaaaacaagtggtcatgccacaggatgtctataagcccattgattctgggattctatgagtgatgctgatatgactaagccaggagagacttatttaaagatctcagcatctttcagcttgttaacctagagaaaacccgaagcatgactggattataaagggaaattgaatgcggtccaccaagttcatggtaaaggatgcactaactgattagagagaggtttcccctgatatgaggaaaacttcttggaagatgaggtgagatggcctaggaagaaattcctacacaaagttgcacagtctctagtcctggaaacattttattcattggataagaatggattgaggcatgagcagaggactgagacaaacacagagaagtttcaacactggttggggagaaaaggagtaactagtgagattcaggcagaacaagaataaggctcctcaagaggcacaagcaaagcagggctcgagttgatttgttctctcttcatcctgctttttgtaattccaccagagtctgaaatggccactccatagagtctctgctctgggattctccag

SEQ ID NO: 64646 - DNA, 1688 bp, Homo sapiens
atatttgtaaaggtctgagaatattcctggcagagtaagcactctgtgagtatgacactggcatttcttctgcagcactacatgctgtctatgcctttgtccaagtctgaaaccctagaactcttagaattcagttcaatgtttacacaatcctacagttctgctaggcttctatgatgctactattctgcatttgaatgagcaaatggatttaatgcattgtcagggagccggccaaagcttgagagctccttcctggctgggaggccccttggaatgtggcctgaaggtaagctggcagcgagcctgacatgctttcatctagtttcctcgcttccttccttttctgcagttttcgcttcagagaaagcagaatccttaaaaataaccctcttagttcacatctgtggtcagtctgggcttaatggcaccccatcctccccatttgctcatttggtctcagcagtgaatggaaaaagtgtctcgtcctgaccccctgcttccctttcctacttcctggaaatccacaggatgctgcatttgctcagcagatttaacagcccacttatcactcatggaagatccctcctcctgcttgactccgccctctctccctctgcccgctttcaataagaggcagagacagcagccagaggaaccgagaggctgagactaacccagaaacatccaattctcaaactgaagctcgcactctcgcctccagcatgaaagtctctgccgcccttctgtgcctgctgctcatagcagccaccttcattccccaagggctcgctcagccaggtaaggccccctcttcttctccttgaaccacattgtcttctctctgagttatcatggaccatccaagcagacgtggtacccacagtcttgctttaacgctacttttccaagataaggtgactcagaaaaggacaaggggtgagcccaaccacacagctgctgctcggcagagcctgaactagaattccagctgtgaaccccaaatccagctccttccaggattccagctctgggaacacactcagcgcagttactcccccagctgcttccagcagagtttggggatcagggtaatcaaagagagggtgggtgtgtaggctgtttccagacacgctggagacccagaatctggtctgtgcttcattcaccttagcttccagagacggtgactctgcagaggtaatgagtatcagggaaactcatgaccaggcatagcctattcagagtctaaaaggaggctcatagtggggctccccagctgatcttccctggtgctgatcatctggattattggtccgtcttaatgacacttgtaggcattatctagctttaacagctcctccttctctctgtccattatcaatgttatatacccattttacagcataggaaactgagtcattgggtcaaagatcacattctagctctgaggtataggcagaagcactgggatttaatgagctctttgtcttctcctgcctgccttttgctttttcctcatgactcttttctgctcttaagatcagaataatccagttcatcctaaaatgctttttctttgtggtttattttccagatgcaatcaatgccccagtcacctgctgttataacttcaccaataggaagatctcagtgcagaggctcgcgagctatagaagaatcaccag

SEQ ID NO: 64647 - DNA, 2032 bp, Homo sapiens
aattatatgcatctatatataattagcacatcctactctaccacatccgtctctaccacatctccttaagaacagaaaccgttatcttgatcatttctgtgtcccaacaactggtacctaagtgacttattttaccattaatattattttgttcattactatgaggatgtgtctctcctcttatacccttttgccctcactggtctcttttcctcactcttgtctatagaaaagggtgcttaatatatactgaaaagatgaatagatctgaacaaccatagacacggggtattcaagtagaacttggatttgaccccatgccttcctggctccaaagcctgtgtcctctccactacaatacattgccatacaaaaaacaaaactacttgttgaatttatggaccaagggtatacagtcttaaggagcagaggagttaaatgctttgtttccaatgagacactaaattaactgactttctaactgcatatgaaccttgacgacaagtcgggggtcggggaagcgccacagcttcactcccggggccctctactaggggaggcttttctcctccacctgcaccaggcgagaaatacccccagagcagggatgagaatgagggaaatcaagctcgcaagaacatccacagcgctacgcggacgcctgcctcagagggcgacaggacaccaacgggcccctagccgcgtaatggccgctccaaccgctgtctcacattttcatggtgcctttaggacccaagttggtccgcagcacatcctgcagccctcgggcggcgcatatattgacagccaaagctgcccgggcccgcgccacctcagccttggagttgacggcctttatcgcagccatagcctaaccgttcagagggagaaaaaaaaaaagccttagtcgcgattctgagcaaaaacggcaatgcgacgccacgctctcttgagcctcggccaatcatcgcccttacaggaagtgacgttatcatgcctcgcccgacggaaaccagaatcgttttgggtctggtcgccaagatggcgtcctccgcctccgcccggactccggcagggaagcgagtgataaatcaggaagaattgcggcggttaatgaaggagaagcagcgtctgagcaccagtcggaaacggatagaatctccattcgcgaagtacaaccgtttggggcagctgagttgtgccctgtgtaacactccggttaagagcgagctcctgtggcagactcacgtcctgggaaagcagcaccgagagaaagtggccgagctgaaaggcgcgaaggaagccagccagggttcgtccgccagttcagcgcctcattccgtcaagaggaaagcgccggacgcagacgaccaagatgtcaagagagcgaaggccaccttggtgcctcaggtacagccctccacatctgcgtggaccaccaactttgacaaaataggaaaggagttcattagagcgactcccagtaagccttcaggactcagtttactccccgattatgaagatgaggaggaggaggaagaggaggaggaaggagatggagaaagaaaaaggggggacgccagcaagccgctctccgacgcacagggcaaggagcactcagtttcctcttcacgggaggtaacaagtagtgtgctgccaaacgatttctttagtactaatcctcccaaggcccccataattcctcattcagggtcaattgagaaagcagaaatacatgaaaaagtggtggaaaggagagaaaacaccgcggaagcgttaccggaaggtttttttgacgaccctgaggtagatgcaagagtacgaaaggttgatgctccaaaagatcagatggacaaagagtgggacgaattccaaaaagccatgaggcaggtcaacactatttccgaagccatagttgccgaagaggatgaggagggacggttggaccgccagattggggagatcgatgagcagatagagtgttaccgacgggtggaaaagctacggaatcgccaggatgaaataaaaaata

SEQ ID NO: 64648 - DNA, 2350 bp, Homo sapiens
ccaatacaaaactcatctttctaaccctaacacctcctcttcctctctattttctatttcagttgatggtaccattatgtttctgctcactcaaattattattattttatccataaacgagcactttatctagaagatcatttaaattctaaatgatcttcaaaaacgcactttactctccaccctaactagctgaatcatctcccacatgggtcactatgagagccttctgatttgttcccttgcctcagtctctccccacccagcttcagcagtattccctaagactcttcatggctctccgtcctctacagagtaaagacgacactcttcatcacacagcacagaattctctcgggaacctgttctttgcttacctaacaaggcccagttgtttgctcttcctagactctgaagaggtcacttaccctcaggctgctacatttgtaaaaatcgccatcccaactctcaaagagctggcttcagatttgagataatacactttgaatgatatacaatcaaggagtttctcctccatcactcctttacattttatatctatctgctgtttagtgcctcgtctcaattccatgaaagctactgaatacaaactatttactagggagtctgcgggacacaaacagagggattatatttaaaaaatagattgacgcgatctttgccttccccgacctcattacaatatagtttctccaccaatatctttaaaaacagatcctctctaacagtatgagaaaatcaaggggagcctcggaagttcaggccaggctgcgttccgaggagccgccacgtccccccacctccgcttcccgggccgcgattgcaggttgaaaactactcccaaacatcacagggcaggcagaatgcaactacgacccacgtggcagacgggggcggggaccggtcgcgtggccgcggccttggctcttgcgcctgcgcgctgcctcccgctctaggacccggatttaaagagacaggcgctccaaccgtcgtgggctgcccgcggcctgtaatgagcaagttccgaggcctacggtgagcgccggagccggagaggcaggtgaggggctacgcggcgcggcacggcgcggcggggcccggcgtggggaaggcagcgggcccggggcgaggagctcggcgcggccggggagccagccccccggctcctcccccgcccgcctgcggagccccggggcacaccctccgtgacgtggcggccctcccgggagcccagggggaggctcgcggctccccgggacccccacggggccgcgtgaggcggggaggccggcgcccgggctgtgttccctgtggaacccacggggccttctcgtaccctggcccggcgtgcgtcctcctgcgctgaaccgggagcgctcgggtgggactcagggagccttgatcacttcccgcctgcgtcccggacccggtggaggagcgctcctttctgcctcgccgggggtcgcggcctacgccgccgaccccactgtccccgccactctccgacagcggcgcgggaagcccttcgagaaaagcggcggcggccaggcctcagcgatttccttctcgggcccctgggctgcggcagttgtgagggtgcggaacgagggacagacgggtttcctcaaagctgcattgtgcctcctcgtggcccagcgcctcccgagcctccctcaagtccactcctttcattattggggccctagaggttgctctgtaaattgatcttctaggaaaagtgttgaaactcacttgttctgacctccttttatgggtctgccgtacttccacttacctcacctctgtggttcttaaactttgggagttatatagccctttgtgaatatcacgaaagtgatagacctcctccaaaaaaccgtgcatttttatcgaatgtacattttgtatacatttttagagagctcagaacagcctccctcccccacaaccagcgcattcatggattccttgtaattttcccaactaccctgtgaggtaggtattatttaccctgctttagaaataagaaaacagatgcagataaattaagagttttctccgaggtaacagtcagtaaactgtacagtcagacttgcactcccatcccttattccaggtccaccagctttccttcacatcatgttgcactacagtaagcaaagcctgctttttattataacgtgacagcaattttgcttcacagcgtgtgcagactgaacataattccagtatacttaaaactaggactataaaatgctttagaaaacatgaatataagaagatgctgatataatctttttccatttggattgatttatgagttcctgtg

SEQ ID NO: 64649 - DNA, 1362 bp, Homo sapiens
ggaaaccatgtcagattgagagaacaagacagagagtgcgatgggagcttcagagctgccaagcccagcaggatctcctccagtcactcttacttttactaagctctctcatatatctaagggtgcaagccactttcagattttagattaaaagccactcgggtggaagacctccactatgtattgtgtatatccatgtacaggacacttcacatttattatttaatttgaggcttactttatttactcctgaagcacctgaggtattaattaagactaccagcataagaatcaaaaagctctgcatttttattaagcctccctcccttatttcttgcagtatcaccttgggtgtgtaatttagcctctctggtgctcagtttccacatctgtaaaatgggggtgataacagtatctacctcatggggttgttgtgaagattaagagagaacccatttagcatatctaacacaaaatgagtcctcaacaagtgtaagctgttttattatagctaggaaatattacctaacggtgacagccaggattcaaatcctaaactgtaattatttctgcatgaaggttatggtggtggtggttgttacaattaatattaatttattgaggtgcttctatatgctagcttgtcatttaattctcaaagcgacattgcaaagtaggtattagtgttcttccctgattcacagacaaagcaaccgaggcttagggagatcaactgttgtattcaaggtcaggcaataaacaggagagcgggtattcacactcaaggtctgttggaggctaatgcccatgatcacattctttccaccaggccatactgcatagctcagttccattcaagtacagagcagttctgagtcaagggcctggcttccatctccaaattccccacccactgctccatcgacacaggctccccactccaggaaggcccactcagagtgctgggaacccagtggtgcttacaagcatatccaagacaaatatttagacagcaacgggaggctgtctggacatcagggtactctcgttcctgaaagcacagagtgtctcagttaggcaacaagagcgcctgatgggcaagctggtactgcctggcagcagctagtctggcagtcgctgacaacacaggaaggcttactcagcccacaggaagcaatcctcggcctctcaccccacaggctgagtgagcacagtgacatccggctgagctctgttctggccaagagcatgtcacatccccaacaagagaggtaattcctgagcacactgggattggcctggagggcaccctcattaatcctttaaagaagttaaaaacttttcatcctgtgttgacttaag

SEQ ID NO: 64650 - DNA, 3108 bp, Homo sapiens
gctaaggcaggagaatcgcttgaaccaggaaggcagaggttgcagtgagctaagatcacaccactgcactgcagcctgggtgacagagcaagattcctctcagaagaaaaaaaaaagagttgatgagaggatcagagttgagaaagtacagtacaggctcttgctcattctacccttactgagaacctactatgtgcaacgtaccatggatacaattctagcaaagcagaccctgattctcaatacatactatgattggagtaaataccaggttctcctgagtactcaaccctggtaagtaagaagaggcttcatggaagaggtgacttctaggctgaaaccagttggccagattaagcttggggaaggtgtgtaaaagaacgcttacatatgctaaggtctgaggtgaaagagaacgtgggcaatttgttggaattataaggagcagaaacgtaatttggagggtgacgactacctagagatatcatagtctgattaggtgaaggactcaaaagtttggcgatgaaaagcaggagggagatagagtagtagcctagtagaattagagatgagggaggttcttcctattaattcagaaaggaatatgggaacaaactcactgataagacagtgttctccacaactcaatatttagttattaggaaggcaaccaaatgccttcacttcttttcctttaacaatggcttagtttgactaaagtgtttctcacaagatacacacaaaaaaacaaaatacaagagcaaatgacggataaagctgtaaacctaacgttttacttttctaagatttatataatcagtgatttaattggacctaactccacatccagaactcaaatgaaagaaaacttctggccgggggccgtggctcatgcctataattccagcactttgggaggctgaggagggtggatcacctgagcttgggagttcgaaaccagactgaccaacacagcaaaaccctgtctctactaaaaatacaaaattagccgggcatggtggcgcacatctataatcccagctacttgggaggctgaggcaggagaatcacttgaacccgggaggtgaaggttgcagtgagccgagatcacaccattgcactccagcttgggcaacaagagtgaaactccgtctcaaaaaaaaaaaaaaaaaaaaaaaaaaaaaaaacctgactcacttctgaagacaggattttcccagtttctaatgcagcttcatctagctaatgaaacttaagaaaacagtttgaggttacctgattttgccagtttcaaaacattgccacgacagaaagcaagctgtctctagttcctgtggctgaggtcgctggagccatgttcagatgagatcatctcaggaaccaagagcagcggctttcatgtgaagtgaatggtgccgcctggggatgtatctttggtaagcaagattgcaacacagcagggagtttacccagggcagtgctgactcacgctgggcaaaatttgtacttcccaaacaactcagcctgaaccaaccgcagtcaactgcaacctaggaaagaagaggcagctcactgattgttttaaatcaagtgctgattactgggggcaggtaaacctcattcccccactactggtaacttggccacctccagagcccttacccaaaaagttccagtggccagtttctaaaatttcatctgagaacaggctggggctggggccagcaagattactgaacatagcaggttcacagctctgaagatttccccaggaggctgataaataagtcactttgcatttacaaattagaacatctgggtcagtggactcagggaacttgcccagtcatcattagccagtcaaatcattagggtgaatttttgtcagttctaaccaggctcattgttcttttttcccactaggcctcctctgacctctctatttcttcagacaactcaagttctctcattaagatagatgcactggaattttttttttttaatcagctgccacattctctatgctaaagccaaatcatttaccatcacacctactggatgcatagggaatacagaagactatgaaaatcaccttaacacttgctctgaaaagagacatccctaaatttatgtcaattctcatttattagcctgcttatttaaaaaatcaatctagaatgactggctcatcaacagctattaattactgaatttgccctgacaggctagaattgacattggtgttatacaaaaaaaaaaaaaaaagatcaagtccttgctttttgtgtgctttaatttgacaagagagaaactaaagttcctattagatccttctgtttcctgcttaaaatgtatgacagttccccaaggccatcagctatttcttagcagggcatttgaggcctctgcacccagcttcgttcatcctttaaggtaggtctcacatggcatgaactctggatgtagctgccaactcagcttgtcattcaataatgttaggttaattaaaatgtacgtgcagacagaatttgagtttaaaaactatactacttaattttctattcaaggggctagttttaaaaagttatttatccaactcacttaattctccttaattacattattccagtaggatagccacgctgagctttgataaggtattataaaatgttccctgttttatttcctccccttcagtgttttcctttcagaaaatggctttgtttaaagaagtttccctatagtacatgttaattagtcctttctgaatgataaacacatctttatagcagctgacaaccattatctcttcaaccacactttaaaaaaaatttctgtagttgatgataagttacaaattctagtatgaaacaactctcaaggtacagacaaatatggaacctccttcagaaaaaaaaaaaatgattagaaaagctcctgacctgttctgtatttgcgaactttaaataagagggccgggcacagcggttcacgcctataattgcagcactttggaaggccgaggtgggcggatcacctgaggtcgggagttcaagactagcctaaccaacatggagaaacccccatctctactaaaaatacaaaatt

SEQ ID NO: 64651 - DNA, 1696 bp, Homo sapiens
ttctgatagcaggcactgcttgctgagctaaaactgcggtgagagttcattcattctggactggttacttctgcagccgacatatttgtaaagacttattcaaaaggtaatcatcctgacggagtgtgaggcagctgtcacccagtagttgacagctcaaccttgacagctggaatacttgggttccaacactgtgaggctttgggccccctctttaatttctctgtgcggcattttcacatttgtggaacacagataacacctacacacctcataggattgttaggaggattaaacttgttaatacagcaaagtccctggcacctggagagcacataataactgttggtaattttcctacaggtaaaatatggcacaaagagaagtatcacatagcaaaagaagtgctagtcttttgatcagtcttacacaaattctcccatacttttagacaagaataagccttcccctaactcccactgaagaatgcatacaatttcattcagaaaaagtatcatctgacacagtggaatgagtgaaataaatcctgctgaacatgcccaatgcttccctagctcctgtggccaacatacaatttcaataggaaaggggattgtttgtaaagacagttttataacatctgtcaccaaacaacagtgaagttcaaagtgaaaattcaagatttcacatagcaggcagagggactttcaaaaacatctgtcctctcactcctgttccccatccctctttcctaatcaaggttataataacgcaagccctctgtaagctggcacacaagctgacaacatgctaccctgctgaacagtcatcaaggaggaaagaaaggcccagggggctgctacaacatttccataaacctcttatccttagctaaaaaggtaaatttgttctagagatgcttaaagaaaaaacacttgactggcataacctagacacatgcaatacctttttcccatttctagttttctcaagtattcagggaatgaccatcgacatttttggaatcagaaacaaattgtttccaaaagtgttaagcagtgcttgtccaaaggcccccatatagctagtaatttagacagctgtgttaggagccacagaagctgcattttctaaccagtattgcttgtgaacaattgaaactttctccagtgcaaagtccagacacaggaagcagtgttctccaaaaacattcaaacagtttcattattgtttaactaccaaaataacagctccaataatctatcaagtttgacatttcatccaactaagcaattaaaccaggatgaaaagcatgcatggagagatttccctgcctgctccaaatcaacactaattttgacattataaccacaaaaactaataatgcatcctcgtagactattcacaaaaggcttctaaaaagcaaacacaaaagcgtctcgaagaaattgcacacccctaaattttattttctgtctcccatctttaagcatcttaactgtgagttaagttacaggccaagaagttagaaactcctttccagtatttagtcaaaaagaggggaatatgcctcccaatacaagcacccaatgcaaattctatcaatttattctttttttttttttttttttttttttgagacggagtcttgctctgtctcccaggctggagggcagtggcatgatcttggctcact

SEQ ID NO: 64652 - DNA, 2444 bp, Homo sapiens
aaggtcacttttcaacctaaaaaaaaagtgggggttagtagctttaacagagataaaaacctgtgtaggttataactccatgaaatcagtagcctggtgagtgtctctccaagaatcttgcaggaaattaagtgtggattgagtaattaaatgtaaagtctccttgagagtaacttcagttattgaagactatatatttctgtgaaacatatagaaaaattatgaggaggatttactaggtatcacatcacagcctttctcctttcacatcaggttggaaacactatgatctaaaaagaatagaacgatttgggaattgttcattctctagtctttgcaaaaattcacgtgctagtgtaactgtaatatacttaggagtttccaaaaatggcacacatttcctcaagagatgtagaaaaaaataatctctgggtaaaaggccaaacattgtctcttctgaatgcttaaacagccaattatgtgtctaatacattaattatataaagagagagagactattacaggaaagttgaataagacatcttaaaaaaatgtaccctggggcctaagtccattcaaatgacagtaaaatcacccctcaaaaaatcagttttatggaacatctagtattttaattttccagctgccaacagaaatatataaggagcagaaattaaactagttatggcagcagcgcagtgaacaaaacttcaattgtattacacactagttagacatttgccaaacaatacaaaggcccttaagggtggaaacttctttagaatataaatgattcccaatcaatatgaaagaaattagtctgtttaggtaataaacagattcatggtttagatgtaaaaattcaactgacatcataattcaatatagaaaataaatatataagaaattaatctctaaaatggctttaaatcactgtgatttacatatgctgtatcattaataggccctttaagctggtattgtactaatcagcttttttaacatcctgcccacaaaagagcttattcatttagctaggagacaggtgttagcaaccagaaacctcttttagcctcgagttccagggactgggcctgcatctatgatgatgattggcaagtctaaaggaaggacagctttaaaagagggaaaaggaggagacagggaacaagaaacgaagaccaaaagggagaaaagaagataatgaaagaaatggatgtcaggtgctacttaatgaggccaccctcaaaggctcctagcctaatctgggctaccgtccaaatacagatggcagaatttgggtaatgttattcatttattcctgcagatagtaactctgggtacatgccaacactccactcattctaaaaaattgtttaaagtgttgctaattgtcctgtgactcattcttcttacccatattctctggttcttaactttagtcctcactctttcatacattttctaaaagagctgactgaatagatattcctggaaagagatatagagaaagctggatttagaaaagcatcttaagcctacagaataaaaattgtgtgaggaagtgggagaagggacgtttattgagttgcttacaatatacaaaaaacatatttttctctctttcaatcctcccttgcatattttcccccttttaatccacataacaatcctaccaggtattttcatcttgcagatgaaaaaactgaagctcacagaggttaagtaatttgcctaaggtagcacagccaggaagtgggggagtcagaattcaaaaccaggtttgtctatacaaacaaactacgttagggataacgtatctagtgcctgaatctgttttaaatcagatggttctatatttcagcaattattcttcctcccatgaactcatcaaacggctgctgactaaattttattaactatttgttacgcacctattattttcaataaaggcttcagctgtgtagaaataaaacaggcaaactgactttattctaaaatttgacatacagagaattcccaggcatctctgccatccaacactgatgatcataactagattcaactacctattcagacctctagttgtttccacattatcattcatttgtccactcatgagataaacgaagctactttcaccaaaaaccctccctcatgactcctgatagataatacagcagaggaggcctcactgtaaagcaatttacataaaagttataaaagctctttgttatctgtcatgactaggaaatgggctattctagcaaatcaaacatcctggatagcataacgattctattagagggactaccaatttataaggaatttcaatgtgcataatttcactctaaaaattaaaaaaagaaaagcgggtcaggcacggtggctcacacctgtaatcccaacactttgggaggccaaggtaggcagatcacttgagg

SEQ ID NO: 64653 - DNA, 4840 bp, Homo sapiens
tagcgcagtggtgcgatctcggctcactgcaacctccgtctcccaggttcaagtgattctcctgcctcagtctctcaagtagctggaattacaggcatgcaccaccatgcccggctaattttgtgttttcagtagaaacagggtttcaccatattggtcaggctggtctctaactcctgatctcaggtaatcacccgcctctgcctcccaaagtgctgggattacaggagtgagccactgcgcccagccaagatgcagattttatgctttaaaaaggaaactgtttaaaaacatgcaggactcttttaaccaactgcttggcttcactgcagaatgttaacaggcccaaatacattaaaaatgtggaatattcaccctgcataagaaaagtaaaggaagaacttcatgacagtcttaacgaagagaaaggataatgggtttaaactaagactggcataacaggattagctatgaccgctgtcctgatggcagctgttaaatcttggaaacagggagggcagaggtctttaaatacatgaggccaattcctacctatctgagatggcttttatgtgagatataataggatatcctactaagagccaaattagttttactattttaaaactgcttaactaatataaagtcacaaaataagaagttaatcagatatttccttacgaaagacccgggagtctgtttctatatgaaaagcttgtctttaggctgggcacagtggctcacacccataatcccagcactttgggaggccgaggccagaggatcgcttgagctcaaggcatttgagatcagcctgggcaacatggcaaaaccctgtctccaccaaaaacacaaaaattagctgggcgtagtgacgcacatctgtggtcccaggtacttgggaggcgaggattgcgtgagcccaggaggcaaggttgcatcgagctgaaatcattccatggcactccagcatggttgacaagagtgagacccccatctcaattaaaaaaaaaaaaaaagactatctttacaattgccaaaatctttcttacacaaacaccaaataaccattaccaataaccagaagtgaaacaaaaataaccagtaatcatcattaaaccagtaaccattaccaaacaacaatgaagcagctcctcacttgagacttcaccaatagtaatttaaactatgcgttctcattaaactctaataccttaattctgttattgtattaacaagttatgagattctaaggtatagaggttaaatctttcctccaaaaacataaacactatgactagtacaagtttggtataaaagcctctatcattaaaaccatggcagtattaaaggttctatgacaagaataaaaaatcaaggtggaattagtccccctaacaacttcttaggtttacagaggtgttctcagaaagtcttaggcatgacgctcatagagatgggtgtgactgtatttaaataacaatgcacatgtaattagaaaagaaattgtgcccttttttgttattgttgctgtttgttttgtcttcttaaatgctggtcactaaaaacgccttttccacaacccttaagaggtgttccggcctggcgcggtggctcacatctgtaatctcagaacttggggaagccaaggcaggaggattgcttgagcccagttcatgacgaacaacatggcaaaacctcatctctacagaaaatacaaaaactagctgggtgtggttgcacatgcctgaggtcccagctactcaggaggctgagaagggagagtcacctaagcctaggaggtcaaggctgcagtgagccatgattacgccactgcacgccagtctgagtgacagagtgagactctgtctccaaaaaaaaaaaaggtgttcctattagatggtaccaagcagagttatgtcaactggcttggtcatgagagaaggtttgaaagaaattgatttttaaggtttctgagaagagctttctttttttgtgcatgttattttggaggctggttaaactggtcgatttaaatatttacaacccttgatcccaatgtaaacaagaaatcacaactgtctacctgatcaatatgaaagtttttaacaggctggtctttgtaattagacgggcattaaaatgagtgcgtcctagattacatgaacattttcttcaatcacaatcaagatattagccctgccacatcaatctgcaattgttatgaaaatatacccaaatattttcaaacttaagaatacctctaaataaactgtaacttctgaattgtactctaaaattcagaattaggaaatatacaataaaagttcggaaacctttgccatcatctacttccttgaatgtgaaagagaatgtaatcagagaaaaggataaagaagttgtcaaacctgaaatcccctgaacagaaaggagctgccacggctaggctgcagccctagaactctgtacacaaattcagcccagtaccttgtcccctgcctactcccattcctagaagaatggtataataaacgggcagcccggcccacatttcagtaaattgaactgtcacggggagaataaggcaccccaaacagttgcagcgacagtggttaacaggaagtctctctgtcctccaaaccaataatcaaagggatacataaggaactcactgctttcttagaaggccacatgcaccccgggatgtttgctcatcacgtcactctggcctttaaccagggagcaaagagacagttgtgggtaaaaccctatttccaagctaacaattatccttccttatggtagactggggggtgcacggtacactcttgattacacaagcagtcttcttcccccctagaacaaatgacagaccaacaaaaaggagaaaatgatatgctgttgtttatctcttctgccagcctgaactcaagctctgagcagacgtgccagcggaggctctggctcccctggttcgccagacttccccatgtctggtcaactgtctcctgggcagccggctgaagagaggccccatttccctctcggtcttgaccgctgccgcacagtggcgacctcacacacatcgcgaacagaggacaactcccaagcgagggaacagtggaccctgcggggagaaccgcattcccaaacttctccatcaaacctccaaactccaaacctccctcctccagccgcctcctctaagacggagatagggacgggctggttcctttaaaggggtaagcaggccgccgcggacctgcctcagtttcttctgacgtacaaagaggtatcttttccccacaagccaactagacctgccggtctgcagggcgcttggggataatcgaggacgcacgtctcctgttactgcccccacaggtgaaacgctttctttgaggggacttttcaaaggacaggtgtgggctgccctgaaggcggggacttccagccagccaagggcttccccccacccctgtagggcagggagagtcccaggccgcgccccacacagaggaagggcccccagaccacagcctgacggcacccgaccgtcccccttcccgtccttccccaggccgggcgcccagcggcccccagcgccgccgccgccgcctcctcacctgctgcggccgccctcccggccggcacctaggagaggaggcgaggggaggggccggatcccggccgcggacgcctcaggcagggaggctgcggactccgccgcggcggcgtctctggggctgaggggcacccgggggcggtcgcgacatcctcacgggcggccccaggaagtcggccccccctcccacccatccccagccggcccggcccggcccggccgctcccgccctccgcgcggccccgcccctgactcggccccgccccctctcgggatcgcgcctccgctcccgccgcgcccgagccaccatagagaagagcgaggcgcccggcggcctcgagcgcggcctccgctcgcgccccctggcggagctgaggctcccgacggcggggccgggctggcctgagccgtggggccgtaggaggcgtcgtttccccaaagtcgtggggtcggccgctgctggttaccttggtcacacaactctgcgggaggcgcccaagggtccaggtccaagtttcagctgggtcaagacccggcttggtgaccttgagcgagtccctcaacacctctgaacgcatgtcataaaactttgaaaggtgcctgactttcatgtctcattgactctctcctcggtgcgatgagcaggcgatggtttcccccgcttcatgattgcagaaacccagccccactaggggttacgagcttattcagcgtcccacaactgggaggtattagaagccgggtctgtgggacctaaaaacccatgcttgtcccactcactctagcactgcccagtctaaaccgctaggactagctacttcccctcaggaaagtcaggaagctgctgaggaaggctgtggtagaatgagaatgactcagcgaggatccatccctgcctttcacccatgcacctttcagcaaggtacctaacctttacgaactctggttttctcatcccagaaacgcaggttggcgtgaggatttagtgagcgcatgcatgtagctgtggttagtaaaccgccaagcagcagggcggcccaggggatggttagccagcgtgggctacgatgcctagtcatgaacataatattaagttctaatccttcttttaaatggtgtctagtgacacaattttcttaggctttaggttctattgagaactcctagtttttctgaacaatttgtattttcaaacaaggaatatcgtaaggaaaa

SEQ ID NO: 64654 - DNA, 1259 bp, Homo sapiens
ggtctcgaactcctgacttctgactccaagtgacccacccgcctcggcctcccaaagtgctgggattacaggcatgagccaccgcgcccagctggcttgggatggactttttaaaaagacactcaggtttggaatgtggagatcaggagctcaccttgtaagacaagccacatttctgagctacctcttccaggtctgcagaaaccaggtccaccactgaaaacaaaacacgtatagcggattggcagagaggactggggcctcccacacttggtttttcctcatctgtcaaatggggtgtcaattctaccccccggcaggccgtctcaggaggccagtgtgaaataacaaagctgcaggagccggcgcggtgccctgcacacagtaggaatctctaccctgttttagagcttggctccccacgcccacccttcctgagcctctccagaagcgcggccctctaggaatggaggggaagcgccctgcaggtatgccagggcagtgcgccagccctcggggcctgcccaggttgtgcgaggcccgcgcggctccctggcacgcgcacacccggtcacctgtcttgatcctgtggctcctgagaagctggatcatctcctcggtaaggccagggcacagtccgaccctgagcacgcccatgttccccgcaggccggaacagccccagggggactgcacgtcacgtgggcattcgcggggggtcctctccagacgcccctcccctaccccttcctagagaggacacaggcgcgctggctgccggaggagaaaggagagaggaggaggcggcaccaagggtagggctgggggtcatccgcccgcccgggatccgccgggattcccgcgcccagagcccgcccgccgggtcgcgccgcgctgccgcttccgggttccaggctggcgcgcggcgaggacctggcctgcagcgccatctgcgggccgcacggggcagagccgctgcgcccctctccaccgcctgcacaggttcccgagtcccacgaccccctccgcgctcaacacgccacccgcggccacattcggcctctaccttctgccgcaacacacacaccgaccttctaaagagccttctgtgcgccagcttccgttccaaacggaacggatctccgctggagacaaaatgcgacacaagacgacccgcccttacccccagggagcttactgtgagcaagggaaagacagacaatgaaaaggaatcgcagaaatcacatcattacagattat

SEQ ID NO: 64655 - DNA, 1426 bp, Homo sapiens
cttcatcccagagtttggtttagtaaggctgggatggggtccaggaactgcaattttaaggacctcccctgtccccagggcagctcttcagtaaacacactggcttaaaggttaaaagcaaaggccgggtgcggtggctcacgccagtaatccccagcactttggaggccaaggcgggaggatcacgaggtcaagagatcgagaccatcctggccaacgtggtgaaacccagtccccactaaaaatacaaaaattagctgggtgtggtggcgcgcgcctgtagtcccagctactcgggaggctgaggcaggagaatcgcttgaacctgggaggcagagattgcagtgagcagagatcacgccactacactccagcttgccagcctggcgacaaagtgagactccgtctcaaaaaaaaaaaaaaaaaaggtaaataaataaataaataaaagcatgggtattcggatagttttgggttccaattccaaatctgctacctactacatagcatcgtgcaaaatactgagtccctccgggccacgctgtaaaatggggatattaacgtgtcccagactgggggactgtgacaaagaatcaatgaaatacagcatccggtgcgttcaaagctaggcccctctccgcaggtggacccctttggttggcgtgtaaagcgctatgccactgattccatctctgacataggtgggagctcacgccaggtgggtcaccacagtccgttagcgggggaccatgaaccgcagaccctcggtaatatgattcccccaccgcatccgcccgggggtggagatgcgaggccgccctggccagccacttacctgggccagtagcgcgttgcacacgagctgcagcctgtccggggtgatgtccacgggcacgtcgaacggggaacccagcagctgcccgccctcatcctggaactgcactagcaaccgctgcacatcgcgcgccaccgcctcgtcctgcgcgagcaagtggggcgggagtcagtctggtcgcccgcccagaagggccccacttcgcctctctcaggcctcagggacccgggccctagcgccccgcggcgacgccccccgcccccatccacgcacacccaccggcactgctgccgccatcctgcgtccccacgtggaggagaaagagcccggcagacagagcgccgtctccgtggtcgggcggggtcgccgccggccacatcgccctctgctgttggggaggagaagcgtcccgctgcgcacggcctcagggattagaaatgggcttacctggtgctcctcccgcccctcaacagccttcacatttatttttcgccagggtcttagaggacacagtaaacttttgactcttcacaacagggattcttgccccattttaatttaatttcattttgagacagagtttcactccgt

SEQ ID NO: 64656 - DNA, 595 bp, Homo sapiens
gctttttttgagacagattcttgctttgttgcccaggctggagtacagtggcatgatctcagctcctcactccaacctctttctcctgggtttaagcaattcttgtgcctcagcctcccaagtacctaggattacagacgtgcaccaccacacctggctaatttttgtatttttccgtacgccacatttcccgcgccccaccgcggggcggggattcggcgctgggctcttccctgttcactcgccattactgagggaatcctggttagtttcttttcctccgctgacaaatatgcttaaattcagcgggtcgccacgtctgatctgaggtcgcgggcctcgatcagaaggacttgggccccacacgagcggcgccggggagtgggtcttccgtacgccacatttcccgcgccccaccgcggggcggggattctaatttttgtatttttgatagagatggggtttcaccatgttggccagactctctcgaactcctggcctcatgtgatccacccacctcagcctcccaaagtgctgggattactgatgtgagccaggagcataaaatattttctaggaaatggagtaggatgcg

SEQ ID NO: 64657 - DNA, 4822 bp, Homo sapiens
gccagttcccaggaaggtgcaggacagctggagcctcttcttctctgggcagggatttaaatgttcttgggtagcctcgccagagacctgtgcggccctacagtgaccttctttccagccactttcccatgagctcaaagctttggattctgtcacttgcaaagggtcaggcctgatcccttgcgggttcttgagaagtgagtaagacttccagcgccccggcccagactgcgacgacccagactgcgacgacccagtctgcgcctggcgcaggctccatagacggcttttcttcagctctgtccactgagacctcgagcccttgagcagaagatgggagagagagggtcttgctgggcgggctccagaagtcctcctggctctgggcgcaggagttggaagagaagagatagagaaacatctactcaccagaattgtaaactggaagaagggtagaggaaaggtgcctagagagggcagctggaatcaggattgggctgaatattttaggagtccccaagtgctacttctatccgctgggagcacgggttcgaatctgcccccaggcagcccgctcctggttctcttgtccccctgtgctgcggcggggcccacttcggccctcgggttccccgcacaggccacacagggcagcagcgcgcgccgtacccacgggcagttcgagagggccgcgcgtggcggagccaggcccttcgccagcgcccagtacaaatttagtactagaattaagagaaacacactgaaatctgacagccccgcctaagacccgggcgtgaggaagtctgcggtgggtgatgaatacaaagaacagtttctctttcctgtcagtaaaacgctgtttccagagcctgccaggtttcgccccagtggccacacctatgcctggcaggtgctggtccgagcccctagcgccagcaaaagaaaggaggcggacgcaacattctcgaattactaggagaaggagggaggctttcccttccccccagtgccccatgtaccaacgcgtctcgccataccccttgcccctcttccagcagctgacggagtaattcgagtaggaatcgaaagatttggaggcgccgggggagaaacctgcggagcgctctccgagcctgtggcgtcccaggaagactccgagcggggccagggaagttctctggaggacatggggtggatacccaggtctccttccctgggtgaaataagaactgaaaatctaaaaataaaataaataaaataaaatagaaaacacagagaagcaacaaaaaagcgcttcccctcctcagttctccccagtccacccaaggtttaccaagactgttgtagttgcaagagtgggcttccggctccacgtaacgatgcgattgggctgtacctctgtctgtctcctgcgcgatgtcccgccccgggaggtgtcacggaactcagctgatataagcccgggatcccgccgggtcaggttctctgctctggacttgggaggctccgttgcctgctcccggagggagacgcgctgccgaggagaacccagcgggtaatgaatcccccgcgcttctttgcccaggccttccccaaacctccccccggtctgcgcgggttctcctattgggctgtggtgaagacaaggtgcggcgactgcagctccccaggtctgggcgctgccgggagagagtctttcccgctggggagatttagtttgttgactcaggagcacctccaacgacagctagtggcagaggacccgggagctgggaggttcggaacgcggggcgagctggggaggagggagaggcgccgacccagcgcagcctacatcttagcaaaccaaacctggcaacatttccccacggttcaggagcacgaaggacttaagggaaaacgacgaaatcggggctcccgaggatgaagttaaatgggttgtggcctggggacaaatagggccaatgtccagtctattacaagaggctttgttccagaggcttgcctataagcccctggcttggaacgtcagtcttcaaactgtaacaacaggggcaggctactagggtagcccacaaagccctgtatcccccatacagtgactaactagagccctagttggtcatatccgcagtggctgagactgcggtgtgattccgtttccctcttgcatgtgtcccgggagcccgagttgtcgaagcccaaattcaggctcaggaacctgatgtgctgttgatgccaaacactgacacacagatgcttggagacagaggaagatttattccatttggccaaagcgagaaggcaagaggtcaagatctctcaaatccaccctaacaaaaagaagtagtggggagtttttatgagaccaggaagtaagggagggggaatttcagggaacctcggggaaaagtctttcttcgtctcagattacatcttgaaccaccagacttctgggcgtcagcagctggtcacaatgcccttaaaggcattcattccttctgcaaaatttttttcttgactctgaagctatatcctcctgcttgacaaagaaacggtgcatcagcagtttataattatattgctagaaaaaggaatattgggcaaaaagtgggtagttaacatatgcaaataagcaagggcctcatcggaattttcatggtttcatcactaaaaatgttggggtgctgaaatcttgaggggctcggttgcaccagaaggggatcctttgtcactagtgcaggcaggaagggatgcttgagggaggatggggggaacttttcaatagttcctcccctcccctaccaatagcgggtgggagggcgttggtttagagccaagcctctaggagaagatgagagcaatggctaaagtttgtctggcctcgccctatgagaagggggcggaggctgtgcctgcctttgtgggggaaaaagaagccgattcctaatctgtctgtctcatgggaggtgagagttcctgtggcaggataacagacaagcaattcagtgtgataacatcctgtgtcagaagtattcatttaaatgtcacaagaggccgggcgccgtggcttatgcctgtaatctcagcactttgggaggctgaggctggtggatcacgtgaggtgggcggatcacttgaggtcaggagttcgagacagcctggccaacatggtgaaaccccatctgtacaaaaaatgcaaaaattagctggatgtgatgacacatgcctgtaattccagctactcggagcctgaggcaggagaattgcttgaaccaccccctccccccaccataaaaaaagtcacaagaattaaactcttttgtttaagaaaataagcagttttattatttccatgtaagaggaagaagaggaaaatgctgtgatccactcctggcctgattatgaaaattcacacgtgtttatagcagccccactttaaccatgggatatgtcccaagaccctaagttgatgcctaaaaccagatgcctgaaaccatgggtagcaccaaaccctatatctaatgtgttttttccctatactttcactgtttcacttaaagaaagcacttaaagaaaggcttttctttggcatatctgaattgccagcatcactactctggagatttggggccattaaataaaataagagttacttgaacataagcagtattagagttgatctggtaagtaagaaggctaccaagtgactaagggctagtagcatatacggggtgagtacaccagacaaaggaatgattcatgtcctggggtgagagggagtggatggcatgagatttcatcaggctactcagaatgaaacttgaaacttataaattatttatttctggaatttttcatttaatatttttggactagagctgactgtggtaactaaagcatggaaaaccaccagataagggaggactactatatactatcagaaaatagaaatcatttccagtattattgttatggcaaattgaatcatatgatatacactcttttatgtctggcttctgtcactcagcatcattgttttcagattcatctatgtcattgtgggtaccaatagttctttcctttttattacggttgagtagtcttctattatatggataatcaatattggcttcttcattcatctactgatgggcatttggattgtttccagtctatgtctttcacaaataaaaatgttatgaacattcatgcacaagtctttgtatggacatatgcttttttttttttttcctcttgggtaaatactttggtgtggaatggctgggtcatatggcaagcgtacgcagaacttcttaagaaactgccaaattcttttccaaaatggtcgtacccctttatatccctacaaggagtatatgacgatgcccattccttcacatcttcaccaacaactagcatggttagtcattttagccattctaatagatgtgtagtggtatctcactgaagttttaataggcatttccctaacgactaatgatgttgagcataattcaatgtgcttatttgtatccatatattttctttggtaaattgtctattcaagtattttattcatttttaaattgggtttttttatcattactttttgagtgttctatatataatctacttacaagttctttatcagttatgtaatttgcaaataccttcttccagtcagaggtttatattttctttttttcttaaacttttactttaagttcaggagtacttgtgcctgacgtgcaggtttgttacatagataaatgtgttgccatggtggtttgctgcacagatcatcccatcacctaggtat

SEQ ID NO: 64658 - DNA, 682 bp, Homo sapiens
attattgtcttatatttgtatttgtctgtcttcctaagtgcctatgaccaattcatcccctactctccaccctctcagtttactaagtgatctgtcaattgcatggtcttaggctctgtccaccgaagcctgctgctctgttgtgcagttttgcctgtgatctgtaggcctgctctgcagctgttattcccagacctcccttcacaaacatccaggggatttttaaacttcctttccttgttgaatctcttgtttcctgcatccacttttttgagggaagaaatgcagggggcagggcaaagacagtgtccagagagcatgaaatctgaaatctcagttcacagtgccaactcttacgacacagggttctgtaatcatgcatgagtcactgtttttcttcctacttcagagaacttcaaattttgccagcaatgcccagcatccattactgcaggcattctattttggtgtcatcaacttccctgctcaagttttcagtgcacttggcattccttctgcgtacatgttgaggtttaaatttctggatttcggccgggcgtggtggctcacgcctgtaatcccagcaatttgggaggctgaagcgggtggatcacctgaggtcaggagttcgagaccagcctggctaacatggcgaaaccctgtctctactaaaaatacaaaa

SEQ ID NO: 64659 - DNA, 1266 bp, Homo sapiens
gaagtttgtggaaagttgggattttcctccagacccttattctcctgcttcagaagggagagaaagcagaccgggatgggggtgcggggatcttcccgggagtggtggggttgtgttaccagtgccccacctcctcccgagccagcagactccccagaaatgaaaaactaaggctggaaggtttagcgatggagcaggaccaacttaccagctcgcggtgctccctagaagctggattcttcgcaggtgcgagcacaccccagatgccagcgtggacccttgagcaactggaagttaaaaacccacgaaaacagctctgagtgatctctagggagctctcgtttctttttcacccatgtgtattttttaagacaaaaagaaaaaaggtaatttaaagaaaacaaagaacaaaggaacttggcgaggcccaggctacagtccgcgggctcactctccacagagtaaaaagaacgcgaatccttttctgttttccggccctccccatcctgggctgcggctccacacttccccagcgtggcctgcatttctattgggcagctggcgctccggaagtgtccgcactctttattatcgactctgcgcctttgggcaattgtcactattttggttcatcaaaattgaagaaataccaggcattcttaccatgcccctaaaggggtgactcaacctttccagctgtactcgcattcccagagcagcactgctgcccccttgcttaaaagcacggttgcccccaggaaccaggccagggcagctgtggatggacaggagaggacaaaggtgcaaggagcggattgctccaggacagacagattcaaatacctacccctggcagtgtagggagcatcttggggccatttgggagattcctttattgggatgctccaaaggctagtctggccggatacagtcctcctgccactttgctttcctttagcccccttattatgataattatggtaatacatgtttttcctgctaacttgtctaagaattggtgtctcagtacatagcttttgaaatgcacacaggccacgatgactcatcacaggggaatgtgcaagtctgagttgctccttctccgcaagctccacctaccccactctggactgcattaactgcctactgcctattctaaaatcttaaggtacctaggaagagtacctattcacattaaataacgtatatattgaaagcacatagctgcgcttttcttcttctcatctgatccagacgccagctcta

SEQ ID NO: 64660 - DNA, 1313 bp, Homo sapiens
aaataaaatcagccgggcgtggtgacgcctgcctgtaatccaagctgctcagaaggccgaagcaggagaatagcctgagcctgggaggcggaagtggcagtgagccgagatcgcgccactgcactccagcctgggcgacttgagtgagaccctgtcacaaaaaaaaaaaaaaaaaaaacccaaaaccatttcttcccgcaatcccagggcacacacactataatcctgcctcaaatgctcattcccagttatgaaacagggtacaggcaaaaccactctgcctaacagtcaccccgacggccgacggcgaggaattgtggagggggcgggggagaattgctcagaacttggaaagcgactggtctctcaggatagagaccgcgacgcaaagaagtgacggaaaagatgcgtccgccatcccttttgctccacccctgacgttggcctcggccttcgattggctgctcctcccaccagccccgcctcaggggcgcccacgtgacccgatggccgccgtgggattggttgttcggcgagagccgcgctaggctgtaagacctgagccgggcggagaagcaaaggagagggaagctggaagcacctttggcccgggacagaaatctggagagcttggctacctccatcctcctcaggccggagcaggcttcctgagagagtccaggtcgtaggagttttacgacttagaaaagcgggctgcagattccttcctgggtgtttggttcaagccttggctccagcctcactctcagtcttcccgggagttcgtgggatttggaccttagattattagtattattttgagggcctcctgtgtgtaagcactggttgtgcgcagatggctgtgcagagggccatgaggtagaggctggggaaatgagggcttggaggtgcttgaggtatggtctttacctacgtgaaatgttggaggtaagtcggatttataacttgtgttgatgcttttataatctaggagcttagggtttagtaggaagagtcgctcattcaatgaattaaacgctcattcctatgtactaggcaccattccgagtgcagtggctacaaagactagtagaacatagtcctggttctttaggaactctgtgattgggcaagtgggagagagggcggaaaacgtgaactggtgagtagttggcgtgtgatgcgtgccgtagtggaagaaagtgctgtgagagttagaagagggggatgattgaaggaattaaggacatttaacagaaagtgatatttgagtaaagtttatttttgttttgttttttttttttttttgagac

SEQ ID NO: 64661 - DNA, 1876 bp, Homo sapiens
tttgttttaaataagtcactgttggaccctgaaatgctgggtattcagtacaggtctctacacataacagagactcagtaactcttaagtcatgggatacaagttatttgcaaattggctatttcaaacgctaggctaccaaataagcacaaattattcgtttgttttttacccagttgtccctaaaacctttccaagaattaataccttaccttgaccacatgctgaagagcgggtctcactgctgtcattaaactgtcctgtgctaccacctcaaagatggatggctggtcatcggccacagaagcagctgtgaagtgagccccgtgctcagccatagtttcctgcgtgtactggctttcacttttcccacaaactctctcgtgagcatgaactttttcgggaggaagagtatcagatgggtgctcagtcttaaaggtaaactttctgcatgatatctgaaactcgaaactcaatcttatgggcaaaaatgaactgggaaaaaaagacctggaggccgagggtagtctcaagaaggttaagaacaaagttaactcggacgtgggtggaagtagtatgtggcgagggggtaacttgtcaaatgctgcacgtcagggcagagcgtgactgtgggggacaggtatgggggaaggaacgcaatcctctggagctgcgaaccagaaacgccccctcctccccaatcgtgagagctcaaaagccagccgactctgaggattcagtcgtgccactgtgagcccgggacacaagggctgactccagctgttggctttgagtatccccgcccgcgcccgtccttgctcgctgaccccaggcgaggcgcaaacaacccacgacgccacgtttgaagggaggtctccgctttatgacagaagccgcacccggaaatgaaaccaccaggacctctgggatgcctggcggaagagaggcgctctagttccgaatgcggtccggaaaccagaactagagaactctatgacccacctgagcttccgctcccgccccgctgaaacagaagagggcccttgtgggctggttttggctagtttggtttacttttcgtagctgggtctgcatggtagcctcgctggaaagctacagctctgaacctctctctgcgaggtctttttgacaagctgtttggggcaccgcgcagacgtctggcgccgggagccagagctcgggcccgttgctgagccctgtgttcctgcaggcgatgaagctaggggcggtgggaggaagggaatctggaggtggaaaggactttgctgtacgcgtgcggcagggatggtggttaatttatatgtcttagccttccagaaatgatttaaagcgacatagcaggagataggagccttagatttattgccgccaattataaggaaagatgattggattgagaaaggttcatgcttgttcctcagtacttgagacggttaattttcatccaagctggtagtttaacgtcttccaggttttggctatattcaagcataactgcatgcacttgctatactggatgaaaatggtctccatccttgaacacagttgtatatgtcaccaccagcgatatgaatacagtactaacgcagagggagctttatgaattgtaactagcatgcactggggacacttgacagaaagtttcctttcatgccgtttttataccaaaatgaatgtgatttaccttaaggtttgtaaagtgcttttatgttatgtacagctttgtctcgctgaagttggctgacacagccttattgaatttggatgagagttccacctctcctcccttcctctgggaagtgccacctctgggctaaatagctgggaatagaaggtattgtttactgccctagag

SEQ ID NO: 64662 - DNA, 1913 bp, Homo sapiens
atacatgagtatgttatacaaaattttaatgtacttctgatcacttttttaagaatgaagttttaaaatactgaaacactttttgactcacagagttcataggcaaaatgtgagaaaaatcatcactttgctctccatccttccttacaccctgaaattaaccttagggacagctagttcatttaacatcatcaatcttgttctccagttccaggtcctggaatctagctcttagtgtccgaaagaaacttacttttgtgtaagcacacctattatatactaggcactttacctaatttatctggtttaaacttcacatgcccgagagagatactatcattgtcttcatttcacagataagaaggttgatgagacattaactgtctcagtcacattcagggtagggattcaaactcacatccaatgcctcctcaacctcttttacgtgcagcactatcctctagccccactgcccgtatataggcctgggctatatcaccattgtccgcccttgagcctggaaggaaaatgagctgaggggttttgttttttcagaaaggaacaggatatttcatcatctctatgtttacgtttttcagagaatttctgtgcgaggaaacaaatccattgtcagctttttaaaatatatccctttggagtagccacttaacatcctctgaggcccagatgggctagcttgccgggaccaaaggaaatctttgggtctggaaggcgacaagagatcacaggctttctaggtctaccgcgcaccccgatgacgtcacgcggcgacgttctctgacgtcagagtttcctgcccaccatctttgtccctggcaaagtgggttttgcgcagtggcttagacctagaaaagaatcgtgacgggcaggaaaccattacaccaccacctgggctgtgctctccggctcccgccgccacccccgccctcgccttcgcctccgcctccggtgagttcagggcggttgcctttagggtgtgtccctaattgacggggtcggggacggagagaagggtaacaccaggctgggtcggagaccggcggaggcgaggaaatcctaagagcgtgaccgttgatgatgcagggaaccgtcgggtgtgaccattgagagggaaaaggttggagaaagggtctctaccatgatgcctgtggtgcggtgagggaatcctcgggtgtggcagcaggtagttgggggcaggaggggaagatgtgtttcggaattgagggtttagggggaccagaggccaggggtgtggctgatagagcctggaggccgtggggggaaccgtctttcttccccgctcggcgtcgttcactgagaggctgagacgtgtccagcaagccaaagggaaaagggattccctcaaaggtttgctcattgatgggcgaacgtcgtctctcgggtaacttgagggtaagagacaacctcttccctgctccgtaatggaggagcatatcgctagaatcttgaccacctggggaaagaagaggcattccttactcttggaggaaggaaagagtaacctccagaattgacccgatgtaagagagggggaagcaaatgggggcaaatcttaacccagcatcttttttttttttttctttttctgggctctgcagtaatggtctggtttgggaaaggctgtagattaagctgaaagtaaagaaactggaacgtcctgttatttccttatcatttgaatccaaatcatttgttcatgctgcttgttttcaagagtagtcttctattggaggggtggggtggggggggacaggcctttattgaactcacgcggatgcttcattaaacttttgacttttattttattttatttttgtatttttagtgacagggtcttactgtgtagcccagtctggtctcgaactcctggg

SEQ ID NO: 64663 - DNA, 1153 bp, Homo sapiens
ccaagatcgcaccactgcactccagcctgggtgacagagcgagactccgtctcaaaaaaaaaataaaaataaaaataaaacaaagaaaaaaagcgttttgttatccatgaaagttgaaaaatacagcatatgctaggcttcacctggaaattgccattgcacgttagcagactaaaagttctgagaagtgctatactgaagaaacctatttaactcagtgttaactgaacttatttggccttggaatttaaaatcacaaaatacttattagtaacatcatgtggaccaccagtattccttgaacatgatctggaaaacactctccgagagagaacagagatagaccagagtgattggaaagcaggttttgtttcagacatgttcagtatgaaagggacatggttgttcaaaaaagaaaatagaagttggggtgactgaggactttggtctgtcaaaataacagagaagaaaaaatcctcctgcttttagactggagttttgaactcttattgcacctcggcatgtttttgtgatcttatcaaagaggaagtgtctggcatttctcctagtggggctgtgccctttgatgtcgtttctcagagcaaattcagttttgatcaattctgtcatggcctcacgccaatcgctccatgctgtaggtgctccaaataccaatgaatcagattccagtgatacactgctctgtggccatgccgcacatgaaacataggggaaaacagtcattgcattttctccaggagtccaaggccaacattttcccacattaaatcactgctagtcttgcaagaccacttcctgcaactaatcctttccagctcttcctttgagtccacccccaggtctggagtgccctggcctttagatttccttccagtctcgagggctctattaacatgaacgtttttggctttagtgccttctgattcaacaccctgggtctagctgagagctaaaaataccatcctttccagctgatctgccctaatcacaatagcaccaacactttaaatagcttttctgtgctagcatagacatttgacagatggaactaacactctgagggctacaggaagtcacaggcttaaaggacttaaccaacttagcactgagctttactttgctctttcatgtc

SEQ ID NO: 64664 - DNA, 1265 bp, Homo sapiens
aaccagcatccagaaacagataccaacatgacagtcactatggcatacccacacacttatttctgtctttgtcctcttcagagtcttctttacctgtctagcacctaatttgagattgccagctccttaggcccaccaatatcataatctccaaaggtaactcgcactaaaccataggtgtaccttattctgttttcagtcctggaatgtgataggcagacaagtcatgaacctgttcttcactttttgctattgtgtgggagaatggcttctgaagtgtacacatgtccatgtgacagtacttgtcagggaactgaacacacatggctcataaggatgtgagaagagagtgtacatttgtttgagattttaactgaaggtgttggattttgaatctgtatttctagacactgtttccagcaagttgcaaaacaacaatgtttatactattgccaagaggaatgtggaagggcaggacatgctgtaccaatccctgaagctcactaatggcatttggattttggccgaactacgtatccagccaggaaaccccaattacacggtaaggcctttctcagaatgggtgagatggattagaggagggaggtgagagccctttcatgtttacttagcaccctagaaagacctggaggaggtgctttaaacctgagatatacaaaataagtagtcaatgaagaagcttccatttgcctcaatggaagacctcctctctgcagtgtctgccccatccaacaggaatggtatctctggcaagtgcctcaaatccatccctcccccctggtgtatacagagttgctcacaaaacttggcagcttcatcctcaatatcagttaatacatatctagtgtatctgtgcatgtggtactataataagctgccgagaggattgtttacatagttaatgtccagaagacctttcttgctgttggagttcatgacctaaggctatcagagtcattaacacatgagcttttttcagcagcattgtatgacctgaaatgcttgttattaaaggtgaggcaaaatggaacacacctttggaagcgtataaggggactttagtttgggaaatttccttcagtatcacactgaactaaagtaaaacttctggcaataataaggcagaagcagttgctttgttaaacagcagattgatagccaagcactaggcatttgtttgctgttgtaaaatgcaatttcccaataggatgtcatctgcattttgaaaagtaaaggaaaaaccc

SEQ ID NO: 64665 - DNA, 810 bp, Homo sapiens
gcaatccatctgtaaaaagggaactgctttgaacatggcagttacacctctgttctcaattcaggtgcttctgtctcagacttgcctgacctcagctggatgcctggttctcttccttgtcccctccctttcctttggggaggatggacagaggactttctaaaggtagccagggaattaatgtctccttagaggcagttttgctaggtgagtgacttgggagagaccaggtcacaggtcggcatggctggcactcccttgtgcctctctccacaaacacacccagcccttatcagggagttggctccggttctggaactctgaagccttggacagagtgggagggaggggaaattaactggcagcgtctcttgtttcctggctgggctgctgtgcctagtactctggcaggcaagacggggtggagggcaggatgggggttgggggtgagggcctttttcaggggtccctcagaggggaagtcctgggcctttcttcctaactcgcctctgggaccctgtaggtagcaaggcagagttaaaatctcagtaagcagaatgagcatgtgcccgggacacgagccaagcagagccactgaaagaatgagaaaaagaaattttaagaatttgacattttgtatttctataaaagcactgaagtggctgtgcgtagtcatgcctgtaataccagcactttgggaggccgaggcaggtggatcacttgagggcaggagttcaaggccagcctggctaacacggtgaaaccccgtctctactaaaaacacaaaaaattagctaggcatggtggcca

SEQ ID NO: 64666 - DNA, 2380 bp, Homo sapiens
taccctctccaacccaggtgatcaccagctcttgtctagtctaccccggggtatctctgagatcgcttcacttacctctgtctccagagctactacctaagtccagggcactgtcatctctcaccaaaattactgcactggccacctaattggtctctgcttttaagcgcctctcatccccgtgcatttttcatttggcagccagaaaatacaaatctgatattactcctctcctataaaatcctctggtgagtggttctcatttcctccaagataaagtgggaactctaatgcatttgacaaggccccagctatttagccccctccttttcgggcatcatctccttctactctccccttgaagaactacttgttacacaactagtctgcaaagtactttgctcacttctttactcggtcaacttctgcacaacacctagggtttggctcagataccatgccttcccggaaaacgtctttgctggctctctgagcttttccagcccgtttcctgctgcagagcccaagcggccttgggcccaccccgctgggccgtgcagcattttggttaaactcatatgcaatatatcgttgggttaccaggcttcaaattccaccttggccgtttactagctgtacgacctaggtcaaatgaattctgtcttctcatctgcaacatggggaaaatatttcatcagtctgttgtgagaattaaatgagatgatgtaaggtgcctgacaattaagagtcagctattattatagtgctgaaaattaaagctcgatccctccgccccgccacattctcagggtcagattcgtgtacgatttcgttttaatgtacccttttcttccagcatccttgtttgctactcggcgagacagttacaacaaaccgggaagcgatcaggtacgcgagctggtcacgactcacagtcccagagctcgccgactccgaacgcccccaggtggcccaagcactctgcagcaaaagccgccagctaggacgtaccattcgaaattgtagggaaagaaaggctttgcataaccaaatactctgtgtttataaggtccctcctctttcgtttcctaaccgcaaattccatcacacccaataaagtgagaaataggattgtaaataagacggagcaagtaggttccacttcctccccgatcgtgatcgtggcattggtactttctcttctcaattccctctcaataatggtacggctagcggaggggggaatagagggccctgggaaggcctcagggctcggcggctagtaccagtgcagaaacatccctcctgccgcagctttgtggtaccacccgctgcccgctgattggctgccggggtcccgcagtccgcctcagcccgccgcgccgccctcagtacagctccggccgccgcgccgcctggctttcgtattcgttgttctcggcgggctgtggggcctccgcgccgcggccgttagtcatgtcgggtaggtgacttcttcagcgagcagcggcagcgacgagaaggtcctggcggggttgggctgtcttcccgcccaccggagggccctgaggagaagcctccggccctgagggaggcttggggtgggggggcggccgctgccgccgccatgttgaactggaggcacgcacgctcccaatggctccccggctgcaaatcacggcgggagcgcctcgggcctcttgtcttttgaccctgtccttggaacccgaggagacttgccgttcccgggggagggtgtgtgtgagtcggggggcggaggccgtctacgccatcgtaggggcggggggagccgagattagagcatcagcctgagagaagcggtgcttctggttctccgctccgcctcggatctttcagcgaggcctcgggccagtcatctcgccgcctcgtacctcagttttcccatcctcgaagtggagctgggcctgcctgactcacccattcatcaggtgggggccttgacgctctgggagccctttcaaaggacgttgccttacacgaaatcgtacttatcgttattcactctgcagtaaccacctggatttgagttgggggtgtttgcatagtaatttagcttcctcttcaccctcctgccattcgtcttccccaccagtttatctcctgaaagagtttgaaagtgagccttgtctatctattattgataagctcctgtaggtgtatgtggcatttaccttaaaacatgcagaccaaaggaaaggcaatcttttttccccccacgaagcagttaacttggcagaggccacccattgtgtggaagagaaagagaggcattagtctcttcaggacaaccagtttggatcctgctaaaccagaataaaaagtctagaacatggatgtc

SEQ ID NO: 64667 - DNA, 950 bp, Homo sapiens
tcttgatccacagggcttgttcctatcagctttcacgcctctggcaccccttttcctagcataatcctctaaagccaggcccatatcccctccagcctagtgtagcccctctcctcccctcccttcctggcacagtctttttttttttttttccccatcattcactcttttccaaagctaagctggctgctagccaaggctcacattgtgatgttaggaaaccaaatgcaggcagagaaaatgaaaccttactccatctggattccaaagcttttatctgacatggagttcccctcctgacttcagactgtgggcagcagctctggctgttccagtgctcttaaaaacatgcccaaagcagggacattccccccatcctctagaaatctgggatcccaagagaagcctgaggcaaagtcatttcctcctgatgaaacttaattttccccatctgcaaattggaggttacttcctggttgtttctctccttctttgcccctgttcacaagtctaaatattccccacctgagactggaagctatctcactctttgtttctgaaggaccctgcatggggtaggtgcttcattggtgctggttggaggatctgccagaggcaatagggtgcaagccaagaccttgtagcaggctcaggggacttcccaggaggaggcagaatttgaacccaagactctacaacatcctggcctcgatttttggtccagctctggttggttctttctgtgttattctgttctgctcctcaattcctctcccctcccctccccctcctctccccaccccttcccccaccccctccccctcccctcttctgtcaccttgcactgtgcactttaatgcacattgcactatgtcaaggtactaactttgacaactgctctcataattccaaccacattcaggctgagggttgcagcttggctccccctc

SEQ ID NO: 64668 - DNA, 1658 bp, Homo sapiens
gatgccattgtaggtgctaggctctggcacaggcacttggcggagcctctgctttgggctgatgtcaatacatgacagcgtctcatctccgcaggtacagagatcacatatgttggtgcttgtggaggccttctgttcctcttgtgcagttaaagccttattttgggtgtaactttcagactgaaccaatgaatcctgagtaggttctagttgaaaggtggacctctgacttcagtcaggttttgaagctgagtctgaacctggtctggacgtgaagctgcagtcttgtccagggctgtagaatgttcaatgtctgtatggggtctagagttatggcaagccccaggtctggaggctgagttgaggtctcctctgtggttggaaaagtttcacccctgtagtaggttctgtatttatggtaagttccaagtccaaaagttgaactgtgacttgggtctggtttgaatactgagcattgacctttgtctcgtggtggaagtgtcaccttagggtgctttggcagaggagctgtagtcatcatggctctagaaggttcaacctttgtagtgaattgtggagtaacggtaagccccagatccaaaggttgaactgtgacactgggtgaggttggatgattagcttgatcctggccttctgttggaagagacatctcataataatacccaggagggtgaactacaacctgcttaggtagctctggaggctgagttggggtcttatgcatggttgaagaaggctcaacctccatagaggattctggagttaaggtaagtttcagatccaaaggctgaaatgtgacttgagtcaggtttgaatgctaagtctgaacctggtgtggatgtggaagtgtcacctcagggtgctttggaggaactatagtcttcttcaggggtgtagaatgttcaacctctgaagtgggttctggagttatggtaagtcccaggtccagaggtttaactataatgatgggtgatattcaatgctgagattgatcctgacctggtgttgaaattgttacctcttgaaatactggaggttaaggtgtaacttcctgaggatgctaagttgcggcctcctgcatggctggagaaagttcaacctttgtagtggattctggagcgatggtaagccccaggtccaaaggttgaagtgtgacactggccagtattgaatgcggagcttgatcctgatcttgtattggaactgtcacctcataatgagctggaggttgagttacaacctccataggtggctctggaagctgagttgaattctccatggttggagaaaatatactctctgtagtaggttgttgattcgtggtaaatttcagatccaaaggttgcactgtggcctcaggtttgtgtgctgagcctgcacatggtctgaaggtggaagggtcacctcagggtgttttggaggagctgtagtcatcctcagcattatagaatgctcagcctccatagtgggttctggagttatggtaagctccaggtgtaaatgttgaaatgtgacactgggtgataccggatactgagcttggttttggcttgctgttggaattgtcatctcataatgctggatactgagcttggtcctggcttgctgttacaattgtcatctcataatgcattaga

SEQ ID NO: 64669 - DNA, 462 bp, Homo sapiens
ttcaatgaccttacaaagtctgagctggtgactgagttgtgggctcttgagggactggaggaagttcatcattttcaggggtatttagctgctgaataatcatttcttgctggtctttcaaatgctgaaactgctaaggggacattgaggactgagctggggccctgtgtttggttaaaatttcaacctgttaggtgaactctggagtcatggttaccatgtgatccacaggtttcacagtgtcattgtgcaatgttggaggctgaacttgatcatgacttagagaaactgttacctcatgatgcactggagattagctataacttcaatagggatctctgaaggctgagctggggtctattgctgtgttggagaagactcaacctcctcaggcatctgtggatactcagcagcagccttctgctgggctggagagaggttctcatctttaatagctggaga

SEQ ID NO: 64670 - DNA, 2880 bp, Homo sapiens
gagaatcaaagatacatgaatggaggccaggctctccagggagaccaggtcatgcaaaaggaggtctcaggctttgaactattgcttctttagtcagatgaccccaatctttcatatattcataccagcctcaggcttgtgtagatcagaggtttcttctttttaaagtatagcctccagttctagtgccagatcttctgtaatttgtagcatgacctttgctaaatcgctttccatctctggcctttaattcccttatcttcataatgacagaaagctcctttctgtcttatgttctgtggtcctagaaaaaagtcagattctggaacaataaggcctattgagcacttatctgctaagcactctctcacattgccttttcatcctttcaacactggggggtaggtatcataattgatctattttacagatgaggaaaccaaggcttaggaggattagtagttacccaagacctcacagtgagtgacagagttgggactcaaacatagatggtctgtcagagtctgagtgtggagataatactctttttgtttttaaataaaagatatggggtcttcttgctatgtcgcccaggctggagtgcagtggctattcacaggcataatcatggcacatgacagcctcgaactcctgggctcaagtgatcctcctgcctcagcctcctgagttactgggactataggcatgcaccactgcacctggcttggagacagtgcttttaaaccattgcatcagctgtgtccccaagtgccagctcaggctgctgatgactctcaatagttgctctcacacgtgcaagcacatgtatgctctcatgggaagaaaatatgtgttcatgcagcccatctgagaaagactaataatatttcaaacaggcctgctgaaaccagccgcaggacatctggtcatctgcttcaaggattcatggtgtctaagacggctgtgtagaaagaggacatgcgagccgtcctctgtgactcccagtaaaatgctctttgtactatccagagttgttctctcattttcttcccttcctgttccagttggttcccccatgtacccagccacctgtattctacaaggcaaaaggtcagtcatacaagttgttcaagaaaaggtttatttgctttaggatgaccacagctggaaaactctgtatatcagaatgaccgaagtcctttctgtatttgtgtgtgtttaaggtcagccatctatctgcctgccttgaaaagactgggaatatccttcttgaaaagcaactgaatgcacgtgagaaaagctcttccagttctgaaccatcagaagtttctggcaggctttttattatgtgctagggtggggatttgactttgtgtatatagactctcgattactcaggttttcagactgacacctcagtgctcctgaatttaaaaacaaaacaaaacaaaacacaagacaacgacattctgttccagcttgccagaaccccggccctgagcttcctgtttttagccttgtcctgttttttaggcctttgaactctgactccctggctttgaccctggtgctggctaaggactttgaaacttcttgccgcatctgatgttgtcctgacttttctgtcaacctaggccctgccggcctcactcccacccccatgtttgctttggcctctgcaagcaaaggtctgggcctgactacattgtatgttattgattctgtcatccccaggctgggagctcctggaggaaggagtttgatcatatttagctgtaacccctgatagcaaggagggtggagagaaattcctggatcaaggagcagggactcacagtccagggagggaccaaagcaggtagcactgcctctgtggaggagcaagagcagcaagcacatggggctcctctgagtcaatgcccgggtgattgatgggttgttgcccaagttcaggtgcttttggtgcaagtaacagaaaccaagatctgcaaactctggctagcaagaaaagagagatacccacacgtccatcagcagattagctggataaacgaaatgtggcagatacatacaatggaatgttagcctagtgactaacaggaataacgttctgaagcatgctacaacttggatgaaccttgacgacactatgctggtgaaataagctagtcacaaaaggacaaatgctatgtgattccccttacatgaaatacctagagctgtcaaattcatagtgacagaaagaagaatagtggttaccagaggctgggggaggagagaatggtgagttagcatttaatgggtacagagtctcaggttgggacaatgagaaaagtctggagatggatagtggtgatgtttgcctaacaaagtgaatgtaggattgtacacataaaaatgtttagaatggtaaattttgtctctctatatatatatatatatacacacacacatacacacatacacacacacacacacacctatatatatatatatatatatgtatttttaggcagagtcttgctctgtcatccagcctggagtgcagtggtgatattatggctcactgcagtgcagtctcaacctcctgggctcaagcaatcctcctacctcagccttctgagtacctgtgaccacaggcacacaccaccgtgcccagttaattgtttttttttttttgtagagattaaaaaatatgtaagatctcaccataccgcccaggctgatctcaaattcctggactcaaatgatcctcctgcttcagcctcccaaagtgctgggtttacaggcataagccactgtgcatggccttgttatgtgtgtacacacacacacacacacacacacacacacgtttttttgagacagggtctcattctg

SEQ ID NO: 64671 - DNA, 990 bp, Homo sapiens
atgcctcagccatctgagtggttgggattacaggcgaccaccaccatgctcagctaatttttgtatttttagtagagatgggccatgttgtccaggctggtctcaagactcctggcctcaagtgatctgcccgccttggcctcccaaagaactgggattacaagtgtgagccatcgcgcctggcctagaaatttttttaaaggaaagatgctgggacatctcatggaactgaaagaccagctgaacctcccagcctggagctggggcaggaagtgaggcagttccagggacctcaggacagaagttcatagacctctttccttgggacactgccagaaactcacttctgctctagcagcaaccagactgagtttctcaggtccaaatttcaaatctctctgagagtctgattggccagctagatgagatggccatcctgggaagatgagcttgggctggggaggcagctcgtttttttttttttttttttttttgagacaagagtctctctctgtcgcccaggctggagtgcagtggcacgaactcggctcactgcaagctccgcctcctgggttcatgccattctcctgcctcagcctcccgagtagctgggactacaggcgcccgccaccacgcccggctaatttttttgtatttttagtagagacagggtttcaccgtgttagccaggatgggctcgatctcctgagctcgtgatctgcccccctcggcctcccaaagtgctgggattacaggcgtgagccaccgcgccggccaagggaggaggctcgggttttaacaacatggccactggggggcagttatgagtcagtttaccagaatccaattcattggcccgttttcagcttgacacttcactgcatttatttgtttctcttaaccatccggtcttaattacctgtcttaaccatccggtcttaattacctggcttttgttttgtcttcacaacagcgttttgggagaatgtt

SEQ ID NO: 64672 - DNA, 5079 bp, Homo sapiens
cctaataaggcttcccctgttttcataggtttacccctctcttctgtaaacaagggcttccactaaagcctggtcatcactgggagttgaggagctggggttgaccattctttgctgtaataattttaaccgtggacaagttcctggtaggcagcaaaggtaggttgggatccttgatgtactcttggacccagtcgtcattggggttggtgcagacttctcggttcctcttggtgacgaagctgcagaggcagaattagaccgtcatgggctgcagactcgggcaggagtccggtgcccacccccacctctggttcacatggagctcaccttatgttctttaaagcttccctgggcctgtcctggctgggttccctcagacagcctctctctctggcctcagaaccttaccatcccttctctcagtcccttctccactcagcctagaccctcaagcttgggtttcataatgaaccacatagctaaaagtggcaaaattaggaattaatcccaggcccctgagagccaaaggccaaacccttagccactgctccactgcttctagcatggagacctcttgatcccatgtatctcattcctgcccctgggctccctgtccctctccacagaaatatctaaaaggacgtgcttacatgattgctggcaggtgacagttgagggcctttctgtatcccaccactagtctccttggcaacactttctcataatacttcaggcagcaggtggatggggtgttcacccactcaggaacttctgaaggaatcacattgcaagctgagccagggaagcagaggggagaccacagctgcccacctctgtctcccaccatttgtgtttcactcctctgatagcaaagccgtctgttagaggagaccaatgatagcttgactggtaatgaagtgcataagatgaatccctttgggggacatacatttagaaccctcagcctctgagctgagtgtcaactacaaatgacttggttattcacacttgccaaggaaccgggaggaagctggctcattcttttgtttattggtgacttgatcgggcaaacatgtgttgagctagtattatatgctgggctctatgggggtaaaaacatgaggaagatacagtcactacccttaagtaacttacagactagtcagggttgaaagagaaattgaaaagttaaacaaacactaccacagaatgtggtccaggatagaacagactttggcataaggtgctatgggaacagaatgaagggcccctaacccatccttggtggttgaggaagaagtctcaaagcaagtgaggcctgcattgattcgtaaaggatgagtaggatttagacacacggctgggtgtggtggctcatgcctgtaatcccagcactttgggaggccgaggcgggcggatcacctgaggtcagaagtttgagaccagcctggccaacatggtgaaaccccgtctctactaacaaaaattagccaggcatggtggcacatgcctgtaatcccagctattcgggaggctgaggcaggagaatcacttaaacccgggagtcagaggttgcaatgagccaagattgcgccactgcaccccagcctgggcgaaagagtgactccatctcaaaagaaaaaaaaaaaaggatttagacacacaaaggacttgtagaatctggaagaaagaaatgcaggaaagcctgaaggtaggggaagctcagtgtgtcttgggagtgctgggcagtttgggtggctggcatgcaaggtaggaagaaatgaatgggcagagatgaaactggagagaggaggagggtctggtcacatacctgctgagctactgaggaatttggactctatcttagaggtattggagaggcggaggttagggggaagggtgagagagtagagcctttagagacagaagttagagcaggaggaaaaagtatatgatttaggctttggggtcagacagcttgggttggaattttgacttgatttgaattttgacttgaatcatgggcaaatttcttaatctccctaggtttcagtttcctcatctattaagtgggggtaaatgatacttacttgtatcctaggatcatggttagaattcggtgagaaaatgattggaaagcccttaactcagagcctggcacacagaaaggctcaatcagtgcttattataattaagagccaatggtagtaatgactgctcttcttgccttggaaatggcgcttccccccatctctttgatgtatgcaggatactggacttgattggttattgtcactgtgtttcctttgagctgtcctgactacccatcaattggggatactacacaagaggtcagtccagagatctctcccagcccccaaaccttcagagtgcaaatctttttgtagcttgacccctttgcctccagtgagtggcaaagcttgggacatcttgagagcaccatcttgctgatccatgctttgggtgggccattttctctttcttgaagcctgaacccactgcactggcctgattgactctcccaaagagcactgttcccccctcccacacagtccctctgtaagtgatgctcatatcactggttctcaaagcaaagtttacaaagaccagggtcatcctgagagtatgtgggcagattacatggtgcacttgacccttgctcctttgtgtttacacaggcagagtcaggccagactacatgccagggtgaccttaagagagaaaagaggccaggcatggtggctcatacctgtaatcctagcactttgggaggccgaggtgggcagatcacgaggtcaggagtttgagaccagcctgaccaacatggtgaaaccccgtctctactaaaaatacaaaaattagctgggcgtggtggtgtgtgcctgtgatcccagctactcaggaggctgaggcaggagaatcacttgaactcgggaggcggaggttgtggtgagccgagatcgcgacactgcgctccaacctgggcaacaagagcgaaactccatcacaaacaaaacaaaacaaaacaaaacacaacaagcaaacaaacaaaaaaacaaaagcgaaaagaatggctggggcagcctagggcaggtacacgtctttgtcctccccacccccgtcaccaggtcctcgtaaacaatgatagagggaggagatacggaggggcaaaacaaaccccctcctccataggccccaattctccctttccccacagctccaaaacctttcaacccctttcctcttttctgcagattttatttagtcataggctgggggatggagaaggggaccatagattcccaagcagccattccactgggactcattttggttgtctgatagtcccagcaacctgtgccagccatgttgaggaagggctctctcggttcagactcccaattcctggacttagacccacatgattgtttgaaccttccttcctctcgccactcattcttccagggcacctgccacttttctttctcatccgcgtgcctccccctccctttcattgcatgcacttcttgttgcattttctgctgctttcttggcctctcctcctgaatgatcattcctgctcaccacgcttgggactcctgaggaaatggtgacccagtttcctggaactacttaccccagaaagatccggaccaaccccagctctacttacaaaggggagaattggaggtcagaagctatgcatgaaggtggggagagcccacagggtcttatgaggccagagacccgacagcgcccttggcactacctccctgccagctgctccatccccctttctcgttcctgccctacagagacaagtggactcacttggctggctgcgagaagccgaagtaatgataaggatgaggacaaggagagacagggcagcctcggagaccttcatcctctcagcgaggcagtacagcttcagggagagccgaatgaagatgttgtctgttgctggtggtccgcttgccaactactcagctctctggaccttgaccgcatcagagccggtagaggaggagaaacaacaggcctcagtgtttgctgaaacagagggcagcagaggatgggacttggtgcagagctgaattcagtagaatctgaattcacgtgaagaaatgggcgaatgtgtgtcagctaccttacatgccctatcttatataatccttaaaatagtgaagtagcgattattacttccctgggactactgaggcctagaggctaaataaattgtccaaggtcacctgggtggataggcggatgaaaaaccagatctgtttgatttcaccatgttacctgccaccatctgtatgttggggaagggcaggcagggttgaaccaccccagcttcccccaggtgatcagtcttggggagatgagcacaaagcaggattacagagcccagactgaggcaaaggtagggcttagttgcctctgagaaggaaatgccctctcccagtccaaggccacatgattgagctcacactctttcatgtcacagtgtatgctaatactccaaaaaaaaaaaaaacaatgtgcctgatccttgggtccccatttgttgctggaccgtttgacttatttgtcaatgtttttatttatctctttggacctcggactttggactgatttttaggtgtagccagctcgctgatccctcctgggtgcccccatggccaaccatgaccagcaggggaccctccaactctgtgcacctgacaacctgcgtctgtgctccaggactccagcttctgcccctctggcctgggctctggctggacctgtcccacagcttcctctctcttcaggtgcctcaggacccttttccatgttgaaagctgcatttagagaagagatcaaagatataagggattttgctgttgatggacagcaagctttagaggcataggtgatgtgtttcaggtgttgagggcagtgggaggcaggggcagaaacagggactgtgcagatccttatggggctttctgcttggcatgactgctcatagataggtaaaccgtataatgcagttactcctggtgggtt

SEQ ID NO: 64673 - DNA, 2532 bp, Homo sapiens
aggagaatggcgtgaaccggggaggcggagcttgcagtgagctgagatcgtgccactgcactccagcctgggcgacagagtgagactccatctcaaaaaaaaaaaaaaaaaaaaaatctttacagtggccaggcgcggtggctcacacctgtaatcccaacactttgggaggccgaggtgggcggatcacctgaggccaggagttggagactagtctggccaacatggtgaaaccccgcctctactaaaaagacacaaaaatcagctgggcttggtggcgcatgccttaatcccaactactctggaggctgaggaaggataattcattgaacctgggaggcagagctttcagtgatccgagatcgcaccactgcactccagcctgggagacagagtgaaactccatctcaaaaaaaaaaaaaaaaaaaaaaatcttgacagctcgggagagactgcccattgcagggctaaccaattcatagagatagctaagggtttagacctttcatatacaaatcaaaaaatcctgagcccatatgcccatccacctcctttgctaactcacacacaccaagccagtatttccactgctctaaatcatcctaaggatgagtactagacagctagagactatccctataccccaaagcctgaaaggcttattcagactacccagccctaaagtgtatgctctgtgctgccttgctttcccccgagaaaccccaataaaggttctggcataggttgtcccttccctcctgtttgtgactcctgcccgtgactcctgcccgtgactcctgccctggatgcttcccttggggccccgtgtggcacggtgtacctccttctcttgggaaatgtaaataatacattcttttttcaatgtcattgacctctttgcgttgacattcacctccacaaattaagattccacaggaacaagtgagacagtgatcttgggtgagtcacttacctggctggttccttttcctctcacaaatcataattttacaccagatggtagatagcagttctagcaccataaaattgtatgattctttttacaaatttacaatttaattacagttcttttgttccagctaaaatatcagctaagggaaaaaatcagataatttttgctgtgaaaagggaaataattggccccaaatgggaccagtcatctgtgtacctttccccgccagggtccaaaggctgcagacagagccaggtctataccctgctggtgctttttaaataagttccataaccatgtctgggctggagagtagtcacaacatgtctccgtcccagagcttgagttaccatggacctggtcacctgggagaaagctcactggactcaccatttatgaactgggcctgggatccaaggacagcaacaagcatgaggcaggagagggcagccacggagaccttcatcctcctggtgggcaggcagggctggccgaggactcctgggctcactgcttcctggctccccgggataccagctctgcccttgtatttataagaagaggaggatccaggaagtcccagggcagagggcagaggtcagaatgctcttctttagctatataatagttaccatgcagtttctaaaaagagaacaaggctgagagtgcaacagaaagtagaggacaaagatgacttgaactgtccctgtggatttcccgaattatcccaatagctacaggcagataaaaaaaaatgtttcaaggaagagtcttccctccaggagattaatctaatcctctaagcctgagataggagtgggggactatcttagactcttggattcaggattgggatgtggtgaatgctgccttttttccctttccagttctattcctgtagttccaaccaggaggtgttagcagtggtgaatccatatcagtctgcagcagcctcagttcttgcctcctcagaagaaataattcaactgaggggtataaggcagagtgagagaccgagacaagatttagagcaggaatgaaagtaaagaacacttggaaaagtgccaagcaggtgactggagagattcaagtgcctggtttgacctttggattggggttttatatgctggcattccgcatgcgcagtggtctgccagcactagggaggggctgcatgcacagtgtgcttactggagttgtacgcatgctcacttgaggcattccttcttgaccagtcaagtgttcctaggtcacataccagttgaactctgccattttgcctcttagtgcacatacttgagcctacttgcctgactcctgagatcttaatgggaaactgttgatcaccagtttgagatatttctatctattgggagactgtctttgctggtgctggctttgaccaattactgttttagagagacagtgtaacaactgcctgaccatcatctgatggttgtctgacattcctggtggggcagggggctctcctgccctgctcatgtctgaataactacctactatgaaacagggattttttttttttttgagacggagtt

SEQ ID NO: 64674 - DNA, 711 bp, Homo sapiens
ctctgctaactaaatttatatctaataaaaaacttagaaatagataaaagggtccaggcgcagtggctcccacctgtaatcctagcactttgggaggccgaggcgggcggatcacaaggtcaggagtttgagaccagcctggccaacatggtgaaaccctgtctctactaaaaatacgaaaattatctgggcatggcggcatgcgcctgtaatcccagctactagagaggctgaggcaggagaattgcttgaacccgggaggcggaggttgtagtgagctgagactgcaccgctgcactccagcctgggtgacagagcaagactctgtctcaaaaaaaaaaaaaaaaaaaaacaggtaaaaggatgactgcatggttttcaaggtcatattacaatgttgactaacaggcccaacccggcattccttaaatctgtaggggaatgaacttttgattgatttctgtttaccattgatcaggccctagattctgagaaagtacatgttaaattttaaacttgtgtgtagccagatgcaaatgatttctgtctattaaaaaagataatcccagaggttacaggtttttttattgccctatccacaggatattaatgtgtgctctaatttaacaaacttatttcagaacatcatccccagtaaactatacaaatctctgttactcaaatgatctttgaattattttaatagttctc

SEQ ID NO: 64675 - DNA, 1209 bp, Homo sapiens
cttgtcctttgccaagaataagcagatgagatgggcggatgaaccccaatgtccctgcaagattcaggaagtcccagccagaaagtaaaggacgtttagttccatgtattgttttcttttttacatgcggggcaacacacctggacagtgtcgatggcttgctccaagccacacggccgcatagggacagggactgggctacataacaagttcttcgacgctgtgatctaatcaaggaaaacctgggacgcagctaatagatgcgcatcgagtgtatcgacgctctaagtacgagggctggaacagtgagcaggatcagtccattgcttttgcctacctgctgagcgctgattggtccccgtttaggaaacggaaaaaggggcgtgcacgcgggcgcggctgcgtgagaggcgcgcggcggcgcagtaaacagtctccttccacaaaaccatggcgtcgctcaaatgtagcaccgtcgtctgcgtgatctgcttggagaagcccaaataccgctgtccagcctgccgcgtgccctagtgagcggggaggtcgcggggtccaggggcgcgggtgtccggccatggcgggagggcgggaggccgggaggccgggcgggagcgggcgggctgctggaggggccggggaccctcggggctgacgcggcctgtggcctctgttgttacagctgctcggtagtctgcttccggaagcacaaaggtgagccccgtccccgccagccctcgtaccactgcgcacggggcagcccccacgtccagcctccgtcttgggggcgtggacccttgggctgcgcttcctttcccgcctcgggtctccgcgggttctgcaggaaccttgcttcctctgacttggtccctggtgtctctgtgtgtcggacagttccctctgttgtccctgcctgtaatcgctctcagggttttggtcagtagcctttcttctaccccgcttctccttctgcgtgttactcttttttgcttagaaatagtttccgattgcttttcccaccgaggtctaccctagcagtttcttcctcagtattctgatgtagcccctcaccatttggctgaaactgcgctaactttaacagtattttcactcgtgtaaataatgtcttgttagaaacaaagaggtaagtccatgtacaatacaaggagacgtccttgatttgttaagagaaaaaaagaaccaagt

SEQ ID NO: 64676 - DNA, 2217 bp, Homo sapiens
gagacggtaatgagtaaatggaacaccgaatcaaggcaagtggcaacctgatcaccagtccctccttctcagactgtttctttctaggcatggaggacagtgggagggcagacgctgagaagcgctgggtaaggatctcatcagtccagctggctccgcccccaggttcccggcgggaaccggggactcaaggtccgggcgtcgtgccgcaaacccagggctgggatgccgttccggaagcacctggcacggggagagtatgtccttcccaggaaggtggacgtgaccccagccaagggcgcagctgccctgacacctcccgggaccagccgccccctcccggggtcctcagctgggcgaagagtggagcaaggaccctctccccccaggccgccccctgccggccaggtggaaaggtggagggtgatcaagaaagacttgtttcaagcaagagccaagagctgggctaccccctcgtgagacacaagagggtcaaaaggaaaaggcaaaaaggagggaaacggcgctttggaaggggaggtggagacgcctacttcttcctcaccgctgcggggcaaactggcctcccaagccccttccgcgtctgaagggcttcagatataggttcgggttgacactcaccggtcccacggcccgagccgccgtgcttcaggcccccgcccggccagactggaaaggcgggcgggccaggtcaggcggcgggaagaacacgggcaggagagaaaagaggaggggcaagagcgtgcagtgaggaaaggaacctgggagcgccgaaccgcaccccgtcggctgcggcactgctaagtggccgggggtcggccggctcctccctaggggcggggcgagcactcgcggcgcggggcgcgcacgtggcttggccgggacgcctggtccggcttgctggcttcaactacggtgagatgttttgcgaccctggggtaaaatgagggtaaagcggcagcttcccacgttctgggggagaagcgcggaagcacggtttcctgggccttcgggcgacaccaggactgggggtctttcagtagaggtcgccgcggcggagtcttgtgcgagtgcggcggagtgttgtgcgagtccggcggagtgttgtgcgagtccggcggacaccattaccctgatagggcctcgccgtgaggtctgaggggccgtgtgaggtgcatggcgcgccgtttcctctccaggcgctcctctcagggctacggccctagaagatctggcctgcaccagcccaaaggacatgacaggagtgggtagcccacgggacactggcacgagcgccatgatgggcggagacgcgcggaatcggccggcccggaagtgccagctgcctgcgtcggccggaagtgccgcgcgggaggcggaagcggctggttcccgcgtggtttggcgggtgcagcggcagtccggctgcccttcccacgtagaccgtctgctgggggcgccggcaccatttggagtacgtgaggtatacgggtagggcgcggccaggtcgggcgtctgttaggaaaaagactttttatttttatgtttattttttaagagacggagtctcgctctgtcgcccaggtaggagtgcagtggcgcgatctcggctcactgctgccttccacctctgggctcaagcgatcctcccgcctcagcctggcattacaggcgcgcaccaccacgctcagctaatttttaatttttctttttttttttttcactcctggccttaagcgatcctctctcctcccaaagcgctaggattgcaggcatgaaccacttctctcggctaggacttttatttttaatggtcaactgatttgagttggttactgtgagatattgtcacaggttccagacaggccataatgcacgcatgcattcacttacttattcagctcatggtacatttagaaactctaggttcatgtttaaccaacaaatgtgttcttccagtatgccgtttttcagacaatgatgtgtggcattcagaggtgttttacaacccttaataaaagagcaactaacactagtatgtgctatacatccattcttaatgcacccaccgtacctacttccatcctaacctgaaaacatagctgtctgtaaatgaggaaaggagcagcctggggatccagaaatcactgcaggggtcacgttttgtaccaaggcagtaggtttggagaggctctg

SEQ ID NO: 64677 - DNA, 3025 bp, Homo sapiens
ttagtagagacgggggtttcatcatattggtcaggctggtctcaaactcctgaccctcaggtgatccacccacctcggcctcccaaagtgctgggattacaggcgtgagccaccatgcccgacccaaaatactttttttaaaggtatcacagctccaggaaatagagcagtaaattgatctgtccttcagatcaccaggactttcataggctaaatatcttcacaacagacctccaaaaccttcaaggtcagaactgaacacacggtggcgagaggaactgtcttcacagcagctctgcttcctcggagacggccagagggaaaggccgttggccagtgccagtacttcgcccaagggagtacctgctcacattaacccagcccaagaagttcctttggccaagacgcacacacacacaccactgtccggttttctatttccttccagtgtaacgacaaccacaagctatcagcacttcactatttgctgtcccctcagcgggatcgggatgcagctacgcagcgggcccctggcgagccgcggtgtcagggcccttttctcctcttcccaccgtgggaagcgaattcagtggcgtcaagggccaagagccagacctgagtttgtctctcaccccccgatgctcgtctcccttttctcactgccttccgccccctctgatctcgacttctcgcaacctatccaggtcctctctgggcctctgccctgagtcagccccgaatcagacgggcttgactcgctgaaagaattcccctttgagaggaggcagattcccctctacatagacgacaccctgacgtcgaggggcttgcccctcgtccgtggggaagccttcccggcccgcggctggggcctgaggttgggccgatcacccctcctaccagtcctagttcgggtctagcggaatggctgggctccgagaagggcgccgggcccacgggcgggacggccagggcggccccgcaccctctgggcgcaaatttctccagcggggtccccagcgcggccagccccagtctcgcgagaggacgtgggtcccgcccggcgcccgaccccgcccggccccaccttcccctcgtcccccgccctccttcttccactccccgcggcgcgagcggctgactgcccgtagaggaaacgacattcggagctgcgctcccgcccaggccggccctgacgcgggcctcgtcagccagtaacagggagcagaggtgggagttagcgaggcgaccacgaaaacggtgaaggtcggaaccgacagcctcctccgagaagggtgaggaaagggtctgagcctccccgttccctggactccgcagagccgctgcggggtcgatccctcccaggggcggggtcgcgctgggcaactgcagtcctggggccgactgggcggggtgcgcccagaagcggggagaaggggtcagttgggggcagagggcacccgggcggcgggcggcggggaacaggctgcggggcccaggccaggggtggggtcctggggccgggactcctgcagcgggcggggaagcccccggcaggccggtcccttccgcctctcctttggaccctgactggaggccggcgggcgggcgggcgggcgggagagagggagggagcgcggcgcgaggggggcgggtcccggcggcgctgggcgctgattggctgagcgtgtgtggaatcgggtgatgggaaacgcagcccggctctcccgtaccctcccgctccgctccctgccccccgtggcgaatgtgctgcgcagcggcgggtgcttacgctcgcggggtttggctgttgcaggcaggagctgggaggaggcggcagcggcggcggcagaaacagcagcggcggcggcggcggcagctgggaggaggtggtgacggtggcaacggcagcgtcggggacgatggcgcgactcgtggcagtgtgcagggacggggaggaggagttccccttcgagaggaggcagattcccctctacatagacgacaccctgacggtgagcgggccgggccgggctgggcccgccgctcccctggcagctgtttcccctcctccccctcccccaggccgagcgctgcgcactggagaaagagtgtgttgcaactcctaggcgaggccttctcttcagcaggccccacaaactcgcctttgcagtgggtggctcggtaacctctgtcggccccaagcccagagctccgtacgcactccctctctccagattttccttcttttggaaccttattccttgaccctttccctttaggagacgctgcttttgccaaagcacacatctcagagaggggttgaaggatcttgggcgtttagggcctaccccatacagaaaccacctaccctcggggaggcttaattacctggtaatgtcgcagctgcactgctacctgtgtattttctgttttaatactggtagctctcaccacataagcttaattactgggggcagagtgacatgctcgtgcacagtcaagattccactaaaatggtttgatttcgttgtaaatagtctcgtattgcctaatgcattaaaactcttgaaatgattgtattgctaggccctttcttcaaaacgggctttcttcgcattatttagtttacaggtggacttttttttttttaaaggaagccaaattattgaatgtgtaagagtactataaaaagctgattgctcatcttgagtgtcaagacccagttccgggtactttattctttagatttggtagtgtagcattatcgaccctctgccctatgttgctgtactgtttcctttaaaaggaaatggctgaaatttgaattgaatctgaacaggaaatgagtgcagttgcttgccacttaagaaatgaaattaaccttttccgaatatcttttgaaatctgcgttttgatgatgctgaagctttggattatacatttgcttatttcgataaggtgcacctaagtctcttcatctcatcagtattcttttgctatcaaaggcagttgatcagttttg

SEQ ID NO: 64678 - DNA, 683 bp, Homo sapiens
gaactcctgagcttaggcagtctgcccgcttctgcctcccaaagtgctgggattacaggaataagccactgtgcctggctgggagcagtattttaatataaaccttttcagatagttgtggatattcttcaatactacactttgaccagtggtagtttctaaaagattcattgcaatatggaatctggcaccttatcaatgacctttttgtactctgttaaattagaatccgttggactatattggactttgaatagatcttttactcatgcattgttttgtaacatcatgcattggaatttatttcaaagttcactgaattatgcaggtcagaaaagtccaagtattaggaagcttcaagttcatagcactgctggttgcaaggccaaaattctgattgttgtttcaatgtttgagttttgtcattgacaacagttgttgttcattgtttcctttgaagtaacagattgacttcattcatttttgagaaaatgcctgctaaatatccaagtctctcagtttgtctctcatttattcgttcaagtgaacttgatgttccaggaaaaaagttcagcttgcacctcaaaaagtggcacaagtacgtttccttgagacagctgcaatagaaatgctttaagcatacttcccatttgtcacatacttttttttttttgagacggagt

SEQ ID NO: 64679 - DNA, 1732 bp, Homo sapiens
gatacatttgctacagtggggtaggggtaagcgtgggggtctagggcagttagacacagtgggccatttagggacagaataccccagtacacgtgtacttaggagtatttcagttctccgtggctagtaaagccaagggatcaggtagggtgaatgagtccttcccaaggtcacctagcattgatggcggagacactcggcgttttctgggccgaatcccttcccatcagccaccggcgggtttgggagggtgtggaagagtgttggagtcaccttaagtgcccttaattcctcatcctggcattagggttcaggagtagagaagggagactaagcgggacgcttcagtatgcgcccttggggctgaaggaacctccccgctaaacctcggtttccctgaccccaaagggcagcgctcactggggaagcggcgccgccagctgccaggacgctcccgcgcagcccggtttccctacgccggggcggggcagaggggcggaaggggcggggcggccgggccgcggcggcctccgactggatacggcggatcgccgggggcctgagggtggagtcccggccggaggcaggccgggactctggtgggtctaggcgcggatcggacccaagcaggtcggcggcggcggcaggagagcggccgggcgtcagctcctcgacccccgtgtcgggctagtccagcgaggcggacgggcggcgtgggcccatggccaggcccggcatggagcggtggcgcgaccggctggcgctggtgacgggggcctcggggggcatcggcgcggccgtggcccgggccctggtccagcagggactgaaggtggtgggctgcgcccgcactgtgggcaacatcgaggtgaggccgggccgagggcggggacgtcgcgggcgggtcgtttccccggagtcgggttcacctgcccgccacgccggggccctttgctctagtcggggcggcctctcggatcccttaaggcaggcttctcccttccccttaagtctcatctttgaaggagccgtttgccctgacagcccctgctcgagttaccgaatctccgaccccggcatctccccacccgcccctcgggtctccccagggtattggcccgaggaaggggaagccggaggtcgggggtggtggtctcgcccctgtggccttctcgcccccggcggccaagtgcctctaatctccagaagtcacccaccacgcagggcaaggtggctggccaaccagatgggcaggagccaggactgaggttggggttggggtgggagctttactgaagagcctcagccccgccccctcacctcgggggtaactcatgcccagtggcatgaggaatgaatggaatattcattagtgggccctcctccactctcctggggcgaacagagtgggtgaaatcgggcggaaaccttgagaggataaagcaacctggaactccttactctgctcttgacgtggggttgggagccctcagagctcagagaaaaatcaagatggccattttggagcagggaggaatttctgtgctaggctctctctggatgtgccctgtaagctcattctcagtgtcgggctagtgcttagctgcagggctttatctccaccgtgctcaaagtcctcaggcagggaaagggtaaggaggccttgggtgggggcagagggagaaggtatacaggaaggaggactgtcccctcccctgctgctgaccaaagg

SEQ ID NO: 64680 - DNA, 2137 bp, Homo sapiens
gcctggcccagtggatttcatggtgatcattaaaaaagaaaaatcgcaaccaatctgccttggcttcaggagtgtctttccattctttccccttctctgtgatcaggggtgcttgtgtctcagaatttcttccaggtaggtcccaggtgggtggattgggggcctcactcatgggagtatggattaccttaggtagcaggaatgggtttgtttgggccttgaaaacatgtaggagtttgacaaagcgaagacaggtgtgcaaggctgagaggtctggaagagcatgcagtgctgtgcgaacagctcagaacttaagcacaggagcaaggagccagatggggctgaagaggcagctccttcctgccttcctggatcgctggggggctgagtgctgcgcaagagtctcgccattacctgtgggacgggggcgttagtgagcttgtcagcaggaacacgacaggctcagagtcacttaggaagagaatcagcggcccgggataggaagtgactgttggggtcctgctggctggtgatgggctagtgagaagttctgggaaaaatcaccagcgccgggatgtggggagggaggcaacaagactgaattggttgaccaggaaggccaacccatctccttaaagggcccttcactggtgcgtgggtgaatgcggtccccggcctcctgggacctcgaggaacacaggacgcagccggtagtacggccagctcagctcgccgctcctctagccttgagggaggcgctgtgggggacagcctggcagccacgcatgcgcaaaacaccgtcaggaaggggccggggaggggcgggctcccgaacccggaagcgagggacccacgtgggagcctgggagcgggtggtcgtagctcggtagtccagttgtgggtaatcggggctgtttgttcctgtccgagagagctcggcggagacggctgtcgagtacccttcacctcggtgttgggagcctgggagcgaactgcggcgcgggttaccgctcccggggacgcagcaaggggcatcgagtccctggcgggagctgcgccatggcattgctctcgaccgtccggggcgcgacctggggtcgcctcgtcacccgtcatttctcccatgcagcgcggcatggggagcggcctggtggggaggagctaagccgcttgctgctggatgacctggtgccgacctctcggctggagcttctgtttggcatgaccccgtgtctcctggctctgcaggccgcccgccgctctgtggcccggctcctgctccaggcgggtaaagctgggctgcaggggaagcgggccgagctgctccggatggccgaggcgcgggacattccagttctgcggcccagacggcagaaactggacacaatgtgccgctaccaggtccaccagggtgtctgcatggaggtgagcccgctgcggccccggccttggagagaggccggggaggcgagcccaggcgacgacccccagcagttgtggctcgtcctcgatgggatccaggatccccggaattttggggctgtgctgcgttccgcacacttcctcggagtggataaggtcatcaccagccggagaaacaggcacggacgtccctcattctctatgtgccccaacttggagacgcagccgagttcctaagcaccttggcccttgggtgatcccttagccagacttacctgtcccagaactctcatccccctagcccttgggagccctgggagggtagggagccgggcttgagatggcccagcctaatgcggggaacggggaaaccttgcagctgcccgctcactccagtagtcagcaagtccagcgcgggggctatggaggtgatggacgtgttctccactgatgacctcaccggatttttacaggtaatgaggggcaagaggggaaggaacagatgtgagcccagctcagcctcttcaaggggacgaagctagcccctggcgagggagagaaaggggcatgttggcaccgcttcctttggccttctaaatccctctggggatggaagggtcctggagtttttaaaacggcaaatggagcattagctgaattcttcctagcgttataccctttcctgcaccccttccccaggtatgcaccactttgc

SEQ ID NO: 64681 - DNA, 1622 bp, Homo sapiens
aaagaggatgtaaagcgattgtgtctttccgtgtgcggggtgcaattacatttatactattaagtctttatattttgagtctgtccctctaacggtagacctgtatttttctgcatttgtgcacctgcttaagctgcctgagcatgccctcatctctgaacagcaaagataatcaataccgaggggtatgcagtggagtaatccacaccccaccccctttcccttgctcaggcaagggtacttagagacgctactgaaactatctttagccacagcgattcctaagtattcccattaagaaagacgccagcagtccgccacacacttacacgtgcgtatccctgacataggattcccaaatcctggccgctgaagggcgggaggcgtgtgcccggcctcagactactataaattgcgaaatgacaaacctgctttgggtcccagtctctgcgtgcccgagtgcgcacccgcgattcgagcagcttaagccctactccctcctccttcccaaatcagccaccgtgggccacggctacgctatgctttattcctaagcgaatctcgcacaaatctcgaggcatattttgtacaaggggacactggccgcgcgcatcgcaatcgcatctcagcgacagaagcggtcacgtgccttggcgcgcttccgcaccgccccttcccgcgcactcgcacgcgcacgcgcacacgcgcccatacggctccaatcccttcaaccttctgcgcgcttccgccttcatgctagcaacgcccgcagtgacgcgcaggccccgccccctcccgcgcgcctcccggaagtggccggtccagagctgtggggtggcctccgcgcggtctctggcggagtcggggaatcggatcaaggcgagaggatccggcagggaaggagcttcggggccgggggttgggccgcacatttacgtgcgcgaagcggagtggaccgggagctggtgacgatggcggggccgcagcccctggcgctgcaactggaacagttgttgaacccgcgaccaagcgaggcggaccctgaagcggaccccgaggaaggtgaggccggactggggcaggccacgtgcggagcggtgggccaggccctgtggggcaagggggcggcgtgggaggggcgtgcgcgaggccgccgggcctgcgctccttcgcttggcgcagaggaacgtcgcctcccgcgagggtggtcccggcctcgggaggagggcttcggcttcttttcacacgcactcgaaacttggtgctcggctggatgggcggaacagatcgagggctcaggccgagaggagctggtcttcaggtttacttgctccaggcctgttggagggagccagagagtctgctagcaagttggaagttagctttgaggatgccctttctggtattgcgttagaaaggaggagaagaaagtcgcatgtttttaattcaggttgcccttcaaaactaagttggagactgatggaaggattttctggtgctgtttaagtctcttgaagtctcaagacacttgttcagtggctgacgactgagactcctgttctgtaagctgatgttcagagtctagctgggagtaatcccgctttagacttgagtcggaagtg

SEQ ID NO: 64682 - DNA, 802 bp, Homo sapiens
taaatctgtggatgctgaacccacagcatcagagagccaactagtctggagaggatggcagaccctagccgactgaggtgctgtgtgggaggtgtagcagtagaaataatcctgctccacccttgagggatgcagactgctcaggaagacttgcacaagacgacttcctcactgagccttgagagattagtaggcgtttgcccagtgaaagacaaagagaatgtgtacaaaaaggtttgtaagcttgagagagtctgggacccattttgggaactgtaattaatttgttttggcagagacttttgtagcaaactggaatttgaactaattggtctgattccagagcctgttcttttaacctctggctgttgagttgtttcactggccaactggcctataccagcaccaaaagtgaatatgagagaatggcaggagataaggctgcatgcatgggtgagtgctagatcatgaccacgttaagaattttggactttattctgtagactgtagtgagtcattgaaagattttaggcagaggaatattgtcatcacatgcacatttcagaaagataattggctgggcacagtggctcacacctgtaatcccagcactttgggaggctgaggcaggtggatggcttgaggtcagaagtttgagacaagcctggccaacatggtgaaaccccgtctctactaaaaatacaaaaattagccaggtatggtagcatgtgcctgtagtcccagctactcgggaggctgaggcgggagaatcgtttgaaccagagaggcagaggtttcagtg

SEQ ID NO: 64683 - DNA, 792 bp, Homo sapiens
ctggaaccattcctccacagataccatgggatgactgtagttggtcatcccaatgacagtggtaagtgcctatgaatttttccctatcccactttgtacccagatgttccagtgatcagttctggagtttgttaactcactgaatgtgtttcctctcctaggttaatagttactaatgttgctgcctgttgcttcctgctttatttaggtttcatgtccttagcaagctactgagtttcatggcacctattgaccatactacaatgaatgatgatgccaggtgagtaatagattaattatgtgtctcaaatggcttcatgacagcctgatattgacctgctctacagccttcgccctctccatttcttcttatcagttaaccatttgtcattggcatcgcagtaagggtcacatctcttcaccctcataattactataaaaccaaaccaaaaacttgcataaatttcagtgctgcctttggtggtttgtttgtttttcctgttttgttttgaactttagcccagcgccctgggacatgtgagctctctaggacagggcaggtggcccatgttcttgccgtttgtacttggggctgttgtgcatatgctttccttttgaaagtggctctagtgagtgctctggagatgtgcatatgttgtatttgttggggattgtgagtgtttttacaaaagatgtatatgcttattttataaagctgaaacgagagaaatacagaaaaaaagtgtatgctcataatattaccgttcagggataacctttttaaaataatag

SEQ ID NO: 64684 - DNA, 875 bp, Homo sapiens
ctagatgcattgctggagttgagtagtttctgcctcctaaaattgcatttctgcatgtgcctaaaagtgatttggggtactcaactttctaatagtgtgtaaagtagtggaggtgtatctgtaacaaataacgcaaagccgtgagagccacaagttcgccactcctactgggcagaagtccattccagagtcccggaaccttccctccaggcagcaccacgtgcagaggttggtggccaggaaccccaccccgggtgtttgcataaagctcacccattgggagccctgctcctggttgatttgagcctgtgcaggtgagaggagggctaggtgacaagttccctcatggctggcggtgactctgtggagctagctccttgagggccaagctccaatgtccctcttcagccagagtctggaccgggaggtatgggccagggaaaatctgtgatgtaatcttgtttacatgcctattggatgctgagtcataaacacagtctgggcctgggccagggctgtggcttgaaatcagagctctgctgggacctgaggtcacagaaatagattgcaggagttgagccttgggcacgtacgaccgaggttgcttacaggtgactggaagccctcaccttccacagcatcccgccgggcccgccaggcgtcctcagacacaggctaactagggcttggttgggcaagatcagagggtggcggaccagagcagattttgagaaaaggttataataaaatgggtcatagatgcggctgttgtaatgaatttgatcctaaaggattcgttttgtaactcgattagcttagcaaggtgccagggtcaatttccgtgcttagctgctaaagagaagtttaaacttcat

SEQ ID NO: 64685 - DNA, 774 bp, Homo sapiens
ttcctagtcttaactttccaggcaaagacatactttctgcctcaaacaagcaactctggctcttttcagctttcagcctctcgaagatggacataagagttggaaaaacacagctcagatactttgatcacctctgccagaaaagcagcttaacccttaagtccccttagcccagggaacagtccttttcctgtcattctggctgctagagaaggcttgggaggaaggcattcctgaagatttttacagagaagcgtatcctcacctgccaccacaatgctccatatctgcacctggggcaaccttgaccctgaaggcatggtgggtgtgggcaggcctagaaggaccaggcaagggccagcagcagtgctcactcagtccatgctgctgctccctgtggcaggcagtcagggcatgttctgtgtgggcgcagtgcggtgctgcatggcaggctgcccagctgcctgggaacagggccacaactaagaacaagttcccctaagcggctcctttgcccaggtgctcttcattttgagagagagggacagtggggaacttacaattgcttcacacttgggctggacagttctctctccatctaaattgatttgtcatttctctctgaacacaagaggaggggaaggatccaggagaggacctcaggtcacagcactcaagaggccaggctagcaaggccgtcccgctccacagccactctccctgctcctggccttgtgaggcagtagaaggatgtcagagagagacaaaaaggac

SEQ ID NO: 64686 - DNA, 738 bp, Homo sapiens
tttcaaaaacacaaagactttctcacacatgaacacacagggcggcacacagacagagaaagagggggatctatacgcaagacacagacacaaagagacagaaagatcagcacccacacagaaagagacatgcactcagggtgacttgcacacacccaaagtacacaatacagagagatacctacagaaagaaaggcaaacagagatgaagaaaaacaccagcacacacaaagacaacacacagaaggagtgagtcagaggaagccatctgagcatggtagtttccttttttcataccttataggcaaaggggctaataggatattctgaacgaatttgcataaaatcgggtgtcttcagcagcacagctctatacttaagaggagctgacatgaagatagtgaagcaggcagagcaacattaggtaacctctgtatctgatcactcccttcagctaaaaacaaatatgcccttttggaagtgagcattgtttggtaagttaaagctatagctttatttatctttcaccctgtaactaagcttttgttttaacaagcagccctgtaagctatgacagtgaatataatgaatttgattagaacaattcaatcagattttaagaaatcaatctctaatgtttcttcatggcacaaatgaaattcaactagcaagttttcaagcaaaacaaaaccaaaaacccaacatctgctttttgtaatattctttgtatataatata

SEQ ID NO: 64687 - DNA, 1061 bp, Homo sapiens
tcttgagataatgagcatgtttttcctcctttcatctatttcatgataaattatattaattgactttctccaaactgatcaaccttgaatgcgtgggataaagccaacttggttgttatgtattattttgtatgttattggatgcggtttgctgatatctacatgaggatttttgctggtcatgagtggcataggctgcttttaaaggaagtgaaaaggagcagataaaggaaaatgtttcaaatttcagataatgtttcaaattctgtgatgtttcactgccatcttgtggcaggaagcaatgtcagcagtaaacagctttaaaattttagccaaggttatttcacacttaagagacaatttatcatttagtgaagctcttcagagaaagccagggataaagtctacctaaatgatatactaaaaagtattggaaaacctgaacttgctcttcctagatgcctctggttcaattcatggattagctgccaagaatcaagctcttcagatatgggtttctcaatttcagcctgtgatgactcaaccaacttacactacacaaggtcaaaaagatatcaacaggaatggtaatctctattagaaaaattacttcagccctttctcagaagcacactggattcctaatttcatcaagctgtgtttcgttgttctttctttagagctagtggatatagaggtttagtttttaagggagtagtgataggagactgtttattaatgggaagtgttgttgacaggagggggcttagctcttacacagtcctatagggatagtttgggttggttatcagaatcaaggctttcttagctagagagtcctcaggaagaggcttaccattctggaattgtgtctctactcgcaggtactgccggagcagatccatcaccacagccttcatgtggcctcggatgccacttcggtacctaggcaaatagaaagtctccactgaaaaacctgacaatccaacactattaagcaataaacccaaaggccaaatttacctccacgacattccactgaactgctttccctctgaata

SEQ ID NO: 64688 - DNA, 2276 bp, Homo sapiens
tttttagaggtgatttcaagtgtccattagtgtccactctcccactctcaaatccaaaataatgttggccccgatccgggcaggaccttcacgcacattttcctgtgaaatcattagcttcacatcagcttcctacgtcctatttccagtaacttcccttgatcagcatggcaaacgaggagagtaacaaaaggcatgtacatttactatgtccctcgcagagaacataataaaatcctgggaacaggaactggcagatacaacctgcctggccctggctctcgccacgatacaaaggcacggagagagcaagtgaggtctgcaccccacacctcactctgcaagagagaaaggactttcaatgcaatcagacccaacccgcaacgcccccttcccacgtggtcttctccctctcccgagcccagaatcggattggagaggggtctggaaggaatcagaccacgctggagctgggcaagaggggtggcgggcgagctccaggcagaaactccagccccccttcctagaggagccctgaactgtacgcctcccagttccgggatctgaatccccacctcccgagaccccagacctctccatgtctctagggaggggacctcaaggcctcagagctgcgggaagggctgggctgccccgcacccgatctggatagtgtggagcccaggccgcgtgcgggtgagcggaggctgggaggcggccccctgcctgccgccgcccctcccttggccccagtttctccaggtccccggtcacaggttctgggccggccctcacctcacctcagggtggcaacgtgtgcggtcgggcgattccggagcccctgcgtggaggaactgctgggcgggaggagacgccggcggctcgggcgatggctgacaggcgtgcagcaccaggccggcccggcacacggagaaggggcggggcttcaggggcctgacccgcccccgccccgcccctgtctcccacctcagccggcgagctccatgaggtgactacgtccggggttactccaggccgttcacctccgaccccgctccgggctgcggcgctgccagggccgccggggggcgaggcgcgggcccgagggctcagcggcagccaatgggagggcggcgcggggcggagcgatgtgaggcgatgccgatggtccgagcgcggatctgccattcggggcccagcggctagagggcgggcgggccgcgggcgggccgcgggcgggccctgggcagtcgtggcgcccctggcccggccttcgcggccccttctgccacagccgggtacggggccaacccctcggctcctcctcctggcggagaggggagtgggggaagcggtcccgcatgcgcctcgcatcagggacagaggcgtcccaagtgaggggccaggactagccggcctgtagaggcggggaaagggaacccagaattaaggcgggctagaatggggcaggcggtgtgcgggcccgtttgtctgtttaatcctaacacattaacaaggggtgggcaatcgcgtccactacctgtcctcatcacgctggctggtttccaagtctgggcgagctaagtaaccccatgctggaactccataaccagccccccgtttcgctcctcagccccgagacagcccactccaaaggtgttatacatgctggatcctggcgtgttgaggagaagcctcagtaaacgaagctcagtaagaaggggaatgtaccaaagaaccaccgtcttctgcctgccctgagcaaaatagttgccacagcgttccagacttttcggattggagaatgcttcccgtcctccactgtgggcacgccgagcctttgagaggaagccagtcggtgtctctagttttgccagttacttcatagcaagactttcatggtagctgtgtgttgaaaattaataataactggaaggggtcccaacacaatacaaacattgcgtagggaagaaacttggagaaaattgcacttgagaagaacagggtgaactcagcccttccaaggaggaatttaatgaagcatgcagcgcaccttcttaatgcttacaaacttgtgaggaaggccaggagaggtgcagaggatgacagtttggtaggaagaagttccacgccagagagtaaaaagtgaataggatagaaatacatgcccaggtaagaagttcttggcggaagctgaggcagaaagagggaaagattggtcaacaaggaacaatatttatctaggagccctcataatcccactaagtggggcttcc

SEQ ID NO: 64689 - DNA, 778 bp, Homo sapiens
gggttcaagcgattctcctgcctcagcctcccaagtagttgggattataagcatgcaccaccatgcccggctaattttttatatttttagtagagatggggtttcaccatgttggctaggctggtctcgaactcctgatctcaagtgatccacccgcctcagcctcccaaagtgctgggattataggcatgagccaccgcaccaggccctaaattcttaaaggtgataaggagtggagacagaattcaaattcaggaaagtttcaaagtccatgcttgctttttcaattatattaaacaatgccaagttccttgcatattccaagcatttattgggcacctgttggttgcacaagagtatagactgcctgtcaccaaatgatgcaaaataatttaggagcctgttttgacagtcacaagatggaggtcctgtacattaggcagaaaagtatgcagctaggcagcctagtaggcattttagaattgtctgataaaccgagccacttagcaacaatatatttctagttcacctaattttttgggttctgcccaaaggctggtgactcatgagacagatattccgcactctgtgtacatgagaaagaagtcagtaaggtgaggaagaagcagaagagatgggtaacgaaggcctggattcacgaaaactgtttaatggccatggtattatgaaaatcctgataccagccaactcttgagtgttaaataatgagagtcagtttattagttatatttggacagatctggttttttgctttatt

SEQ ID NO: 64690 - DNA, 2068 bp, Homo sapiens
taaagtgtaagtgaattctaaaaaaaggttgggcaaatttatcaaaggcagacttctaaatagatgtaacagttatatagttcagataaaccatggtttgaattcccttccccagtacttcctagcagtgtgatcccaagttatttatgtcagtgcctagatttcttcacctggaaaatagggataacaacaggtgcctacctcacaagttttaaatgagaccgtatgtgtaacctgctttgtgcaatgtctggcatgcaataagtactcgacaaatggtagctattagaatcatcattaacagcagtaataagagatcttgggacatacctagccctcaagattgacatcagagtagaccaccacatcctctcatcattgcgcctcaatttgggcctctgaagcccaaagaggggatggttctttccaaagaagacaatttcgacgttccagaagcatctgattgaaacgcaccctcttcaccccttaaaatcagtctggttcatccacgagcagcccttcggggcccggactggagaggcagccacggctcgccgtccctgggcccagttccctcagcctcaatttcccttgctgcaacaggggtggagatgggaacgttatccccaaacccaggcagtcccggctcggcccgcctcaccgcactccggaggggaccaaacagccccacgcgccaggaagcctcaggcaacgggccacgcgccacacgggcaaagtgattactggtcggatcaaaagtcaggcaagcggctcagccccatcctcccagtcctcgggcacggggacagcagcaggcgcgcggcggggaccgggaaaaggccaagagggcggtggcgggcgctcagcacccggcgggggcctccacggccgaggggcggaggcggcgggcgcgcggcacgcggcgcgctcgccactgcgccgcccgggggcgcgcacgcaaagcccggaggcgcgcgcgaccggcggctctttggcgcggattagggggtctcggcgaggtgaggcgccaggcagcgctgggcgggcgggcgggtggcggagcgcgagcccctctagcgggactagggagaagcgggggccacgaggtgcggcgggggaggagtcgcgggctgcgggccccggcggcgggcttgacgcggcaggctggcgggccggcgggcgggcagcggcgggcctcgccgctctgtgggggagggcggtgtggggccgggcctgaccccgggggcccgccccgcgtctgggcggtgccccagtgccccggcctcgccatttcccgctcagccctggagcgcgtagctctaccaagaatggccactgtgccagatgcccctgaccagcgttgcccatttgaatttcctagcaggccccccaaagtaggtatttcagtaccctgttagagctgaggcgcaggtaaaatgactggcccaggccggtcccaccccgtaaggatttgaacgttggctccacaactcgggagcctgcgcctttcctcctcccaacgtggactcctgcccggcgaagtgcctcacttccttctcccggtaactgattcgaatttggtgattgttagtttggagctagcgccagtgtttccacggaagttggtgtcagaatgtggtctcttgtgaaagggggagaaagaagattctgcagactgcaatattgtgcttttttgcctttttttttttttctcctaggctgtactgcagtgcagtggcacgatcgcggctcactgcaatctccgcctcccaggctcaagcgattctcgtgcctgaggcgtgggccaccacgcccagctaatatttgtattttcagcagaggtggggtttcaccatgttggccaggctggtctcgaactcctgacctcaagtgatccttccgcctcggcctcccaaagtgctgggattacaggcgtgagccaccacgcccggccctactatttttttattttttgagatggcgtttctttcgcccaggctggagtgcaatggcgccatctcaacacactgcaacttctgcctcccaggttcaagcgattctcctgcct

SEQ ID NO: 64691 - DNA, 1115 bp, Homo sapiens
ttacctcctcttagcaaggtctctttatctcctttccctttgaagtaggaaatgtaatccccaaagcagggactactgctttatgctgacactaaaaacaatgtgatgcagccttgagaatccaagtgtctgtgcattctgcccccactgtgccccatggctcttccctgaccattggtgctgggactgtacctgggcatttagtgtttgactcctgaaagagccaggctgctcctcaggagcacatagttgtaaatccctaacaaacccaggcccctgagccagctggcatgtgctaaaggctcttctagtatcacaccctggctttctcttcctgggtgtgtgtccttagggagtgttctctccagagaggaagagactaaatggaatgtagtccagccacccatcagctcctataaatagttggaggttgatgtcactttaaaaaattttttgctatacctgctggattaaattacaaaaatgacagatgttaatgtttattaaatttgccgtgtcttgcagctctgtcagatggtgaggttggtccctggagcctatttagaatacaaatctgctctattgaacgaatgtaacaagcaaggaggcttaagactggcgcaggcaagagcactcatcaagatagatgtgaacaaaacccggaaaatctatgatttcctcatcagagaaggatacatcactaaaggctaaggctccaagagcttgggatcagaagtcagaagtttggaatgtggtgggtcaaaggacaatatgggtgggcattctggagagttgtttttcagctgaattctcatggtgaaaacaggggaaaggacaaaggaaaccttaagttgtattgtctactttcttctccatcctgctttaaaacactcctgttgttggtattatgctgcagagttgtgtgctacataagctattattaaatgtgagtgggcattcattcctaacacctcttgtaactaaaagaaccatagtacctcacatcacagtgctggtagaaatggaactaaaccacagtctgtaatcccaggagtccagctcagatccttatattgcgaggtaagtttgctgattatctgtcttgccttcaaaca

SEQ ID NO: 64692 - DNA, 3274 bp, Homo sapiens
aaaagtgacacctataaaaaaactcacatacttatagtccagaaatgtgctgtccagtaaggtagccactagccacatgtggctatctaaatttactaaaataaaattttaaattcacttccttagttacactagccatatttcgtgttcagtagcaacatgaggctagtggctactgtactggagagtggagatacagaacatgtccatcatcacacaaagttctactggacagtgctggtccagaagagaataacttcaaattgcatttttggtacaggcatgtataagcccgcacttccacattctgtaaaggcataaagcgcctccctaccccagggcatgtctgtacagtcattaaatggtctgactccagcacttctttctacttaatctctaaatctctaaatcttgacacgcacatcgcacacaacacaaactctattttagcccacctccctcttcactgactcttcatggtaggtttagttcccataatccatgaaaatgcctagctccttgtcactagagcttgttttggaaacctgcctacagtgtaacaagctggaatgtgaagagggatgcatctatttgtgttgctgagtcattgaattgactgaagcttcaaggactagggggtgctgagcagaaatgaaaacacacaatcctttctgttagagatttgctcttttcgtattggcatgtaaacaagtaagtcactaagtgaactgacgtcacaatttagttttaggaagatgcttttcccaggcacgatttgaactcagtggtttcctgaatctagcaaagtatgctgctttgttttctcttagattaattttgcctaattttaaagctttgattctctttttacgaagacgaaaataaatctctctagtctgggcctttttcgtttcccaggattatgattaaaattatcactaacttttagatagtccagcacgcaccggatgactctgaagccggttgggcagtggagatcgggaagaacatgaaaaagcttcaaagcttttggttgaggacatcgggagatgtaaaccccaaacgcgggttttacttctcccctccacccctccccgcaaacccatgcctactcgttttgactgctcagcaattctgaggccaaccatttgcaacggcgaggagcaggggctggtgagtcaaggactgggcatggagtcaggactcttaggtgccttgactcacggcagagccttgaggaagtcgctttgcctcccacgtgtctcccttcacctgccagaggcggaggggaggcggggctgtgctggaaaacgtccgtttcgcaccgacttatgttacagatgggcagacctgaattttaaaagaccctcagagtcacacagcaaatgagccctcaaatgcccgtgtcccgcctgcgctccggagaacccctgccctgcctcggggactcgggaggtgggtgtgggctccgagactcggacggcaccttggcgtggcgagagcaggtggagatgcgcacggaggttgcatgttcacctccgggtctcgggcgccacggctgcccgtacctgttccagcaagcgtcagccaggaactgccgcgctactgattttcccttcgctcttgggtcccaacccccgggctctccgggctagggaggcggtggggtggggtcgaggccgtcccgagccacccgcggcggcttcacacctgtatcggatttgctttctcgcctttaatcctctccaatcccgaaagcaccccagcagagcgcccccgcagcccgcctcgagcccggctcatacgcagacgctgactggggaagcgaggggtcgccggtgtgtgaggcagggtaagagaccaggggacctgcacggaggagcgctctaggggaggctgctgcctcgggagctagggcgcgcccggaccacaccgcacggcgcagaagcccagcgcgcacgcgcgccgcctgccgccccgcgcgtccccccgccccgcgtcgcgtccccccacctcgggagagggcggccaggcgcagggagcgtgcgcgcggcccgccccgggcgcgggcggagggaggaggaggcggcgcgcgcggcgcccagcccgcagaagccggtggccgcgcaggaggacggagccctaaccgcaacccgcgccgcgccgcgccgcgccggtaggggacccgcaggcccgggggtgggggttgtggggaaggtgttggggtggggcgggagggcgggacttcgcgcttcgggtccctgggcgcagggggacccagaggcccgcgcgaccccgcctctggaaactttgtgccggcgcccccacctgctccctggcggtccttgactcttcggggcggcccgcggaggagaggcccgagaccttccgcagcgcaccctcgccggccctgagcgtgcgccccctgccgctcccccgccgcgccgcgccgcccccgcgaccctgtccctgtgccccggggctccagcagcctcggccgcgcctcctccgtcgccttccgaccccgctgaggccgcctactctcgctggcatccacccgctctggagcgcgccgccgctttttgcatctccccgaggtttctggtgcatggatagaagcaacttgactttcagcgatgccaagtgtccaacttgagtctttctctgcggtggtagatgggtgtgcgcggtgctaacatctgtctttttatttctcctaagtacccttgctccggagcgaagttgagttgttgtttgtaaagagggggtgcgtgctgtggccgccttaagtggattgtataactgtattttatttaggtggatgttgccagtggtaccagccagtgttatggtaactgggcatcccagaggctagggaaggaggagcgacttacaaatgcagttttaccatgcagagattttttttttttaaaaccaccttgtactttctatccagcaggacctccggacatttagtgtgtgttaactcgttagctgttcattatcgttttataagagaggggggtggagagcgttaccatcccgttttacagatgtaaaaacggaggcgaagagcaaactccgggtatccttagtaaccttaaaagaatagggaccaagagatttaacccagagtctcctggaattcctagtccctaaggccactcagaagtatgatggaatgttggaccgtcctccctgacattctacagatcacttaagagtcagagaggccgaggccagccggcagctccatgcctgagactcagctctg

SEQ ID NO: 64693 - DNA, 706 bp, Homo sapiens
ccccaagaaacaactcaggttttcagtactatgggctgtttttactttgctttgatcaccagtttttttgtaccagttgtttcgttcactcaatggtagtccatctcttactgttattcagttgtttttatatgtgtatcttgtgtcatttctgttagatgataaaatcctagcacagggttatgccttatgttacctgtatatccctgctctagttactactgctgcataacacagctctaaaactcgttgtaaaataactatttgttttgtttgcttatcaaacaaaacttgtttacaagtccctgttttttttttaagacagagacttgctctgttccccaggctggagtgcagtggtgcaatcacagctccctgcccctttgaccttctggactcaagcaatccttctgcctctgcctgccatgtagctgggaccacaggtgcacatcaccatgcccagcaatttttttttttttttttgtagagagagagtcttctcacattgcttcagttggtcttgaactcctgggctcaagcagtccttccacttcggcctcctaaagtgctggaattacaggcctgagccactgcccctggcctaaaatgactatttgtattgtactcacagattcctgtaggtcaggaatttggacctcactagtaggggcaacttgcttttgcttcacaatgtccgaggccttag

SEQ ID NO: 64694 - DNA, 1738 bp, Homo sapiens
gttcttggctgaaatgtggcagagggcagatttgtttaagggctgagtctggaagctttgttctaataaatgcgcaactgctgtttaacagtgcactttctttgtttttaaatgcctttttaaaaagaagacagacaagtcttaagagttagtgtacaagacaagaactctatctcaagaccattactaattcagaggtctttagatgttcctgctgtttgtcgcgggttaaggaaataaagaggacaggacactctaaaaggggaagagacaaatagtccacacacacaccccccttggaaacagtcctccagctttgtgaacagatttttaaagccctccctccaacatatccggttaagtctagaaagcccaaggaaagggaagaccctggtcgcttcggaggcagctaggactaggagcggagtcgcggttcctgatttgccccgcccccccccaccccaagaggaccctcatcttctctcccctcccacactgggcgcgcgctcgctccccgctcgattccaggcggccggcgcccccaactgatcccggaacaccagcgtccagcacctgggctccacacgcccctttcggcctgggtccctgggggatgaccctcctcccgcagcccagttccaaggaaaaggatcagggctggagaaaactgccataactgccaagcgcccctcgccgcccccgcggaggccagcgggctcccgcccggctcttcacacctacccgcctcccccggcggaccccgcgccagctcccgcggccccgccgccaccagaaccagctcctggccgcagcgccatcttgctcccgacctgccgctgccttcgccgccgccaccttatcagcagctgtcagctgaacacagccacttccgggtcaaacaccaggccccacctcgccgcggaccgggcgatggggcggggcctcgcgcccacgtgactcccccggccctcggggaggcgtggcgcgcccacggcacgtgacccggcgccgcaggggtcccccagattcaattctagctctcgggctggtggggcggtcgcgggcgcctctccaagggagctgattcattgtctggtaggccctctgcagggcccagctggcggcccagtggcaaagcgccgttggtcctccgtttgaaaaccatgatcgcggttagtggaaagagtaggctgagtcctgatttttaaactatacggtgggtacactggtgttcttttattgttactctttacacacaaagaacagataggtcctgaagggccctttgatagtctcgcagcactgatgagtgatcagctctcccctctttctctggaactcggtagcttcatgttggcacctatcacagacgctgaaggcatttaaattttattttaaatcaaccaagagcccaaaaacccaacccatatttcgaaaaaactccaaggtgtactactcttgtttggttctgccatcctgccaccttacagtccttttgtttttcctattcttgcaggcaagtgcaaaacagtggtttttggaaggcaattcataattactctgaagctatttcggcatattttttactgatttttttttttttttgagacagggtcttgctctgttgtccaggctggagtgcagtggcatgatcatggctcacagcagcctcagcctccctggctcaagcgatcctctcgcctcagcctcctgagtagctgggaccgcaggcatgcac

SEQ ID NO: 64695 - DNA, 518 bp, Homo sapiens
tgcactccagcctggtccacagagcatgactgtcccaagaaaaaatacacacacacacacacacacacacacacacacacatagtactattacaagactatttcatacttgatatgtgtttcatattaagcacattgggagggtagaacagatcactgtatacttttcccttctaaaaaaaacaaactgagatgagtcaggcataatgactcatgcctgtaagccctgtactttggcaggccaaggtgggaggatcacttgaacccaggagttcaagaccagcctgggtaacatagggagaccttgtttctacaaaaagaaaaaaattaaccaggcgcagtggcatgtgcctgtagtcccagttactcaagaggctgaagagggagaactcttgaggccaggagttcgaggttgcagtaagccatgatcacaccactgcatgccagcctgggtaacagagtaagaatctgtggctaaaaaacaaacaaataaataaataaaaaccaaaactaagatga

SEQ ID NO: 64696 - DNA, 404 bp, Homo sapiens
atgagggagctgacttagtgaaattcactctgttgaagtgaaaacttgagctaagaggaagcaacctgtccaagatctgggaacagcattccagataggggaaacacgtggctgaagggaaaaaaattggaaccttgagggaatagaaagaatgccggtgcgactagagccaagttgcagtctgatagagtagtacagataaggttggagggacaaacagaagccagatctcacagaatcttgtaacaaggtcatagtaaggaatttggacttccaccttgggaaactatttgaaaatttttatggagagaagaacatgatttagtttatcacatttaattttttatatttattacatctgtacgaaattatttactgcttattgcctctccctcttctggaat

SEQ ID NO: 64697 - DNA, 2226 bp, Homo sapiens
cccaccccctactcacactcaataaaatgcactgatgaggaatccatggagtggggaagaaagttctagagagcaggagcctgcgtaaaacaatgctcgcctctctgggcttgccttgccccaggatttcactatgttccaaatcatgttttattacctttcagggttgggccatgggaatgggataagaagcaaagcattattattaaccagttccatgtcccatacaatattagccatgaatagctccatctctcccccacaatttccctatcagccacattctaatgccccccacccccaacaccgctctctagtctgtctgtctgcctgctccccctgcccctgacatgttgcaattcagaaagagcttgtttatgataagaccttgaaatctggagttataaatcctgcccagggcggccgccctatctctgtgctaatgcttgtggtgccaaaaggaggctcacctggttgtgacccagtccctcttactccctgaggagttccctgctcctcctctgcaaacacaggacaatgggcaaatgggagttacctgttccaacaggtgttagctgggcctcactttcctacagggtgatgagaaggtcaccctctggcccgcccacgctgggcattcctgtgactgtgaaagcccaccttcgaacatgaccctccctctcccccaccctcccatgacttcagctacaggagactgagcccacctcaatggctttaaaagtccccacttgaagcttctgagtctaccaactagagagcaggcagcacctgcactggctggagggcccttgtgctgcctctttattctgtacaggcctctgtcattgtgtttacaccatattgcagttggcagttgttagccttccctactaagctatgggccccttaagggaagacactgtttctgattcatcattgaattcctaggcccaaaagactgcacagaacataaatatttgttaaatgactaggtgaatggtgtcatcattaccagcacatatttcttcagggtatcttatgtgcagcgaacctgctaagcagtagggatacaaagattaattggacaccattcccactctcaggggcttatgctggagtcggggagacccactgaagcttcacttccctagaggtcagaggaagagctggatctggggaccccaggaagctgctttgacaaccagaggcctagggtcttgggaaagtttgcccagagtgaacttaccacagatgccagagactcagatacctactcaccattggtcttggtacattccagagtggaggtgataacttgccaactaacagcatgtggagccttttcctttgtgacttgtatcctcctctcaacaatgggaataaaagtaatttctagtatcttcacttggaatggatttttcagccctttagctctgggaagaaaagaagtgaaactggcccccactgggccctagctggagctgtgcttgttagctctgccccataccatttggtttaggctgcctgtggatttgaggccacagctgcctccaccctcaggaggaaggaacgaggaggtccaggcatctgtctggagttcagttcatcccaacacacattaattgaatgcctcatctgtgccaagcatgctggacagtgggaatagagaaattaacatcgtgggtgtagctcctcctttcagacagggactgatatctctgagaacctgtgggaagaaggacaaccagttgatctcttggggactgagagtcagcccacatgatatgagaggctgttgcatcccaatgccattgtctcatggaggggacctttactgtgtggagtgggggcctagcagtgtatgtgtgggcagtgtggtgcagtgtccatgggtggtgttttctgtgtggctgtttgcagtcagcgcttttgaagcttttcatgtgaagtaccattagtggcagagagtgaattcacacttcacaaggggcatggggttttagatcactgcacacagaaactttcttcgaagccccatgttttgtcttaaaagtatgtttaggctgcgcatggtggctcacgcctgtaatcccagcactttgggaggccaaggcaggtggatcacgaggtcaggagattgagaccatcctggctaacacggtgaaaccccgtctctactaaaaatacaaaaaattagctgggtgtggtggcgggcgcctgtagtcc

SEQ ID NO: 64698 - DNA, 1385 bp, Homo sapiens
ctgggttcaagggatcgttccacctcagcctcccaagtagctgcgactacaggtgcatgccaccacacttggctaatttgtgctaggattacaggcatgagccaccgtgcctggcatctcttgattttactgaacagtgctgggctggaggcttccagtgactctccagacagacccctgtggttctggagactctgccactgccccttatctttcctccccatggcgcacacggatttgatggctctaggtgctaaaaactctggactctagaactcagctaaggaattgcagagctgatgggacagtggaaatgtgggcaacgtgtccgaacaacccacagccctgcctcctcctccccagactgaccaatgaccctaagccctgaatggatttttccttttttttttttttgagatagagtctcactgtgtcgcccaggctggaatgcagtggcgcaatctcggctcactgcaacctctgcctcctgagttcaagtggattctcctgtctcagcctcctgagtagctgggattacaggagcacaccactgcgcccagctatttttttttttttttttttttttgtatttttaggagagacagggtttcgccgtgttgtccaggccggtcttgaactcctgacctcaaatgatccgcccgcctcagcctcccaaagtgctgggattacaggcatgagccaccgtgcccggccctattggattgttcctaagaaacttggcatggctttggcaactgacaatcctgacaaaggattatcacttccgcccttcgcctttggagtatcttcatctaagccttcactgcccttaaaggaaaattcagctgaatttggaatgaatgaggttgtacagctaatcatgtttagagtcaccttcctatgacattaaggcctccaggagagtcattgaaaagtctgtgaggtctgctaattctattgagagtgaggaatgtgtttattcttccaaggggcaaagatcccccactcaaaatgacgctgccacattgtgtaaccaggaacgtgggttgttgctgatgtaaacagatggccaggggtggacctgccaggatcccgggtctccttttcccagaggtgtttcttatgaatggttgtgcccagtgaagcaatttcctgccttgtaaactgctgcccaccaaaccacatctcctatctatcgctgcctggctctgggtcataaaacaattccccacaaaccaatcagagcctgattaggagaccttgagtaacaggaaaattaccctccacctgcagatgtaatgacactttgcaagctagtggctttgcagtttctgaacgtaaacatcacatgctttaccccatgccccacctctgctcatctgaga

SEQ ID NO: 64699 - DNA, 670 bp, Homo sapiens
tcaaccttcataattaattggggataatctaatatatcagttcattaatgatgtcaagacaatatggcacaggaaagaaatctttctttggggaatataacagtgtgtatctggtgaaaaaataaaagacgggggaaagaaacatcttgtttttgtgttgcgtgatctgttggcgtaaacgtacatatgcagatcgtgtgaagcctgctttggtgtttcctgcttttgatgtggtccccctcatatttgctttgcaggttctcccttagaaagtgttttctctataggcatgcacccaggaaaaaggaatgttcatccaggcacgtgcaaagtcctgcaaactctaaagattcatttgtaaaatagtcatgttataaatctcggcagacaatccagtatttgtccagctagaatgacctctgcacccaggagaagaggaggagggaggggggtggggaggaagggcctaacaggcacttggttcagctgattgcaatttctcataaatattcagcctgtgtgatgctgttgggatgtgtttgaagcattaaggcatggatatgtcatatctcattttccagagcagctttggatggcgtgtttgaattaattcctaagtcaaaggggacaccttgaccctgattttccttggacagaagttagctcccac

SEQ ID NO: 64700 - DNA, 2513 bp, Homo sapiens
gggaaagacaggaataattaatcatggtcctgtctggggctgaccaagcggcagatggattgataaacctttcaaaggggaaggtattcccaaggagggccgctgcgcctggctgcccccctgattgagatttgtgagcacagataaatgttttccctgcccactacaaagagtgggaactcgcacgggagtcgaagggcagggtagtgaggggttgtcctttcatcttctattgggtgagagaagagtggcaaagcaggtcccacacacctctccctctacccccagctccagagcccagctgccctggtcgtgtgtgtgtttcagtgcccaagacaccagttacttaatctacgcaagcttgctgaatcctcagaaaaagcagatgttacaactctcactttaaagatgaagaaatgaaggctcagggaggtcaaggtcaccaagcaaatggcagaaccaggaatagaacccacctgctccactgcactctagggctggaaggagatcggggcaaaggaaaggatagagaaccctgatcccatgaaggaacctcctgggaagcccatggcagtggatgaagtgtgatttgcagggctcagatgaaaaaaagaccatcaacaagaccaaattctgagagcttctgacatgaagttcaaggttgtcacctacttatctagtaatcgatagaggccaaacagttcccacactgcacagaccccagctactaaaaggtctcattgtgttactctggaatcatcacctgtgttcagacatcttgtcctgttttctaactctcggtgtcttcttgcagtccagctgtccaagctgcagcaatgagcctcgccatcagctgcctgtctactattccatcacctctattcagaggtgggacttagtcatcaactgaaacagtgactaagcctctggattccccactttcagtgcagcaggaagttgattctaaatttcttgataaaaccccaagtggatgcttacccctggaaaagccaggctgtctactggggagtccccatgggttgacacaactgggtcattcccagagcttatggcattctgggtccaggggaatcagcctcaggacctctgacttcctactcactttctccgctgactactttgtggatcctcagggatccctcttgcaaagcatgaacctcagcaggggatctgtcctcctgagccctccttggaaataccttttccatggaccattgatcattctattagggaacactcaatctaaatgcctaagcgctctatgtcatccagtctccagcaacctatcaaacttctgtccttgtttagtgctcttcctggggaatctgggggagcaataagccctttcagcctgtggcccttttttttttgccctgggaccttaaggattccctttgcaaacaacagggagcctcagaaggacctaatttctggccgagtccatgcttgccacaacctctgcacatccatggccttatcacaccctgcccacaccccaacccccgcaaatcctgctggcattacctgtttacttgaagacatgttggtgagtgtactgatgctgctggtatctgtgaccaccattgcagatggaaaccgggaggtgtgggaatactgggggggttcctgcttgtgtgcgtacactggagagacagagtgaagacagaatcaaggtgcatacacaggcaaagacacaggtacagagcccccatcccacaccatagctcccatctcctcaggtagataaaagggctggtggttatagtggggatttctcatattagttatccataagattcatgtaaattccaagtcacataaccaactcccgaaagcatgtggatgcttggctgtgagggagagaccacctgctctcagaacacagggcctaccagggaggcctccggtacggaacgggagcaaaggtcactggctgttgcctcggcttgcccttctcatgcagggaggcaggttatttcctggtccagggcaccatgggctctctcttcatgggcggccaggcctgctgggcctcagcagtccacaggtcgctggtgaccactctctgactatcccacccaggcctcgccactgaggaagcctggccaggtgaagggatggggtaagtggggagcacatcaccaggctctgggaggaagggaagtggggcacatgtggtctcagactctgctacaggctgtggcagattttcagaagccactaaaatgtgattggaatgtgagatggtgctcagaaaccagctccacaggcccgagtggggattgagccctgaagatagaaggctggacttggctgttctcccccaaacccacagcttatccgatgcagctagggaagaaacacaaacctctttcaccatcattgccttctaagagtccctttataaataatctttataattttttatgcttaccaaacgcagtttacccctatgtttatttcatattcataatgactctaaatgcatacta

SEQ ID NO: 64701 - DNA, 1360 bp, Homo sapiens
aagcaatcttcacaccaaccctatgacgtaggcatcattatcccccattttacagatgaagaaactgaggttaagcaatttgtccacactactgctggtgaatgaccgagccaagacttgcacatactggttcccttccctgcattcctttttaaccatactccactcttgccttgggggaccaagatccgtgatggacatgttattatattaacaagaaaacagactcttgaatttggacctctgatgatagtgacacagcacatgcactagggtgttggagacaagagaaaagccaggccctgcaaacaagcttccaggtgtttgctaacgttgaggtgtgcagtcttggtcaatcatcaatccagtaacacactgcccagttaaagcactgctgagcagaacaggaagcaaaaagcgtgtccacaggctgcatttagagcggccctggcctgggtgaggcagcttgcctcttagaaggaggagaggcagagctcagtaggaaaccccaaggaccttcaagcagtaagagctgagacctggaaggttcttccacactgagaagtcaagacctcttccgtaaggcacccttctccatggaagcctgggtaatccttaaccctaacttgtttgggacactcttgagaagtcagaaagacttgtctgtgcctctcacaggtaactgacacaagtggttcttcacatggagaagaatctttcttaagggataggtgggagtaggagaagagggctgcaaaatgcctcccccaggaatgccctttcatttttgtttgcagagaccacgaccagggcaagcagctcaggtcctctgaaaccagaattggccgggtcagtgctcccctcagaaaccacacttgtttttcctccagggagccagggactcgatcacctgtgactcaccgtttctgtgttgcctacacagcacacacgtcaagatctaaaatggcctctgcaccctgttgccctcacccatcctggcccccactctgggaatgtgtgcagctccaccttcagcatgaaagtcgggaatctgcggctcctccctcccctgaaaaacagagcatgacccaaagaatagagctttccattctctacccttgccagtgtcgtaatgctcctgttctcccataagccactctctcctgcacttgtgttgctacaggatcagaacctaatcctaattagaacctagttttatttattttattgttattattaattattattttttgagacacccgagtctcactctgttgcccaggctggagtgcagtggtgtgagctcactgcaacctctgcctcccaggctcaagtgagctccccacctcagcctcccgag

SEQ ID NO: 64702 - DNA, 1793 bp, Homo sapiens
ttcttcacgtctgccacccagttcccagtaggatgcttccaacagttcaaagtgttgttacatgaaagaagaaagagatttgaaccttatgagctctgaaggcagagctaggttcaatggaaaacagggaggcagatttcaaataaataacaggaagaattttctatcaaggaggggcagtgggaagactatggactctgcagcgaaaccaactcaggttcaaattctgatgctgctcttaatagatctgtgatcatgggaaaattactttccctctctgtgcctttgtttcctctagaaaaatggagagaatgcctcctcaacaggactctttttggattagaggtaacatctatacagtttcttgcaaaatgccatataaatggcaactatgggtggggatgctgtggggaggaagctggtacaggaatggaccccaagatatttgccctaagatcctagaattctagatggcttaggacagattctaaacactgaatggaattatctttccgtagagaacagtttccaaagaatcctaccctggcagaaccactgatgctttgccctggaagcaacctgggagagaggtctagccgctgccctcttgctctgttcttttggaggaactggacttcaccctgtttttctcctgctttctctgactccctaaccagctatttacctccccgagaggctctgctcctgagagagtgttgataacgctgggagtcagttgtgttttcacctcccagcctgtccccatcatcgattcagtctcaagtcaaacagtctctggatttagcctatttaatttggctgatggaaaagggccagccctctgatgatcaaatatgggtcacaaggaggcttctcccctaccaaaggctacgcaattatttatttaaaaataattaaccaaggatttccgcaggaaacaaaaggcttctttacaagggagcatgtcaggagagactcaagagccatttgttagaatccaggcagcatattccaaggctgctgtggtttttatactttgttttctccccaacaaaactttattatataagaaatataacggtggagctgctctgtcaaaagacagatgagcctagacctttgaacgttcctttaaaagcccctggttaagtgatagaggctcggctggaaactgggggatccctgttttaatctcagctctgctatcaatttcttgggtgagcaccagcttcctcatctataagccagaggacggcccactgtggggagggggccattgtcacagcagtgtgatgggagccaggcacaaggctgctcatcagccccagatccacctgcaggtgttcccacgatgctcctctcaccaagcatgtggcaatcactggcccctgagagggtggctgtaatcagccagccatcttatgagggggcggggtgggggcgcatcacaaggtgtacaccaaaaataggtgctcttgttagaggaaggagaggccagtcctcctatatttcaaaaactcagaagagcacttgaagtgagaacaaaaataagtgcaaagtgtgtaggctctggagccaggtgacctgggtttaaatcttggctctaccctgtaagacctgtgtgatcttgggaagttacttaacctccctgagcttcagttccttactgttaacaatatccatctgtcaggtcattgggaagagaacggaatgagttaatggatgtccaaatacccagatcatgctgggcacataacagttgctgaaaacacgtcaattcctcctactttggc

SEQ ID NO: 64703 - DNA, 2950 bp, Homo sapiens
ctcacggcaaccttcgcctcccgggctcaagtgattctcctgcctcagcctcctgagtagctggaactacaggcgcccaccaccacgctcagctaaatttttgtatttttggtagagacagagtttcaccgtgttggccaggctggtctcaaactcctgacctcaagtgatccgcccgcctcagcctcccaaagtgctgggattgaaggcatgagccactgcgcccggcctcaagtgttgtgtttttaatcctgtttttcccgtaagccctgtggttcttatcacatggcttagcaaactctggtgatttttaggctgcatatgtcaggttatatagaccctactgcgcctgtgtgttcaaagacaaacatgactgccttgcaggaggaccccagagaggagctgctcagggtgccattcaccagagactttgcagaaacctgtgcttcagggccttagagctacagctcatagagcccctggcgatttaattcagctctaagagcttcaaaaaatcatggaattccatgattccagagatcaactgggcaccagcctctagacactttaacaatctctctctctctctctctctctctctctctctctgccataactctctgatgattctgggtcagttaacttttgagccttggcatttttgtctgtgaaaggggcacacagatattccttcttcacaagccagaataatgaatgaataaaataatgtcagagatgcactggttctgctgggtaaacagaagagcaatgtcaacaaagaaaacaggaccagaattgttcttttagtaagaagaaatgagggaagtggggattcctgggcaatgtggggctcagcttgcccacgatgtggcttttggcactgaaacctgggggttcctttcactgaagtctatgagctgcacccagaatctggtgggatgcctttcacccttgacatttcagagccaacctcccatccctgataatgcaggaatgttcctccggctggtggacctctgccagcgtaagtgagcgtcccagccaccaacagagtaaacattactcaactggctggggctctgtcacacacattcttcccctgtgtttctaacctcatgcagagtgcagcccagccctgttgggtctagaaactgggaatttaaactcaggcaggagagagcatgcgaaggagaaagctcttccaaaaggtaataactatgttcattgttcataaattatgagtagacacagccatcttttctatgaagccaaatcattatgttggggagatgacagggagagactgggccaggcttgatggacccagtactgtgtcctgataactctaccttctccctaaacactttacttttcttaaggacagaggcagagagacaaatgattctgtctggtgaacttctgagaggcccatttggaagaaaagaatgtgaacaattccctggcttgaaattgagaactccagaaatgaaagctttcgaatgagttagcattgctgcctcagtttccttgtttgtagcactggacttttgctagttcttattaatatttcctcctctgagaggataaagattcatgtttgcaaagagtttagaagattaaaaatctgcaaatgtggaagaaaaagctgatgcaagatgaaagcaatttaaatgctgggctggtttcaattccggatccctttctacctaacatggcttagttaggagctcaattcataagaggagaaatacagacaggcctgcagggacagtaaacattcttgactcaaggagtaaaagttgagtgatacttaagggaagcccacaaactggttttcttatttaaaaaaaaaatcaaagcaaatgtaaccaagaaaagaaaaaaaaatctttcatcaaaagcaccttggctgagaacagaagctaacatgcatggtgcacttgaaaaaattgcacatgtggggaggtagaagaccaacagaaactctgtgtgtcctcccccacaaggtctacctgggccaccacgcctcatccttactagagtggcagtttctgcaggcaaacatcaggcagtttgcaatgaatacttcagcctgaagattgctgctgtaggtaaaaggaaccagcctggcacttgataacttgggcagtcctcacatctgagagtatgttacacccatctgcttctcaatgtgtcacaagcacccatttgacagagtggaaaactgaggttcggagaggacaaggttgtttgcaccgctccttgctagggggtctcccagcaagtccgtggtattccaaagctgacccttctccctcttcctcctaagccccaaatgggctccagatatgtagagcctccccatcacgacccactaatagcttgaaatgatcttgcaggtttgtttacttgttccttggctgcatccctcactgtaatgtaagccccatgagggcaggaccttgtctgtattctccattttcttcttggcagagtcatgctaagcattcagtaaacatttattgaaggagtaaatgatgaatgaataacctatgcttaaactctgactgatgactccacatcactttcacctttagactgttgagttgagtggtggtgaagtgactggagtatgtccatttatcctctaaatctcccagtttttcttttcttttttgaggcaagctctagctctgtcacccaggctggactgtggtggtgcaatcacagctcactgcagccttgaactcctgggctcaaggaatcctcccacctcagcccccaaaaatagttgagactacaggcacatgccaccatgcctggctaatttattaatattattattattattgttattattattttgaagagatgggggggtctatgttgcccagggtagtctcaaactcctgggctcaagtagtccttctgctttggcctcccctccctg

SEQ ID NO: 64704 - DNA, 4749 bp, Homo sapiens
acattaagaggaaaataatgtaataaacgttttagacatatccttgtaaacatcacagatcatttaaaagtttatttctggtcaatatttccacagatatttttaggatggaaaaatactttcaacggctacgaacaagacgcctcgaaccttaggggaaaaattgcattttaaaagtgaatattgctttagcaaattcttcggctatttttcttttgtttaaatgcctttacctgtgttcattttgtatgcctaagaaacctagaaaaatagggtactgttctaagtgggaatgattctgtggaaacagtgaattagcccaacaattggggagggtttaaaaaaagcccccaagaaccttataaataatggcaaaaccttttaagtccgacttaaaagagtgaggagtaagatggcgcagttataccttcacagccctctgaccccaaaattcacgtgtgttcaccgggaagagccgggagagctggttatttttgtttgtttgtttgaaaacacagctcaggttcagaggttccctaacacggagaaaggcaccggtcccgaagagggcctgcggccattgtgtcccaagcgcaggtgtcaaacgccggccgcggcgcccgcagggtccgtcccgcacgctccttctcaaacaatgactttgctgcccacgagcagagaagcctggactccagcgcagtccgcagcgcgttcgttaaggagcccaacttcggcttcttagaatgcagcccactttctagacgcccccggcgcacctgcctcgaggccgcgagaaaggccagctccggccgggagccggggaccgggaagcgcgcagtcccgaccttcctcccctgcctttctcttccaggaggtttactagaactccaggaactccaaaacgcgacttttctttctctttgcttttcgtcttaagggaacacggtgggcaaaagaagggagtgcgtgtgcccgaggcttgggagccccctgtgcagtgacctaggaaccgctagcgatttcttgaaaaattactttaatcaagtccggcgctcccgggagcgggggaggaaaggcagcacccgctcgggacgggagaaaaaagcctccaggtctgtcccgcgtctccaactcggcgagggtctccggctccccagtccctctccctgccctgctggggcctggggctttggggagggaagagcggggctggggtctaaggaccctgggccgggcctggctctccgccggccgggcctgcgggtgtcggcgacccgggggctccgcgggcggctcgggcgctcacagagcccgcgtcccgcgccagagcggtgaggccgcggggccgcacggggcgcctggctgggtgcgcgctgggagcggcgagcagccccgcgcccgcgttttgatctccttcccccctctaagccgcgtttacaacttcaccaatgaataacccgcctctcttttcaacctaatcacggctctttgtgtatctttctgttgatgatttatagaaataaattaataacaccccaactccacgtgctgcagtttatgttacgtctcagctgcggccagcccggcgcggggctgggtgcggaggggcgccccaggtccttccagcgccgcgctagaaagcgggcgcctgcggccgggtgggagggcctaggccctgtggcccccggtggccggcggtgggagcctggttcatccgccaggtcctgagcgacctccccggcagccctggcgccccagccgctcctaggggccactctctcgacccctcttagcctccgcgactcacaccttccgcctcgcggaactctcttgcaggagttctctcccggtaggggagaaatcacctccgggcgggagagcgacgagggaagaacctcaaacctatgaattataccaaagtgtgtttggggaaaaaaaatctacaagttcccctgattgttttggctagagggcaaaccgccaggccctcggagcacaaattcaaatgcaaggtcatatcccaccccaaaccgccgctgcggacgtgcggccaaggctcagccccgaaatcgcggcgcttcagtgtccgaagccacgcgatgggctctgtcctaaagcggagtggcccgggagcgacgtgctgtctcagggaaccgctcggctccttagataattagtaaccagctgtcaaagtctagggcggtcggggaggacccacaaacgatcccggccctggggatacactgccagccggcctgaactcccggggagaggccgggggtgggcagcgaggtctggaaacgccctcctttctcagactgagaccagatcctctgcgaactgaggtctgagacgcgttcgcccccacaccaccgcgcttcgtttctttggccccgcgcgtgtccacccggaccctgcatggaacatgccctttgcaaatctaaacccgcgttggggatcccggataattccgggccttgcatgggcgcggctaacaagagtgcccaccagggaactcgcctcccagatcccggctccggatgccgcctgtccttcggcaaagaactgcaggtcatcatgcaggtcaatgtgtccgaggccgacatgcggctttccagacccgaggcagcgcgcaggaaaaatgcgcggcctggggcttgcagcggcgcgaggctctgctcccgggaagtcgcagcggtttcactgcacccactcgcaccttcagtcgcgtgggcaaacctcccggcaaagggctccacagctccagttctccccggcccagccccagccccgcggggaaaagcccttgggtctcggacgctggcctgggcctggggagaagaagcccggtgggccgcagggtcgtcccgctaagggattgggaagggtccgggtgttgggagagaagcagagcgccccccgggggacttctctggtgggaaacgggcttggcgagtgtggtcgggcgcagtgtcactcaggcccggggccggggctccaggggttcgggtgggtcccctccacctcgctctgcgcctacctgagcatccggtccacctccgcccgctgctccgccgcctcctcggtgttgagcgcctgcagctccttgaggatgggaggtgtgtcatagtcgtcgccgtcctcggagccctcgtcgccggacaagcggcccttggcgtggccgttggtgagagtatggaagaccggcttggtgtcgggctcggccccgctgccaggggacaggggcagcgtctccagcttcaccccgaagttcggggatggcagcaactcctccaaggcctgaaccagcacctccttggtgaccccggagctcagcagggcgctcaggagttcttgctggagcgacgtgagcttggacaccattttccaaggacggaaaaagaagggggtgagggggtgggtgggtgcgagagaggagggtggaggggagtttcacaagcaaaccccaaatccaggaacccctccacccttcagcctccagacacctgttactccccggggtcccggaggctcctccgaaaggagtcagaaaacttctaacttgccatgatcgccaccattaggccatataagatatgcaaattagtgggaagggcccagctttcggctggatgcaaatgatggtggggagggggaaacccggagagagggagagccggaggggcagacctggagagcagaagacctgggccgggagcggggctttgccagggtccattgtactcacgctggggggctagagaccttcttttactggttctgcttatcagccaaacttcacctaacctttggacttgttaagccagtgccttgcagcctaggcgcggggcttttccaccggttctcagttccgctttagtccagagagaagacactacgcttcggggttcaggtgagagccagaggaagctggggtgctcgtggaagaaggggacgcaggaggaagcgaagagtagagaccctggatgcgtcccggccgacgcaggtggtgggccaggagagcccgcagggcggaagagaaactgaccacttaggaaggggcgccgaggccacgggggaggtgaggcagcgttaggtgtggtgagcatgccctggagggactccatttatttctacctcggttactacctccaggccccagaacctccctggcctggtctggcggtttgggtttgcagaactgcccgccagagagcgtaggcgagggtgaaggagtccgggagaactcttggaaagagactactttatgggtagagggagtagccaaagtgaagctcccccagcagctgggctgcaccggcgcccagcctggccacgccactggggagctggacccctggggctcctcactctcctgtttaaacccggatgtcaaggcgcctccaccttgggggaggatggtgaggcagaatggtgaggcactaggatggtgaggcactaggatggtgaggcactaggatggtgaggcagtgaaagcaaagcttgacctgcagctgggtggacacttgcagccgagggtccccccggcccactcatttctggtttattcgtagttccagaacatctgtggttccctgggccggggacgagctctgtagacgaggtcactgcagcagtggcagaagtcttgcactcctagtacagaaggtgtcgacagagctactgagggaaagatgttttttttcccactctggcctgggccaggtaggaagccataggccttgcagc

SEQ ID NO: 64705 - DNA, 983 bp, Homo sapiens
ccaaagttgggctcccctctgctcctctatcagtccaggctgtttgtattcaggtgacatgtgcccctagggacgtggcccaccccaacccccttttcaaagccttccttgcagacaaacacacacacaaaaacaagccctagatatttgcagcatggatctccacttcgaggcactcagtgaacattccagggcagcagtgcccagagccggacccctgccctggccatccctgcagccctgctgacacagcacaagagccagcatggccagggtcacaggcagacctacacgccacaccatgctggaggctctttcaccccaaggggctgttttggttcagcagctcctgtgtcttgaataagttaatcactgatgacaagagattaatttataaccggacagcagacaagatagttcgggctttggcgaggtggcactgaactgtggcgcagggcattgctcaaaagacacctgggtctgcagcttggtgcagaggctgggaacttcagatcctcaccggttccccagaggccacttggtccaaagagaggaaacacgtgctgaggacttctgtttcctctctccagcacatttacttgtagaaaacatgtccaggcaacaggcaggcccgttagaaaagtccagttaagagagagcaccggcatgccaacccagcccaggcccattggaggaagagggagaggggtggggagagaggaagtcatggaaagatgtggaaggatagatgggagcctggggtgagagctcattcctacagcctgagtcacccagcgtgtggattctcccctccagctcaggcagggctcaggcaggtctttgaggatctgccctcccatcccacaggcatcctctctgttgtttctaacgttaacctcctcattctgggctcaaaaaagaaaaaagatggaagtgcagcatgatgtgcaggcctctctggggcctgaccttcatgctccaga

SEQ ID NO: 64706 - DNA, 1871 bp, Homo sapiens
ttgagtaaatattcttccagtatttgaaaccgttttctgactcagcaaagaagttgctcccatcattgacaatccaattaagttttgtctttttcagttttatcaaccaacattcacctttacaattacactcctaggtcaactgcaatcacagtttggctacccatataagagtttggcaaaaatcaatgaaagcattctgtgagaaagagttatatggaatttgccaatttactattaattgtaaattgtgaactacacatcctttatgtcagtaaaacttaacgacaaatttttgtacctatatatgtgcatacattcccgttctccccccagagagctggttgttacacatttatcagtacagcactgggtctagaacacgattcatgtactgattccacaaacattcactgggtgccaggcggacggagatacagattaatgatgaaatgactcagccaaggtcacacatcgcaagcggcgtagatggcagaaccatatgtgctcccaaggccagcggcgcgctcccaggaccagaccatggtttccaaggcctctccactctaccgaatgggatggcctgggcctgggcgcccaggaagtgaaaagcaaggaccgggaaaagagaccaacgccagccaacagacagctcaccgccaataggggccgggggcgcgcgcggcgtcactcgccgtggaggccagcgcgagcacgccctggggaaagtggcgtggctaagcccttccggaagtgacgtcggcttgggggcggtgctcggcggtggcggagcgcggcctgggctcgcgctgggctccgcgcgccccccgcccccctctatgaggcagaggccgcggcggccgttagcgctgtcgctccgggggccgcggcgggcggggctccggcggggcccggcctagtccccaccccagcccggctcccagccgcccgccctccctccctctccccgatgcaggaggccgagctccgggatggcgaggcggcggcggcggccgcttcgtaccgcgtcctgagccgcctccttggctatggagaggcggcccccgagccaggccctccgccaccgcccccgggccatggccccccgccgccacccttcctcgcgcggcccggcccgcggggctcccggccgccgcagctgatggtgttccgcaacgtgggtcggccgccggaggaggaggacgtggaggcggccccggagccgggaccctcggaactgctgtgtccccggcaccgctgtgccctggaccccaaggccctgccgccgggcttggcgctcgagcggacctggggcccggcggctggactagaggcgcagttggcggctctggggctcgggcagccggcggggccgggggtcaagacagtcggtgggggttgctgcccgtgtccgtgtcctcctcagccgccccctccgcagccccagccgcctgctgccgccccgcaggccggggaggaccccacggaaacgagcgacgcgctgctggtcctggagggcttggaatcggaggccgagagcctggagactaacagctgctcggaagaggagctcagcagcccgggtcgcggaggaggagggggcggccggcttctgctgcagcccccaggccctgaattacctccggtgcccttcccgctgcaggacttggtccctctggggcgcctgagtagaggggagcagcagcagcagcagcagcagcaacctcccccgcccccgcctcctcccgggcccctccggccactcgcgggtccttctcggaagggctccttcaaaatccgcctcagtcgcctctttcgcaccaagagctgcaacggtggctccggcggtggggatgggaccggcaagaggc

SEQ ID NO: 64707 - DNA, 1575 bp, Homo sapiens
tggagtcctcactaagttatcacacctagagtgatggggtggccccttaccctatttcagccacatggtgtcatgggaattgttgccttgggccttgctaaaatgcacatgtaccaccaggctatgtgggcctcaggctgaggagcagcaacccatctcaaggagcccgtcgcaagaggctcatttatgacttagtgaggaagctgggctccaaggagcagcctctcctggctcccggagtcactggccagtacaactcaaccccttgttgaaaagagaggtgaaaaacttaatgctgggtacagatgaggacactggggcacagagaggggcaggaactgccctgatcactcagcctctcagtgctggcactggactccaggtcccctagtgccctgtgtcaccaagagagggcccaaaggaaggagcagggcctctgtctcagatccttatcactggcgagggaaagcagggtgggtgctcactccctgaatggacactgaaaggcagcgtctcccttcaaaggtgccagacaatggaatggttggccagacagccatttgctaaatttggatcagaagactgtcttctgttaacccctccatgcctaagcatgcggaggcacagtgttcgcgattcctccttccttctgaaaacactacagccctgttccagctgcactaggaaggaaggtgggttttccttggctatatctggattcagagatcagggaatcggatctccaatgatggctggtcagcgccaggctggagcagtgacggcacctgaacgctgcacctgaactcactacccaagggtcactttgcacgggtcacaggccaaaatgaaagtaggcagagggcagagggaaatcaggcagctggccacatgacagtgaagctgcaggccacaggaagcctgagtgtggatcattatgaagcaagaccatagcaaaagcaggcatcaagccagaaaaaagaaatcaggaataatgccagccggtcaaaagtttgtgggtcacagtgaaatcaggccagaggagaatgaaatcaggcttcagaacagaccaacgccacctgtgactcagagggaagggagctgcgcctcccagggaaaccaggttgcgggtcactccagccgcacccccacccctccctccgccgcgggcccagcctcacttgagctgctgggtaataagctcctcgtcgttgagatagcgcagccgttcctcttccaccagggtgcgctgccgctgcagcgggtcctcctgccgccgcgccgcctccgacacgcgcatgctcagctctgcctccgtgcgcttcagcagcgcgcgcaccgactcctggttctgtagctgcgggacgcacggacggatggacccgggtggggggagcggagccgcgaggcaggggaagggccgggagaaggcgggtagaggactgcccaatccagggcggggctctgcagaagaagcggctgcttggctccgcctcaggcagcagcgaaggggtgggatggcgaagggcaggggcgggatggcgaagggcaggggcagagggctaagttctggggaag

SEQ ID NO: 64708 - DNA, 1613 bp, Homo sapiens
aggataccctggtggaggggcgttgggcctgaaggttccccccaacccagggatggggttggggaaaccagagacataagggagggggctcagggcttctcttttctccaaggaacctcagtgtgcaaggctgactatattttttgagtccgagattcaagccacagggaagatgccaagaactggcgaaatccagaatccgaatgaggggaagggcagggtgaggaaggcgggttctgccaccctcagctcagcctgccccgcctgggaaacgcggaaggtgaaagtggcctgaggctggggtggccgggaagtggcgggcgccccccagtggccggctaggaggacggcacaggtgcttgggaagagtgacgttgtcatttgtccgaacaattccaaattctacgtttatttatcagcctcatttatttttatcctccaccacattcttttacatgagatcactgtaactgattatgagaattaagatcccaacatcttagtgacaccatctcataagccaccaagccggtccccaactggcatctttaccccggatgtaaccctctactctgtcctctggctgcccctgggcaacattcacacatgatgtcatctgcaaaggaggagaacggggagaggagaggagagggagggagaaggaaggagagaggcaaatggacaaagtagaggaagaacgaagccaccagctcaggaaagggagaagagaactctctggggcccctgatgtgagtcctccccagccccaaactcaagatctggaaatcaggtccctgtaaccctctctgtggagataaggaggctggacaaaacccctcccttggggacctgagaggctgtcacatgtgtgccccgacccactgcctgggcaggggtaggagctgggttatagccctggcaggaagcgagggcaggaggcactcagggtgaagacaccaactcacaagcccacaggacatggggctaggcagggcagcaggagaggagcatggagacagctggaagggtggaggacctgcctgccttaggccacacccacacacacacacaaacacacagcatgaggctcccccagtccctcctctgcagccaatgctacaggagcccaagtcagccaggaggagccccgaggcactgccaccttcgattgtgcatgatgactccatcctgctgggtgcctgctgcagtcgggaagcacacggtgtgcttggaggttggaggccagaggacaaaggtcaaccgggaccagatatgtatcaaactaggcagaggctctgggaacccgaattaggagaggggatcctttgcttcccctgctagtgaaggaatcggcctccctgtccctgggtgcccctggctctgccttccttgtgtgcccatactcctcagtttctgctggctggctgtgggtccttggatcagaagcccatctgtgtctgttttctaaaaccatcttttccgccccataccacagcaaccaaagtcattttccgggcaattgcctttctgtaaacattcctgtgtaatatccccccaaattgctaatacccagcgccctgttgagtctccctgtcactccaactaaagcctcg

SEQ ID NO: 64709 - DNA, 2216 bp, Homo sapiens
ccgggtccttctcccaagcccggcgcacagcggtcccctgcccccacacacctgcgccccagcatccctcgccccgccggccaccgcctccccggcccggccgccgcccccgcccccggccgagggggaaaacacacaaagaaaacagaaataccttccacttaagcatggaggcacattagggaggagagagacagggacatgccttgggacggagcgttccccatcgggcgggggcgcggggggcgggggccccgggccggcctgcctggcgctcgccctctcgccgcctcgcgggctcctcgctcggccccagccccggggcgcggtgccaggcgggcgggccgggggcgcgggccccgccggggtggaccagctgggagggcgccggcggccgggcgtgtgggtgagcgcgcgcgcgggcgtgtcaccgagtgtgcgagagcgagtgtgtgtgtgtttgagtgtgtgtctgcgcgcgcgcgggccggcgcgggtgtgtcactgcgggcgggcgcgcgcgcggcgcgggcgcgcgcgtgtggccggaacttacaaagggccgcccggggcggcgggggcgggggaggggagggggcactgcgccttctcgcgccctccagcttcaccgcgtgatcccgcagcgcgcggccggggccgggcgcggggcgcgctcactctctccttcccgcgccacctgcttcgtcccaccccaagtagtcttcgcgccacgatagagacaaatacattgaccgaggaccggctcggaggaggcacccggggaagcggggacacttggagggtggaggactcctgggtctccaagcccgggcgcgcctagggatggaaaggctctcggggctgggtggggaggcggggcggcgagactgggggctcccttcagccaaggtgaccgcggaaaccaacagccgccccatgctgggagcgcccggatcctcctctgcttctgcctcgcgacccctcaccccagcgcgcctagacgcggctcggtcggagggtctgggctccccggcgccccctgctgggccgccgcctcgcccccgctccgggttgcagcccctcctgcaggcgtgcgcgggaactgcaggcaggtccgcgcccctccggccagtgagaccccaccgtaggacgctccagcgacggtccctgctcacgcctcgcttggcggcgtcactgccgcctctacttcagcccgcagagcactagctcggctccaccctgccgtcccccgcccctccgcgtcccaccttcgttggcctacctgttggctccgcagacttctccagcgctgacccggacccagacccagacccaggcccgcgccgacacctcgtgattccagcggccccctccctccctcgctccgatgctctggccagtcccttctctctcaagctttcttgcggaggagaaggtgggctgagtcccctgtcccttttatttacttctggagtttccaaaagcagtttaggtgagcaagagagtggacacagtacttctattcactgtgggccatcaggcagagtggcaggcaggcagagagcccaggagaggagaccccaccccaagtggcccaaatgacaaaccggtttccccacttcctggtctacccagttgcaaccttaatctgggctctcccaatttcctatccacccccaggcctgcccctgagccaaccacatgcccagctagggacaaggtcccagattccccttagagataaataaccaattgcagtaactcagatgccagggccaggaccagaggagaggcccttcccagctccagtgggacagatcaggaggacagccaagagctgtgtcctggacacacagtctgggcacacgaccccagcggcaggcaccctgacttcttccctcctgggccaactgcctctccctctgccaactggatggtgcccatcttttggcctctgagcgcacagtgggcatccatccagtgccctgcctggctgcctgcccaggatgggcatgggaggcagcaggctctgtgtgggggaggctcaggggaggcaagggtagcttcccctcagcacacggacaccacctcccaagcggctgggagcccagagctctggcacaggtcgctcctccgttcagattcctcacccactgactgcacaggactcctgcccttcacctgcccccaactcagattccccccaagggacaaga

SEQ ID NO: 64710 - DNA, 846 bp, Homo sapiens
catagaccagtgccagccactggttcacaagaatacagaaatggagagtaagcactgagaaacctttatagcgattgcctgtacatctaggcacatgaccacttttactgtattttacaaaaatatgggtatgcaatcaattggaaatttttttaaaaggcgggggtagtccttcattacagagtttgagaaacactaccctaaggaccctttcactgctgacctactcaataaattcaggctggcattccaggccctccacgaccccatcctctaatctttccagccttatttctggctacctcccacaacacacacacacccacacacacacacacacaatcttcccttcacactccatgtctttgcctatactgttcccctcccccatggggttgtcctttccttcctctgcacctgttgacacctgattctggcctcaaagcccagctcaaattccatttcctcagtaaagcctttccaaattccacccccttccttccttacacacataagcaaacacacaaacatattctagctgaactttgcactcccctgggctttcctaacacccatgtagctttctttgtggccgtctgtctcttcctagccaaggcagagctgtggtcctctctgccggtgcctcctggcctctcccgctctgggatgtccagcacctcgctgcatggattctgggcattgctatcctgatttgtaccccactcccctggcctctcctgtggttgctcctttgtgtccacccatcttctgtgctggcccctctgagctcccctcagcaaggactccatcccactccctgccccactcctgacttcacctcatcac

SEQ ID NO: 64711 - DNA, 1414 bp, Homo sapiens
gtgcacaggagcgaacgccgaagtgcgggaaaccgcctccgccctcttcctcctctccgcggcgggggcacgctgcgacgtccgcatcctcgccggcggcggtgttaggaacgccgggccgcccggtcggtgcccagaggtgcttcaggccatccggggcccagccgccagggcgcaggggggcctgagggccccgcagcactggggaccgcgccgccagctccccaggccccgggcccagagaggacgcccggggcttggcaagggcgcagaaggcgagggcacgcaggcacagcggagagaattcctgggtcccccgacacggcttccggggcgtgggggagcagggcgaccctcgcggggacgccggcactgccaggcggggcgcagggcacagggtctccatggagcagcctgaggggtgcccactgagcgggtccaggtcccagcggcgggatgccctggctgcccgaagagcccacgggtgaggggaacatcgccccccgtcgacggggaggtctctgctcacgggcgcccccggcccgccacccggggccgcagagctcgggctccctcttcgctctcctcacgcggccctcccggcggccggactcctgggtccctgtgagtcccggcggggtcggccgcccttctgccgccgcgtccccttcgcaaccccggcgggagaccctctcgagtcgcccgaagcgcagaggcaggggaaacaaagcggccggcggccgcgggaggcgggaaggaccccgggcccggcacccggtgcccgggcccaggcggcggggagggcgccttccgcccgctcggtttctttcttccccgctggctcccggagaccgcgttatagagaactgccccctcgctgccccaataccagcgccggggccgcgagcccgccgctgattgggccgcaccgcccgtgacgttagcccggaccccacccctccggcggcaccgcccccgtccccattccgcacacagacacacacacgtggacccggcgcggcggcggctgggagggagcgcgggagggagcgtgcgcgggtgggatcgcgagcggccagatgcgccgccgcacgtggcccggtggcgtcctgggatttcgtcgtcgcaaagccactcgttttttcccgagcagtcacggttttgcatctgtaaaatgggacggttcatatctgccctcttgggactaaaagagctatgtgaatcaacgtagatgaatctcagaaataatgtttaggggaaagatgaaatgaggcaatggttgtttacaagctttgcacagcagggattctagcgggccgtgaatggcccctaaaacagtgcgtggcacacagtaggctcaaaaatgctgtaatgtataagtagttaataattcagtacttgtatgcaagatgaa

SEQ ID NO: 64712 - DNA, 1094 bp, Homo sapiens
taacatctgcagaagagctctccagggcagttgtcacaaggggggatcctggggtcctgccaagtcatgaagctgagctgggtctagactccagggctcataattgctcaaaaagcccacctctacacacacacacacacacacacacacacacacacacacacacacacggaaagttctggaaggatgatcttcatggctgtctcttctgcaggacagtgctgaggactcatcctcaacaacagtgcctacttgcactcctgtgcctaccacagtgtagacacaaggagagaatgcccaagaaaatgatcagtatgaataaatgagtgaatattacataacagtgcagatcaatggcctcttctttctctgcctccaaaagctcccagctcccccttccccatgtgagtttgggggctttattgaggggtcattacgattgtgagtgcttctctctgcctccactatccctacttccccttgctctcatcaggcaccccagaatatggactcagggatggaatcactacaaacagtaggagaatagtgtgagtgcctctccagctgaaaggagatcatcaaaccaccctttatggcctggatgggggcgggggtggcgctgtgcaaccctgggcaggtcacctagacactctaagtctcaatgtccttatcagtgaaaaggggacaacagtggcttcctcacattgttgggagggttgaaacatgatgtgagcagtcaccagaactcacgtgggcaggcccagctgctgcaattaccatttcctccggtagaggacactcgaccccatcctcagcctgctatgagggcggcaacacccttctcaggaacctctcctcctcataggagaaaaagagggacaaggctggatgccgggtcccatctaacacttccagagtgaaggctagaaagggcccctctggatccagaagccagcccttccctttccttggcccatctaggtctcacctggggcagtaaggactgtgttcaaggatttgggagcaggagacctgcccggttgccccttttggggaactgcaccccaggcgtccaaccccatagtaacttctgt

SEQ ID NO: 64713 - DNA, 874 bp, Homo sapiens
gcccaggacaggtggttcctggtgacctgcggcagagcaattccagcagggtgaggaggaaccacacagctaagtgtgctgcgcatgtggaggccgcgcttggtctcctgacttacgaagcagagcagagggatctgggagacacagagggtggtggcctgagcccatgtggaggctgccgggaagagccaggagagggagagagtgcagatcaggatagagtctccacatgagggaggagagatggatcccagccaaggcttggctgcaaaagcacagggtcaggctcaaggcactgagggcctggaccagcgtcagggagcagggggaaaggatccagagacatttgcgcagcagagatggccaggaagctgctggagagtgggaggagtcaggcgcaactccaagattttgaatcccaactcctgccagcgtcctgaaggcctctgtccccctctaagtccaggtttaccaaagcctgctgcaccctggagttctcagttctctgagcacggccccatacctgattctaaattcacaccactgcttcctctgcttttgttgcaagccacaatcagaggacactgttcacttgctgattccaatgccctttggcccctctatcccacagcccggtgatgtggctccttctcctgccctccaccagagcccccatctcagcaagggctttgctttctgtctcaaagagaaacacggtgctgagcgggggaagctgagcacaaaagagtacacataatacactcttaggaggttctagaagcagtgacacccacctactgtgacctacagtgatagaaatcagatcagtgctgtctggggccaagggactgattgcaatgggataggaagaaac

SEQ ID NO: 64714 - DNA, 6292 bp, Homo sapiens
tggccaggctggtcttgaactcctgacctcgtgatccacccgcctcagcctcccaaagtgctgggattacaggcgtgagccaccatgcccggccgcctctgcgcctttgaacatgctgttccccctgcctggaatgctcttctgccccttaactgcctgcaaactctccctcacccacttggtcctagttcaggccctccctgatcccataaactcagttacttcctccctgcagtatcagcatcattcatagcactgtcatagcccttttcatcctgaagttaataattccctatgtctgtcacccctactagctatctgtgtacctaccatgtatctccatgtatctgttaatactttcctatgtctgtcatccccaggtgctatctgtgtatctcctatggccagcccatgatgattcagtgagtgtctgctgaaagaccgaataattaaactttttcaacttctgtcctgatggtaagtataagaggagggatgaagattaggctgtaaggccaggcgcagtggctcacacctgtaatcccagcactttgggagcctcaagcagggggatcacgaggtcaggagatcaagaccatcctggctaaccggtgaaaccccgcctctactaaaaataaaaaaaattagccgtgcgtggtggcacgcgcctgtggtcgcagctactcgggaggctgaggcaggagaatggcgtgaacccagaaggcggaggttgcagtgggccgagatcacatcactgcactccagcctgggtgacacagcaagactctgtctcaaaaaaaaaaaaaaaaaaaaaaaaaaaagattaggctgtaagaggaactggtaaagtggaacacagcagggcaaatgtgctagtcaactgtcattgcttaccctggaaatttccccaggagcggagtcatcaacttacagaatgttaccaccaaggggactttcaagatctggtcacctgaccaaataccagagacggtaactgctttgcccaaggtcacactgctggttaggggcagggctggggctagagtccacgtagctctggaaaaagtttgggcagatgctatctcatcccatgaacttcttcccttcctacccattctgtctccccaaaggaggtccctgatgccctaacatggtcagggaactacctgggctcactcacagctcttacagcatttgctgggaccttggccaggtggagttaccaaaatcctgtagactggaggcagggggatccaactatcaccatattagagattggcaaactgaggcagctagctaaccgcagagggcaagatttgatattgagtactgtgttcctcctgtagaaagacctgagaagcccaaactcccacatatgcagagtcactattcacaataatcatgactgctgacttcctaatgtcagggaaatcccctcactcccaccagttcctcctgaaacagagcctccctccatcttgcacagggtgtctgacttaggaaacaaactgtacacccaccctcctaagccacccaggcctactagatagatcacctccgagtcataccctttaatggggaaatcacccttctttgtgccaggcacttgacatcgtcactgctcacatcagccctaaggttagtactacagtctgcgatggggaaacggagggtcccagataagtcactactaatccatggtcaaagcaagaaagtggcagggctgggactcgaacttaggtttgcctgactccagcgggtccccgcccaggcgggaggccctcccagctgaagcctttcgctgactagattacctgggggaaaatgacttaacctcttcgaacccccagaaggtcagaagctttgcttttgggggagaaaatggtgtgcaaacgagacgcgaaggaaacgcaaaccctcgggcgtcggcgcagcctcttccccgagcctgggtctgtctaatggcccagagggagaggtcgcacccccgacccctggcacctgcgaaaccaagcgcccggtcggctggcagaaacgaaacctcaacaccctccagcctcccccgcttggttcccggaaccggcgagccaggcttcgcggaaacttgcccggcggcagccgcctagggccccgggatcgccctgaccgcagcccgcagctccgggccgggaggtgcgggccggcgcggtcgggcccgagcagcagcgcgacgcgcgcttccgccccgctcggctccggcggcggccgcggcggccccacaatccccttctggctccggggacgggcggggcggggcgagcgggcggaaataattttctgtttggtcgtctctgccccagtcccttcgccgcgggacgcgcgagacgggagaaggtgcgggaagcgggaagcaggagcgggagcgcgcggccctggcacgcatagggcggcggagagggcacgagcagggattgagcacctactgtgtgccttcacgctttacaaaaggattttcgttcgatgttcactacagcccctgcccgggggtactgatgccccatttacagagggacaagccggatttcggagaggtgaagtcactcgccgaaagtcgcaccgccagggtctgcgtgacaccctaaagcagtgttcagttaccccggggagagcgcgatgaacttgaaccacttgttggctggttcctgctcttgctcgttttttgcggatcgacacatagtgggcgctcaggaaaataaatgttggaagcttgagattgaacttgacagctcgaccctaggtacccgccacgaatccagcccagcccgcggggcaccgggtttctccagacctcgcagggaacatttgcggatgggctggtagaggaggctcggacatcccagttccgcacccgcactcgaccaacgcgtggtagcggaacccctgtcgtagcgaggcacagactgggttcaagtcccgactctgccgatttcagcctgagtgactttgagcgagtcactttttcccgtcgaaacctcagttgctccatccacaaaatgggaaatatgaacagccaccctaaaacggtgtggggaggattaaacgaaacaacgttcccaaaactctaaacttacaaatgttgtctcccgtccatcccataaacttaggcgacaaacctggcgcagggtgacctgagacaaaggcttcccggcccctgtctccaagtcgtccatccctggggcgtaggcacgttttagtgagccctgtccggcgaaacccgaaactgcggccaccttggcagcggtgggccccaaaaggaaatattcaaatattctgaaactcgtgcatgatttaggactgacatttttacgtttaattttcttgcagttttattcttgctagtaaaggtaattcgttagaaacccttaagtgcagtttctcctctgtgtcttgtttaacttttcgtgttagcgaaattcacaaatttgaccaaggaaccggagcgcggccgtcctcgccgggattccggtcatcgcaataatctggctctcggcccctactcccaggcacggaggtcgaagagacgggcttcccctacaccgccctgtgtagatgtagcctcttcgtcccggcagccctccgagattccctgtgtccaccggagcgaggagaggtgtggggctgcagcccagaactcagcttcctggacctccccaaactcccgcctctccgggattaagggagtaaatccctgacgccaaagaccaggtcaaggacaagttctcccccgccctactcccccctcctgggcggggattcatctcccttccggatgaaaggtactaaagagccgacggggggccgcggcgggccccaggcccttgatgttccggttgaacaggtgctggtgaaaaggaggcggacccggcggaagagtctgccagggggcagtgcgccgaaggggaggcggcctcctccacccccagtcccccggcccgtcttcccttctcctctctgtttgcccctcccccgcaggaagcgttcccggccgcgaggtctttgaagtgtcgttgaagcccccagggctgccttctcccctacgccacccgaactcccgctgtggggggcgggtgacctttagtccccacgagtcgtccccctttaggaagtttttgggggtcagatctcacccccccttgcccacacaggttgggaagaagactttgggccgacgcccctcacttctcccccagacccaattgcagggactttagtcctctggagtgctgcgtgtgagttaccttgtgtgtctgtgtgcgtgcctagaggtcaagtgtaactggtgttcgtgagcacctcgtggttgcgggtctctaactctcgtgggtctctaagcgcacccgcggggctggagcggaggttcgtgtctctgggagggtcagtggtgtgactgaagctgggagttagctcgtgtctgtgggtgcctcggtgtgtgtctctggggctctgagtccctgtgcgtgcgtgtgtgtctgtgaacccgacaggaagctccccgagggcaggaatatgttttgctctctactcgatcccagcgactggcaacgagcgtttaataaatatctgttgaatgaataaatgtctgcgtgtgagagcgtctaccctccagagtggcctcggaggaaagggcccgagggcggccatccaaaaagacccccagacacggggtggggcgggggcgaacggcccgcgtcgctcccattcctcctagcgccccttcccccggtctccactccaaagtttccctggggctgaagaatccacccagagacgaagacttggcggagggggctggagactcggggacccggggcccgagacgggagtgcgggcagagggagggctcgggagcgacgacccagagccgtgaaacgaaaaagaaagcaggcaaagcagcacggagcgaaagagcgaaaagctccctaccaagccaggctttgttccctgaacctaagactttacccggcggctggcggcgggcgggccgggagcgagcgagcggaggcgcgcggccatggctgccgcggccgggcaggggggccgggggggcggcgcgtgagcgggtggcgcggggcggcgcggggcgggcgggcgcccgcgatgtgccactcggcgcctcccccgccgggctcgggctacgcggcggcggggcggccctaggagccgggcgagcggcgcggagggggcgagcccggcgtgcgagtctcattgttgtggggggggcccgtcggggcatgagggcgagagcacggcggggggggcggccagacagagcgagcgaggaggaggaggaggaggacgcggaggaggaggaaggaggaggcaaagaaaagaagcggcggcggcggagggagaggaggagggggcgaggaggcgcgcggccccccgctccctccctcccccctgacccccgacccccgccggccggccccccgccccagccccggagggagctcatgggagtatgaaggagatggtaggaggctgctgcgtatgttcggacgagaggggctgggccgagaacccgctggtctactgcgatgggcacgcgtgcagcgtggtcgtccaccaaggtacgggggtggcccgcggggggcggcgggaccccgggggcggcgtgcgcggggcgcccccggccgcgccctccggagacctcctggggctcgcgcgcccctcccccaccccacctgaagggaagggaggcgtagggggagctccccccgcccggtcctggaagaccgggtcaggcattgttttcttgcctattgttccagttccgcgccccccaccctaagttgagggagtttggggagagtctagggagcaatgagtgaactccccacgccccacaccgcgggtgtcggggctgcctggggaatgtttacctgcgaggtgtcccctcccgcccggttattttggtcccggctcctggaggaagaggtcaaggggggggcgtcatcccccctcgcttccggataatgggaggagcggacttggaaagggaagagaagggtcccaggggagaagggactcctaaaatccgccggggaagagctaaggataggagagaggttgtgcagggggccggaatcgagaagagggaggcttggagtttcccccagcagcacatggttcgggagttaactccttgaggaatcttgccgagggcgcaggctggcatctcccgcctgcctggcacaggcagccgggcccccccttcctgggacatccctgaatgctgtggcccggggctctt

SEQ ID NO: 64715 - DNA, 1837 bp, Homo sapiens
agtctcgctttatggaaggggacaggaggtgggtgccaactgcgggggtgtaggagggcgtgggctgcggcccttctgtccgcactcagcggcagagagcgcacagacgctcagcacacccgggcccaccacgcagggtgcatcagtccgtgggccccggccgtcgggaccctgacccgtcccgaggtgacgcgacgcccgcgcgcttgctcccagaagcgcggcctaggctcggccagcaacagcgactcctgggagggtcctgcgccctcgggggtgccccaggcgccgaggctgcgcgcggggcgttccaccgccaggcccgcccggcagggggcgccgggaccgaccgctcacgcccggcgtgctgaggaggccgctgggcgggcgccgtggtcgggcttccgtaccccgcccgcccctggcctccgccctcgcagaacgccgcggcgtcttccggggcctggcgggccggggaccgagggggcggggaggtgacccggcgggggcggagccagcgggcgggcgcggcgcgggaggcgaccatgcgcggcgcgggggcgatcctgcggccggcggcgcgtggtgcccgggtgagcacccccgccctgcaccagcccccgtcccgaaccccagccgggcccctgccagcccccactccagccccggcccggccgagcatcccggagctcccggcccgtcccgccggtgtctggcttgcctcagctcacaggcttttcccgagcgccagtccctgccaggacctccgcagccagcaccttctcttgcgacctttttcttaccctctcattcctccctcgccccttcagccctgtcacctcctccttcctagatggcctcccgtgtccttccctttccactgattttatttttccgtttccaaaccaccgtcttgtgatgcctgccatgcttgcgtaccttgcaggacctgaacccgcggcgggacatctcctcctggctggtgagtccccccatcctcccctcctcctcgcacaagacccccaggcacggagatctcaaaggcagaaacaggaaatggagctaggaagagtacaggcctattccctggagttagcccgtggctctcagggaggtggggcggaccagagggcactgggcagggcgccagtcttctgtactgaggacagcagcacctaatgaaccaagccccagtgtgggtggccctgccgtaggctggaaggatcccagcccgccttccctagcacgcaggtgggagccagcgtttgagggaaggcagctggaccctgaaacctgagtgcctgcatggctttgaaatctccctgtccaaagctcacggtcctatggtgtcctggggaacggtcttgttgggtggcatcagatcagcctcttgtagaggaaacctgccacacacacaggccagtgggaaactaggaagggtcgcaggccggacggtgcttccagggcttgagctaaccctgagcccctcatcttccctggccacaggcccagtggttccctagaaccccagccaggtccgtggtggccctgaagacccccatcaaggtggagctggtggcagggaaaacctacaggtggtgtgtgtgtggccgcagcaagaagcaggtgagacccctgtctgccttcctactgatacctctggctaggaacagcctggtgtctccagtgagttcccacccaggatgatcttattcttcccacacatacctgagggacaccaagggggcttgggaacaaaaggccagtgccaccagcaaccttaagctcactgcatctaccccttgcaatgaagccagagagacagaaactcagtcac

SEQ ID NO: 64716 - DNA, 2850 bp, Homo sapiens
ccattctacccccagcgcccgggcttccccaggagcccatgtccaaggatcagggaccccagttaccgggtggccgctcccaccttccctagagccaaactttctgcggggccccgggaggggtgttccggagggaggctctgctgaggtggttcggggagggggcggggcgccggcgccgggacggggagcggggaccggcggggggaggtgcccgagaggacccggaccccggcggggaagggcgccctcccccggcctcgcggccgccccaaagcacatccccttctgccggccccaagtccccgcgcgtccacggcgcccctgtgcccacgggagagcgacccccgcccagatggaaaagggggtagaccgggcagagcgagaggcggctttggctcgtggggagcggcgacccaacccagcgcgcatcccgcaagccctcccggctgccccggaccttccccctcgctacctcggaacagggtctgcccgggggctgctgcacaaagaggtggtggtcgagggagacgccaaatcgttaagacggggagcccgtttcggccatcttggaagagaggaaagggaaaaagggacagaaaaaagggagaaagaaaggcggacggggcaagctgggctagggactgacggggcgcggggggtgcgaaggcaggatcggctcagagcctccccctcccatcggggcttgcgaagaacggccggcccccatcccaatccccagagggttacaggccaggagagggaaaggcagggggagtccgctccgcttacctgggttcggggtccggtgggtctcggggagggggggatgggagggagggagggaagggaggggaggggggccgcagccgtgtcgctcgcccgggcggcgggaggggagaaacctacggtaagaaaggagtttgtgaaagcggcttggggtgggagggagaggggaggggaggggaccgaggggggaggggagggaccggagtgtgggggggagacaaaatggcttttttcctccagacaagagtaggtcccgcccaccactcacccacgtgacctcattccttcaggatgctggcagagacgggaagaggagggggaggctggcgcggccgctccccgccaccggctgccgggtccctagccaggacgagacccctcccttcccatgcggccgccccgaccccggaggatggattctcttatgttaccttccgcagttagcccccctcccttcaaaatatgggttccccccactgacactgtgatgcccatccctaactggggcgcctggaaaatggtgaaatggggactgggctgaaaggtggctcgtggtcctccacgccccggcctagaccaaagggcgcggggctccggcgggggacgcgacgccttcagccaggcgtccgagcgattttcattcactccaagtgacactcccttaaaattaataactgcatctgggagggcgagcgtgtcctccccactccccttgccccctcggcggcaggggcgctggccccgaaaagcggcgcaccaggatccagcctgggcgcctggcagggagcaatcgcgagaggggagtggaggtgcggggtgaggccgggtggggggcctcgccgcggggggatcgggtagctctggcggaggctgcgcccccggcgtgctcgggcagagaagaacggaggcccgctgaggatgggaactcaggctccgggtctgggacacaataatccggccgaaggcgagcggccacactggactaggaaacgaggcgccgggctgtaaggtgggcccgcgccttttctcctgcctggcgctgattcccgcatttttcgctcgcgccctgcgctgcgcgctgcctgtgcgcctccctgggcgcgcgggcgggagagtcgggcgagcgccaagacggctgggcccgactcccactggcgccccggctccacctggcgctggggctccggtccgcagtggctccggcaggagggagagaacgaggagggaggcttggaaacgccgggagtagcggtgaggccgacgccggggaagcgaatcgatactgcgttactggacgcccgtgggcctcatgaggatggtcgattccctcattcgttattcacgatttattagggatggcggccgcgtctgtccctccagagagctcgattatccatccggccagcagcgccattaagcgcactgacggtgggaggctcgagttagaaattaggataggaatcttcgcccagttttggagcgcctgcctcctcttccctcgttgctcgcagccaaggcagccgcgaagctgggggcctcgggtgaatgctttcgccctctggccggcgaccaggagacctgcgcacactggccgccgagtgaccccagctcgagcctgcagccacaccagcgggacgggggcggggaggaagaggaagggcggagagacttccttccagagggagtggtccgagaaccggcgggagaagggccaagggaagatccggtcacctgctccggagcctgcaggcggagaggcgagtagttcaccggccccggaggaaaggggaccctcccactgttcccaggcaaatgtgtcgccggcatcctgcactctgccggggaagacgcgcatccactcgctctgcagggaggggaacgcgggaaggactcccagtcagccgcccctctctggctacaagaccccgaacaagagaaacctgtaacaggggctctgcggagatctggatcccacccaccaaccacatgggcacctggggggctgcccctcggggcattatcagccagtgggaagggggttgacgttcctctgcggcccat

SEQ ID NO: 64717 - DNA, 2614 bp, Homo sapiens
ccagcatataccaagagctattgcgaggatcagatccctttaaaaatggtgacgagacaggagagggcggctcctctagagctttccggaacgtctttacctctgtgtcctttataccttttatctcccccaaacaaggtccttagtcagtttctccttctatttccccatcttcctcccccacctccctgtgtagttctagggggaaaaaatgtgttgttttcctttttttctgatgcttctaatattaaatgcgtctattttcccactctccattgtcttgaggtcttcccctacccaccctgcctagttctgtcacgtcccttctttccctgtatcacaacaatgttctccctttctcacctttgtttctcttcatacttgtttctctctctgtgtctctctcattctcttcccttccaaatgtagtatttggagactgtaatatcgattgaggcagacaatagaaaactgtcgaacctccactgtaaattcattcttaatcctatgaaaaaatgcatcctgaaacgtgttgcatgcacagtgagacaaaaacctgtgtctttaggtttcctgcgatctagcttggaggcgggttgggggggtgtggagggaagtgctggagaaattatcccattattgactgagcagcaaagaattttcaagaacagtgattctcctagaaaaagtattgctgctgccatttcaatgcaaaatttggcttttgagtaaaaggcttaggtttttatcttccggggagaaaaaaaaaacccaaaagacaaaaaaaaaaaaaaaaaaggtcatagcgtccctgggtgggctcgaaccaccaacctttcggttaacagccgaacgcgctaaccgattgcgccacagagaccgagtcgactaccggcgtagtagtgagccgagtcaatgggagcgagcctggacggcgcagacgccgtaagagatgccgccatcgggcgaaataagtggaacccgggggagaaagggaaggatcctgatgggggagggaggcgaaagagcttgggaggagaggacgcgggacgtgcacgcccttcctccattggaacggcgagaggtcgactctggctatcctcaggttctacctcaaacgtggagaggcgcggaacgtccctttttagggtgacctgagattgaggatacgtgaagtcgggccgcaggaagtcccccaaatcagaacaagcttcggcttccaaactccctttcacagctgaacccctgcagccgcaaaatacccgcgacgcctacacgcgacgccttccccttcccacctgcatcattaaatttccatttaatgggcgcctcctatatactaggcactgttgtgggccagtgaatattccgagcctaggcaagtgcctggtacacagtaaacgcaggatttctggagtgaataaataagctagcacgactaatacgacgaactcatacatcacgttgataagcgtcacggtgccccttcagctggggccgcagcttcctaaacccagtttcaccagcccacgtgcgcgcaggctccgcccccagtccctgaggtcccgagtccaggtccgccgagatcccactatgcaccgtgtcgcaagtctcttccgcagccacagtgacttttcacttccgcttttcccgcctccgttttgactttgcaaccaaactacctgtactggtgaccgacagggacgtgtgaccaatagaaagcccagatgtccaggaagagtccgcctatcagccaatgaagagacagcagtgagagcggttgcgcagtgaaggctagacccggtttactggaattgctctggcgatcgagggatcctagtacaccgcaatcatggtgagatggggagttaaagcaaaggggcatggggaaggattgagaagcggagggggtcaggagaggcttggggacgaaaagggcctagggtcgatggaaggaagcggtttcagttcgaggggagcgggccccggtgaggaccaagagggtgagtgcggctcattgccgccacacagtgctcatcccagctggagaaccaggggttcagacgcctccggaatggagaacgggcgtacaggagcctccgcatcaggagctgggccgggggctgtggcagcgtttgaccccccgcgctgacccctccgctctgtctgtcctagtctattatgtcctataacggaggggccgtcatggccatgaaggggaagaactgtgtggccatcgctgcagacaggcgcttcgggatccaggcccagatggtgaccacggacttccagaagatctttcccatgggtgaccggctgtacatcggtctggccgggctcgccactgacgtccagacagtgtaagtttcaagggtccccgcccacacccaggcctcttcttggaccatccaaccccggcgtcttgaccggccaaggtgtcagtcatctaccacacaccaccagtgagtttgagactttgccgcctccaaaaaacatgtccttccctttcttttttttttttttagacagggacttgctctgtcacccaggctggagctcagtggcatgatctcagctcactgcaacctccacctcccaggctcaagcgattctc

SEQ ID NO: 64718 - DNA, 1814 bp, Homo sapiens
accttcaaaaactatgggaagacatattatttctactatgaatagtccctccttataaccaggcatcctcttctctcaaatggttaatagccattctttcttctccctaacccagagagacccaggtgaagtgtctggttcaaggaagcctgtgcttctccagttgatacatcttgttcaagagggaaaaaaaaggaaacccagggtggagttctacattcaaaggtaaggaggcctggaggatggaagaatttgagcagccacaacaaccaaacgatcagaaagagaggactatttgggcagaccactgctacttgacagagctggcagccggctgtaaggaacaagggggaatatacaccctcacaaacaggatgaggggggaggaggagaagcagggatgaaagcgactccactgcactgaggccttgcctttgcgctccatgggctgccccaagcgagcacgccacacgcaggaagccagaagggctggagggaaggggaggtggcgacggcagaccacagagacaccaggcctcgcgtggcgtgcggggagtgcacacggggccgaaaggcgtgcaagggtggggtgggcgtgcaagtggcttggcgaggggtggcaggcgtcaccggcagggcctgcggggcaagggcccagggctgcagggggcgtgggagcgcgcggggccgcgctcagaggggcgcgcaggagctggttaccgtgtggttcaccccccacatcaggacgctgaggatcggctcgctggcccggaatagcttcactttctggcacacgaaatgcttcttcttggtcttggtcttgctggcgctgagcggcgccaccgccaccgccgtggtgctggtgcagttggacgacatgcccggggcggcggcggcggcggcgaaagaggggggcggcggagacagcgcacaagccagcggcctcaggcctcccccggaccgatccccacccccgctccctcaccgcgccatggtcgcgcccgtcccgttacctcccaccccgccccggtggttccgtccgccccacgccccgccctcccgccccgccccggggagcccgccggcccgctccgcaccccgcccccgggcggtgcagccgccctgcagtcccctggccccgtcctccccgtccgcgtggtacggcccgtcccggggaggcagcggccgccccgcccgcccctcctccccgggcctgacagaaacccgcctggcctccgaacgcctcggggccccgtgccggagccggaaggggaggagggctgggcaggcgtcgctgtggaccgcgggaggggctccccgcccgggccccccaacgccagggtttggctctttcccgcaacccgaatgccaagatggcggcgatgccaccgctccggaagggaaggagggacgggaatgcgaggagggcgggacgtaccatgcccaccccgggggagaggagggacgcagcaaggggaagagaaagtccagcctagaaagccaaggaacgccccctcgctccacctaagcgtggatctgcccactctgctgggccccgggcgcgctccacccgcggggcacgccccttgcccccagggccaatgagagaagcaggccaggaacactggtttttatgaatgggccccgcgcccacccacctgctgcctgttctccccgcaaagggtcagagctcagaggccgccagcaccttcagacacctatcccactaatcgtcttactctggctcatttcgtaaaatctttgagtaaactgccccacgctttgttacataattctcagatgagggatctcca

SEQ ID NO: 64719 - DNA, 2027 bp, Homo sapiens
ctctgggaggccgaggcgggcggatcacttgaggtcggcagatcgagaccagcctgaccaacatggagaaaccctgtctctactaaaaatacaaaattagccgggtgtggtggcgcatgcctgtaatcccagctactcgggaggctgaggcaggagaatcgcttgaacccaggagggaaaggttgcggtcagccgagatcgcgccatggcactccagcctgggcaacaagaaactccgtctcaaaaaaataaaaaataaaaaacgaccccagggcatggcttagggtagggagaatggggcacaaaccacccctacttcagtccaggacatgactctgaactctcacccaaggaagagaggtgtgtggcaagacaagatatacaaaacaaagtgtggtgacacgtcctccatatctacctcctttcctagccatggctccatccgccccctccccggtcttcccagaatttacagccggtagagccgcagtcaacaaacacgcaaacaccacctgtcactgttcgcgacacacctcggactttcccaaatctcagtcccacccctccattgccctaaggatccatcccctcttcagggcaacggcctcctcccggcgaaagcaaagctgcgttgccatggttatccactccttcctctacccccaccccctgccaatttccgtcccggcctcagtcctcccccgcccaggcctccctccactcaccaggtctccgccccccatgacggtggagacgattcctcactacgcggatctggaagatttcgggaggatcaagagaaaacgtagagaaatagttcgggggctacctcgcgggatctagtcccaggagccgtcaactgccagtttcaccaccgctctagaggtcacttccgggagggcgtcatctcaccgcgtcggcgtcgcggaacgatgacgtacagggctcggtcgcgctttgtgacgttggcgttacttgcagattttgcaaaggtccgggctccgctgtcgaggcctttgctgtcgaggtctcattttggctgcttcgggtcgccacgttgcctgatgtcccagactctctgttgaaacgccacaactctgttcagtgatgggttgccgtgggcctgtgcccacggctgtgttgccatggcagctcaccagggcattcggctcaaagctccacgtagtctctgctagacctaaggtggaccagactaggcctcctcccctcaccctgcacacacccccacgctccagttttccaaaacggctttgcaaactggcgctttcctcagaccttgactcacagcaaatccccttatgccaggcctattttacgaagctaaatagaaaccatcaaatcgaaattccatcagcttccgtttgccaaacttttaaaatctgccagcttccacagtggcagattttcccatagtgggaagctggcagattcctttcccttcagttactatgtgtttttggcatgtttttcttttttctttttctttttcttcttctccctttgtttttgttttttgagaaggagttttgctctcccaggctgcggtcgaagctgactgcaacctccgcctcccggacagcaattctcctgcctcagcctcccaagtcgctgggattacaggcgcccgccacccgcccggctaatttttgtattttttgtagagacagggtttcaccatgttgctcaggcttgtctcgaatttcgacctcaagtgatctccccgcctcagcctcccaaagtgttgggattacagacataagccaccgcgcctggctatttttatttttgtagcaacagggttttgccatcttacccaggcttgtctcaaactcctggactcaagcaatcctcctacctcggcctcctaaagtgctgggattacaggtgtgagccactgcgcccgacctgttttgtaattttcagaatagaagttttgcacatcttttgttaaatttattctaaatgttgtattttttgtgatgctattttatttatttatttattta

SEQ ID NO: 64720 - DNA, 1907 bp, Homo sapiens
gtttactcacccttttttctgagctctggtttgcctttcttgactgtggccatcaccatgtcacccacaccagcagcgggaagtctgttcagccgtcccttgatccccttcacggagatgatatacaggtttttggctcctacaaaagaatgtaaataaaaataaaaaatgttgagggccatcaggccgttccatcagtataacatttcccaaacacttccaaagcccctccctccactcactgcccaagcagttagtccgcaagaacgccttgtcacaccaccgattgaagcaaacaacacatgttgccacttcacccaaaagcgatgttttcactctcccctttcttgacggctcaataggtcattagccacaggcccattgagtgcttttaaaagggggagtatagcaacgtgcaaagacctcacctgtgttgtcagcacaattgattacagctcctaccggaagacccaaggaaatccggaatttcgcaccagaggacccaccacgtcctgtggatataaagggaagggaaacaggataaagagatcacaatctagacatggttcggagttccccctcatactcaagctgtaattcaccgcacatgctttgatagactgtacgctatagattagctcgctcggattttacttatgccgtccccatgtgccacccgattctcacggaaagtagcctatttcttactattaacactctgacatcgaaattaagaaacctagacgactcaacccttgctctaactttcgcaaaacgcaattactcctgcaaggcataaaaccgcagaggtcgcgcaaaccagggcctaatccagtctaacttcaaccccattacgatagccctattcgcggagcgatctcgcggtatccagactacattcacgtcgggatcctgccatctcaactctccagcaccccactgccactttcgagggccctggcagtgctctcgcggtggcctggctctctctctccggcctgaaggagagcaaagcgccccagctgcctagggccaccgctcctgacgaatccgccagccactgcacgacagatggtggaggatcctccagaaacaaaacctcacctcgcttcgacatcttgaacgccggaaaaaagaaaaaaggaagtcgattcaaaggacactgggatatgaactttaacgccccgcccaccctcctcacgtggccggagcaaaaaccggcctcttccgcctctgggcgctgccttattacgtaataagtttacgacgtcgcttttagccctctctgcgaagtgggagttgaggtagaagcgcaagagataggaagtatcttctctacgagcttaagagtagttagggacatggaaacagtgatttgttaacttgctcacgacctcttttgaccacttaatagtgccaggcacttatctgcacactagagaataggaattaaaacacggtttgtgccgtgtgggggttccccaaggaacaaagaaagtgggggagggagggagaacaagctctaaacggtttcgttgaatgtaatacagttgagaagtgctgcagatcattccatctatgtgttcttggtatcataccattctgtattttacatatacagtattgctctatttattgacccgtcccccccaacacacactctttttttctttttttgagaccgagtctcactctgtcgcccaggctggagtatagtggcgagatctcagctcactgcaacctccgtcttccgggttcaagcaattctctgtctcagcctcagagtacctgagaccacaggcgcccgccacaacgctgggctaatttttgtatttttagtagagacggggtttcgccatgttattggccaggctggtctcgaacttctgatctcaagtgatctgccc

SEQ ID NO: 64721 - DNA, 816 bp, Homo sapiens
ctaccggctaattttttgtatttttagtagagacggaggtggggggggggggggtgggtttcaccatcttggtcagtctggtctcgaactcctgacctcgtgatccgcccgacgcggcctcccaaagtgctggggattacaggcgtgagccactgtgcccggcctatcttggcctagtcttttaatttctccttcctcattggtaatttcagtataatctagcaaagagacactaattttgaacgaatggtgaaagtatgaaaattttgggatcaatcgatgtaaaaacaatttaccagagagccaccgccagagggggtatagctcagtggtagagcatttgactgcagatcaagaggtccccggttcaaatccgggtgccccctcgggtttctttaagtttttttcacagccatccaggaataacctgagtcagcgagttctgaatgcaaaactcacgggaggtgtcgtttgtatcttccacctacctaattttcaccttgaaaggattcccgtaccctagagggagagaacagcaaccagaggctgcctttaggtggatctgagccctcataccccaagtggcgataagcgcaccagtactctcagttggagaacaaaggcgcgtatcgatttccatctccgatgcccattggtttaacgttaattataatttgttttggggtaaaaaatatgtcttggacggggcagtagttcgtacttgactatgaaaactaggagaagtaatccaaattcagaggttttcatatactcgcgaactcgaacaggacagggcacacagatagaaggtagaca

SEQ ID NO: 64722 - DNA, 4567 bp, Homo sapiens
ttctcggggcccccttacagaatcagaaactagcagtgttttaacaagccctgcaggtaattctgatgcacgttcaaatttgagaaacactgtgttcgtttatctcagtttgcactgggttataactttacttttgtacattaatagtcaaggatgaacacagcacgtccatgtcaccattaatacagaaagttgaagttggagaagggctgtgtctatgggtttccctcgcctgacccaccctccacccccaaaaggaacgccaagttgaggcgttcccctgtctccctacccccattggaaacatcctgtccctcaaacccggcacctcgaactgtctgacccatctgaggctggcgcccgtggccgcagaaatccctacacctctggcgcgagtaatgcggtcgcgcagcttttatacccaccccctcctcccgctgagcacaaagtaaaaccgaaagatttctgctaaggttgaaaaatgaggaagatactttttcttttctttttttttttttttttagtcaggacccaatgttaaaatgtgagtcaagaatgaaaaacagatggttaacaaggggaaggaaaaaccaagccattgagggggcacccggatttgaaccagggacctcttgatctgcagtcaaatgctctaccactgagctatacccccgcgcctctacagcgcctggaggcggctccttgggtgctaagcattgttgcagctgctacactgtgagtagtggtgtaacagaaggagaaaggaatgctggagaaaaaggggtcaagctgaacgcagacggtgcccgcatccggggaaccccgggaaggtgcactgcaggggctcgagagggaagcactagcccgggcccggcagcgcgcagggtccaagagggagggacgggttccgccccacaaatgtgggaaagggtgtgggccggaagagagctaagaggggcagggtagggggtccccgttcggtccgcagattcatgccgggtagaaagtccccgaatgcggtgaatcagttccagcgttcaggaggatccaaccccaccctcgacgggcttgaggggttagcccgcctcccgcagcccgggcgccccagatgtgcagcctgctcgcctctgcgccgcctccggctggggaagggccctgggcaccgggcgcagtcagcctgagagcgctgaggcgccagcaccgcgggccccgccgtccccccaggaacccgcccccgcgcagccccacgtcgcccggagagcgcgcctcgctgcgcgtgcccttgcccgcgcccgaggcgcgtgcccgccccagtgcagcccctcctccccgctgtgtttattaggggaaggagggcggaggcggaggccagttccccagctccagccgccgtcgctgctgcctgtgtagttgcagccgcggccgcctcccgccagctcgcctcggggaacaggacgcgcgtgagctcaggcgtccccgccccagcttttctcggaaccatgaaccccaactgcgcccggtgcggcaagatcgtgtatcccacggagaaggtgaactgtctggataaggtgagcccgggaccgggagacgcgtctttgcaatcccccgcagtgctccgaatccagggaggagagaagggccgggtctttgccgccttatccccgcgatcccaggagaatggagggagggcgagcgggcggtgtcatggggtgtggggacacatcccagtctgaaaaccaggagatctggggcgaggcgggaagtccacgcgtagcgggcagccgctgctggagaggggtgggctctgtgtcccggggttgggaggacgggagaggagcagggaagtcaggcgccggggtgtgttgggggaaggttaggggtgcagtcccgccccctacggcctggagagtgagaagagacggccgctccctctccgctctgcgccgagcgccaagtaggcggaagcgcggggcgctggtggagggggcgggggggcggggcagaggctggggggccctgcaaaaccgtccgctccggcgggggtggcctggcttcctggcctggcggggcgggggctatcagcctgcgagtgtgtggcatctgatgcggggggttttgggtaaggacccgggctctgccgcaagagccccgtttttgaacgacctgcacccccttggattcagtcgttaaaggactcgcagacctcctccacagcttcccaacccccacctccaattaaaagccaactcccggtgctgggccgtccagcctgagccgggtggggttgggtggcagagtagggtgggtggagggtgcttagctgagatctcctgaaattgtgctcagagccaggagaccgtgtggaagaacaaagagctaacttttcaaagcaggtttctccaatggagggtggggttggctgagttctggggaagccgaggaaagggggaggtattggggggaggggagggtggccttgtggagattcagtgtcccctgggggccctgtctccccaatgctggacttgttcatctggttgccattagacttttggaggggggttggagagtagaactgggtgtttcccgtacagtttagggtaggatcctgttctcttgtaagctccgtaagatcctaaggtaaaacctgcccctctgcatcccctccccagtctggaggggaggcctctgtgattttgtgcccttcctcaccgcgtctttcatccaccacccaaagctggctccaagtccaagtattctgtcctttccatctgaactgggagggctgggaggactggatggaagagaggtgcaagggtgggaacactagatgaaagaggggtatagagccctggggccaagttcattactgacctggagccaggttttgttcaggagaggatagtttattggacaccttatctctcccctcccccttggtgtgtgagcttcctcagtgacctttggcctctgagtcagcgtgaggaggtggggttggaggttctgaaagatatttgaacttgctcttggggagtgtgggcatatggggccgctgctgtgtcactgttcctcctggtcctgggcttgactgggcaggaggagaggagggggtatattgtgggcacgaggaaagttgttgatctccccatgaccatgccagccgctgttgggcaggacttgagcttagagctatcagataatgaagtctccccttgagaatgtacctgtccttgcacactggggtttcgcccgcccctcgtggcagagattttggcctctgcatcttgagttccctgtggtccccttcttctccacagtcatgaattgggaagaggcagtgggcacttgacccgtataaggaaaaagcaaaacatgaaggcaggattgccactccaggagttgggaaactgggtccttgttccaggtctgctcccaccagttttatgaatgtctctaggcctcagtattcaccatctgtcagatgggtatgatgatgtcatttccttaaaggtggggcagtgcactaaagtccctgagtgctaaagagggtgctgtatagactatgccctccctacctctctgggatgctctgttcagctccacaccactccccttggaaagaccttcagtgccgtgtacccgaggggaggggagcagggatgggcagggtgccctccccagttctcttaccctagctggaagaggacgttcaagtgggggttgcccagggaagtgggagttggtgattccttcctctttttagaactctccctataggaagtggccctggagagacctcgccccctgtactgagcaggagacctgaaatatccaggtatcagacctattcctctccacctgctccaggcagtaaggataggaccaggaatggggagccagtgcctggaggatgctgggctgtgaccagggaggaggggaaaccttcagtcccataggcagcttcagtcccatagttgctaaccaacttcccaaggcctcccatttacagcaaaagagtcaaattagactcacccgtttctctacaatcccccatggtactcagcccactacgtggcccaaagcacagggtgtgtccttggtttcagccttttctcctccctgagccttatctcccaaaggcataggtgggtaaaaaccttgtcacctctgaaggccaccctgcccccaacctgcagtacccagcatgctttgcaagctggataaatatgtattgctgatgacagtgtttgaggaaggaggtcgagatttgcttctccagaggacttctgggattagagctgggggagaaacagggtgacctcatttgctcattcaacaaatatttattgagcacctactttgtgcacctgctttgtatctagggagctgtgttgtcaagaacctcgccacgtccctctttcctggcttgcttccccaggtttctgaaaacaggtggaggtagaggattggtctgctgccagttcccctggaatcccctgttagggtgggctctctgcctctgcttgtctcagcgctccctccccactcgagggggttgaagtcctca

SEQ ID NO: 64723 - DNA, 599 bp, Homo sapiens
atttgtgccaaaagtaggtcccatcccttcctgaccctatctggaggaatgctctgggcctggggtcttgtatgggggcgtggggccactgggaataatcctgtcctcctcggaatttgtggaggtgcagcaaagatctatgcctttaagccagcgggtcaggtggccaaccaagctaggctggtgccccggccagggtggggctggcattgcctctgcaggagggagaaactgtaaccctgggcaacaggaagggaagagatggtctcataatccatccctgagtcatggccaccccaggtagcctgggttcagaggccaaggtgccaggctgcaggcacagtgacacgaagcttgccacatcccccccaacccagagccacagagggacaggctgtcccaagtgaggggtatccttgcaggcttctgcccctaccagcctgtttacctttctttagagtgggttgcaggtaggcaagggaagatcaagatgaccctgccttggagcctcggatccaggctgagaggcctctaacaggcagcagaggtagggtctgtctggtttctgtgaacagggaagccatggactttgcaggcag

SEQ ID NO: 64724 - DNA, 1262 bp, Homo sapiens
aaaaaatttgggacttgtctaaaaagggggcttaaacctccagccttacccctaaccttaccccaaaccttccttgcttccttaccccctcccgttccctggctaagaccactctttcatctttttaggggctcgctcattcagcagacatttattgcctgcctgctgctataatacatactaacctgcaccaggtgctgggaaaacagattcctgataaaaatctcaagcccaagaagcaacatgaagttgtcccttctggaagaaggagggcactgggcaggttatctgggtaaaggaagggttgcagctctgtcctggcccctccttcagctgccccttctcttctattaatttctactgttcctcttccccctaccaacccctcccacccccacaagggaaatgggacattcttcgaattcttaagggctcacacaagccctggttctctgccacttcctccctccattgggtagtggggtggggttcagagaagccagggcagttaacccctccgttgctggaccacctcaggctagattctgagcctccgccccagcacgcagaagtctgaccgagccttggagcccagtgactcaagcagcctagaattcagtgagcactgggagctggagaaaaatcagaggcttgtccttgttttctctgcgttttatcagcctcatccaaagttccagcttactgtttttactgtcttcttgggaagctgccacaaggttgggtggagggctcctgcagggactgggggagccagaagaggcagatcaaggtttcttctctgggtgatgcttccaacttgcagaggcagaggttcccctgtctccctcctggcctccagccaaaagaagcaggttggcctctccatgtttcctccagcttttgtagccctagcctctgccatgcctcattgacctttggcccagttgggatgtttcctgggaaggagcctagtgagagagacctgggggctttgtgacccagctgtgtttcactttagctgtagtagcacctcctcgcccaaggcagtcattctccctcccctgcatccactgggccaagaagttacccgtggggattctgggatgaaccaggtgtggcgcccgcttgcaaggagtgctctctggacgtgtctgagccttggtttccccatggttaaaaattcctgcccaggaggcctggcatagtggctcacgcctgtaatcccagcactttgggaggctgaagcaggtggatcacttaag

SEQ ID NO: 64725 - DNA, 748 bp, Homo sapiens
gtctctgtccttgacactggacctcagtttcttcatctgtaaaacggcacaatgagaatgccagcctaaagctgtgtggtgggttttgagagagaatgtgcacaggactcagtgtgccaagatgttgctttgtgtctctgtaaattgtcctgaagcccgaggctgctgccaatagctgcctgtttgccctgccctatccctgtccagtccctgttcctgccccgcttcttcctgtcctacatgcctctccctgcaaactccccagagcagctgatagcagggaggaagggtgggtggggcacctgcagagagcccaccacccacttggaatgattaacaaggggccagtacaggctggcctatgggacaaaggacagctgtgctctggactctgccctgcacccagctgatcacctgtccctcattcctcgccatggcccagtctgtcatggggttgggttccagcggagtcaccagctgggacgggtggcccctggtctgtcttagcacccatgttggcatgcacacatttccagccatccctgctgggatctaggggtaatggatgggatgggcaggaagggaaaaggtagaattcccaaaaattgtttctggagggaggtcaaatcagttggagctttctttgaagcccggcatgctggtggggggaggggtgcagcactgatgttctcatgcctttgcttctagaaacaaacccgtgacacttgtcctcctcacctaaattatc

SEQ ID NO: 64726 - DNA, 2020 bp, Homo sapiens
actcttggggtgggttggtgcctctatccactgcattcacttctgaactaatggggaacagcacatccaagcccttcttgtctggatcagaacagagaaggagagggaaccacatggatgagtgactgggggcttcaggagacaaacaaggactctgacccccacaggcatgtgcagaggacctgacaggtgtggccgtggctgcatgcgcatgcgcagtcgctccagtccaagcacagctcggtgctgctgccagatgattccctgccagggaactgcctgggtttgtgtcctgggctgacctgtgtccaggacagtgcagcccccgtggaggaaatccaagcagctggtggggtctggaacagatggctgatgaggtggacagtgaagtctctggaagccaaggaatagtttcctgttccatgagttttctcagcctcattctgttcttcaaaaccctcaggggaggacaagctgttcctcatatttcaattcctttcgtgccagggaagtcctttctgatgtctgacttgagtccctctagtactgtggtggggtggaagggttcttccctggagcttggagacctgctgagatgctgtctgacccccgctgctttcctcccctcctatggcggtggcctctgaagccatcccggcaggctcccagaatccgcggggcctgtcaaaggcgcactgatggagccttccctggggctgtctcaccaccctcctttctgggcaccaactctgtcctttggcacagccctcactcagctggttgctgaaaagctcccccaggcgtagtgggcagggccacatcctggctaacatgagggctggggccaccctgggagccctggaaagaacctttttcctataagcttccagacaggatgggcagggagtgaagggtcaagagtcaggcagatgagggtttgcactctggtagtgccggacattgactgctaagctctgtgaccttgggcaggggactttgcctttctgtggctccgtttcctgatccgtaaattggagctgttaattgcgtggctatatgtatggtgggatctaaatgagatggttcatgtaaggccctggactctgtgcctgccattcactgtgcaccaaagacttggtagtggcttattattacgagtctaacaccttttggctgaggcctctgctttgagttggggacttctgatcagggtctttctgctgactccctgtccctgtctcctgactggttgctgcctcagaggggccccaagccgaggccctttcggctcctggcctgactccaatccctcttcctcccctcctgcaggtgcgctacaaggaggagtttgagaagaacaagggcaaaggtttcagcgtagtggcagacacgcccgagctccagagaatcaagaagacccaggaccagatcagtaacgtgagctcttgccctgccctgcggcatccctgctgccctctgtttggtccccttcctgccagcctggcagacgcaagcctggcagatgtgaatgaggccagtgcctccactacccctgccctccagggtgggcctggggaagagcttggggttcccagatgcctcttctctgtgtacccccagaccaccagcacgcatagcattttcttcttgaagggactgtattctgtgggggcctgtgtgctaaatcagcccccactctctctgactgttgttcttttttctggatatcgtgggtatcggtgaagactgcatgtctcatcttagcacaaaggtcaaaactggggggcggggagcacctggcctcccctggtctgcgcctgggtgctgacattgcagtcatttccgcccttccttggcctcctcccccacatcagcctgctcttccttcctgtgtaaaaaccccagccagcttcacccgccagccctgcaccccctggctcacaccccccgcctccctgatggtcagtggcatctggctgtggcaggggtgggcatggagagtgggcaggggatcaactgt

SEQ ID NO: 64727 - DNA, 832 bp, Homo sapiens
gggaggctgagacagaagaaccgcttgaactcgggaggcagaggttgcagtgagtcgagatcgggccactgcactccagcctggcgacagagcaagactccatctcaaaaaaaaaccaaaaagatgctggttgcagacttactgtgaatgggttttgcaactggactgttgacctgcagtttgaagttggtggcctgaggaaatggcatgcttccctttggctagcaggggatgcctagggcgggcactctaatcctccttcccctccaacttccagaggcctgtcacagttgactctttatatgctagggcctggcctcacgccctggagcttccctttggctcagaccctgcaaagggtaagacccttaggtctgtgtttcagagctctcggcttggaaagtgggggagggggaagatggtcttagattatggggaaaacccggaatggttcacagaactggaatgtcggctcttcagcctctgcggcttttcatgtagaggctctagtcttttatcagtgacacttgctcccaatgtgcaaccccagctccctggctgttcactcattgcttcaccctgtgggttttggaggaggggagacaagcccagtcatccctgcttccctttctggaaggcttccagaacactccacactcagcctaagccacctcctcttcttccctcccccagttagaggtgttaatatcctagtgacaaaactcaccaccctggccaagccatccgcatctcaggagataaccatcttttacccttctcgcggtgctgcagtgagctaatggtcctctgcaggagctgggggaagggatcg

SEQ ID NO: 64728 - DNA, 2289 bp, Homo sapiens
caggtcaggacacgaagatgcctcttccctcccctgacctacttcgttcttgtgacggcaaggagctggggcgctggagagtgggagacggggtgagggggcatcctggcttctagtgggctggggcctagggactagaaaaccgcggagaggaagggtgcgaacgctgagcgccattggagaaattttccaggaggagggatatgggcggggacaggagaaggtacactgtgggctggaagagacggattccgtggcactgaggttaaaaaaaaaaaaaagaaaagaaaagaaaaaaaaacacctaagaaaggaaacaactaaaggctctctaatctcttagaacgccggttcctccttccgccgggcccagagtcccagagactacctcctccagccctaaacccaatgtccccttaccgtggaacaaggcaaggccggtctgtaaattcttcttgatgtctaatttaaatcccaacttggcggactctcaaacagaatcagataggcagctacctccagctgcagctacttgctgccctcaagtggccacgtgacgagccacaaccctcttgtcctgcgggtttcctctttccccagcctgcccaccccctgtctccgacctcctgccttcctcgaggtcaaggtgagaagtctcgggacggattccagctccagccccggcgtctttgcacattcctccatctggggtacctcgtggtctgtcttacaagaagagctcaggctgaaacataaacttgtaaatagtagaagcaaatgtgtaaattttaacgtaagcctctagaacttgagatcgtaatcacctgcagggtgtgtgtgtgtgtgtgtgtgtgtgtgtgtgtgtgtgtgtgtgtgtattttgtttgttttttgagacaggttctcgcacgttgcctaggctggagtgcagtgctgcgatcatagctcactgcagcttccaactcctggactcaagcgatggggagcgtatatgaaaacacagatttctggactccaccctcaagtttctaattcattaggtctgggatgaggcccgagcgtacccaggtaatgctgctggtcccaggaccacattttgagagccactgctgttgaatccccagttcctttcagtccctcactgctcctcgtctgccagtaggagtaaaagcaaacagcttaggaaaaatcgacacccaggacaaaaacagtatctcgaaaaggccaaagagggggcacccggatttgaaccggggacctcttgatctgcagtcaaatgctctaccactgagctataccccctctgccggcaaaccgaccgcacgtagtcgtttagtggtattgctgcgcaggcgctgtgtggcgttcccgaagggaagtggaagtggggtaagacgtttacaagagatggaaaaaatacaactcccagaagaattactcacttggaagcaggggttgttccctgaagctctgagctgaagatccccactggcagtataagaaaatatattcctggggtgtggaaggagaagtctctcgaaatatttcacttcgggggcgtcccactctcctgccctgcagaagaccccttgccacgtctcggagcttctttctccctcccacatgctcacgcggcttctcccgacctgtcttccccagcccagcccttagaaactcagcctccttcccgccaagaaagagccaggctgacctgggggtgcgctcgcctccgccctgccattgcgaggttgagccacccgtaccgtgttccaagggtcagcccggagctcctcgccctcactcgcattgcattctaccctgggtacacacacaggctgagccactggcaggggccaggactccatcctcactcgcctgcgaaagcaaaaagggtggcagggctcgagactccctcccattccatctgtgcgggaactctttagaggacctccggagaccaacaaaacgaggtaactccggagcacagagggggcacccggatttgaaccggggacctcttgatctgcagtcaaatgctctaccactgagctatacccccgccacgccactacgttgtcattagagttaatttctatggaataggggtgtggtcttcattttcccttaaagttttaatctgagggttgcgtcgggatacctactgaaaaaaacacaaaatacaatgggaatggctagaactcctgagttcttccttcatagccacgctttcggaaaaccaactagattaaggaatcttgggccgagagcggtggctcacgcctgtaatcc

SEQ ID NO: 64729 - DNA, 911 bp, Homo sapiens
ctcagcccactgaagctggtgcccaagcggcaggaaccttgacgcgggggagataaggaggcgagggtgacaggcagcccacccgccccctccccgctccgcagcatcgccacccagccccaggcccagcgcccatcaatcacaacctgcaaggatggggggcgcgcaggcatccctctctcctccgcgcccggcatataaccccttcctctcccgcgcctctcgagccgaccttaacacggtccgcgggagcgaccccctcccgttgggccgggccaccacgcctcacctgcgggctggggtcgaagacctccatggggatctcctgggagggtgggtaagggccccgggacatgctggtcttctggaccatggagaggagcctcccctcccgccgccggcccggcccagccgggctccctcagcgcatgggagaggccgtgggagccgaaagcagcgcggcgcagccagcacccggtccagccacccagctcggccttcggctgcctccttcctgccttccctcgctcctcccgctctctccactgccgccgccgcctcccccgtaggctcagcatctccccgcgcccctccctcgctccctccctccgcccgcccggccccgcccctcgcagcccctccgccggctcggcgcacacaatgggcgtgcggcagcagggaggcaagcccctctcggctctaggtggccgcaggtgggcctctgactggccgtggggtgcaggcggcccgctggggcgggaaggcagaaactaggcgtggaacttgggggaggggtgggggggcggtctaccagtggatgccgagcgctgatggggattggcatggctggcaccaccccccttttgtcccaaacctctcttcctgcgggtccccccaacccactcctgttt

SEQ ID NO: 64730 - DNA, 2191 bp, Homo sapiens
gctcactgcaacctccgcctcctgggttcaagcgattctcctgcctcagcctccccagtagctggaattacaagcacgcgccgctacgcccggctaatttttgtatttttagtggagacagggtttcaccatgttggccaggctggtctcgaactcctgacctcaagtgatccgcctgccttggcctcccaaagtgctgggattacaggcatgagccatcgagcccaacccaattttttttttttttaattttactttctgcaatcattcatccattcagccagtgcggtatttctgaggtgtgttcgatcgcggatccatgcctgccgcagtacagttgtgagccaaatgagactgagactagttcccgccctccaagagcttgcaagacccgcagtggcgtaaaaacactaacatcttttagtgatcgattctgcactccaggggttttcaatctactacaagagtgaataagagttcgcctttgtctgatatctgttgtcattctctctcgcttctttaactgattttttctcagctaataaaacatccacccacaaccccccgaacgcccgcaaacaccaggccactctagcaaaacctctctcactccgcctgcgcaatccagctgacttccggttacagataaccacgtgattgggaacccttgctgcgcatgtctagtaggaagtcggactataccactttccctacggaaggggtacttttttatgtttttaagtttaaaaccgatttctgatatttgacttttatcatttcaggcctatatggaggctatgagtgagtttagtgtggcagaagatgaaagaaccggacaggaatacggacgaaattggagcagggtttgggctctccccttcgcagataatgggaggagccgggcccgagcgagctctttcctttcgctgctgcggccgcagccatgaggtgagggcgagctggtctccatcaggcgctgacgcgtgtcgacaagggactgtcggtcttgggaccgcagctggggttgggggagatgaaatggaggccgccctaaagcggccggtcccggggtttggggtaggccggagcactttcgtcccgggcctccggagtgagggggggcggggagcgtcgcagcaactgagaccaggaaaagtctgccccggctggtgccgcaccgcacacgtgtccggtcgacccacgcgagcagagcaaacggagcgaacaagaccaagccgtgggccctttcttgcttggcacacccggagcggagccgatctctgctttcacgtgatgtagggcaagcctagtgtaggccccaggcctccgactgccgagagaggtgatctctaactcttgactccattcactcctttggcctctcataaaggaaatctctgcgaatagccgaacgaggcttgttactgtgataaaacagggaaataagcccagaaaacagagtaacttgcctgcattcctagactagaaatcaggtctactcacctcgaatattctttaaacgctgagtaccagaaatggcataacccccctattcaatccaataagtccttggcttgactttccagaggagaaatgcgaacatgaggctccgagaggtgaaggcatagcgtgggttttgaagtcttaaacccaagggggccagctgcatagcccagagccttaaagatgatttagggaagagtcttatttcgcggctgtggtgtgggtcacaaagggcaggtcttgatggggacgttcattcttgcccaggattggctttcagagtctaatcatgttttctgtgtgtctagtatgctcaggcttcagaagaggctcgcctctagtgtcctccgctgtggcaagaagaaggtctggttagaccccaatgagaccaatgaaatcgccaatgccaactcccgtgagtacctgggatctgtctcttcaccctacttccttcttttctcctgcgtcagattaatgataacacaattgtgttgacttttttttttttttttagacagtcttgctctgttgtccaggctggagtgtagtggtgccatctgatcattgcaacccctgctcccaggctcaagtgattctcccacctcagcctcctgagtagctgggattagaggtgtgcaccaccacacccagctaatttactctttatattttattttattttttttgg

SEQ ID NO: 64731 - DNA, 627 bp, Homo sapiens
tgccctacttgaagcaggaggagctgcccaacatccctggcacggagctgccctgccccatgttctagtacgtgctctgtgcagccacctcgccagccgtgaagcagcaggaggagaccctcacctacctgaaccagggtatgctaggcctgggagaggggaggagctagtgggcagtgagctcgggaagctgggctcagggtgagctggaggtggtaggtgccactctgcccctcagagtggggctcacgcaaccccttaatccctcccacgccagtcctatgaggtccggatgctctgcagctccaagccgtgtgatgccacccagtgcccccagctgctgaaggtgggtacactcctccccggaagtggcaaaggctgggtatgactgtttctctgggcaagaagccaatgtcatcacagtgatatcatcgtcacggagaaccctctcacgtccgtcatttaattggaccctcacaacagctccgtggtgggcaagaattgaagaaacaggcacagagaagttaagtgttttctcaaggacacagagccagcaagtagcagaactgagatttagaaacacatttacacagtgtaggctggccacagtggctcacgcctgtaatc

SEQ ID NO: 64732 - DNA, 688 bp, Homo sapiens
acctgtgaatgccagctttgtgtcaaggggagagggatttgtatagctaaaagatatttattgcttaggaaaaacatgactgaataaatgcatcctcattaaataaaaaatgctccagtttctgttgtcagggagtttattagagggaaaggtaaggcccccacttttctccacctgcccctggcatgatacaaggcagaagggcaggtgcttcctggacatcatctggcatagggcacctctgactagtctgcttggcatctggttattcagatgtttgccttccacccctccacatgccagagctggtcagcttggcttatgtacacaagggggtaggaagaggtagatgtgaagtcgggttttaagacacgtgtggccgggcgtggtggctcacacctgtaaccccagcactttgggaggccgaggtgggcagatcatgaggtcaggagttcaagaccagcctggccaaaatggtggaaccccatctctactaaaaatacaaaaattagccaggcgtggtggcgggcacttgtaatcccagctcctcgggaggctgaggcaggagaatcgctggaacccgggaggtggaggttgcagtgaactatcgtgctactgcactccagcctgggtgacgagcgaaacttcacctcaaaaaaagaaataaaacaaaaaaacacttgggtgt

SEQ ID NO: 64733 - DNA, 1228 bp, Homo sapiens
aggtcagaagttcgagactagcctggccaacatggcaaaaccccatctctatgaaaaatacaaacattagctgggcgtggtggtgggcacctgtaatcctggcctcttgggaggctgaaacagaagaatcacttgaacccaggaggcagaggttgcagtgaactgagattgtgccatggcactccaacctgggtgacagagcgagactccatgtcaaaaaaaaaaaaaaaaaaaagaaatataggcgaggaaaggctgtgactccatttttccccattatccttttactgctttagaattctttggtacaacatcattaatggggagagaggttctgtctcaagaattccaaccaaacatcctacatttcttctcaaacaggacttggctaattcacagtgcctgggtttgaggtggctaaagattctaggattggcaggcagatagagaggcaatctttttgtaaaatgcttcagagctcaaacatatgattgagaaagtctgtcagccaggagatacaaccaggataaaagcctacccttaaatcatacacataaggaggaataaggcaaaatagagcaatttcctttaaacccctcctctcactggtagcaactggcatgagccgcctgtgactttcagcacaataaacataaaatggccaagggtcacccatgacccatgagtgctcttctcccaacaacacagtcacctaaggacatgctgactaaacaagcaggcaggaagccactctcttctttccagtgacactctcacactttctaacaacttcaaaccaagacaggtttcatcacatattttgtttagtcccccatggcattagtgggctatcaaactagtaacgatgcatttttttctttctttctttctttttttttgagatagtctcactctgtcgcccagggtggagtgcagtggtgcgatctcagctcactgcaacctccacctcccgggttcaagcaattctctgcctcagcctcccgagtagctgggattacaggcacctgccaccacacctggctaatttttgtattttcagtagagacagcatttcaccatcttggccaggctgttcttgaactcctgaccttgtgatccacccaccgtgccgggccataacaatgcattttacaaggcaattagaagtaataaaagaatgtcgctactaaaacattatggctatcttgaataactcaaatagtctgga

SEQ ID NO: 64734 - DNA, 557 bp, Homo sapiens
gcttccactgaactaaccttccaggtacaattataaattgggaatgaaatattaaaaattaccacctgaatgtattggaaagtgaacaaaaacaggtagatattaaagggagaggggaatgacaatttctagttttacagcatttatcctgagggcaggttatatttgggaccctcagaacatttagaaaatggatagaaacctgcaaaggaaaactagagaacagaatttggagcaaccacattgtaaattgtagagagatccaatgtgaggcaacataaattctgttcaaattactgactgacctctgaacactgcacgcacagggcagactccaagcagctaagggtaaaagaatttaacttatatttgagctggcacccatgacaggcagtttgggtacagcaaagttaactatctgctaaaaaaaaatacactgaataaggataaggagaaaaatcctgatatagtttgaatgtttgtccccttcaagtctcatgttgaaatgtgatccccaatgttggaggtgggacctagtgagaggtattagatcatgg

SEQ ID NO: 64735 - DNA, 2438 bp, Homo sapiens
cactcctgaagtgcaacagtaacactgaagctctgaacttaaactgcacccaaaacacttcctatcttgatcttcgtggatcaattcaaattatttcccagttcgcataataagaaatcaaagaatagattaaactgacaacccttaaaagttttcacaccctgaacctagttgtcgagtttcttaaacttttgtctcgccgtcttacaatttcatctctcaaatggagatgaagaaaaacaccgagtgagattgtccactgagctgtgagtgatcccaggtcagcctggttctctgccagaaaagaccaggtgacatttactcttcctgtagaagtttctttctcttgaccctcaaggaaccttccagtatattgttatactactgtaattcatcagtagttacaatatttcacttcccaaaggaatctcttccttgcaagatgactactctctaaagacgctttcaagaccgtccactcctcaattccaggacagtaaacctccctcgctagaggagaaaaagttcctgaaagacagaccggaatggatttgctgaactttcgtcccaatctcaaagcatgtagacatccaagggttcccaaggaacaatgagctacagaagtacagactaaacgggaaagcagaggaagtatcagaacaatacccaaaccaaacacagcaccgaaaacccgtggtagcctctatcatcccaaactaccgtccccacttccctagtttcaccaaggtctcaaactcggagaaatggtacccatcccctaatttcctccctcaacagacaacaaacgcgtcatgaaggtagcagcgagaaaagcagcaggctctggtggaccggagccgtgatggctgggtggaaggaggcaagccaagggttgtgtaaagaatggaaagctgagcgatcctggaggagggtggaattagggcgcccgagctaatcccccgcgggggcccgctggtgggaagagacggggggcgaaccggcgaggggactgggggcaccgggctgcgctgggcttctgggtcgcaagaaaggggagcggagtctggcagccccgccagtgggtgggtgacggcgcctgccagggaggaggctccgtgcggagcggacgttttgggattagagcgcgcgacccgccctcctcacgccgcccgagccccccaagctcacacctcaaacctgctcttggtcactccgttcacgtccctcctcatggggccggcgggtgcggcccgggccgggcgctgcggcgagcggagtgcacagaccgggggcccaggacaggcccgggagttccgggacggggactgggcgccggaggggtgacgccgggaccgtgggacgggaacaagagacctctcggctccggctaggcctccaccacctcccgcggcgccggcggccgcaacgactgctcgtcgctagctcggctctctcctcagcctcaacttcaacccaaaacaaaaacactccccacctgccagcaacgccgctgctcattggacagagccgcccgggcctcggagcgcccgggagggggaggggcgggaggggaggagcgcggcggcggcggcgcgagaccacccctcccccacacggggccggccctgacggcgctcccgggagcagccggtgcgcggcggcggcacgaccccctgcgcctccgaggcagacgagcccatcgggagaaggcgaggcagggaagtgcctgtgcgtgtggaaaagggggtctgtggggcggatgcgagtgcgcgcgtgctcgcggaccagcgagggagagtagagcagtaccgcactctgcgcgggggcccctcttctgccccgtgtccccctctcctccctccgcgggcaaacaggcacgcacctgcctgcacagaacctcagcctctgcccgcgcccgtcgcccctcgtcacttgttccccaggatcctgtaaggcacccgcatccttcccggccacccagctcccttcccctgtcactcactgtcgccttgaacccaaagtgcagcaggcggtccctgctcggagccattttcctcctcttctggatgtgtctagattggggcagtgcggctgccgccgcgcctccgcggttgccgccgccgccgcctcccccgcctcccccgccccagtgcattacattacggggtgctgcagggaggcctggggggccggggccggacgcttgtctccctgtgcatggctcgggagggcgagggtggttgcgctgagcaacaggccaagtgcccgccctggtccggggatggctgcggagctgcacctgaggccgggggtcgggggtgcagggctggagccgggcaacccttcctttggccggggtcggggcgcgcgtccgtgggggtggggcgggcgagaccgaagagcctttggttttccttgctcggccgccgccggcgccc

SEQ ID NO: 64736 - DNA, 1761 bp, Homo sapiens
acagttcactgtatcaacagaactatgcccaaaatgctaaggcagcatcttagccggagtgtggaactttagaaaatcttagtaaagttccacagaaaagttgtttttctgcagttcgtagttcggtcaataaaagaacgaaattcagcgcactttaaaaatacacaatggcacaggatctgaacacttgacattgtagagaactgctggctgctaataaatataaggacctaatcatttcattgatgccaaaatagtctccagtacgtttacacacagccctaaatttattcaggcgtctcttctggaacgagatgtaagctgattttgtattcatttgccccgtctcccaccactttaggccaaaagtgccctagtcgagcatgaaatcttcacagaagttgagagtccccatcgccctaaagtcgaagctctataatcaccaaggagggtatagtgacaatctaaaactaatacacattccctctcctggactctatgcccctaaagtggcccccatgggacatctgcaagaacctcctctcacaaactggctcccccagttgtgtcccgccccctcctttcccctacagtcacttaccctcggtttccccctgagctttcatcctgaaggcgaggagaagctagatccgccacaaaaggataagcccttccccaccactaacggaggaaacaagttggctcgggatcccgggacgcagggcaccagcagtccctactcttcccgggaaggatcaatctgaagtccccggcggcaagaagagaagggtgctcgaggccgccgccatcttccccaacggaacttcccaaaattcgcgagataaaccgtggtcctgccagagagaggaagaggacagggcatcgaaatctcgcgaatattggtcaatgcgtcggcctcgcgagatttctttcagcgcagtcttccctttgatctgagctgtctcaggcctcgcgccgctggatattaaacctgccggccggtagctttcggctcccctgcggaaaccgccattttttttttattttagcagttaaacagctcgcaaattaaaatctccagatccctgtactgaaagactagcttttcttttttttttaatttttttttttttttttttgagatggagtcttgctcttgtcgcccaggctggagtgcaatggcacgatgtcggctcactgcaacctccgcctcccgggttcaagcgattctcctgcctcagcctcccgagtagctgggattacaggcacccgccaccacgcccagctatttttagtagagacggggtttcgccgtgttggccaggctggtctcgaactcctgacctcgctgtccgcccgcctcggcctcccaaagtgctgggattacaggcatgagccaccacacccggccatgactagattttcaaaggctattggtatcaggagtgtcttatgaaagataagtttaacctgagatactagatgcaataattacatcctaagaaagatagtggcgcattgtaacatgacgttcaaagcgagcctatagcacagttaattccccttttctcatttttttagtttcaaaactatttctggctaggcgcagtggctcatgcctgtaatcccagcactttgggaggccaaggtaggtggatcatcaggtcaggagtttgagaccagcctggctaacatggtaaaactccgtctctacgaaaaatacaaaaattagccaggtgtggtggtgcgctcctgtaatcc

SEQ ID NO: 64737 - DNA, 762 bp, Homo sapiens
gtgttacgattacaggcatgagccactgtgcccggcccagaggactctaaacctaaaatctaaactaacaaattggtttgttggggaaaaagagctattgaaactttagttaaatatttcttcttgtgtacagcctaaatggaaactttctgacttgttttagtagatttgcaggctaagtattgccatcacctgactgatcacttggggttcacagagttgccctgactctctgcccttgaaggttatgcaaataaagcaaatggagcagtcctggaatttctgagttcaaagtttttctgtataatgaagcaacccttattttacaaaagcacagattggatcaatacctgcagtttacagtagatattgtattttaaaatttagatacagcctgagattttctgctgcagaattttattcaccaaaaagaggaataccatgttagggagattatctaaaagaaagagagagagagaaagaaaggaaaagaaggaaggaagggagggagggaggaaggaagggtagttcaatacaaagtactggtttagtatgtagaagtgaggtgtcccggctccaggcactttctacacttaagtgtcaacatggtccaatctaactccttctcagtgtcagtttaacctatattagatgtcgataataagtggctcacgcctataatcccagccctttgggaggctgaggtgggtggatcacttaaggtcaggagttcgagaacagcctagccaacatggccaaagt

SEQ ID NO: 64738 - DNA, 2701 bp, Homo sapiens
aaccctgtctctactaaaaacaaaaaagttagccgggcgtggtggcgggcgcctgtaatcccagctactcgggaggctgaggcaggagaatcgcttgaacccaggaggtggaggttgcagtgagccgagatcgcgccactaacactccaggatgggctacagagcgagactccgtctcaaaggaaaacaaaaaacaaacaaaaaaaagtcatcctggtagttaaaagatttgttaaaaaggatgttgaaattattttgtcacggagcctgggagtgtttgtttaatcagttaccgataaagttttggttaaaaaaaaaaaactcggtttgttccgtttcaataaagctttgctcaaacggggagctccgggagctcatcgcgagactcaggtgaaacgcgtttctagtttgggacctgatctcgcgttgtttgataagcaggggaatgaggtgaaagcgaagcacgaaacatcgcgagaggctactggactctcgcgacgatttctgggattgcccctccccccttccccaagtgccgtttcggtttaatctagtgtgtgactgggtctgtgtgagggagagagtgtgtgtggtgtggaggtgaaacggaggcaagaaagggggctacctcaggagcgagggacaaagggggcgtgaggcacctaggccgcggcaccccggcgacaggaagccgtcctgaaccgggctaccgggtaggggaagggcccgcgtagtcctcgcagggccccagagctggagtcggctccacagccccgggccgtcggcttctcacttcctggacctccccggcgcccgggcctgaggactggctcggcggagggagaagaggaaacagacttgagcagctccccgttgtctcgcaactccactgccgaggaactctcatttcttccctcgctccttcaccccccacctcatgtagaagggtgctgaggcgtcgggagggaggaggagcctgggctaccgtccctgccctccccacccccttcccggggcgctttggtgggcgtggagttggggttgggggggtgggtgggggttgctttttggagtgctggggaacttttttcccttcttcaggtcaggggaaagggaatgcccaattcagagagacatgggggcaagaaggacgggagtggaggagcttctggaactttgcagccgtcatcgggaggcggcagctctaacagcagagagcgtcaccgcttggtatcgaagcacaagcggcataagtccaaacactccaaagacatggggttggtgacccccgaagcagcatccctgggcacagttatcaaacctttggtggagtatgatgatatcagctctgattccgacaccttctccgatgacatggccttcaaactagaccgaagggagaacgacgaacgtcgtggatcagatcggagcgaccgcctgcacaaacatcgtcaccaccagcacaggcgttcccgggacttactaaaagctaaacagaccgaaaaagaaaaaagccaagaagtctccagcaagtcgggatcgatgaaggaccggatatcgggaagttcaaagcgttcgaatgaggagactgatgactatgggaaggcgcaggtagccaaaagcagcagcaaggaatccaggtcatccaagctccacaaggagaagaccaggaaagaacgggagctgaagtctgggcacaaagaccggagtaaaagtcatcgaaaaagggaaacacccaaaagttacaaaacagtggacagcccaaaacggagatccaggagcccccacaggaagtggtctgacagctccaaacaagatgatagcccctcgggagcttcttatggccaagattatgaccttagtccctcacgatctcatacctcgagcaattatgactcctacaagaaaagtcctggaagtacctcgagaaggcagtcggtcagtcccccttacaaggagccttcggcctaccagtccagcacccggtcaccgagcccctacagtaggcgacagagatctgtcagtccctatagcaggagacggtcgtccagctacgaaagaagtggctcttacagcgggcgatcgcccagtccctatggtcgaaggcggtccagcagccctttcctgagcaagcggtctctgagtcggagtccactccccaggtgagctatttgtctaacagtccttcctcatttagggtgggttgcgaggaattggcattcagcgtgttaacattgtctggaagcccgcagtgttcatcattgactagaacactttgctgttggctagtcattccagtgtgtgaatctgtctccccttaacccagaattcgagaagtgaagagtacataggcctcaaaccgccaaaggtaggtacttccagtggtggggtcttcagttgtaagcttctgagtgagaaacgtcaaaggcttctgcttagtgagtggatggagttgatactagttcccagagcatgtctagctatttctgttgcttagttttatatttttaaaaatcacattggtatttgtgctttagactctatgggacctggttgaagacttaagaaattggtatggaagttacttgcctagtttatcctatttgtgttgtccactgaatccccaaacctgtacatttattcatttcctacttggcactgttttaattatttacaaaagattcctgtcttttaactgatg

SEQ ID NO: 64739 - DNA, 1392 bp, Homo sapiens
atggagagggaaaggagggtgccctgggaaggacttgtgcccagggtttgccctctggcaactggcctctggccaggtccccaagtcacaggagccatgatgccctggcctggatctatcaagttctgctcatgggtgggtaggtgggtggaggctgcttctaaacacagagagggagcagtcacattaaccatggagtttttccaccctgtatataccactttcctcagcttcttcagaagactccctcctagcccttgcagactcagtgaggtgctgcctccaccaggaagtcctccctgatgtcccctgatggcgctccagcctctggcccttggcaccgcgttgaacatttggggatggacagaccagcttcaggagccccagcttcaccacttgctcaccagctacctgcagcccccgcccccgtctgccctcctgtctgtaaaatgggaataagaagccctgcctcacaaaatctttgcaaggaggagcagcggcgtcctaggagcaagcacctggcgcccggtgagcccccgccactcgctccttctcctccttgtccttctcctggcttgctcccggttctctcctcgccacccccgccccgcgcctggcacggcgcccggcgcgccccagccgcccaatcccggctcgcagccctgacttcctgcccgccgggctccctcggcacgtgccccgcgccccatgggaccgcgcgccctcccggggcggcctccccgcggcctcccgcttgggggagccgggcttgggggagcgggtcgccccggctcggaggtggggtcggcgggggccgggcgggccggccgcggcggcgggaaggggacgctgcccctttaaggtgccaccgccgcgtggcagggaaacagcttgtgccagccccattccgcccggctccgttcgctacaagaaacacaatgcataacaatcaggcgcgcgcttggagccatgccacgcggcgggggcggggcggggccgcgcgccgggcggggcgggggctccggggtctcggcccccgacctgcgtcctgggcccgcaggggagtcctgccccatgctcccgggcggggccgccctgtgccccagcgaggtgccccggtgccccccgcctcgcccgcgcttgcccctccctccccgccatctcgctccctacaaagttcattcccactaactcttttccaggccacttccccctcacatctgacaatcggggcccctcattctcccagtaatcactccactgcactaattgcacatgcaaatatgcaaatgcgtattaattaattactatactaattagttctgtggtatttgcgagtaataaatcattggatgggagcgaggaagctggagacctggcccattttcattc

SEQ ID NO: 64740 - DNA, 1871 bp, Homo sapiens
ttcctatggaggattccaagtcaccacttctctcaccggcttctaccagggtccaggactaaggcgtttttctccatagcctcaacattttgggaatcttcccttaatcacccttgctcctcctgggtgcctggaagatggactggcagagacctctttgttgcgttttgtgctttgatgccaggaatgccgcctagtttatgtccccggtggggcacacagcggggggcgccaggttttccttgtcccccagctgctctgcccctttccccttcttccctgactccaggcctgaacccctcccgtgctgtaataaatctttgtaaataactgctgagactcctctttcaggggaagcaggaggaaaagggaggtaatggggcgtcctgatagggaaggccggtggtcaaccaagggttagggttttgaccctactgtccaatcctctagtctaggagtctttctggcagacagcaggctcggggcactcagaggaagaactacagaagttctagctgctgcttgggatggctgaaggaggcaggtggggtggggaagtccttctcgaataactggattcctccaaagatttccccatccccacaggactcccctcgggaaattcccctttttccctcagtgccaggcctgtgtggcctaataacgacggccctggtcttcttcccactcccctacccttaggtaggcccttagactccggcctttgagtccgcttctgcgcagggccggggctggaggcggggcgaaggggcggggccgcaggcgaacgcaagtcccgcttcgctctcgggggcggactcagcggcggaagtggcgctgccggaagatcttcttccgctctgaggcgctactgaggccgcggagccggactgcggttggggcgggaagagccggggccgtggctgacatggagcaggtgggtcccggagcggtcgctgggagcgggtggcgtgcgagggccgtcttccgccggtcgaacccgcttcgccgcccgctgtccgtgctgggttccgtccgacccttcccacacccgctgcgtctcaggttccgcccccttcctctgtctggcctcgcgccgccccgcgcgggttggggtctccagcaatgactcttggcgaccccgcctatcctggggagcccggggaggacgttcgggatctccttccaaagcctccgtcttaactgaggggagaggagagggtgaggtgtctgggtgttatgagcaggggcaggtatggggaggggtcggaatctggggtgagaggaaaacatctacgcattccggtagctctgcgtctcagtgtcatcccgtgtctccccaacttcctttcgaaacggccgtgaataacttcctaattggtattaaaagggccctttgaagtcttgagttcttagaggtgcatagtaccattgacactcatttctaatgacacgttccctcaccccgcatttttgggttagtcaatgtctcctggttttcttcgtaccgctctgacagtcggtcaaagtcccgcttcacgttttcctctgtcgcccaacccctcgctctgtacactgaatctcagtggtcttattttcccccacggcttcagctttacaccaactaaatacccagatccacatcttcagcgcagcccttccctggagctccacgcttgcccatccagcggccattgggacagctctgcttcacatggagctcactgggtccaaacttgaactggtcttttccttgcagattaattcttcctctaccccaacccagccggaagtctggtaatttccttacactttctcctctctttcaagtcccacatcttaaaagtgacctagtactgccaacttcctga

SEQ ID NO: 64741 - DNA, 2118 bp, Homo sapiens
agttcttgctatcttactcccttcctatgaaaatgaagcccaaattcttcaacctgacttttgaggctccaaattgcctttccaaccgtattggtcactactcctgttcatgtaccctgctccctgagtaaataaagctcctggatgtgcccacatctgcccagggcatccattctctctgttccctctgtctggaatgcaaagtggtataatagtaaagaggacaagcttgtggtcaaacaggccagaactggaaactccactttactacatactggctgtgtgaccttgggcagggcatttaatctctctaatccccatctgtaaaactgggattagagaaactatctcaaagggtgtgataaaaattacttgacatattgtgacacctgtcacacagtgagtgctcaatacgttggttctttgcccactatggtccaaatcgaatgtaccagtccaaagtccctccttcaaacaaaacgttccaagatgatccctgcccccacgtcttcaaagccggaactgacaccttcctatcccaaatgcttcctaatcaaagagtctttcaggggctcaaatcattctctgccttgcacttgaaaaggctcatgtccccgtggggactgtgagtcccaatgggcgggaccctggtctgatttctgtgccattcctagacattgtggcccgaatgtatttaataaatacccttttgactgaacaaataagtaaatgaaagcttctgggaaagtaagagaggctggtaaggctctcatcaccttaggggcttcactcacattcataagagacctcgtggggaaactaaggttcagggattgcagaggcgtattgggggcgcagggggcgggagcaagacaaatgggcggggcttaccgtgggggtggggcttacctgctagactcatgtagattggctggcgggagcggaagtgattcagagcgcccccagagcagttctgctcttcgcactgcagtacgcagtcgcggtacaccggctcacggtcgccctgggagccgctcgccagcgccgctgccccagctagcaggaccaaccgcgccgccaggccggccatcctttctccctggctcgccgccgggggaggagcttaggagtatgaagcttccacttccggagtaaccggaagttcctgtgttctttattctactctccgctgaagtccacacagtttaaattaaagttcccggatttttgtgggcgcctgccccgcccctcgtccccctgctgtgtccatatatcgaggcgatagggttaagggaaggcggacgcctgatgggttaatgagcaaactgaagtgttttccatgatcttttttgaggtagggctgtttactgtcaccacccctgtcggattttacttcctaaacgtacctgtaactatccacttctctccatctcttctggcaccaccctggttaaagacaccatcatgtgtcgccaagacagccgcagtagcttcttaatggctctccctgcctctacttttgcctcttccaacctgcgctccattttgaaaaattaaaatttgcccatatcactttttttttcttaaaattatttactggctcccaattaccttgggtaaaatacagtctccacaaaccctgcctgatttggcccctgtccactggtctccctcactcccttgctccagacccgcttcagagggctatgtccctcaagcttcctgactgcctggcctggtctgaatcactcactcttcttttttcttctagtcgcaattgaagtaccacctcccgagggtgattgcttccccatgcggggtagaacctttgctgtcctgttcaccactctacctccagcacagaatttggcttatggtaggcgctaactgcgtttgtttgttcttctgtttaatgaatgaacagcatacatcaacataagaacttgacaaatccagggctgtaaaatcatcagtatggttctgcactgagatcggagagaagtaatatttctaggaaaattaggaaccctgggaacaggacgcttgctttagtatcctctccctgctcacctcccctgcactcccatcagcaccgacccacacccaatctcatagaag

SEQ ID NO: 64742 - DNA, 968 bp, Homo sapiens
gtactgttgtggacatgcacaaaagtgaggtgagtcgcaggacagaagagtgctttttgtttcagcagagcagcctggggagagataaaagctactcctggggcctgggcctgcattcctgagatgtgggtaagaggggcccagggtcagagtgtctggcaagcttggctctgcccctttgctgtcctggagactagggctaatcctgggctcagggagtggcctccccatggttaggatacaagtgctcatcaagggccacccctaggaaggaccaattttcctatcagaagcttctaagttatcctcctttggcccaaagggacacctcaagcctactctgaggaactctttccaatgaactaattcctacagtcacttccccagcaacctgtgcctcagcctcaaggcactgtggggtaggcctcagtttgtggcctggacatcggactgtggaccagacgactcctcccgatttctgtttgttttcagtcctctgaccccaagctggctggtgaagtaggtagagggaggagactttggtgcatgcatacacacacacacacacacacacacacacacacacacacacacacacacacacacgtctcctgtgccccccagtctccatggctggtcaatgattgactggcatttcacaggccgctggttgcagccccagcctgttgacttagaggtcaccctcggaagctagagccctgtcctgcctcttcagtgtcagtggtcactccactgcccacaggctggggtcttgggcaaaacacacgcatctgccctgatctgagtttgctgccctctgtcccgcagtcagccccactctgttcccactccctctccccagccccctagctagacccctctcaccagcacccctttcccttccctgagggtccccctcgctgtctttgtccctcagacatcctctttcctgggctctcctgccaggc

SEQ ID NO: 64743 - DNA, 1602 bp, Homo sapiens
ttactagaggatgtggtgggaaaaccattatttgatattaaaacaaataggcttgggatggagtaggatgcaagctccccaggaaagtttaagataaaacctgagacttaaaagggtgttaagagtggcagcctagggaatttatcccggactccgggggagggggcagagtcaccagcctctgcatttagggattctccgaggaaaagtgtgagaacggctgcaggcaacccaggcgtcccggcgctaggagggacgcacccaggcctgcgcgaagagagggagaaagtgaagctgggagttgccactcccagacttgttggaatgcagttggagggggcgagctgggagcgcgcttgctcccaatcacaggagaaggaggaggtggaggaggagggctgcttgaggaagtataagaatgaagttgtgaagctgagattcccctccattgggaccggagaaaccaggggagccccccgggcagccgcgcgccccttcccacggggccctttactgcgccgcgcgcccggcccccacccctcgcagcaccccgcgccccgcgccctcccagccgggtccagccggagccatggggccggagccgcagtgagcaccatggagctggcggccttgtgccgctgggggctcctcctcgccctcttgccccccggagccgcgagcacccaaggtgggtctggtgtggggaggggacggagcagcggcgggaccctgccctgtggatgccccgccgaggtcccgcggccggcggggccagaggggcccggacgagctctcctatcccgaagttgtggacagtcgagacgctcagggcagccgggccctggggccctcgggcgggagggggcagttacacggcagcggctcgagatggcccatccaagagactggcgctttccaggctccgaggggctccgggaacttgtcaaagaagttctctgaaattgttcagaaagttttcccgcaaagggtgtattgcgtagagcgcgcgcgcgcgtttccccccttcttgagccccctcaagctttctcaaagcctttccagttggcagcctccgcctccggactggcctgggctggattccttgggggggtcctctgccctgcccctcctccagcccctccccgctccccttcagacgattttggtttggttgctcctgcttctggcggggtcgggtgtgtgtgtgtgtggtggagtggagggtggcatagcaacctgtcccaaccagagccggggaggaaagggtggcccggagggtggcctcttgctggggtctgggttgggggcgggggagacgtttgctttgaacagattcttggggccagcttagggactgtgctctgtgacttttggagcgcgtggaccatggaggggtgggggtgggtttcttggggtgtaaagtgggagagttcccagagaaggaagctaagaaataaggccagatgggagcctagggagggctgcgttgttctgctgccttttccttggtgctgtgcgtggggaagggtgagtgggggcagtgtgtatcctgacccatctgtccacctgtgtgcattaatcataaaagctaacatatagcct

SEQ ID NO: 64744 - DNA, 1443 bp, Homo sapiens
gctgtatgaacctgtcttgtcttaacttttaagaaatgtacggtgtacttcctatatgctaggtttttatccatgctttcatttaatctctgtgacagtcctgtgaagtaggtgcacagatgagaaaatggaagttcagagaaatgaagcaacttatccaaggctcccagctacccagtaatgtccagggaatttttggactctgaagaggaggcattaagaggtggttagagtcttattccagccaacaataatgggttgaacaaagccttaggggcaggcaggtggccagatgggaggagaagcgctcctcttgttcaggcgaatgacctttccatccacttctctaggctgtagaaagtggagctgagctgggggccctgaggttccctcttgacttcagagtcctctcccttcctgtccagccaatgcctgtcttccttttgggccctaccagcatgacagggggctgcgggcaggaggggacagaggccacgttgacacacagggctgtgggtgagagagacagctgaagtgtcagcgtgaggggccagtgtggggctgcggctgggagggctggggtggggcccagggtagttgtgcctgtccttgggtgatggaatgatctggaaagagattccttccctgccctccacctgtgagaagcccctctagagtgacatctccatcttatgtttggccacccatcctccccctgggaagagagccgaggtggggtaagggatgtgtactctttcaaggagtgggagaattattctagcgaatgtttgtgttgtcccagttctgtttacaaagcctcgtcatgtttacagatggctgcgcaattcattacctcatttaactctcatgtacctcctctgagggagtaagagctgttacagccaagtttaggtcagtaaatattcaccaagttgcaggtactgcagggcatagagatgaatccgatttagcttctgccctggaggtctgggaacttgctcaagatcactcagtgagcagctgagctagggttctcaactaaagaccctgggcccaggccctggtctgatgtcaggcctgatacaccaggtgtttgtggtcggggaatcccagtgtcacttgaatgggctgtgacattatgggtctgggagagctgagctttggggacacaggtcattttactgtagtattcatggaaaccaagggaagtattggcttttctgctgtgagcaagaggagcagctggggctgcaagctggtggggaggagagaacccacctgagagaaacctcaggactggggtcaagtcctgaccaccagagtccagagagacatgaaggactgtgaccagctctgagcagagagatggattccatgacctcaactggtcccttttgttcggagactcgtgactggacttcattcatccactcattcattcat

SEQ ID NO: 64745 - DNA, 1380 bp, Homo sapiens
agatccaccgagagtgcctgccaggcacacagtaggtgctcagctcagttactgtggcggcccccactccccattgttgttgttttcctattgcctggcggccacagctggtatcccttgaaaagggctacagggggtggagtcggaccctgccccagccctgtggagaccctgggcttgggccagggcctggggtctgggcctgcagacagctgtgtctataaagcagctgaagggctgaggccgggggaggtcctggcagcagggcgttattttgggcctggcctgccacccccagctcctgtttctcttgggagtctgttgggggaggaagtgtggggaagaggagggggtgcaagtgggtgaggcatggagtggggaggcctccctcagggacatggacccttgagttctatttctgttcctccctcctgttcctccctctttgtccttatctgcctagagaggtgggaatagaggccattctgagtatcactaggagaccaccagtttgtggccactggccactggcccaggcagggaacctgggggcttgccctaccagcctctcccagcaatctgaaggcagggggtacctcgtattaccccctaggatttgaccttaggctccaacttgctgggagagcagtgcctctggtgtcagaccccaagccagcccttgtgctgtccctgaatctgcatgtagcctgtgggaggcggagcagtgaccggcaggaattctgggcagctcaggcacctgtgggcctgagggtgccctctgcccccacccttccgatctcctgggcaagacacgccaggtgattcatctcaccagagcagaaaaacaagttcaactgggcactttaatctcccctcactggcaggcctggtgtgagctgctaccccggcgcccctcaccaggggtgctttacctcctctagtattcctgaccttagtgggcatttctggtctcagggataccaggctggggtccaagtgggccaggtgtggcagttcagccctatgccccatggctgatggctcgcgctgggcaggtatgcagggctgacgtagtgcctttgtggcagcagtttcgtggcacacattctgccagctggttctggagtcttgccctgaggaggtggccagggtgagggtgccagcgcaggaacctttggcgcatgcttcaccctggcctgggatctgcagcctgggtccagatgcccacaactggaatctgacgctccttttctcttcatgggggactcccagaggtctctgcaatgaccagagccccggttgtcccatgcctcagctgcaactccagctgaccctccttccccactctctgggtggcattacgggggtgtggatcccttg

SEQ ID NO: 64746 - DNA, 1476 bp, Homo sapiens
cccagaacagagcaggaacccagagtcctgtgcagtcacaggatgacgcagggaggacggctgttggtgatcttttctagggtttctccattactggctcttcggatggcctcaatgagctagaggagtggaatgacaggatgatgcactgttggggtagggtgaccaagaggtcctcccaacgctgtaaatactcacatctttctcatagggaaagcccccattctccagcttggagaacaccagctgtccatttatctctatctcaaaggcacctggtaagaaatcaacagataaatggtacactgagaacataggcagaagtcaggagttcctccaaaggggtcccccgccttcaagtcccccatcaatcccactggagacccatttgtagctccttaagcaattccccaaccctgggtcaactccagggaacctgagggaggcctcgcctgtgtgcccctcgcaacactcaataaaggactccctcccctccaaccctacacgattgcagtctaataggtttttccccacaggcctctgtgacaccccctgacctatggaagggaactcatgttggccggacattttaccatgtgccaggcactgcgggcactttacataaagcagccaatgtcagaactagaaagcgggagagctgggattcagagcacagactgacccagcaggtgttctgcgagcctcacctgtgcccccgaggcgcgactcgatctcgatgcccggatactgctccttcacagcactggccagctccaggtaggtcgcctcgaagccgcagggttcactggggagtcaagagatggggctgggctggggattcgggggtggggcctcccgtggacccacctccgtccggcccgcgggaccagggtgcgggtcctccagccggggccgctcaccagtactccaccacgatgcggaccccactgcccggctcgacctcctcgggagggggcgctacggacgtctgccccggctccccgctcatcgcggccggctccgctcgggcccctgcttccgggtgtgacgcgaaccgcgggcacgtgacggggcggggcctctggagcggggaggggccgagggtggcgttcgggcgccccctgcgggtctccgccactgctacgttttgacctcgtagggcagctccggagctcgctccccgggcaggggctgggtccggtccagaccctccttccctggcccggtctcccggagtgccgggcttccccactccccactcccggtgtccgctggacttcatggcttcatttactctaatggactatcttagactgcaaagcgcttttcagtttacaaaagaaagagaaagtggtggggcaagcatcctggggatgggggtgggtgtggctgatgcatgaaatagttgacattttctcgctaacatgccgatggcattttttttttttttttttttgagacggagtttcgctcttg

SEQ ID NO: 64747 - DNA, 4218 bp, Homo sapiens
aggcagagtttgcagtgcgccaagatggcaccactacactccagcctgggtgacagagcgggactctggctcaaaaaaaaataaaataaagtgatccctctaagaggaatccccaggggcccaggccagagctttctccaggtcaccatggctcctcccactgtgccaccctgcctaaccccctcgattttaaaggagaagccaagactctggactttgctcagaaggtggggggcgggggagggagggcttaccctgggtacctctgaggggccagggcgcagccaccacggtaagggtgactgcagatcgaggggcaggccatgttgctggacaccaccctggctggcgtccctctcggcagggtgctctttgccccatggggtgggatccagagctgcagacaggcccccaggcttggccaatgaacagaccaggttcggggagggtgttggaaaagagtggatggggtggttccccttaccttgcagcccccaggccctcccccctccctcccaggtggtcgggactcttgatcttcgctcgtggtactgtctgttcggctgtcttccccgcctctccccaggcacctgcatcctcccttggcacctgctgccaggctaggaagggcaaaaacaatcccagttggcgtagtcagggagtctccgccctcctcccaggtttcctcctcccaggcgcctcccctggacccgcccccatctgcccaagataattttagtttccttgggcctggaatctggacacacagggctcccccccgcctctgacttctctgtccgaagtcgggacaccctcctaccacctgtagagaagcgggagtggatctgaaataaaatccaggaatctgggggttcctagacggagccagacttcggaacgggtgtcctgctactcctgctggggctcctccaggtaaggggaccgagatcggtctcagacgacagcctgccaggcaacccccagccgcaccagggccccaggctgtgccagtctccggctgaactggccggcggcccaggtgggaggattggagccacctggctctccccctcccccgctcggtgatgtcaggccaggggcgggggctggagggggacaggtagttaagggcctggcgtctccctccctgaagacgtggtcccagccgggtgtcctgacgctcggggttcaggtaagaacccaagcgggcatttatcctttgggggcaggcacggccggtctggaggccggtagggaaaggctgggtctcctgatgggttgcttggcctcccacttttctcttttctgtccatttcccaccctgccccctcctccccacccgccctcttttcgtccccatcctggtttccagcgctccttgttccctccctgtacacctccctgcaggcagcagctgagaatgggaaggaagacctgattctctcctccgacttggctttcccgctgaaactagcccctccccgcacacccggggagagccgccctcactctctggctcgcccagtttaccccagtttgggtttccccaagtctctaagacagacgtctctgcgggctgcggggagatgtggggagggccccctccactttggagggcagtgaaggagagggatcctctaaattgtcgaggcttcatctctccagattgtatgcccttctcagcaacaccgcctccggccctccgatgggaaagtggaggccgggtgagacggggtccctcctggcttcagcatgaaatgggcaggaaggctggaggggtgtatgaggggctctgcagtgcggtggggcctggggagagtggggtgggggatagcagatggtttcttctgcttgatgaggctagggagagacccaggttcccggtctgggtctccctggcagattgaggacagagaatgaatgcatctgccggcaaggtggaacgccccccaccccgccccccaactagccgcaccgccccccaggaatgccctcttttggtccgccggtcttggactctgctctcccctctcctgatatcctactgtatgcttggtggggggacctcatggaggcgggcagcctgtaatgattaactgcagagacactccagcattcttcccgaattaaactttaaaagagctgccccgccttctcccattgggtatttttcctgagtgagagtgggcggggcctcagagtcctgggtcctcccttatactaggagtcatccaggggtttctcaccttctcacctgggccctgcaccctaaaaaattataagcctctcccgtgggggcggggcgtggagtactgggcggacgggggctctcccgccacatccaggcccctggcccaggcctcagtcccgcaagcccttccccctgctctgggaagcagagttgttttctgttggccctgaacaccgggccccgccacctgcccttagggccagccaggtggggcgtgattcaggaagtaaacaaggaggttgggaggacgggaacgcgggtggggctggaaccactgggggaggaggcagctgggaagccacggacggagttacctcgttgaggggacaaactgattttgggggtcggtgtttccaaccgaagctttaccggggcctcagtttgaaaactccagatctctaagctgccaggcccacagccaggaccccttcctcctccctgctcaccccattggtcttgacgattccacccgcctccagccttagaagcttaagggcacggctggggggctctgaaggcaaaccccagccttggactggccctctctgatctctgaggccaggctctaatgtgatttgaatctacttctaaccccttccaagcactgccctcccgaattctctgctcctctccccaccccactgttggtctgtgatttcgaggcaggcgtggccccctgcagcctggaatgaagtcactggggctgtttggagaccggggctgtttggaggttagactggggtgggagtgggggattgtgttctggtattgaggtgctggtgtctcttgctagcgggtgatgggtgtgtcgtgcccctcctggcaggaccctgagccccctccctggcctttcatcctgtctgtcttcttgagtgttttccctttccactcctgctcctgtggtacccctctggccgggacacccaggagaatgtgtcaggaggaacttcatccacacagggcaggggctctgagcgatgctttgggtggggaggggcaccgccgggatgctggcttctctccaaatgggcctctgaatccaggccgggcattgcctctctccttcccaggcgagggactccctggcgaggaggtggtttgggactgggggtgagagcagatcgtaggtcccacctggcctggagctaggccgagggtggggaggaggaggtgatgtcaggagcctcaggcccacatcctcctcccccatcctgttcccagccccgtgcctcccccattccgctctggctagcagtgggttggggagttgggggaagggtggaggcagggctgtttttgtttctcctaagccaggaagttgtgtggatgagtcaaggttgaatggagagccctaggcagtgttgtcccgcccgccctgactcacctgtcccccaaatcccctgatgccctcactgaagggtcaggtgcctgctccctcctgaggggtcaatcccaggtgccccaggtggcctcatagtactggcccagtgtttggagaacaggctgggggctgggattgcaggttctcccaggtctcagcccggccaaaggggtctgctgggttcctgcggagaaggtgccagccccacctccacctctagtgctcgtctttgcctgctgtcctgtctttacttgtcttgagtgtctgtgcagcccctataagtgataagacatgggtgagattggccttgcctgggggtaccaggtgccctcagacaaatgggtggataggacaggtgcacagtaatggatgatgcggcccccgcacagtgctgagagagagtcattcagtctgaatgtggaaggccaggaaggcttctcagaggaggtggctctagcactggggcttcaggaaagagttgggcaggaggatggcctggggagggtacgcaaggtttgggggctgctggggccaggacccctaccccaggccctgctctcccccttgcactgcagcggagcccgct

SEQ ID NO: 64748 - DNA, 1321 bp, Homo sapiens
tagccaggtgtggtgacatgcatctgtggtcccagctacctgggaggctggggtgaaaggatcgtttgagcccaggaagtcaaggctggtgtgagccatgattgcatctctgcactccagcctgggccacagaacatgaccttgtctcaaaaaataaaaagaaaaaaatgaaatccagaggttaaaggagagggtgtgggcatagtcatggtgtggccatgagttgacactggctgttgatattggttgaagcttggtgacaggtactggctatgtggggatttgttaaattatcctctccacctttgtatatgcttggatattctattatatattgatatattttaatggagagccccttctcaaatctttgggactgactgggcaggaggtggtgagacgctgttttgtaggtgaggaaactgacggcccagtgggcagcctggccccagatcacagtgggagagccaagattccaacccaggtctgaggaccaggtctgggcatgttctgcttcccctgtctggctgacgtccaggtggcattcctcagccacagtgacagcaatagtggcctactggggtcctcccttagagagcccctcccttccctgcagccttggtctctggcctggagggttgtcctgaggtgaccttgagactgtgcagcctctgcaatcagcccctgggctgggtctggcagccctggcagccactcccgaccaaggcacccccatccttggctaactccaggctgggaagctgggaccaggtccagcagacagaggtgggcagagaggtctcatgcacaccccagcctgggacctcctgggaatctgctggaagaacttactgcagcccaagggcaggaagggtggcagattttgcttctttttagcaggactggaggcaggacccagtgcaacctgctgcctgccacctgccacggttcccagagccatccccaccacaggctgtggctcgagcaccgaacagggcagtgtcagctgtgtggctggccatgggtgcccagggccacctccgaggtgtgggtgccagagttccaggctggagtgagagtaaaggggtcaagatgagtcacctcttcagcatgtccaggggttcagactgtaaaaaaagaggacccagtgtcccttcacagcctgaggcactgggcagagacaaagcctctctgtcaatcagctaattggagactgtgagacagatgtccttcccactttacaaatgggaaactgaggctcagggaaagacagggactcacctgcgacaggggtcgcagagggagttcgggacagaggcca

SEQ ID NO: 64749 - DNA, 2020 bp, Homo sapiens
ttgcccaggctggagtgcagtggctgatctcagctcactgcaacctccaccccctgggttcaagcgattttcctgcctcagcctcttgagtagtttgggattacaggcgtgcgccaccacgcccagctaatttttgtatttttagtagacggggttttgccatgttggccagactgatctcaaactcctgacctcaagtgatcctcccgctttggcctcccaagggagggttccttcctcccaggctgaggcaccctgccccacacatctactggaggaacttagtgttggggccagggggtggctgggtaaggctggatcccacacttgtcaggccaggttggggtaggggaggatacacgggggacccgtctctcagccgttctgggccggtgcctgaggcgatctgccccgccgcccgcccttccgccaccacccaagtcgcatgcgcgcgccggggccgacgggcgccaggctccaccgagccaccctccgtcgtggcggcccctcgtgcctctgcggagggaaggccgccggcttcgccagggggcgcgcgtcggggtcgcggctctttgaactcggccccacgaggggacgcgccatcggtttcgtggcttgcgtggcgccgcagcaacgagccggtcgccccggggcgttgcttagtccgggcctcgctgcgagtctgtgggcgaggcgggaggtgcttccttggccaggcgggtggaggaaggtgtgggcgccgcatcccagcgtcgcggagcctccaggcgcgggcaggcgagactggcgtgcagcgcgacggcctagtcccggcgtcccaccgtcccccactcccgcaggcgccgagccgattcagccgcgcggctgcagtgacacccagcggccgtcgcgggaagtgcggtcgccgcggccaggcctccggggctcctgtctctcgaggttcccaccccggttacgcgcgggcaccccggaggagagcggccgcgcgctgcagatgcccgcgggggcacttcccctgcccctcccccgtttcctccccgcaggcgcccgagcgccgggagatcctgcgcagcggcagtgcccggaagggcggggcggggtgcagcagcggcgctgggctgtgacccgggcagtttcacttctggatcctgctcgggctgtgataggacagcgcgggggcagcgggggaacacgcgggcacgccgagatccggcgctcgggaccccgatgaggggaggcctttcactcctggggtgtcacgcgacccacgctttcctccatgtccactcccaccccccatgggttccactttgctgtcccccgagctgccgctcctccccagcagacaccgtctccgccggggctgccgacccccggagaggccccgagcggcgtgggcggcgggaggagggagctgtgaagccgcaggcagggggttaggctgcgggctgctgagacgccgagctgtttctcagaagtgcagctgcccctcccctcacacccccctcactcccaccgcgcgccgcacccctgccccctctccgccggcctccctttcctctcccaggcaccctagccgggaatctggggtctgggtccacgcagaattaagaggagaacctgagaaagggcgggggccgggggttcagacccagcctcagcgcgcgttattccgagcctcctataattccacaggtgaggggatcctgtcccctacccctggggtccaggattggaatttgatagaacagttaggaaaatgacatcttgagagagtcagggcccggccactattactctagctccagcgtccagtgaggagaggagagagagggaagacctggagcccggctggtgcagtgaggttgaggcctgtcttaggagtaccagctggaaggcccttcagagatccctgactctggggaaaatcaacgcccagaaggggaagtcaagtgtctgggctcatcccgagagggagagggctgggattggaaccaggactccaaatagttgcgggagt

SEQ ID NO: 64750 - DNA, 817 bp, Homo sapiens
aaagcaagaaagtgtaaccgtagctttaaacctttatgtcagaactcctaagggcctgatgaggcaggctgtgcctttaccccatctggcaaaattggggttaacattgaatgcagatgtattgcctagtggtagaaatagcccactagttccgtacctgtgtaaccctatcctgtatgtatgggagttgactgagggagaggtgcttgctagactagtattgctgcctacgatctagaccagtgcagtggtcaaacctaatattcctcccaaaggtgggaaagtttgggcataaacagtaagaaggaggaagagtagctgagagtaaaggaatgaataaatgagttatgtaacaagtcctgtgagtcatcctagcaaattattaaacatgtggaggggagtccccgattttgtagctaagtcagacaaaagtgcaggtaacctggggacctggtacttgagactgttgtctaaagtagggagagtactgtgcagtactgtgagactgagcctgtaacctgtgcggtctacgcaaacatcaggaattacaatcagaattgaattgaagtgggctgggtatggtggttcatgcctgtaatcccaggactttggaaggctgagtttggcaatcacttgaggtcaggagttcctggccagcctggccaacatggtaaaactccgtctctattaaaaaaaatacaaaaattagccgggcatggtggtgggcgcctgtaatctcggctatttgggagactgaggcaggagaatcactaaaacatgggaggcggaggttgcagtgagccgagattgcgccact

SEQ ID NO: 64751 - DNA, 798 bp, Homo sapiens
aaagggttgattattccaccccagatttgcagccatttcagggacaccccttaagtgctcttcctctgcagatgtagggtagaccccccatgtctgacaactctttagaaataaaattgcgaagaagttatcactttccaaagggcgggggaaggacaagtgagagacgttaagagaaccgacgcgctttgtcctctgaaatacctcatatttacttttgacaaaagaagtaaatagaagcaaaactgagattcagaagaaactctttctactgcttgcacaggttaagtttctcaaagaccccggagaaaagaagcgggctggaggctcaccttccatgtcgctgccgggccgggctggagctgccgctgtggctactcggcctctccacgtgctcctgccgtcgcctggactcagcgcgcagctggcgggagattcccggcgcggggagtccccgggatccggcagccgcgtcggcgcagactgaaaagggcaggagccggcgacctgccggtgcgcggggttacagcggcgctggctggcggcggctttaaaggacgctggccgcggagtgccgcgggttccgcgcctccagccccctttcgaatgtcaaacccaaggaaccccgacaggatggaaatgtcgcatcactaaattgtctcaaaatgtctattttagaaggataatggatgagaaaagtgacatcacacggagggtcgggggtcagccttgctttcttggcaagctgaagttcaaagacgtttatcttaaattgaggaagatctggaactttttgtc

SEQ ID NO: 64752 - DNA, 881 bp, Homo sapiens
tccaaagatgtgttaaagtttcttatctgctgctgcattctttctatccttgtaggtttatacaaagtttttctattgctttactgtcatttagtgaggcttcaaaagacaaaattaacatgcacaacctgccacttttaatcagaagtccatgtatgaaatccaggctggttttggatgttaacatggagcgaatgggatacatcaaagaatggttggctgcttgttttaaagaggtcccactggtgacaggatggtagtggcgatggcagtgaggacagactggtaaagggaaaacccagaggcttgtggggagaaagggcttttgtagttaggaagagacagaggtaggcccctcagccagctccagcaggatagagacaacaacatacagcgcacagagaattcgtgcctcagggtcatagtccatgtcaggaggactgctggccagctcatcccagttctgctccatgacagatttcacctggaaggaaaccccccagattgtaacagctaggaacaacgatataccagaaatggcaaatatttggccacactccttgctgctgagctgataggcagacgtaataatccatcatggcactctttcctgcagagcccggagagcttcatactctctcaacatagtggcaggctctgctagtcagtctgcatgggaactcaagatcataccagctgctgtcctgggactaaccaatttgcagccctctcttgcccacagataaaaaacagagcctaaagaacccaccacaaattgttctggcaactctctgtccagggaattgtcacaaaccagctgcatggatgtgagccggcagaaaactatggaataagaaggggctgtaccctgggacttctgg

SEQ ID NO: 64753 - DNA, 9655 bp, Homo sapiens
ggggtggcctcacaacgccacatgtggctgccacatgagaggccctgcccagtgccagtctgtatgaggaagttaaggggtgagggcctgcagaggaccacagcacccatcgtttctgtcacagcttccccatacccccgcaggagtcagggccaagttggacctgtgcttacaatgactcacgggccttttccccacctgtctacccaacagccaacccaggagttaaacccacagcagcctccctcccctattactatcacattctgtgggtaaattaaccctccaagcctgcttccctccctgcccacatcccaaaggagattgggtctagcttctgtccctacccctccctcccttacaccagtcctctgctgctatgtggccccattcttctaagtctcgactcactagctctcctacagctccccaacctccaccaggccaggatggcagcagccctggccccctcacctctggaaccaagccatctacactctaccccatctttccccaacctgaccctccccactcccaaccaggacccacggtgggttgcagagaagctgccaaaagcctgggacttggattagacagctccctacccagaaaggcaaagacccatcccacacttgcttccatacacaaaagcacacactgcgtggcatcgaaaaaacctaggaatcacagtgaaacaatccagaagccgtaccgccctctgctccctatgcaggggttaaagtgctttggctgcctgagggcaaacaagtgagcaggggtttttcccctggcctcctgtcgcaactgcgtggtccatgttcagcccaggagcccagcccattccatgaccaactccatggagtctctattcaaaaagcaaaaggaaaagatcaaaaaattcagaaaaggtcagagcccagggggcctaccccaaccccactacaagctactccaagttggctactgggggaagcgaggggggaaattaggccagaggctcaacccccatctctggcagtgtccagaggcttcttctttctgtcttcagtgttgcagcacatgccttttaccctacccctcccctgccaccctgggcaggggaaggggctgcactctcagtacttattgattccaaaaatccggactccgtggagctggggcagcttggggataagcacgctcatcagggacacggtgttgagcacaaaatggatctggtcgtacttagtgtagaagctggtgaggaagtacctgggaggggaagggtggggagagatataaaagactgttgggaggaccccttcctccctcacttcctgggaggggaaaggcagaatcccaacagctaaggagttacagaagaggttcccagaccagcgtaagaagcaagagctctcaggctaaaggggcccctcctggcccagtaccgcccccacctcccagcttcaccccaagcctgtaggcctatctcactagcaggaaggaagctccaatggaggaaagatggggccagggaggcccaaagcctgagtccagtgtaagacccaggaatattccaacttcctctgttcatccctacaccaggagccacggcagggttaataagcatggctgggccctggggtcctccaggccttgccctgcctgctggtgtcttcctgtagcccaggcactcacagcacgatgggtgtgatggtcaagaacttccgagaggccgtgaactggaccccataatccatctgctcccagtgggttagcagcctcgccttgccctggtccggggtctcaaagggtgtccccttcaccgtgtgcaggaagatatacatgccctggaggaagaagtctttgttagaggatacaaaagggaaaggcccccctgcccagctcctccacccagtcacagacacaagtaactcccagtgatctggagcctccctctgctgggcagggggatatgggctggaggtcaggatggagcagctgggagtatggcaggagaagaacaaggggactccctgggggacgggctaggcctggcatgagaatgcacggtggaagttggccacaagataggcaccgagatgctgcccccctccaggccactcatagccccctgtgcctgttgggaggaggcaagcgatgggactaagccctgcttacccgacaaagagtgcaaggtagcaagtggtgagggagcagagaagggcaaaagtggaagacggttcgagaagctaacttgagaaaggggcatttctgtatcagcctaggcaccaggactctcgggtcctgggaactctctggagccctttgttcagctctcaggagcacatcttccaggccaacagccaccccaccctagagatgtggaaaaatctgcagatttgattcctgtcatggtacacagggcaggaacccagaagggggagcaaggcagagaggtaagggctaggcctgggctctggaggcagatgtcgtcagtacatcaccctgacacctgggccaggcccgacaggctcctcctatccctcagccctgccaaagggcagcccacagggcaggggcaggggcaggggcaggcagcagacaggctctcaccatgttgtgaatgaggttggtgagggtccagacgacagggacactcacaaacgggatgctcagcagcacgatgtggaggagaccgatggccagcacgtaggagagccagatgccacggctgttcatcacccgcgtgttggggttcacctcgctgtgcgctgtgcccacattcatcctgctgcccctctctgctgttctgcaaacaagcagcacaggtcagacaggtcacactgctttccctgccccctctcaccctcggatcccgctgggaggcaggcccttgtttccctgagaactccaggcagttccactcttttgattctgaagcatggaaagtggagaaagtccatgtggacttagctctactcatttcctgctgctgggctgggataaacaacaggctgccccatgcatcatcccattgggacagggccctggcagggcatcggaggacaggtcatcaagaggcacgcagccccagggcagagaagtcaaggcccatcccccagcctcaccccctatggcactcccatgaggaccctctgccgacaaagccccagggagagaattctcactcagcacaacccctgctggactgtgtctcactgaaggcctaatgtgggacatctgctcttaagctcttcccatcaggagggaaaggaagtgaggcctgtgggtacaggcagcagtggatgaactattttgaggtcactgcatccactcacctcctctgattttttcaattctggatctccccaaaccccaacttaggaggactgatcaggtagaaagagggaagtggggagggaggaagggaggaagaaaggagaaaacaacagactagggacaacctttgcccagacctagaaggcacccctcctgggtgacacaaaacaacccatccggatgttttctccatttggcagccactcaggccaacccttgtgatgctacccactccactgccaaaccaccagggcccttttccccacaagagaggcgaggatagagaacgtggccaacacctgtaactcccatagagagctggaatccacctcaacatatgtctcctaagggcacagactcgaacctgtggcctccctcctgcccccgttcttctctgtcctgcccatcctcacctcagtctcccctctcagcacctgtttccaggtgtatattagcaccatgccttcccctgcccagcaccaacggtaggagtcctgcagcaggaggaaccaggaggtggccgcaacccacagtgagcagagggaagtagagaaggaaggggtggaatgatctgccccttatccagagtttggctgtccccagatccctgagggccctgtgaccaggagaaagtggagacagatggcacctgtgtactggctcacctccctatctgagatagggtcctgcttgctaaagaccgtaaggtcatcaccatggtaacagccccatctttcctgggaatgcagaaaagagtcccagatggagatattctagaagtacccagaaggccacctccctcacgcccctgcagcaaccccgtcagacccagatgctatctatctctgactaggatcctagccaaacctgcacaggagactgagtcctcaggggccagttatttacttccaggataacaggagcaagtttcctcttctcagacagctccaagcttagagacctcagagaaaatgtgacccacaacacgccatcccaacaagcaaacacccgtgcgccagcctggggcgcattctgattgaagagatgctcctgggacccatcagcgcagcccactaggctggataattgagcctaacagaaattcaagtatctagaaagccagagctggctcagattgtttatcttcccagggccttggggcttcagttactctagcagcccctgggacagctgctacgcaaaagcctccacctgagaggggagggcggcatgtggctgacaagtgagggctctgaaggacttaactctgactaaggagagggaaagagcttcccaagtctgacctgaaactgccaccccatcacctctctgtaacccgcacctacaggggtgctggtatagaaagtccactaacccttcctagtatttgtccaggagtgccaaaagccttggggaatcccagatcacaggaccccatacgcctttctggctttcacagggcagccaacaaaacttgatgagcctaggaaaagcctagacctaggtcctagccaacaccctcagaagcttcttcctgaagcctaaacactaggtgccctgagagcaggaaaccaccagagacccctgaaaaagaagagatcaataaactaacaaaaagactggcaatgaggaaacactcttgagactttcgtgtgactatggatacatatcacttccattagtaaaacaaccaactggcccctaccctagatggggagaaacagagagaagaggctggcagaggtcgactaggtctacaggagttgagccgaaaacttctgctgccatagctggcaggtggctgcttagtgctgggccctgatgtggtttcataacctgcctcaaaccagagcctgcagcaactctgttgtgttaaccacttttttgctggtagctctttccccctccttcccgccccaccctcttggctccacatacaaatatccgggcccagccagtatgccagacactcaagccaaggctgagcaccaccagggcagccaccaggtgagcccttcccattccctcccccaggaaagagcagccctcacaacagcaaacctcctgtcttctggaagaggagcacaaaacatccaggcctggatggggaccccaacggggagtccggggcagcacgtcacaatgccatgtccattccgcccaccccccaagctgcaggaccacagctgataacctctcaactttggcccagccaccccgactgggggagggcggtaggagcggaaagcgagtgcccaggcgaacccgcactaagcacaggagaggaggagcgaagaggcggagtcctcactgttgttggggttttctgagtgagacctcgggtgcggggccggggggaggggtcccgctctgttccccagcctgggtcttcgcactcggaacccggtccggtccgggaccccacagccatctccacgcgttcacccagccctggaggcagccaaacgtttatccccgaagccgagccgctccccgcctcccacccctagccgaggcgctcctcccgacgttccacccccggcctcccgctcgcactttattccttggccacctccccagccgatgcaccccctcggctgatgcactccctccaccccccactccctctgcccccgtctctccagcccggggcgcctccccagcagcccccaccttctctcccgcccctcccgtagccctggggcctcttggttccttccgggctcaccgtgtggggccgaagatcaacggcccgggaacggttcccgggagcgggggccgctgctgctccagcagctgtaacaacccgcggctgcagcctccccgctggcagctccggccgaatcagcgctccgcgccggtccccgtacgtcaccgccccgcgccggcacgcccgacgccttctgggagttgtagtttcttccgctggctccgggccggccctcccgacgcctcctgggagttgtagtttttcctgggctccgttcccggcctcttcggggacgcacggttggaagttgtaccgtgacgtgatggtcagatcggatgatagaattttggtgcgtaacaattccaacttttgcttctgtgcccttcaagtgtattttatccgtgccccagttttgcagatgaggagactcggacttgtaagtaactttctgtaggtctttgctgggtcctagactggatcgaaacccaaatattctgaccccaactgcaggatttttccactgcacctggctgcctccgccctggccccagattggctcctccagaaacagactagcccggccctttgccctgctgggccctcctgggagagcgcttttcacaacattggctgggatgagggtctggagggcccggaacggagcctgccttctccttctcagtcacgcttggcccaggctgccccggaccgggccacatccttggccgccccgcacctgacgtgagaagaggctacgtatcatagattcctccatcagtagtaaggagcctgagtttctgtctcaggtcagcttgtgtggctttgaatgagaggctctggtctgcagttttcacatctgcatcgtctaaaggcaagggcacagactttactgcctggtagacatggggtaggccctcctttattggcagtgtgaccctgggcaaattacttgtcttaatctccaattccacacctgtgaaaccccacctccaaggttgtgggaacccaaaagaatgtatgtaaagcacctgttgcattgtaggaatctacttaatattactgtaggaggttgaactaaatggctcttgaggtctcctcggttactcccattctccatgtcaccaagaggtcttgtctgggtagtttcaactccttacccagcttctttctaagtccactctatgcagggcagggctggaatagcaaggtcagatgatgtcatggcatgccaacctgactctgaatggcagttcatggcaccctgaactgaaagtgagggaacaggaaggaaaaggctagcccagggaaactgcggagcactttactcggactacacctacctttccttccccagggggctgccaggaaacagttgtcacacagctggagtgggacccccagaggcacttagtggtcaccaggcaggtgggtatttgaaccacccagagcagaacaggcagcttcttcaatatttccagggccaatggccccaaaagggctcattccaagatcgaaataatcatctgagtctgaaatagctctgcctatgtcctgtggaagtttctcctggtttgtggaggtgcctttccttatagtcatctttctgcagacataagcaaacccagtgttgttcttttcacagaaacctccccagcattaaggcaagaaaggtgtctctgttttttccgaagtgtgcctgcttgactcctttgatttttctctgggattcttcatcctccatcaagttgatcgatccctctggatcttggtcagtttcctgacatctctatgaagttcagtgacccagactgagtccacgtctcaaataaggttctgactaatgcagagtctaacagaaagattactgaacatgtcatgcactattaataactcctgttatcgaggatttttttttcacaataggaatgaacagagttctgactcactctaggtttgtggtaaattgcagatcactttctgctttatttagcgggagtccctgttgtcatctttctccttctctcttggccctcataattatcatatcttccccaaacgttcttcagctgtgaatagccctaagcactattcagagtgagtgacagctctcttatttcgtgctgggggacatacaaacccttggacaaacacttgtcactgtgtgccaagaagctgaaaaattcttcttgcctcagagccataattacacttttggtagcatattctaaggaagtcatcccatgtacaggaaaagctgcaatgtgtcaggatgttcattccagcaatatttatagtagtgaaaaactgaaagcaaccaaatgcccaagaaaaaaattacagtatatccactggatggaatagtatgaagccatttaggacagattgtgaaaaccctgtggcagtatggggaatgtttgctaagttatatgaaaagatgaggacacaaaatagcataacatacattccccagggatatagtcagcaaagtctagaatgaagaaaattaggacaaacacccaattcccttaacaaataaaactggggccaggtatggtgactcacgcctgtaatcccagcactttgagaggccaaggcttgtgtccaggagttcgagaccaacctggacaacatggtaaaaccccgtggtctacaaaaaatacaaaaattagttgggcatggtggtgtgtctatagtcccagctactcaggaggctgaggtgggaggatcaattgagcccgggaggtcaaggctgcagtgagctgtgatcgtgccagtgcattccagtctgggcagcagagtgagatcctgtctcaaaaaaaaaaaaaaaaaaaaaggaaaaaaaagagggggagagacttacagattaaaataaattaaatgatatatcaactaaaagtcttatttggatcctgattcaagcaaactgactttaaaaaaaaaaaaaaaaaaaaaaaaaaaaaggccgggcatggtcacgcatgcctgtaaccccagtactttgggaggccaaggtaggcggatcacctgaggtcaggagtttgacaccagcctggccaacgtggtgaaactccgtctctactaaaactacaaaaactagctgggtgtggtgatgggcgcctgtaatcccagctactcaggaggctgaagcaagagaattgcttgaacccaggaggcagaggttgtagtgagccaagattgcaccattggcactccagcctgggtgactgagcaaggctctgtctcaaaaaaaaaaaaaaaaaaaaaaagattttattaagttatcaggcaaatttgaatactgacaaggtattcaacgatattaaggaattctaaatgtttaggcgtgatatggaattgtggtaaggttgtttttttaatttaaaaagtcctccatggctgggcgtggtagctcatgcctgtaatcccagcactttgggaggctcaggcagacagatcacctgaggtcaggagttcgagaccagcctggccaacatggtgaaaccccgcctctactaaaaatacaaaaattagccaggcgtggtgacaggcgcctataatcccagctacttgagaggctgaggcaggagaatcgcttgaacccaggaggtggaggatgcagtgagc

SEQ ID NO: 64754 - DNA, 1399 bp, Homo sapiens
aaaccccatctccactaaaaatacaaaaattagccgggcgtggtggcgggcgcctgtaatcccagctactcaggaggctgaggcaggagaatggcgtgaacccgggaggcggagcttgcagtgagccgagatggcgccacagcactccagcctgggcgacagagcaagactccgtctcaaaaaaaaagaaaagaaaaaagaaacagagccccttcccctgggggaaagaataccacctctccactcctactcctcccctcctcccccacctgcttcctgaagggagggtggtgaggtcctgtccagagcaagtgcaaggaaggaaagaactgcttatttcattgacagttgtgtttttatttttgtttgggtgggggataccccaggcatgtggtgggaagaaggagggggaggggaaggcagatgttaagcagacaaaggagcagcgaatgaccctcctgagaactactgagccagtcagaagccaggagtgggtgcgggactggcagcatcgccagcgggcactctgttctgcctccctcgcccagtcctgtagttggctattttgggctgtggagagaaagggctgaactggtcagggccactgggtccccatcccccagcctgtgcctgggaacaagaacctccctggggaaccaagtgcagggaggtaccttaggaacccttcaacctgcatattctttgatatggacaattgacactctcccatgaacaaaagcagttagaaaactgaaaatatttcagatcaaaagggcaatggatataaaaacagtaagttcaagacaagaccccctagctccctaccaactgagttcctactcctagcctcacctgtctagaaatctgggtggccaccgttcccagatcaccttcttctgcctaaggccagctcctccctcagtaacaatcacagcaaacattattgtttgctatgttccaggcactgggcaaagggctttatttgtctgttacagaaccacctccccctgggctgctagacttgctccctgtctcacatttgcatttcccgaacagagtgaattctcaataaatgttaactgaactatgtaacggaactgttaccagaaaggggtcccgatccagacaccaagagagggttcttggatctcacgcaagaaagaattcagggtgagtccacagtgcaaagtaaaagcaagtttattaagtaaaggaataaaataatggctactcaacagacagagcagccccgagggctgctggttgcccatttttatggttatttcttgatgatgtgctaaacacggggtgggttattcgtgctcccctttttagaccatttaaggtaacttcctgacgttgccatgatatttgtaaactgtcatggcgcggctgaaag

SEQ ID NO: 64755 - DNA, 2255 bp, Homo sapiens
catctctgctaaaaatacaaaaattacctgggtgtggtgatgcaggcctgtaatcccagctactcaggaggctgaggcaggagaatcacttgaatctgggaagtgaaggttgtagtgaagcgagatcatgcaattgcactccagcctgggtgcactcagagagagactccagactctgcactccagagagagactccatctcaaagaaaaaaaaaaaaaaaaaggtagggagaggagcagagcccagccctatcctctcttaccagcaaatcaaagactgtcccacaaacctattctgcggacttctgcttagatgtcattgaccagaattgggccaccctcagctgcaaaggagattgaagaagtaggcaacaggatttctgatgggctgagatcaatcaggttgaatcatcaaggactgagtgcattgccactcccaaagccatgtgtgttaatctggtagtaggagggaagggatgattctgccatgttattaatacttattctctctctgtgcttcacagctccctgtacaaacatcaattaatgcaggcagcacatcaaagcattgtggagacatgtctgtgcctccctccagaccatcaattctcaactcaggctgctcgttagacatacctgaggagctttcgaaagaaaccagtgcctagaccccatgcacagagattttaatgtaattggtccagatgaagccccagcataactaatctgtaaaagctccccaagtgatttgaatgtgcagggtgttttgagaaccctgccatagacccagcaccttaagaaccctgtctatgtccccttcaactagcacataaggctcacaggaaatcctcactgaatgaataaacaaataaatggatggcagagaatttctgctccaattctgcagcccctagtgggcagtgtgcactgtcctaagtgtggttcctccttccccccagatctccctccttcaccgagtttgcactcagactcccttaattaaccacatctgcagctccagctgggctcctgcttctcccacagctgctgtgctggacaccctagttccactcttttcctggaagctgccctagtcttagaaggaaataaccctccatcaacagccaggctcaattcttgtgcctcagttaaagcccctgcccagtgtgagagaggaacagggggaaagggaggattgctcagctttctgtcccacattcagctacagtcccgaaatggacaccaagtagccagcagcagagtgtccggccctcagagaaaaggtttgcttgttgcttctcctgcctaagtgtagaaagttatctgattccttagacaaatgtgagtctgcaaaattcccctgttgacatcacaggaataagtctgtggtgagtacatcctcagagatgatatcatctggcatcctaccatctggtctggtccccatcatgcttctgaaactgcttgttcaaaggtaacctacagggccagcctcacaggcatgcggctgacgaggtcccacaagacctcatgccctgtgctcacaagagctctgcacttggttttacactctgctgctgtcgtcatcttaaaattcttttttatttttattttttagagacagagtcgcactctgtcacccaggctagagtgcagtggtgcaatcacagctcactgcagcctccacttcccaggctcaagccatcctcctacctcagcctcccgagtagctaggactaaagtatgcaccaccatggtctgctaatttatttttctttttgtagaaagtgcatttggacaattttttttttttttctggagagacgaggtttcactatgttgcacaggccagtctcaaactcatgaggctccttggtccttggcctccgaaagtgctgagattataggcatgagccactgcacccagccttgaaattcttttttttgagacagggtcttaatgcgtcacctaggctggagtcaagtggcacgacccaggctcggtgaaacctctgcttcctgggttcaagtgattctcgtgcctcagcctcccaaatagctgggattacaggtgtgtgccacctcagcccagttaattttttgtatttttagtagagatggtgtttcgccacattggccaggctggtctcaaattcctggcctcaagtgatccacccacctcggcctcccgaagagctaggattacaggcgtgagccaccatacctggcaaggccttgaaattcttaagttttca

SEQ ID NO: 64756 - DNA, 1607 bp, Homo sapiens
gggtagatgggcatagaaggtggggccagaggtctattttacctagtcacctggcctagctggatgccctgacaccctgtcgctcatccgtccccttgtctccatcacgcgagtgccaaccagaccctctggtgcctacctagcccacttggcagccacccaggtaggtaggggaagaagactttattccaatgagagaaatcaacacatggacagaggcagaaacttagaaacccccagacccagaatgaccaacaaggcctcacagattaaccttctagaatcaacagaccctaaaagagtttcaagtgcaagagaccctttacccaaaagaccctattgaggagacttaaatcaagagagaccccaataaggaagtgaaaaagtcacccaggcttgagagaagcccccagagaagaggccccagcccaaaaagactccccagagggacctcgggaggagaaagctggcagtggggcatgcgattctcttgactcactcctcctttatgtggcctttccttccccagatcctactgcactccaggactatgccaatttatggccatgctcccaacagcaggtcacctcctgcccctcctgctggtgataggcacagggggtactgtgcccagcccccaggtgcctccccggggctgttatgtggcaaaggaagcaggtgaacggacgttccgctgcagccaggcaggcctcagtgctgtgccctccggcatccccaatgacacccgcaagctctacctggatgccaaccagctggcatcggtgcctgctggtgccttccagcacctgcctgtcctggaggagttggatctgtcccataatgcccttgcccacctctcaggggcggctttccagggcctggagggcacattgcgccacctcgacctctctgccaaccagctggcctcagtgcccgtggaggcctttgtggggctacagatccaagtgaacctatccgcaaacccatggcactgtgactgcgccctccaggaagtgctccggcaggtgaggctggtgccgggcactgggacaggcatcgtgtgtggctcaggagcccgaccggacctcgtggggcaggagttcctgctgctggcaggggaggaagagctgtgtgggtcggggtggggtggggcccggaggagcaccgatgtggccctgctggtcaccatggggggctggctgacactcatggtggcttatctggtgcattatgtgtggcagaaccgagatgagaccaggcgctccctcaagcgggccccagtgctgcccgtgcgttccgaggactcctccatcctcagcacagtggtctgatgacccaggatgctcctccagccacaccccacactcctgcccctatgccctctcctttgctctgaccccctctgcctcctgtgcagcttcacccctgcccccaagcccatcccacccctccctcctttattccccctaaatacctgtgctggttctctctctctctctctgtgtcgtcttaaccaacaccatctttggtgcctggagttttttggtgcctactctgtgcctggattgtgctagactcagaaaacccataacagagaatgacagcag

SEQ ID NO: 64757 - DNA, 754 bp, Homo sapiens
ccaccccttccacaaagctgaagtaggcagagcagtccttcctccagaagcttccggaggatggggagaatctatacgtggtgaccaagaccatggagatgctgaagaaggggggtaaggccagaggggcagttccatccccgacctcactgctgtggggctcaaggttgggaatctctgagatgccttctctgccccatcccttccatgcacacttgcccctctccttcccccacgcagcccctactctcctctgcattctatgccatttcccttcacacttttatcttttctaaggactttttcatctatcatctcacaggaatcccctgaggaaggcaaaattgctattgcaatcaccatttcgtacagtttaggaaactggactttggaaaagtccagggactgacccaaggtcaatctgtgagcaaagcccaggttttgagattcccagctggctctttcgccaggcagctccactgcagccagggttctcccaccatctgccagggttcccttctttcattctctcccatctcctcccctcccctcccctccctgccctgtggacagctgcatttcccagggctctctgtttccacacgggagcatcatcatggcctttctccccaagcagtgggtcactggggaggagagctggagtcacagagtacagtgtgagggagggaaggggaggggaggcggcctcccaagggacggttcctactctgagccaagccctcagagctgagct

SEQ ID NO: 64758 - DNA, 1830 bp, Homo sapiens
cccctggacattggcgggacgtagtgctgactgtgatggcagccacgggtttcttgggccttttcggtgcatcctccccgcaagcctccaccacgctgttccaggtaggctgaggttaggcccactcagggcggcaccttggcgcaggacacctcttccgtttgggctttccgtcctcgtgatttcgctctccatctgacagtcatccatggtgacagggtgtgtccctttcccctaaacaggatcctcaatgcccatcggaaaacgttgtaaggcgttgagcccccaacgccccctcaccacaagaccctgctgtgaccatcttttcctggtgaggagagtctgcacgggggagcagggcgccataccccagaaagaaacctctgtgcctgggagtgagggactcgctgagtaaagtgaggtcgaagagggtggagaggggtagggtcccagtcaccactgtcctgaacccacagttcagtccgggcccaagatggccccacaggagcacagggggtttcgggcgctgcaggtggaggtgaaggaccagctgcggtgcggaaaggcctgacccgggcggcagatcgcctgcggagagaatgaccggctggggtggaggcggggctggggtggtgtgggcgtggctggggaggcgtggctggtgtggtaggcttaagcagtgagggcgggactggggcagaggcggggtttgggcgctgagggcggggctggggctttgaggaggtggctggggctggggcgaggctggtgcggaggcggggttggggcggtgagggcggggctggggcagaggcggggctggcggagtgaaggcggggctggggtggtgagggcggggctggtgcggaggcggtgcgggggaggtgtgggtggggctggggccgagacggagtttgggcagtaagggcggggctggtgcggaggctgggctggtgcggtgagggcggggctgggtggaggcggggctggggtagaggcggggctggggcggggtgggcggaattgcgggctgcggggcagagatggtgatggcgtccggggggcggggctgggtggacggccggactacaagggacgagaggctgggcttaaggtagcagggggcagagcggattgcccaggggcggggcgggatcggggacaaggctcaagtgctgaggaccagacatgcgccggaagcccaagcccggctagcgagtaggagggtggatggtgggggatgataggctaggcttaagatggctgagggcggggatacaaggtggtagggccagagatgggctggatggggcgtgatcggcctcctcctgggagatctcagcccacctgagtaggcttcttccggccgcaagagagactggggcctggccctgatggaatggccattctgagcgtgaagacctgcgtccccctcccttcaggaagctccctgtctctcaaatttcagggggatcatcacttcccatctctctgccaggttgatcgagttctggatctacaggagccagttctgagagggaggactgggggtaggaacggggtctttgaatggctgcgggactgcaggagacttccagcaacctcagctccatgttggaggaacattctgtacctgctgggtgctctgtgtggtgagggtcagggatgagggtgagggccatccctgatgtaccaggcctactaggttaggcccaatggtaccaagcaagacctaccacaaaagttaagggtcccagtgcaaaatgaaaatgcaggactccttgctacaaaagttattaagaattatatttggccagacgtggtggctca

SEQ ID NO: 64759 - DNA, 2578 bp, Homo sapiens
aaaaataagtgggtagggtttcttgtccaatttgcttccccttaggtacaccactaagtaaaccatcattctctccttaggcacaccattattctgttccccatttcacaatgtctgtctggatgtataaaagccctctcaatgggctccctaaagcgtctgccagtaggggctcccaccctctttcctcaacactcccaatccaccgcagcccagagcacagtgtctgcttatctaaccatctgactcccccgtatactacattcttgagctgtttttcacccccctatttgctaaccgtgggccgtacatagggtggacccctatattttgttaaactggagtgattctacgcaaatgcacgctcctacctatcggcactcccagcctgcagaaattgtatgccttatgttcagcactaaactcaaatctaaccaaggaagtccggatcccatagggttcttcctactctccagttcggtttattttaaggccaacagccctagcttcacgtccctccttcacagccttctttccttccctcctgccggatgcgcccggcagccgttgagcacaagcccagcggatctggaaggagaccccgccgcgaccggggaaaattgagcgaacttgggcgcaaaacccgcccggcaactcgtgacgtcatctcgtcccgcgctcggataggctgtacccactccacgctggttgaggcgctcttaaagtcctttgtaacccagattggagcctgaggggacctctcgtggacgcccacagaaatgcactcgagaggaacataaaagcatcacacttaagcgctcgaaagaaagccccacgaacccataaaggctcctccccgctccttcctcgaagctcctccttcatcctgcacctcggctgtggatttatttcccctttgttgactcggccatcggcctgccgggcctggcgtttcccagaaggcccagcgccgggaaggggtttgcagctgctccgtcatcgtgcggcccgacgctatctcgcgctcgtgtgcaggcccggctcggctcctggtccccggtgcgagggttaacgcgaggccccggcctcggtccccggactaggccgtgaccccgggtgccatgaagcaggagggctcggcgcggcgccgcggcgcggacaaggcgaaaccgccgcccggcggaggagaacaagaacccccaccgccgccggccccccaggatgtggagatgaaagaggaggcagcgacgggtggcgggtcgacgggggaggcagacggcaagacggcggcggcagcggctgagcactcccagcgagagctggacacagtcaccttggagggtacggcagcccaggccgggaacgtgccgcgatcgcgggtgacagcgacccctgtgatttggcttcttgctgggaagccacagcagcctccaccaccctcagttctttgggatcacccccagatacctgctcccactgccccgacactcccgactccaggcccaatgactgaaccttctctccaggctgggaaccactcccctcccatcccctccatccccatatctggggttgcatctatatctaggtcccagtgggcctggggactccctcttttaagtcctcccctctgacctattccgtttatatcccacccgactgattttagcgcctccaatatatgactgattgttcccgctggaaaccagtgtttgtgtctgtgtgtaaacagggccaggatgacctagaatattgactcctgagttttaaaactgtacagcagatttttgttgtcctagctgcctttagcacactcccccgaatgaaccatttcgacctagtatcttgtttcctacttctctaactgaagtgtcccaacagtccccttgctgtctcctcccttcaggtccttactgcccctctgtttctaaagggtttaagtacatacacacttaaaacttttcgggtgtcatctttgtttggttttgtaatactcaacctttggcctaaactcctatataccggtgtctcctatttcttttctccgaggttcctgtttcgagtgtctgtagtcctcttgttcctccaagttcatgttttacttttcccacttacagcgtcctgtttccatttgaagtgggcaaagtgagagcttcccactgtgatcctggtgccattttcctggttctggatcaagtgggaccagactacttactaggttttcttttcactaaaatgcgtgagaaactagctcaaaaacattgagataagcaaagttatcctcctaggtggtgcttttgaggatgtgatggtgttgactacatcagctcttactgtaaagttgagcaacaggatcgatatttaatagagatccttttacctaaagtagtggcagcaatgtcaaaggtgccactcagcattgcctactgggtgtgtttattacaggcacttcattttcttcttgtaaagtaattcatattcattgcagaaattgtggaatgtatgagaagttaaaagcaggggataaaaaacatggttaacattttttcttgtgaatttttgagctgttctcctataa

SEQ ID NO: 64760 - DNA, 852 bp, Homo sapiens
aatgagaaagccaataggtgcccaggcccctgatgcccccaggcctaggcacaggacacaagcaccctgcacctccgctagctcaacagaaaaagatgccataagcaaaagtggatccccagcttcaaggaggactggggcccctttccctggctccctttactgccctgcacctatctgtctgatgaccaagctaaactgcacctctgtggtaagaaacaacggagtctgccaaatgggctaaatatagccctggcactttcagagaaaatgatcaatgggaacttgcactggaatacctggcaggctgggcccagtgcccgcagggaggaacacagggcaaaggtccagggtgccactggtcttgctaagaaccattcctagactggctctgcccctcccacgtccccagtaccttgaggaaagtgaaagctgtccacttgagctcctccgtaccctcgggagactcaatgagccccacgaagcaagctttccagatctccaggacaaaaagtggggtggggatatgctgtgggaagagccaaggatgaggcctaagagggtgcccataccccgtcacccttctgtggactctgaggatttggctgggtcagagactgcatggcagagtcactgctcagctatgtgctgagaaccaggggagtaaggtccaatgacagaagtgtgcacgactggcacccactttccatcatggagcaggagaaaccccacttctcccagggagaaccagaagaatcctccctcctgcccccaacaggctggcctgccttggagaagggagagccactcggcccctcccacctgcatgcgcttcaccatcgtcagctgctc

SEQ ID NO: 64761 - DNA, 543 bp, Homo sapiens
gtctgctcaatcacctgggtttggcaaactttccatccatgtgcaatttccctctcaccaaaatacactgctctgttcagccatctttcactagtactcctgggtgaacaggagcaaaacacagagggcttaaataccatcagtgttcagaaccaccatactgtgaggccagggctagtgtctgatatccatcagaaagctgggagcctgcctgggcaggatgaccataacgttccggcgagcgttttgtttatttataactgatgtccccatagcgagtgcttggcaaagaagtgaaccttgctggataccaacctgcagggggagctggatgtccccactgaacactgaccctcaaatgccgggagagaaacccccaattatgcatgttccgagggatgccattcgtcaaaatgaatttatggtcttcaaattctgaattctgttcagcagatttctgctaactgtatcaataaagcacggctacttcagagacccaaaaatgctttctacatgacgaactgttttacacagcaggatctg

SEQ ID NO: 64762 - DNA, 1214 bp, Homo sapiens
tgctcgtcgatacttcctcctccaccctcacggtgcacacccgaaaaccccccaattctcccggcaagcaaaggctattttttaatgacatcttttccaaaatatgtcaccaagtacccactcctgcgggagccgcccgggctggggagggcgagtccgagcggggcggggcagaggcggccgaggggcggccggacctctggcgggggtcccggggcgcggcagggggcggggggcgggggcgggcggcggcgaggcggcctgcagggagcagccgcgagccggccgggcgcgccgagcccgagccccagccggagcggggcgggggagggaggagccagagcggccgccgcctctgccggaggagccgcggggccgccacactcgccccccgccccccccgcgctcactcgcactcacacccgggcgcaggaggcgggcggcccgggccccaccggccccccatggacgcccccagcacggggcgctgagacccccgcgtcgctgcccagcccggtccggcgcgccacgccgaggtaaggaggagggagcgagggggcattaatatgcaaatgccttgcgattgattatgcaaagccgcggggctccgtggccagctcccaggcgggctaggggcgcccagggggtgcctgctgccagcctcagcctttcctggcgccccagtgaccctgtcacgagcccgggagcttgcaactgacgccctggggaagggaggtgttgctaggaggtcgctgggccccggggttcgcaggcggagatggcgtccgagcctccccctggagggcccgcccggcctctgtccggccagtctgctgcgcattcccgggccgggccccgttgccggccgccggagctcccccgcccgccgcgccgcggtttgtttacggtgcgccggaggcctgcccccccagcccccacccctagcctctgaggcccgagtggcctttgcaaagctgcctccagctgcggagggcagtatgagtgcggtggcgcgggtgggcttgcacgggtccggggagagggaagttcccccgcctcacccgcctcccggttgagcatggctgtctggttgcaacactgctaattgcaaaaacgcggttgttgggggggaatgtgtgtgtggaaggggtgtacttggtggtgcctagatgattaggagagttgctggctggggaggagagggagaaatggac

SEQ ID NO: 64763 - DNA, 808 bp, Homo sapiens
cccgagccaggaagccagaggcctggccaggcaaagccctaaggcccacaactgggtccctggagggtagaggaagtagatggaactcacagctgggcagggcatggggtagctcccctcccccaaagcctcaccccaggaaggactctgaggacgatctggcctgtcgctgtgtggctgtcacttgcagcccctgtgtctcccagcttaggcttctgtgggtctggaagagtctgtgcttaatgtttggagaaaggcaggaatgccagttcccagtctcctaagactgcaacccctcccccatcaccttcccctcccccatgtctatgcgccaccttgtggctatctctaggactacactcagaggctgtgagtctggtggtaactgctgaagccgctagctcaactggggcctaggtgggctgagttcccctgcacccaaccctctgggaggcgtgagggagacctgacctttcagcctcataggaagtagaccggagtaatccccacggggcgtggagcatagggttgtctgtgactgtgaccctggccaaggtcactgtgtcagtgtgttgggagctgcatccggctccaggaggaaggggcctgcaacatgccacacgcagggtgggtgcgggaggttatacaatccttgcatgcatgtagagggcttatgtaacctgtgtgcaccgaggttatgcaacatgtatgtggagagcctggcaacatatatgtgcagtggctgagggttgctaataatacgctgcacagaggggctcagtcccggctctgactctagctcatggtg

SEQ ID NO: 64764 - DNA, 4930 bp, Homo sapiens
ctccggacctagggtgccactgtgctcatccccacctgtctgcccaaaacattgctggccactcagttcaccatgtggagcccctaatcttggagttaataagcaattccccaacacacagtagacatggcatggccaagcaacacctacgaccctttgcaggccaccttcagcttctgctttcagtatgaggcatgacccctgtggcatctcgcatatgtgccccccttccttagttgccttccttgggaatatcgactgcagctaatgacttagttgtcagttgaagatctggggatgggatgggcagctgagcaccattcaaagtgcccagtcctccaaaaacaaaaacccagctgctgattttaacactaagaccattccaggaatgagaccatggaccatggagagataggtagccaacagtaaagagaatggagggtttacaaaagtaagacagtcacattccccccagttggggacatatattctctgaaggaaatgaagggaaggaatctgcccagcctggttcccctggcctcttaagagagtgagccacagtggagtctatccctgtgtccaaaaaggacttcgaggtgcgagttgcaggaggtggaagtacaaactgtccagcctggggctctaaaattcccccttcagatctcagcctggtaacaatgaccttggctctctggccattcagggactttgaccctctggttacattgccaatgaggtggctgtgctcccgtggtattagcaggagaaaaaggtgacctgcctgccacacctccggcaagcacctagattggtctgccatgggcggggtgggagaagggaggatcccaggacacatgtgacctaacacatgccatgccactgtgtctgcagaggcacatgtcttgctcacccactgacacacactgaactgggcagggcggccctaaaatagctcaaggttggtcagggtgaacccagctccttggaaaatagttgcacaacagatcagctcccccggtttcagggctgaggtgggggatggaatcattagttggcagtaaatgaagttgacctagttcacccatcccccaaaaaggagtgagaccttcatgcagaggcttccaacgtggaagtgaggagcatactcaagagtctaggtctaggtctagacccatcactaccaacttattttgtgacctagaggacatcaactcccctctttgggtctcagttttcctttctgtgagaaaaaaaggacagtatcatttcagctatgattgtggggtgcagttgctttggggagcccttagtaggcaaactgcagcttgtctggtggagatgggggtaagacaatgctcgcagaactaaggagagagaagcttggggaacaggaatttgtaatgtggggaagctgagtctaaatgcagtacggtgaagtaggtgcaaataagagtgaagtggaaaggagtgagaagggtggttaggggtgaggtctctttagggagtgtaaaacagaaggccatgaaaggtcaggaatggctccatgttactttgttttggtgatgggggagggggccgggcaggcggaccggaaaaggaggcaggcgggggcggtgagtcagcccagcttcacccagatctcggcggggcggggcagggcgggagctgggccctcagccggcctcacgtccctgctccacgtgtgcctctcgcacgtggctccccaacgaggaaccccggaactcgaggccccgccctcctcgcttcccgtcaatcgagagcagtcgccccgcctcctacccgcccttccccggccaccaggtcgtgggctggaccccgaacgatagcagggccaggacaacctaggggaggagagaagggaacacgcgttgccggggcgaccgggggggcggagctcattatgtaacgaggccgggaggcaacgaccaatggggtggcagccacggcttctgctgaatgaaaacaaacgcagcacgtgggcccggctctagagccatgtgagccctcccggcggccggagccctgtaggtgccctccctcgggccgggcaccacgctctggactcctcaagtgtcgctccctcctgtcactgaggattccccagtgagatccgaacgattctcccagcccctccttccctgaaccccatcgcgccactcttctcagattccctcgcgcctgcaggaactagaggagggggaagacaagaggggagggggtccgttttctgaggccaggcatactacagctgcaggtagtggacagatggggccgtttcggggcactgttccaaagctcccagtccccctaaattcttcgcttcaccacccgtacctcctctccatttcctcctgcccagggattcgaggctcaagggagctttgggactctgaggggtggtgatggggcgtttctgagagcatttccagcccgaacaagccgctctggaaatcccacactaaagcaccgcagcacgttagcaaatctccgggccgagggacaccccagtcccttacaaagttcctctttttataaggcgtagatggaggtggggagacagtgacagggaaaagatgatagtaaagaaatctcagtacctgtgttgttgttggagtccagggtcgtcatgtcttcaccagctgagagcggtcattcaaactggaccttgactcaaactagaggttgcgatcgccgctgttgccccctgggcactggctaagggcggggagtggaccccgcgactcacgatcaggatccgaagcaccctgcagcaaggtcttggggtggccggactgcagccctgcagaagggttggacgttgaggcaacggagttctgctttgcatgggaagagcagagagagtgtgtagggggaatcagcctgcagtagttctggctagaaggtagcaaggagggtcgggtctctgcagtgtacggggtgcctctgcctgccggctccgcagcgctgcggggtggcgaatctggagctcccggtgcaaaagtcccagaggaagagaggttgcaaccaggaagtaagtaggtgatggggagaaacggggcaccgagtcgcaaagaggcgagacgtgtgccctgctacgttccctcggcagtaatatttcactctgccaatctcagccgccttttgcccgagcctttccctgggacagagggctctgcgcaggcgccagcagcccagggttcccgggccgcacgcggcactggagcaggtaccatgtgatcccagggagcgcctcgtgccccagtgacacacttttccaacagccggcacgttgagctcttgcgcgcctgcgcaacgacaagactgtcgggatttgtagtccaccgacaaagtgggcggactgcgtgcctttcccctttctgcctggcaaagcgcttgccgggacctgggaggagctgagagtggggtggggtggggtgcgctgaagagtcagggtggcgtgtttagaaagcctgtatggcaggggcatgtgaatttctggggagggactggcaagcttgtttgctgtctgggagatcaaagctaagaggccctttctgcaaaccttgcaaacgtgagggcttcacgtgattgcaggactgacctcgtcctgaggttactggtgaccgggagagagagaagccggggagggagatttccctggagtcaggagcttaggctgccctctgcttcagggcaaagtccagagaaggaaaggaaatgtgaccccctttcccttctactcgccttagggagaacacctccaggggaaggagttcccacagaggtagggatgtctgtagggactccctgtttgcttgtatgacaccattccacccactccagttgactttggggtgagtcatttccctttgtctgggaaataaaaaggacaacagaggggaactaatagtgaaagtgctttgaggtcctaaagtaatggggaagaggtgaggcagggggtgggggcagagtgacacccctgcccctcggtgctggaggataaaatatgaattccacagaagattactactcagaggggaacatgtagatcatcttaagcctccctctttttactagtggggaacaggaagcttaggagaagtgaccgacccaaggtcagacgtccattgctagtttcatctgcccaccccgaatgggaaggtgggtagatgtacaagtgaaatactgaacaggggttagaaacagccagcattgccgggtgctttggctcatgcctgtaatcccagcactttgtgaggctgaggtgggttgatcacctgaggtcaggagtttgagaccagcctgaccaacacggtgaaaccacgtctctactaaaaatacaaaaattagccggatgtggtggtgggtgcctgtaatcccagctagtcaggaggctgaggcaggagaatcgctagaacccgggaggtggaggttgcagtgagccgagatcgccattgcactccggcctgggggatagagtgagactctgtctccaaaacaaacaaacaaaaaacagccagtatttcgcttcagagcagcaactgtcccatgagtaataacagatctcaagtagaggagatctatcatgttagagggcttgggtcatggaggggatggaagcttcttaggcagcgaagggagagggagcctgagccacctgctgctcccgctaattcctccccagtcccagtgcttctagagagggttttcttcacataggaagcccttctccacaggcagctcctgggatggtattgatggatgcctgggaaacatgaaagccaccgaaaaggtagagaaaaagaatatgggagtccgggggtggtggctgacacctgtaatcccagcattttgggaggctgaagtgggcagatcacctgaggtcaggagttcgagaccagcctggcca

SEQ ID NO: 64765 - DNA, 1812 bp, Homo sapiens
agcatagtctcatagcccagcaagaggcaccgcagcttagaaatggggtcacgagtagggggcagaagcagagagccagaagtgggggtctgtggttagagtgcccagagaaggaccaatggaggttagagggccaggcagatggaagggggcacttcaatgagggatggaggctgaatttgccttttgcacacgcatttgttctgcagctacacaggggttattgggaaagcccttctaggtttcctccagccctcggctcttccccatctccaagtagcagagggactttccccttccggtccactaacctcacagaccactgttgcagaacctttgcttcatgtccccaaacacacaaatccctgaactgtccttgttctaaccctggagggggcacttgctgcgtgtgtgtgtcatcctccttcctagaaagaggggacagggtagcctgatttggggagcccaggctacagggaagccaagtcttggctctgggcagacatcaacacatcaccatgagggctggggtgggctgttctgtgttcttggcttgggaaggtcctttgttcttttgaggcttagggttctgggttgtgaaaacaccaaggggctgcctgggaggaaaatatgcttggggagaccatgtttcttttctgggtgtttgctcccctggtggctcaggagagacaaaaggagacagaagcaggataaagcgcaaggagacaagaagggagccccgcgcgctttccctccttcctcatcttgcctcctgtttctctggcccacggaggaaggggcccagtgtgtttgtgccggctcgaggctcacgcgggctgccggggtcacatggcccgggcatgtgcagcctgctccatttctaccacaacaactcgctcataaacagcccggctgctgcggcggtggcggtggagacatgtgcaagcgagggggtggggcacgtggccctgcccgagccaagggaaggcgctcgctcagcactgcctccacccctccccagcactggcgctgcctcgtcacaggaaattcctagtgctcctgttgctgctgcaaaacatgttttggggaagtgactttcaataaggatggaatcaatggactatttaaaaagagacagaatggataatcagttagagaccgacttacgcctgcccttaccctctcttaagatctctgtactggttagggtggtaccagttccttcctcctatataaaattggaaccatgtaatcccagcactttgggaggccaacgtgggcggatcatttgaggtcaggagttcgagaccagcctggccaacatggtgaaaccccatctctacaaaaaataaaaaaaaattagccaggcatggtagtgggcgcctgtaatcccagctacctgggaggctgaggcatgagaatcgcttgaacccgggaggcggaggttgtagtgagccgagatcatgcaactgcactccagcctgggcaacagagcgaggccctgtctcaaaaaaaaaaaaaaaatggaaccaatcaagtcctcatggtaaacagtggggggaggggctggggttctctaagacagtggttctcaagataagcatagggatctggggtcacctgggaacatgttagaaatgcaaattcccaggccccatcccaggtggattgaatcagaagctctgggagcaaaacccagcaatctgagttttaacaaggcccttgggattctgggaagcctgagacccactgctttaggtcttcggtccctaacaatcagtcctctaggagaatctagcccaagatctgggg

SEQ ID NO: 64766 - DNA, 5697 bp, Homo sapiens
aattaagcccttatctatttttgctggccatggggaccccaagttagttaacagccataggctcttgacttcccatgagtaactaaaagaagatgaggaccatgcacacaggcacacacaaacactccctgcgatctcagatgctagggtagggagaccaagagaaggaatgaagtcccagaaggttggaagttccctgggtaaaatgagtttagcagataacaagcaggaaaagtctttcaataggggagggcggggtcatccctggcctactccaccttcctgagacccagaaactgtggccagaggaaacaaagggtccctaaggcaaatcacaaaagctcctgagaatgaaacctgagcctggaaagagagtagagaatgagggatggacaccagatccaaagggttcccttacacaggcaaatgggggttagggggttgggagggatgtgagccatgcccagcccctctccttgggccttctctccatcacaggcagttctcaggagcagaactcctgttactgtctcagtctgagcagctgactcctggcctctccctgcttcattttttgaggaataagcttttctctgattctcacagagccctttcttttgcttctctgcaaggctttctctctgtgcctgaaaggctctgggctcaaggagcagacagccctgcaggctcaactgcagtgacctacattggctctcccctaggccctgggtgcgggggctgagatttcaagataggaacctgggaatctggcacaggtctacagatgatgacatcaggcagacaggctgcaaaagtggcattgagggactggaccctgaggcaggggatgccataggactatgttctcactttgtcatttgagggctttttatggacaagagatcagaagagatcaaatgcaaaaacacctgagcagtgaccccttggagaggagccagtggtccctgacaggcccagtctctattaatgagatttgggagtggtttctgcctgctccctgttcttgctgaacctacactggtctgctgcaggggactggaaagatgatgtggaagaatgagttcggatttcagctgatttatttcagggaaacgaaggctgggtaaaagtcagatatgcagaaatccacgtactcccaggcttaactataatatagagaccctgtatttctttagactcaatggttctgagaaggatccagaaggagccctcaagattaattaccatttacaaagtccttacctcaggaccctggcaactgaatccctccttccagctaccagccttctggaacagagaaggcagcttctgaaataggtgctttccctctctcccactataagccacagtgtttaggatgaccactgcttccagattgtgtgatttgccctggcaaggaaatcctattgtggggggaggaaatgaggcagtcgtgacacaaagtgatggatgagccttttgcttagcagagagagagagaaagccggcaggctgtgcagaactgagtggctcttgggtccaaagggcttccccttggccaagtcccaccccaaagcccaggaagtccacagcttggcgcccagtcaaggcaaaaacattcctcaggactctgacaggctgggggatggttcccaccacgaggatgggggaggggaaggaaacacgcgggggaggaaatgaccacaaagaagggggtgagggtaagaggtggggagtgagttctcagtgccctgagtcccttttagagagaaaggttgaggctggactcattggcttgtgaaggacttgcagcttcagagcacatgacttctgggtcacccttctgctcagggtcatccctgatgacccaaggtgtcctctggaggcttgttaactcaatctccctccttacgcaggggctgtggttgagcttgggagcccctgagtggctaaaagctggaattgcagttgtgctgggggaggagcccatcgggtctccctctgcctctccacctccgcccctccctttccctctccctaagcccaggactctggaaatagcacctggtaatgggagcgctgacagatgctgagttataggagagcaaatgtcctggctagagtcctcaacattctagtttgatcgcttttgggctgtttcccttgaaaacacgtgccccagcaaggattgaaaaactacctattggtactatgctcactacctgggtgacaggttcagtcataccccaaacttcaccattacacaatatacccttgtaacaaacctgcatatgtaccccctgaatctaaaataaaagttgaaatacacacacggaaaaataggtgccccaggactacttccattgtcttccataaattactgtttaacatgcccctgggtagtgtgcttcctggctactgagatccccctcctagggctccccggcttgtagcttctggaccattcactgtccatgacccctatgaccttggagggagaaatggccccacaataattctgattttaaatttacccctccctacctgcactacttagtcctagttttcctcctctgagccttgcccacaactccttccccaagtcagcctccaaccttgaatgttccctcacccccagttccctacccaatcccccaatcccacatctcctgtaggggataggagtgaggtgaaaaatggacaaagcttagaaatttttccaaggaaactagttccctctgcatggcttcctttgacctattttctaactttccctggttagcccccttgttccatgtaccaaggcttcccactggactaatttttgctgccccgccctactcctccttcctccaacatgatctcctggggctcttcccatccagggaaaatgttccccagtgctgagagagggagagattccattttggaaactatgtcagcttgaggagtccgagctcttaaagagacaactagagtgttgctggggaagcgggtagtggtagtgagcaaaaagcagctcacccacccagaggaggccctgttcccatcacccagcccataattagggcattcttggctcttgtctggaatgggaggatctgagtgctctgccaacatcatgaagaactcaacgggaaatggagttggagtagaggtaaccaactttgcagctggaaattaaaattttattcaactccacccccaagtaattttatttgatgacatccttctcttgcatttgtctcatcgtttgattgtgtaatccttagccagggagctatgtagatatgaaatcattttaaacagaggcagctgcattcccctattgtacctgagccctcatcagctttcctcctctcaagctgctgccccacattcaccctgaagggggcacttttgttcagtcgttagctggtgccagctgaaagcgagctccaggaaggaaacataacaattggtcacatgttggggtgagggttctcgcaggggctgctgggacagggaagggaggtccacgtggagtgggcggaacgcgctgaaagttttggcggggctagcagagggagaaaaatacccaaatttgagttgtgatttttaatagggggaaaaaaaaaaggcaaggagggtgtgtcctaccctctgagaggcccccgcagaggggagcaggagagcagcacactagcatcctgctcgcggaagcctggaacgcaggacatggtttctgccagaaagagctgagccaggccaggctgcggagctggaagcctctgtggctccacgctggcttcccatcccccatcctcccggagaaggcaaaggtggcctctccaactgtggtgtcctttcagtgtcacaggactggggtaataccagtcacacaactccagtctctatttacctttccgagagcttcaggaaaccacccagatgaatcctctttccctggggagtggccaaaacaagtctcctcttttttctacctacttctgccccactgttagctggaaaacgtagctttatacagtcataaagctgcaagggaccttaaagatgatttatttccattttattttttggtctgggaaaaccaagcccagtcaagtgaaaagtcttgctgcatcctctttccacgacataggcattcccttcaaagaatgtaggtcatagaaatggaattctgccattctataagccttagaggggtggtgaaagtattggcttttaactctttccatactcttagccagaaggcaaaaagaatggtcattatctcattagggacagaattgcttagggaggcccgacactgtggctcaatccggacacggtgactataatcccagcattttgggaggctgaggtgggcggatcacctgaggtcaggagttcgagaccagcccggccaacatggtgaaacccccgtctctactaaaaatacaaaaattagccgggcatggtggcaggcgcctggaatcccagctactcgggaggctgaggcagaaaagaattgcttgaacccaggaggtggaggttgcagtgagccgagattgcaccactgcactgtccaacctgggtgacagagcaaggcttcgtctcaaaaaaaagaaaaaaaaaaaagacttaaggacttgatttatggtcctaaacacagttttcctaggctccctcacagctggcaactccactttgcccctctgggcctttgagagctcccttctttacatttcttagttcagggatcaccacagcttaaaacttaatggtttggaaacaagaattcctttcccttcttagaagaccttctcttctcaggtttcagttttctggtggtttagccaggtcatcctgtgtattgagatcaagatcagacctccaatccaaaaattccagctttggctttggtggggaaaagcatgtttacttagtctggagcagtgaaatcctagactttggatttcagagctgtaaagtttccagaaaaaaaaaatgttgagaccaggcacagtggctcatgcttgtagtcccagcactttgagaggccaaggcggatgggtcacttgagcccaggagtttgagaccagcctgggcaacatggtgaggccccatgtcatgtaaaaattagccaggcatggtggtgcatacctgtagtaccggtgactcaggaggctgaggtaggagtatcacttgagcctgggagttcgaggtatgataatgtctgtgaacagctactggactccagcctgggcaacacagccagaccccgtttaaaaaaaaaagtcaaccaaccccagttgtagagtcccaagcagtggttctcaaacttgaagtacatcagaatcacctggagggcttgttaaaacaccacgtgctgcatctcaccccacagtttcttattcattaggtctaaggtgggaagccaagaatttgcatatctaacaagtttccaggtgatactgaaggtgctggcctggaaccacaattgggctagagaggaagaaaacatataatttattcatggaattgccagctggttagtcttagaaatttgacggtaaagccctccttctccctcaccccactttctattgatcaacaaatgctgccaattagtaataatgtgataactacattatcaagcattactaggtgccacatgctatgataaacattttacatggattatctcatttaatc

SEQ ID NO: 64767 - DNA, 3057 bp, Homo sapiens
aaccccggaggcggaggttgcagtgagctgaatttcaccattgcactccagcctgggcgacagagtgagaatccgtctcaaaaaaaaaaaacgtttttttcacaaggaattctgaggacttgttggctcaattgcttggacataaagacacacatacatgaagctggagagataggaagaagcgctcaacacagaacaccctaagtatccctactccctttcaaggactaaatcccttcagagatttcctttgcttcagtccttcaggagcctcccgaagatgctaggagtcgtttaagaaggctggaagatggccgttgggaaggaactgttggtagctggcaatacttcatcccaaggaggcggtggcaatagctccctgggcagcagacatcatggattttcctccctctgggaaccagaggtccctccgtttctggtttgaatcccttagagacaaagaacttcattctctcccatacccgcgtgggactgctggggaggagagggggtggaggggttagacttctacccccatgaaacacccgcgggctcaaagaggagcctggatcctgactggtccaggaggcgtgcggggccgcggggcccctccggcttgggccaggcgcgttgccaagatgcccggggaaggggccgcccggcgcaggccggggacgtggagcgctcggggcgctcccacgtaggccacacattggccgcctgtatcctccttctttcctctcaactccattctctcgcgcttttttcccggggagcctccgctttccccttcttcccgcggccgccctcgcccttcttccccctccagaccctcccccggctcgcccctccctcggcagcccaccttcaccccgctcctccgcgcgctcctcggtcctcgcccctcagccccggcctcccctcgccggcccccggcccccgcggtcccctccctgcccccctcgaggcggcggcggcccctttcacaatagcgcggcccgcctccctcctctcggctcccggtgcactcccgcccgctcccctccccgcgcatgcgtcctccggttggcggcggctgcggcggtggcggctacgagcggctccgtttttttaaagggaaacgctgaggcgccgggggtgactgtgggggagggggaccccgagccgcggagacccccgggagaggcgacagaccccctctcccggagtaggagggctttgggcggacccagccctccaccccctcctgaggaggaggggggggaaatggaggctcggggcggttgaggcgagctccggggcggggggccggggcggggaagggggggtgcggggtggggagacgaggcgggcccggccgggccagggggggccgaagcgagctccggggatgagctcgggggcggctgggtgcgagctcctgcctctgaggcgaaggcggcggcggcggcagcagaggcggcggcgaggcccccatgggccggcggcgggcctcagccgcggcctccacgtctccgcacgccggcgggatggcgcccgggccccggaggagccgcgctagcggaggcctgctgccgcgctgctgaggcgagcccgccaaactcccctcccccccctcagtcctcgaccccccgcacctcgccccttccccaccccctcctccgcctcggtgcccggcgctgctccggaccactatgaccatgagatccgcggtgttcaaggcggccgcggcccctgccggcggcaatcctgagcagcgactggactacgagcgggctgcggcgctgggcgggcccgaggacgagcctggggcggccgaagcccacttcctcccccggcaccgtaagctcaaggagccggggcccccgctggcctcctcccagggcgggagccccgcgccttccccggccggctgcggcggcaagggccggggcttgttactcccggccggggcggcccccgggcagcaggaagagagctggggcggttcggtgcccttgccctgtccgcccccggccaccaagcaagccggcattgggggggagcctgccgcagccggagccggctgcagcccccggcccaagtatcaggcggtgctgcccattcagacgggctctctcgtggcggcggccaaagagcctacgccctgggctggggacaagggtggggcggcctcccccgctgccaccgcctcggacccggcgggacccccaccactacctctgcccgggccgccacccctcgcgcccaccgccaccgccgggaccctggcggccagcgagggcagatggaagagtatgaggaagagccctctcgggggtggtggcggctcgggagcctccagtcaggccgcctgcctcaaacagatccttctgctgcaattggacctcatcgaacagcagcagcagcagctgcaggccaaggaaaaggagatcgaggagctgaagtcagagagagacacggtacgggaggggttaatctgcattcgggccgaggagcgagttgtgcgcatgctcgggggaagggggctgtaggaggttaaggcacccccgggttaggggtaaaggaggttggccaccggcaaaggagtatcttaggcgctgggtctctgggagccaggctcacagacacgttgggttggagggaagggttaaagggcaacctctcagggggagggggaggggtttcaggtgccaaagggttaatttaaaatgacagccccagacgtgtgggaaagacgtttagtggaaaaagacgtgatctgtgaggggttaaaaatgaaagggtggggtgtaggtgttgtgtccttatggaagggttaaattaaagagctattgcgttagaaatgcacggtggaggagagggctgtagcaagcagctgttgctttcaccactgctgcagcatctttagataggagggcagtaggccttttagtgggcacaggggtagaggtgatttacgtggaatcctattttagttttcttaaatgatattaagagaatcactgcctttgatttcagacagcttttaataggaacctgagttctaatacatga

SEQ ID NO: 64768 - DNA, 2344 bp, Homo sapiens
ctttcagtgggccgagatcaccccactgcaccccagcctgggcgacagacagagtgagactccctctcaaaaaaaaaaaaaatattttactcagggaagaattctatgccatggtggcctttgtttgataacatacattattaacgtgcactcctgtaggtgcactaaaaacttagctcatgcactttgtatatccttataatggtccaaagaaaacacactgattcttttcaatggtggccaatgccttgccaaaatgaaataatttccataaaccttaagaaggaaataatgtcaggattttgaatcaacatctgtttctactgaccatttatttttaaataggttctaaaatcctgacaagggcagtagctcatgcctgtagtcccagcactttgggaggctgagacgaaaggatcgcttgatcccagccaggagacaagcctgggcaagagcgagaccccatctctacaaaaaacagaaaaattagccgggtgtggtagtgtgtgcccgttgtcccaactactaaggaagctaaggcaaggaggtcacctgtgcctgggaggtcaaggctgcagtgagccgcgctactgcactccagcctgggcaacagagtgagaccctgcctcgaaaaagccaaaacaaaaccggtaatactggcatcataccagcctgcactttgggacaggtgatggctggggtgggaagaaacgtgaagaggaaatgagaacacagagaaaacgctgcaacaagaagtcctctggcttcactgcagacaactggtttctccttcgcccgttatcttaaacaaggctggtgcagcaaatctgacgcagcactacagcttttaagatttaccttgattcgtgattttaccaagcaaaggaatgcagtaaattgacctgcttcaaacgtaggtagaagtgagaaatggaaacagaaaaccatgaaacagccctagtgttgcagtgaagctgtgacaggttgactccttccactcgggaagcccaagatggccgggccaggaacccgggaggctgctgaagtctcaattcccctcgccctaggcctgcccaagggaagtcaggagccgcgccacgcccccttacatcaccgatagacgtaatccgggtcggccgcaaacgtgccgcaggcctaggccccgcccagtgccccgcccctcccccaacacacacacacacacacacacacacacacaccccaacacacacacacacaccccaacacacacacacacacacacacacacacacacacacacacacacacacacacacacagcgggatggccgagcgccgcacgcgtagcacgccgggactagctatccagcctcccagcagcctctgcgacgggcgcggtgcgtaagtacctcgccggtggtggccgttctccgtaagatggcggaccggcggcggcagcgcgcttcgcaagacaccgaggacgaggaatctggtgcttcgggctccgacagcggcggctccccgttgcggggaggcgggagctgcagcggtagcgccggaggcggcggcagcggctctctgccttcacagcgcggaggccgaaccggggcccttcatctgcggcgggtggagagcgggggcgccaagagtgctgaggagtcggagtgtgtgagtgcgcgcaggcggggcggggtggggaccgggcggcgagccggccgggggcggggtgtaggtgatgctaggtagtctgtgagttgatagtagatactgggacttttttttgtttttgagagaaaaggggagttatcccaatgcgagtttgcatccggagttccaagggaagaagaaggattgggggtttctgggaggatggtagagccgctggagatggaaagcggatgttttattcagaagtcggggctggagggaaggagaccagacctgccttggctactacttgataaagatttacctatctctgtctccctctccaaccattttgtgctgaatcttcagcttttcacccacatttctttattgggctccccacctctggaaatcacagaactaacccatgtcttctgctttctttcaggagagtgaagatggcattgaaggtgatggtgagtagcatcttttaccccattaggacaagagttttttttaacataaactcaggtcatctatttccaacatcgacattctcacacactgtcacggatttagggccacagagtgcctttttgtaacatagtggttaagagcataggctttagcagtatagtcttcagcaagttaccctctgagcctgtttctccttttgtaagtggggactataattttatccacgttgtaggttgat

SEQ ID NO: 64769 - DNA, 1077 bp, Homo sapiens
ctctttgaaatgatgctgagacccggttatcccttgagccaggaatccttccccattggtaaatctctgacttacctttgcccttaatttcttctgcttagaacccaagtcccttactgtttccctcgcggtcaaccccagcgcgcgagttcaagcctcgtgcggcgcgggggcgagccgaggaagggtaggggcggggactgggcggggactggaggagggggcgcggtctcggttctgccaccttccccctcttcacggccaggagcgcagccgccgccgccgccgccgccgcgtcctctcagccttgcgctccgcccgctgcctctgccgccgcagcgcagagccgggcgcaccggccccgcagcctgcccactcttcgggccgcgtgccggctgcagccggcatggggggttgctgagagcgagcactcctttcctctggcacctcccccggctactggccactggactctggccagcgaggctcggcccctctggcccccagtctggcgcctggcacggccctctactctgctcctccagctctgagcatcgtgtcttcgccgccccccccgcccgcgcctgggatacctgggtcccccggcgacccctaggagaggggcgggggggggcatgaagccgctggagaaatttctgaagaagcagacgtcgcagctggcgggccgaacggtggcgggaggtcccggcgggggtctggggagctgcggtgggcctggagggggtgggggacccggcgggggcggcggtccagccgggggacagcggtcgttgcagcggcgtcagagcgtgtctcgcctgctgctccccgctttcctccgggagccccccgccgagccggggctggagccgccccctgagaggaaggaggagagccggcgggggtcgcggaggagccgggcagcggggggccctgctggctgcagctggaggaggtgccggggcccgggcctctcgggggaggggggcccctgcgctccccttcctcctactcatctgacgagctgtccccaggcgagcccttgacttcgccgccctgggcccctctgggcgcccc

SEQ ID NO: 64770 - DNA, 1247 bp, Homo sapiens
cagtggcctgcctctgttgccatgacaaccggagcttgactacttggcctttgcaaggttggccgaggcgggttcttcgttaactcgagattaaggaaggatatttaggggggagggtgtgtgtgtgtgcggcggattaaagacgaaaggagtatattcaacaatgactgtttagctcagtggttctccaccttggcaacacgttagaatcacctgcaacaatttcctgatgcctaggctgcaccccagaattaaattataatttccaggggtgggaaccaggcatcatagtatttaaatcttgccaggtgattccaattgcagctaaagttgcaaacccagcttttagctggtaagcggaattcctgtgaccttcctaagatggcgtccactcaaccgcttccgcctttacgtgggccggcagggggcgggcttcccaggggcgcatgcgtctcgcatctctccgctccctgctctctcctcctttttcccccgcctccattttgttcgcggacgctggggacggtgggagcagatccatttccgggttggcaaaaggggcggtggcggcggcggcggcggcggcggcggcggcgacggcgagaaagagcttgccggggggcgagcaggacaggacgaagccggagtgtaggcggcagaggattcgctcccagagcagctgcggccaggtcggaaagaggccggggcggctgggtcagtcgctgaaatgacctgcggacctgagtgggagggaaagtcgcggggaggggggctcggggcggggcttgagaagagaggggggcattagaggaggggccggagggggagaggggtcttgcgggtggggcctgaggggcggggggccgggggactgtatcggaagaacctggaggagagagggcgtggggaatctggggaggagtggtcgaatattggtatggggcgagcggggactggaaaaatggggaggaacgtttttgagagacaggcaataagggctcctgaagggttgggtgagttaaggcggcaactctgtgaggaacgaggtaatcgtgcgcaaaaagggagacgggaacggaggacctgttgggaacggctaattagcaggatgctgtgggtgaggagtccagtgtgacattttggggattgagttaggtgaaagctagtgtttgggaagatggctcgggaaactgcttacactagagggaatcttgagagcgttctttgaaaaggaatcagaatttagt

SEQ ID NO: 64771 - DNA, 713 bp, Homo sapiens
ccagaaggctcaaatttgtcctttgattaatcacagttggttagtgaaatttgtctttctgttgtcaaatgttatgaattgttttggttcatttttttttttttttaactcaaagtagttctcaaagcagaccctctgcattggattagcgattataagtctcagtcctaatttgatgtaaacaaaaagcttcttttgggagtttttcagggaaaggaaagttgttttaatttgaattcacctaaatggggctgttcttggaaacatatagagaactgtttgtattctataactaagaaatttggaatgagttaaatttcatttggggaaaaatagaaaattgctaaaccacactaatttccaggggagttttttgtttgttttctccatagtgattagtgaaaaggaagaagtcaggagacctggatatgaggcctaactctgcactttattcctgagtgatcttgggcagttgccctttgatgagtcagtttttctcatgtacatgtaggcactcccactcctgggacttcagtgtcctcaccataaaatgggaaggataatacatcattatgtaataaatgtcattgataggagtgtgtcatgcatacaatccctgtggagccagaagaaagcttgagagccactgttggtagtcaacactaaagtcagtcacttgatatagatggtgtttctttgatttaacttttttt

SEQ ID NO: 64772 - DNA, 664 bp, Homo sapiens
tgacctctaaccttgtatagaagtttgctttgtactttgcgaggttgagcattagagaggtaaggaaagtgcctagcatcatacctggcgcacagaacccaaaacggtaggtatcatgtagcagttctgaaaatctagcccatcaggatgatgcaaatgggtactttaggcagtgagaaggggaaccacatcttgacacttccagtcgaaggaagagtgcgactgcgcggcagcaaagactacgcctcccagcgtgctttgcggcgggccggcccgctttacccagagtcgccctgccgcaatcgcgcgtctttccaccgaggccccggatgtagattccctcccccgttcagtggtcgtggcctcacagcgactctaagacttggggctctctcattggctgtaactcttccactggattggtagcaaaaaaagaggcggtgcccaaggcgaaaggctctgtgactacagccaatcagaatcgaggccgggctttggcgggaggtgggaacgctgtggccattcggatttggcgcgagcgcggctggagtttgctgctgccgctgtgcagtttgttcaggggcttgtggtggtgagtccgagaggctgcgtgtgagagacgtgagaaggatcctgcactgaggaggtggaaagaagaggattg

SEQ ID NO: 64773 - DNA, 706 bp, Homo sapiens
ctaacccagaagcaggggggaatcctgaatcgagctgagagggcttccccggttctcctgggaaccccatcggccccctgccagcacacacctgagcaggtaggaccatgcacaccccttcccaattctttggccgcctttgaccccggcctctgcttctgatctagccatttccttctcgccagttctggctttccccatccctcctctcccgtcgctcactgtagtcctgggaggtgggagcctgggaacagtggggtgtctgaaagctcagagccctctgcaccctccagcacccttcctgcatttctcctgaggcagttcccgttctctagataagagtggggagtagggggaaggtctgcccaggccccacgcccttgcaccctcctttgcggtattgcctaataccccttcccccacctcacctagactggagaattggcaagtgctgaggtaacagagagaggagagagccagagagggacctgagctttcccaagggatttctttcttgcttcctcacccaaagagctcaggactttgcccctactccctacacaccttgtaggggaactaatgtccccttccaggttcatctcacacttgggtggctaaaggctttgctagagggtagtggaggttgtgagcattttggtgagcttttcctctaggaaagttctttcagcttagagcccccatccat

SEQ ID NO: 64774 - DNA, 4370 bp, Homo sapiens
cacatgtctgcctcaatctgggctgtttcctcccctccaagatatttcactgtctctgggctgggcgccaggactcctgggtttccctgcctgtggtgcagggctcccctgcagggctccagagagtcgcttagctggtttccttcctcctttgtggggagggccttcccctagggctgggaggtgtcaggaatcccaggtgggacaggggtgggggcacagtagcctctggcactgtagcaccccagcttctccctcctagcctctgactcagcttgggggcagcacatgcccagcctggcaggcatggcctattcttgcctccaggcttctctctttacagaagcctacatctcctgctctcattttttagtttttttccccatgatatctgcaggtggctagtgaaatccctggttttggggagcaagggactaacataattgaggctggggcactattttgtcttccctccagttgggccaggatgaaggagactgtcacaaacttccccaagccaattccttctgccctcaaaagaccagtcagtggagccaggccctgccctttgggtgcccacaatgtggttggcactgatttgtcagaaattgggaaggtttccctctagaccgcttgcctcctttctcctcctcccgcagggtaggggcagctctgtgattgcaggcacttatgggcaggcctccccctaggaaaggggtgtgggatgcccccaggatggccaagttggcgctagccccaggctggagtgctggacatgattctgacctgggagttagtgggggtaaggcagggcatgggcctccctgcccccctcatttcctgctctttgggcagctgtgggcgagaaaggctgcagggactatttttagttggtcagtcccctggcaggagggacgtgcagaaaagcacggggcaggcagaggggctggccaaggtgagggtaagcaggcaggcagaggagtgaggaagggccagaggggcagaagacagcaaggaggcatggggagcaggggcaggaccttacccagaggggcatgacccaggtagatgggccgggctggactgggtggaagagtcctggcaccctacagggttttctttatccagctggactcagagctggaaggggttttagaggctacctaggcaatcccttccccttgcagagaaggaaactgaggcctagagagaacactcaatcagtcattggctgtgttgagacctgaacccaggccctccctttgcaccatttttctgttgtcatggttcctcaccacagctcagtgtgcttcccttccctactgcagcaaggaggaccacgagccaggcacacctggtccattttcccatctgcttttttgtgcagggtctctgaaaatcccagcttggtttgtttataagtctccatgtggaaagagtctgtgtccaggctagaaggaggtcagagttgggtttgtttgggtggcctgtggccactggtgtgaatggagctgctggacaggctccagcaggctcacaggctggtgagctgtggggctaggagacaccttacagaagggacgtccagactccccagagccctttgtgagccctcctcctgccctgcccaggacctgtgggtcatggtggttgtttgcccatctccccaacaaaagaagggagcagggctgaggagtggggagattactactggcttctgatcgctagtcagaaggaggccccctctgaggcctggaggcagggaaagttggggcaagttggggtgtgtatggggagaaaactcaatggagaattgtggtccctcagaattcagtctgctttctgtcttctgcctcaggctctccccacaggccaccatgctgcacagctgcagggggaaccattccatagactatgatgtgaatggcaccccctggggttgttcaaggccctgcctgtgtagccacacgtggtgcatctgtctcccaccttcttccttcaaattagttcagacccacctggaaggaggtgttccagacaggccttaatccaacaccctctcccctaccctgcctcatgccactcaacatctcctattcctctgctgcccacccccaacgcaccaagcaagtcatggtgcaccaccaattgtggttcagaagcccctccccttctctctacgcagtttctgtgtctcttgggggctgatttatcataccccccatcaagcctactgcagtgtgtgagaaatcaatagtgcaaatggattgaggctgtttagcctgtcaactctccttgggccccaccaactcttctgggacttgcggagttgctcagtccccttctggctcaacatacacatatttagtggttgtagccagagcactgagcacaggaattattctttctgttggtctctgtctcattctctctcatatactaggctggtcttaacatgacaaatactcttgaacatttattttctagcttgggtggacgggcttaaagggcagtaggctgccagccagaggtagggagggaggcaggtgggtgagggatatggcgggtggaggggtggggtgggggtggggacgagctggggaagggattgggtgacagcccaccccatcagctctggtaactcaatccctgcaccccaccctcccaatttccctcctgctcaacaacttcagcagctgctggcagaagcaaggctggcagaagtgtgtttgagtgcatgtgtatatgaggggagagggtgagaggggctgtgggggcagggagtgctgccaggacatgttaaaggagactcacagcctgggtacaacttgggtggcaggaggaggtggggcaggtgggagagtgggtggtgagtgatgggcaggctgcagtgggggcagggcagcacaggggtctcacaaaacttgttggcactggagcggggcctggtgtggtgggggtgggcagtggtgagggggcaggggctggcacagacattgctggccccagaatgctgaggcccattctttgccagggggcgcatgtaaccatggagggacagtctgcccctgtctgcaatccttgggctgtgcctgctgggcatcacagtcttggtggtgactaagtcacttctgtcctggggctggcaaggtgccaggctcagctcttctcggtaggtgagtcactgccctggcatctcccccggatgcagctgagtcacccagccatgcctgctaggcaggtgggcaccaggcttgtggtgggggtggagggctatgtgtgcagcccccagtgtcttctctgatctctctctggcatgtcctggccccacccataaacctgcagagccaggcaaggatggcgcttctcccttgtgatccactaaggggtgaaggaaaaggtagcagggcacagagtggagtcatacatgtttgatttggagtaagtaggggaggaaagagttgaggagggaacattgattgggttatatgtatatatatatatatatatatgcttatatgtgtatatatatatatatatatatatatatatatatatatatacacacacacacacacacacacacgtatatatttatttattttaacaaaaaagacacagggtcttgctatgttgcccagacaggtcttgaactcctggagtcaagcaactcctggcgtcccatcttggcctcccaaagtgctagaattaaaggtgtgagccaccatacctggcctgggtttgaatcccagccctgccattgacaagctgtatgacgttgaggaaggcaattttctttttgagcctcagttttttcatctctacaatggcaacaggagcctgccccttcaggactgtgagaatcaaatggagtgggactattaaggtacttgtgggaggagctccttttgggatgagctaggaggcttgggaggggaagaggagtcagctggagctggttccaacaaactcccgcaccatggtcttggagggccaattgcttctcatcatctcttcggagtatcacttaatgctgttcttcaggagtttccacaggctgtgagaagacagccttgttgtactagaagtgtgggccctcctagggtgtctcagagctatattttatctcttttgactactgagaactgccactggccctggtacctgtccagactctcttccttcacttcctctagtttgaagagggatggggctcagactcctcccccagcctatctcctgtgtgcagggaaacagtaggccccaaggagtgtccttcttagagtgaggcgccccgagcctgtggcttttctctctctgctagtttcctgctgctccctgggtacccttctctcctcctgcatcagagt

SEQ ID NO: 64775 - DNA, 2736 bp, Homo sapiens
ttgtacacacgggtgctggtcttgtttgagtgtctgacccctgcggggggtgggtttgtgtgtatgaatttcttccctcatccacacatggggctacttctgtgtctgtgcagaagtgtgccccaccctctgcttcatgcccttgtctgtgcacaaatgtgtttggatgtacttgttcatgcgtggatgtgcatacatgcgtcggggatgtacacatccctgccctgaatgtgcacgtggaaatgcatttgtaccaggatgcctgaccctatgatggcaggtgtacctgaaggtcgtcccacttgggaggcagtgtagctgtgtgcatgcatgcttgcattcttgtgtccatgagccttcccctccagcctcaaggaaggaagacaggtaggatctaggttgggaggtgtccgtgggcactaggggcgggctggcgctgactccagtcctgggctggttctcacctgggcagagctccctgctgttggcggggctcaggctggaaggcccttgggggagcgcggctggggggtaaggggttaagcggtggcgtccacatctgggagccattggcgcattcctgccggctgagcgcatgtttgcggatgaatctggacaggacagggcgggaggggctgggcgggaggttcgcaccggcggacggaaatccagacgggagcgggagacagctccggcccagcaggcgggaaggggcctggggaagcgcggcccagcactgctggggcagtttcccgtgcgccggccctcagggcaaagggtcccgccatcctggcttgtcctaccttaccatggctcttgggctaaagccagggacaatcagatacttcaattctagacccggctctgcaaccggtgcgactgtgcacaaaacccagtgcctgctcttggactctctttccttgtttgtaaagcggggtccgtcggaccagtgggtttgagagctctgccaccgggtcaggctgagagtctcctcactgggctggaggcctgggagtgcagcacttccccttccagtgggaagttctgtgggggcacttgtggccacttctctgcctgggaacagggcgagaggggagtattctaagcaattctgcttccccctaagcccgccagtggactgctagcgatggggacaggatcctcccaaacagagctgcaggctgggaggggggtcatgactgtattggggactgggggtctctcagatggagggtgattcagatcctgtccagctggaacatgaaaaagagctttcctggcttctccagacttgttcgggagagagaagcttgagtgtgagtctttgagcacggaggggtgctcctgggcgcccctactggaagatccaaaagtcttgccctttgaggagaagagtactttaagggggctgggagggttgggttgagccagggttcctaggacccactggagctgcagaggtgtttggggaaagaagagatatacttgcgggagatctactcctggactctttttttttttttctttttcttgcagctgagataattaagatccagggaagggaagtgacttggtcaaggtcacacagctctcagttccagctggtccctagaagaggattataattataggattcaggggcttgacagctagggcaggagtcaccgcactcacttccatattacgccgccgcctcacttctcagatttaggtgtgggtgtgtgtgtggttggggggaaaggagtgtaggataccacacgctgcggtcttctccaccgagcgctattttcattctttccgcagaacctcaccccgttcttgctctgaatcttcggttctgggtctgagggagggattctcccggattcccacggtccagtcttcaactaggagtggctcctttaagactcgcccttcccgaggtctattaaggagaggcgggggcgggcgtgagcctgtagatccgcccctgactggtgattggtcggtgggcgggcaggggcgggcctgagggacagggcctccccctacctctgctccgtaccctccgccccttcagtctggggctccgggtaaagtttcagcctccgcacgtgactcgctatggccgctgccatcgccccgcgcccctgagccgcggccccctggacggctcctctcccgggaccccgcaccctgatgccgagcagcaccagggcgccgggttagggcagacgctgtgctcgctggcaccccgaacgggttgcttcccccgctgcgaggtaattcctcccctggggattttggggagcccctggttcccgcaggcgtcggggccccatgtcctgccccagattggtgctgcgggaggggactgggtaccgggaggcttccgacgggaacccggggtttcctgggcttcccaactcgctgccgccgtgtccagggtgggggagccccgtctgtgagtctgcctgcgccgtgtcttcgcgcgcagccttgaggcgtctggggccgtctgctgcgcgtgtcccccgcgctcgagctgttgcagaaccgccgctgggaacttctgttctttttctctttaatgataagcaaaacaaaaagacttgaattcaaacctgtttggggagagatcggatgctcaacggactagccccctctctttttccctcctgttatctgagctgccctgtggtttggggagaatcagccagggggcccactcccaccagagggagccggccgggggcc

SEQ ID NO: 64776 - DNA, 1239 bp, Homo sapiens
tccacccacaccccgaatatccctttccccacatccctctcctccatccgagggaagcagaccctgggaaatgggtaattctccctcctggccccgtcaacagatgttgccctgggtggggtgaggcaagggaaagcaggccgactgctgaggggcaccaaggtggtggcaagaggcatggggatggagggctccagttgcccgggcctcccctgtgccaagctctggtctgggtgctttccaggacttcctgtctgaaatcgcacagctcgttgttgaggtaggcagttcacaggcgagtaaacagatgcttagagaggttaagtgacttgcgtaaggtcacccagagtggcagagctgagatttgacccttccgacttctggttctttctcccatcttcgtggctcagaaagctctcacctttttctctaggtgtgtgactctggggtgtaacgcgtgggcagctagggatgctgatgctggagaagggatcctggcaccttctgagggtgagagcggccccagtgggcaggagtgtggggctggttgcaggtgctctagccccctacccctttttctgctgtgcttaggctaggctccatatattggaggtgtgggcctgtggttttctctctctcaggggagggtgcccgtgggcagtggaggtggctggcatagggtggaggttggatgtgggtagtttgttttccctctctttggtactggtttcgattctctgccgaggccttctccacccctggggtgtagggggctggggcccaggtgtctctctgagggtcatagcttctgatggaccttctgaggcagagtctgtgcccttttgggcccaccctggtcatccctacccttgcccatccctgttctctggtctttctggcccttggcctatttctgtgacctttagccctcctgcggctcaaggccctccccagggagctgagtaaatttgcactgaaatttgcaggcagagctgggttaggctttttggaggctctgataggggtctggggaggccttccagccttgccctgtagtgtgtgtgggtggtgggctgggggtgaggtgggggtagtggggattgaagtttgattcaatttcaaactccactggggcagagttgaggtggctgtggttttctcttctctgggagcaagggtgggttccagagggtccaggctggactgactaaactggcctcccgacccccaaaggctggg

SEQ ID NO: 64777 - DNA, 2859 bp, Homo sapiens
attatctgtgcatatcctctggtgccagctgttcaaacagggtgtggatctgtattcacactggtgaagggggcatctggcctttcatcttctgcccacctcccaccccagttcatgtgttttgcttctgcagacagaagtatgtgggtgaaccttgagatcaatctctccttcattgcctgggggtaggaggcttcctgggcggtccttgccctcctacacatcgcctacccctggaccatccatgctgttaagcattggaggtgatacctaggagtccttggttcccattttcctattagtgtgtacgtaaatgggcctcctcccagggcctgtgggacaaacccgtctggggtgctggggcttggatctgggggggaagtggtgtaagaggggccccctggcttaggagtcatttttctgagaagtgccaatgctttagggaagcggcttttcctccccctccctcttcccccccagcacacgttctctgcatcttgacctcaggtaaccctcactgggggaaggagggccagctgcccgtttctgctgcagtgatcccttgaggtggcactgtggaccctttcccctcaggactgtgggtgagaggccctccaaggttctgggctctgtccctgtctccccagcctggctgtgctatctgccacccccagcagtgtctgggccctgcttccaggtcatctctgccagccaggcatggtgccagctgtctgctcagctgggtgccacgggaaaatctccggcagcccaggttggggagctccacggggaatgcctgtgtgcctgttcttcagtgcccactcacctgtctttcttttttctgcagcatcacaggacatggccccctcagccacctagctggggcccatctaggagtggcatcttttttggtgccctgaaggccagctctggaccttcccaggaaaagtgccagctcacagaactgcttgaccaaaggaccggctcttgagacatcccccaacccacctggcccccagctagggtgggggctccaggagactgagattagcctgccctctttggacagcagctccaggacagggcgggtgggctgaccacccaaaccccatctgggcccaggccccatgccccgaggaggggtggtctgaagcccaccagagccccctgccagactgtctgcctcccttctgactgtggccgcttggcatggccagcaacagcagctcctgcccgacacctgggggcgggcacctcaatgggtacccggtgcctccctacgccttcttcttcccccctatgctgggtggactctccccgccaggcgctctgaccactctccagcaccagcttccagttagtggatatagcacaccatccccagccagtaagtctgggtgtgggggctggggtgggaagggactgtggagggtggcaggcctcagagcttgggctctgggcacgtctgttctgctgtgagtggaaggcacggtgagcgacaaggtcttctccagttggggtgaccatcatttgaggtcttaaaaatgaaagccctatggcctataggctgatcatggtggttgtgtttgaagttgggggtggcagagggggagatgaaaccatgctgttctggcctgcagtggccctcgcacccctcttctgtgctctgctgttggggccttataaatagctccaaggactggacacacaggttggaggtgggtaaacaaacctcttgacatttgatggaaatggcagctctacctagagtgagagcagcacaccacctacgccccacccccactcagtgcctctgagggaaagggcttgaaggagcagaccgaggaaggctggctggaaccccacctctccccctgccagctccacccccggccatgctaggatgtgcttccctttgtggggaggatgagagggaggggcccacggtctagctgggtggatagggtgagtgtcccaggaggggacacttggcctggactctggcctcggacgcatgcatggtcttggcagggcctgtgttttccttgcctccaccctctgccatggaggtcacttgttggctgggcaggggtctcagtacccttcgccggctggccgagccaggtagtgggaggtggcggcagctctggccagctggcagagtccagggctggggcctgccaggccgcttacagtaactctggcccccagggcccagctgggcgccaggccagggctggggggaggagggagccggggcctggcctgggacgggagagggtggaagcagcagaatgggccatgggctgctggctggccggctggtcagctgctgacctgggaaacgtgtccccacctctcctggccagcagggactgcacaccttgccctgtgcacccaccacccctctcacggctgctggcaagctgcctggcaccactgccctatgtgcctggctgggctgggtcagtgcccccttctcagtgtgggggcagcgctctctccccggagccagggagtctctttgtccctggggcaggccctggctgggcgcctcactgcccgcactggctgggtgcccaccaccaccactgcttcctggatcgcctcctctggcttagctgtggccccctccctcccaggctccaccagccaccaggagcagggactctatgtctgtgtttctttgtgttccccgccctttatgccctggggccagggggcaggcaggtgctgcctcagtttctcctgccaccccttatcaaaccttcatcttctgtttctgctgtctcttctctccacctcatataggagtatgggatggatggagtctggggactctgattctggtctggtcct

SEQ ID NO: 64778 - DNA, 6274 bp, Homo sapiens
gtgaggataaaatgacaacatatataaagagccaggcttcttctagaagaatgtccttgggtagcatgtacatttccatccttccttttagagagtgggggtaataggataccccctcctccaggggtatcccctctttctagggacctacccaagctaggcctttcttccagtgaaacgtgcatcccgagggcttctaggatgaagtagtccactggaaggcaccagctcttccttttatctctccagagctggacagtgcaccaggggccggtactggttccccagctaggagacaccttgggcggggctttgctcgccggaagcacgcagagcgtggggaggagggccccctctgcctgtgtttgtgccaacagcacccgcgctgccgcgtcgggttccggcggccggagtcacacatgatgtcacagacaatgacacaagccggtgtctcattccgacacagcgtccgagctgcacaatgtcacacccgggtgccaaacacttggccccgcgcgacccggccctacgcctcctgccgccgctctccgcgtctccgggggaggtggcccggttcggccgggcagggggctggcgggcgagccccgcgggcgggctggcgagcgggtgatgtcacgggcagcggtgggtgggtcactcggaggtgaggcgccgccaggcgagttcagcgagagttcagccgcattgcattaggcaaatgaggcccggcctgggtgggggtgtgtgttaaggggaggacaccgggaccacccccctcttccccgccccaccacctcctccaccacggcttcgctcggccagggactgaccaaaccttgggggagcctgggagccggaactggtacaagggaggacgcccgcccctcttccgtccttgtcccctcgcagccccctcctctccctgtactcggcgtccctctgtactctgtgtactcctcatctggagcctttcccccttcctgcttctctcctctcctcccccttcccaggctgcccccacttgcctgtccacatgccgcctctccctctcggttccctgcgtttctcccgctgcagccggacgcgccgggaatgggttaagccaggggcggtgcctggacggggcggggcggtggaaagggggtggtgcccggaggggagggggcgcgcagagctggggtgggggggccgtggcgcgtaccaccagagaccgagcgagtcgccagctgcccctggcctggcgggggcggaaccgcgcgggatccccacccccacccggaatcctcgccacggagaatccctggagaagccccggatccccggctgggaggaggaagtgctcgttgacccccagccccgcgctgatcccgcccccggcctgcggacttggggagccgctgtactctgcctcggacgccacgagactctagacgggagtcccctcgaggtgaagccgctgagttcccgggccccgccaggcttccctgggagagccgacggaccccccctcccagcacacacaacttccctgcttttcaccgggactggcggagcggccggcggacttagacgcggggacttcagggcagggggcgccccctgcccgggtcaccagtcggggcgaggggacgtctcctctcccccagctgctctgctcggatggcgccgccggctgagtgacgggggcggcgcgcaggacttcccagctcggacctcttgccttcgaggggaaagatgtacgagagtgtagaagtggggggtcccacccctaatcccttcctagtggtggatttttataaccagaaccgggcctgtttgctcccagagaaggggctccccgccccgggtccgtactccaccccgctccggactccgctttggaatggctcaaaccactgtacgtaccggcctctcagtctgctgttgtagggggtgggagtgggcggtagggcttccactactactcgggggtgagagtcccggggtgtagtggaggtcctgtctctacctttcacttaacccgtgttgcccttgctggacaattgaaccctcccggccgcaccctccccccagtaaccctaagtgcaatttgtgttagattagggctgaggaactttgagagttccttctttcaagcaacattccttcatctcttgtttcacttcttccaggagaaatgaagcccaagccccttgcccccagtttatatcttcttgcctggaatccaacagcttcacagcaggctggagggtggggtaaaggtcctgtctgtgtgggtttgtctgctcccgggggaaggcccccccgccagatcccacttgccaaagcccgagggagagccccttcctgtgcgacagctgctgcccccagcccttgctcttgcgtcattagagtgggtgtcaggggagcactcagtgtctttggtattgacagtggggtgtggcagaaaggggcaacttcatcagacacccgtctgccatcctaaccttccatcttggcaaggggcactgggtccttatggggttgttgtcctggccccagacacttggctgtcatctttgaggctttcatccccaggagtggaggggagaagctgctctggtgagaagaatccctctccccctaatcctaatccggtttgttctctggggaatgagtttgtttttgtgggtctggggctgctctggaaatgaggactgcatcccttcccagctccgccaccgagtccttttgttaccctgacttcacttggggatagggccaggtcctgggctgtgccttcctaagaggggcactgatgagaatcctagcatcctggcagcctggtcactttctctccttgttgccccctgcctgggtgcaggctcctctgggaggaagggctctgtgcacactcaggagctcggagcaccagggtgtacacctgggcattttcctgcgcagctgtgaggcagtgtacactgggtgggcgggagcaggcgcaagggggttattgttagatggctcaggtttcttcccctcctgggctttgggctctttgctggaggggaagctcttccgtggaggatctcccaccttcctggacctgctgcctccctcctgcctgccagggaggaggggtggagtgggtctcgggggggccctggcagattggagaaggttgaagggcaaaggacttaccccacccctcttgctgggagaagagagacctgagatggacagacagcccacctctgccctcccagagccacttctatcccagcttttcctattgtcctgcccccgaccatttcctctagggccgaatctgctgtgtggctgtagacacaagagggaaggtatcacccttgactttggaagaagagagagtgagaggatgactctaggaccctttttctcattctcccagtgctggagcaagacccccctcccctagggggatagttggagcagggctgccagagtcaccccttccactgccttggccaccttctccagagggctggagagaagctgggatctgagaccttggtctccagcccctgtctcttcttagcccatggggacagctcagctcttcctggcccagaactggagagggaggaggatcacagagagtaggacaggcagtgtattggtgagcccttcccctaaaccactggacatggggaagtggagacctgtccccacatccattctggggtggggtagtagacctagaggcctgggtttccagttcccgtagtctgagcgtgggtgtgcatatataagtgagtgaggtgtcagtggactcgggtcctgaggctgtgaggttgggagtgatgggggtctgggggcttgccttgaggcacaggaaggacccggagtctgagggtggcaactagactcagtctagaatatgtggggccaatgccaccaccttggaagggtccccttgggtgtgtggaagtccgctggtgactggagctgcctccagccccctcttggggaattctccactctcccctttactgccactgaaggtgggaagagcaggttggctctgggaggaggtggcctgggttctgcagggccctagggacattgcctccctccccagagccctcatttcggtgcattagaggacaaggggggtgcacaggatgtggctccccatctgtctcccaccaatctccgccactcacacctccgcccgctcccagacgtccaagaatgtgaagcacgtggatgcccgtagttgggggagggggagacgcttatcaggcggccgctgggctaggggccttcttccgctgccgcggtacacccagagctacccccgcctctccccgggaggaggaaggacggtacagagggccctacgccccctccccaaccatccccaggggctgcgaggggagctgcggaggagcgggcgccagctggattgggaggggagccgctggccgggggcccggctgatttcctgctgatctcctccaggaaaccggccccttgtgcgagcctgcgaacggctcgggggcgtggggaatccggagtggagcgctctgcgccgcccgccctgccaggatggggagcgagggaggggcaccctggcagcgtcggcgggaggggacgcctggcttcctgggtcagttccagtcctctgttgggcgctggaactttgagctgagaaggtgtggtccttctctagcccgagtccttctgcaggaagaggagagattggtgggctgggcctctggggagggaggttagcagggatgggccaggcccgggcagtccctcccccgttggtgtccctccccactccacctgtgtgtgcagggagttatggccgtgtcctaactcttgcagaggctgtgaggattccggagttccccacacctccggccttggtccttgtacctcacctccttggactgctggctggaggcctggggaggtggggcatcgagctctgggttcaaagggcagagcagggaaacctcagagctgggttacctgggtgacaggtggggatgtgctggaggtagggggcaggctatgttacagcctccaaggcagtcaagctgccgttgggtgggctaaaaggaggccttgcccagcctaaactgtagtccttgcctctggtcatctctcccattctgccaaaaaataattttaaaaagcacattctctcagttccgtaaacaccctctgttggactttgctttagctccatgtttttatggctttttgccctctagtctgtcccaggccttagagctgtttacctctcatcctggtatcccccatgactccccataccctagctcccctcgtgacatcccgctctgtacccccaaagctccctcagtcctttctccctctccagtctggttcattttagaagtggggccttgggagaggcggggcccagggcaaacggtggattaggaggggtggggaggtcagtgccttcttcctctgcttgtcggaatgctgaccaagattctaggccatggtccccccaaccctccacatacccccttgcccttgatctcccctccccccaccagtctggattgtctattgttactgcttttacgtcttggaaaaagttagcacaacaaagggctgctttgtggctcaccccctctgcctcctggcctcacccaggccccccaaccccgcccccccagcagctgttctcaggcctctcagcctgtctgatttgcttgtctggcctggggagaatgaggtgggagaaaaccaggccagggcagttggtgttggagtgaagagcagacggcggtggggaggtcaggagagaatctgctgggctggggatggtgtgggcatcaactgtcccattgctgcaggctggtcttggggcagggaaggggatggggggccatagcagtgctggtcagccaggctggcctgggaagtggtgcccaggcactactaagagccaggaaagccctgccaaggttgttggcctagttccctgtcatcagccgcctagcagcccccactgtgtctgcaggtaaggggggagggtggtagcacatagtcagcccctggtgttcccatgcttccttcctctgtgccccaattttagggccatgtgatttggggctatgtgactcatgtctgtaaggtgcttgggccaggagctgtgggcacctttaaatgccagccagtctcatgtgccggagtttggggtagggctaggtaggattgtggaatatgggaggaggcagggatctgtctacctagggaggcatcctca

SEQ ID NO: 64779 - DNA, 2924 bp, Homo sapiens
gccatttcaatagaattaaagcttccgaatgataaacgtcttgtcacagctgcaattttctcttcccaaattatccccccactctccctctccctctcccttctctcccctgcactttattgaatttgcagaatcgacatgagtgatctccaaattatgccagctacccccacctcgctaccccctccctgagcccctcccccaccctcccttcctcccgcgtcagcagccaccaccaccagccctgtgagtgattgtgtgtctggataatcggctggtaacgaccccatcgcttctttaaagccgagtggtgtgtgcggctcagcgcccctggtgatttgtcagctccccagctaatgggccaagagattctccccgccaggtcccccactctcaggctggggagccctactccccacttgccccaggagctgctcagagccagtcccaagggacccccagggagactgcagctgggagggctgggtgagtggaggcgggagaaggaccttcctggggaaagaggaggcagagcacctaggagggcaccgtcgcctggagtgtgagctggagtagacgcgtgggggatagcatgcggctggctatggggtggggtggggggtgtgtgcagggccacagctgtgctcatggggcttctggggcagaacttgatgtgtgggttgggtgggcatggagggctggagtgcgtggcaatgccttgcctgcccgtgaacgcgtgctgtgtgcgcgtgcttacaagcctgggtgacctcctcagcagctggcagctctctgtcaggctgggggtggacgaggccctgagcagcctgcagctgccctcttaaccccctctgccctccacagctgtgagaaacgaccgaaacaagaagaagaaggaggtgcccaagcccgagtgctctgagagctacacgctgacgccggaggtgggggagctcattgagaaggtgcgcaaagcgcaccaggaaaccttccctgccctctgccagctgggcaaatacactacggtatggctttcccccggcctgcagggtgggatttgcccagggccacagggccaggatgggcccctctcaggcaccccttcttgtgccaggcaagatctctgcgtccttcccttcccctctcttctccctcctcctgctgcctcttcccaaggagctcccaggaagtgaaggctgggtagagggcaggcctgtgggggctggagccaggctgagaaggggtgccatggagaagaaggccctcactctccctcctcccccagaacaacagctcagaacaacgtgtctctctggacattgacctctgggacaagttcagtgaactctccaccaagtgcatcattaagactgtggagttcgccaagcagctgcccggcttcaccaccctcaccatcgccgaccagatcaccctcctcaaggctgcctgcctggacatcctggtgagggtctgcaccctggcccccaggcactgcccctgtgtcctgggtagatgtccttccagccagacagccaccctcctaaatgtctgtctgcaatcaacctgtccaaatgcccaccgcccaaatgtctgcccttcctctccccatatgtccacctgtccactcgtctccctgtccactcagccacctagcagccagatgtgcaggagctcacctgttcacccatacacatatccagccacccagccatccatccatttagccagtaataaagattcacgtaggagccaggtgcagtggctcatacctgtaatcccagcactttgggaggccgagcgaggcaggaggatcacttgaggctggaagttcaagaccaccctgggcaacatagtgagaccttatttctgcaaaaaactaaaaagattcacctaggatcctctggccagtgttcgagctgggtgtcaggaacccagcggtgaatgcaccaccatcccctctcttgaaaaccttccatgtgaggcaagagataagtcaacagaggttgcaaaactgtgatcaatgcttcctggagattgggggagggcttgtgactgcttgggcctgaaggatgatgtctcagaggaggtgacatctaggggtttgtagagggggaggtgagagggtagccctaactcaggagcaggaagtgaaagacttgctgctgtgaggccatgctgagctcaggggactgccgggcactcggtgaggtgagcccgagggtagactgggctggaggctggatgcagggggtgggggcaggaagaggtggtgggaactgccaaagcctaggctggagggagcactctccttcctgctgtccctgacaagggctcggtccacctgttccctcttggtcacctccagggtggggaacctgggatttgacgagactgtcatttctttttatgtttttcttttttgagatggagtttcactcttgtcacccaggctggagtgcagtagtatgatcttggctcactgcagcctgcaactgctgcctcccgggttcaagcgattctcctgcctcagcctcctgagtagctgggattacaggcacccgccaccacacccggctaatttttgtatttttgtagagacggggtttcaccatgttggccaggccggtctcgaactcctgacctcaggtgatcctcccgcgtgagccggcagactgtcatttctccatgggcacctctgaatgttgaggcgggtgatgggtgggaggtttagattgtgctgcctgcaggggctcccatccccatgccgtggatgcaggaggtgccgtctgggttcctgcaaccacattcaagccaatacacatttactgagcgcttgttgtgtacctcatcctgggagctgtaggcagcagcccagtgttccttagctcctagaaattctaggtcccctctacattctttgcatg

SEQ ID NO: 64780 - DNA, 1459 bp, Homo sapiens
acagtgcttatgtgtccgtgtatgcacactcgcagagagcccacagggggaccactctctctctgaacacagagagtgcctgagaatgctggcatcacagttgtttttgtccccagtaaaacaaccactctccaccttccgctctgttctccccctcgggtccactctctctcagggtcctggtctccttcctttccacctgggtggtggcatccaggacctgcctgagttcattctccgcccccagcccggcctgccccaggtgccgccggcagccactgggaggcagtacgaggcaagtgcgatgccgcccgcgggccgtccccacaacgcgtctcctgccggggcaggtcccgcgacagctctggtggaagcagcttccggcttctgcggtgcgggcggaggtggcggggtccggccctcgccgtccagtccgcgcgaggcggtgcccgcccctagatggccagatctcggcggccggtggccggtgacgccttgccgcggccgctgccgcactcgcggaggctggccggcgccgggtgcgcataggccggcggggcgcacggctcggggccggggcgccgggagggcagggccggtggcggaggtggcggcggcggcggcgggagcagcttctgcgcctcttcgtgtgcacggttgcagcggttgtcacgctccccggcgcgcgggcggcccttccagagcaggtggcccagctcggctacgctgagcagcgccgacagcagccccaccgcgaaatagaagagcacgaagacggtcttctcggtgggccggctcacgaagcagtcgaccgtgtgcgggcagggcggaccggcgcacgcgaagtgcggggccacgcggaagccgtagagcagcgcctggccgcccaggaaggtcagctcggccagcaggcgcagcgccacgctcagcaggtagcagcggcgcgcgcggcgggcgcgcagggcgcacggcgcgcactgggcctcgggcagtccgggggcgcactgcgccgccgcctcagcgccgcccgcctccttgcctgcccggtgcatggagtagacgacgaacagcaccgggggcgccgagagcagcaggatgtggaagagccagaagcggtagtgggagaccgggaaggcgcggtcgtagcaggtctggcgacagcccggctgcagcgtgttgcacacgaactcctcttgctcgtcctcgaacacggcgccgcccaccgtggccagcaccaggatgcggaagatcagcatgaccaccagccagaggcggcccacgagcggcgactgcagctgcacggcgtccagcagcgagcccaggaacgcccactcccccatggcgctggggacgcggggcggggagtcaggggatggggcaagtcagggacccctgccccttccaagcctatcggggtggggtccgttggaccttctctgacttcagggtgagtcgtgag

SEQ ID NO: 64781 - DNA, 675 bp, Homo sapiens
atggtgacggtcgtgaaggggctcaagaaccctgaaagcgactaaacaggcaggaccccacgagaccacccccgaccaagccgcttctccacagacgcgcgtcggttaggagagctccacttgaaccttcctttagcccgcccgaagcagaccagccaatccctgactcgctctcaccgtctccgtccagaagaaccaatcgtagcttgccttttatatccacctatgaacggctgagttggccggggtttgtttgaataaaccaatcaggttagggaggcgggactagagaggcttcaaaaggcaccactcggcgtcatagcggagagattgacagggaatctggccaatgagaagggctcacttgttttctcgtgcggaaagcttggaagagatgggctttggaagcgggaaggggtggcctgaggcaaaagtgtgcaggagaaaagcaaaggatgtttattctccaggaactgccaatctatttaagatccctgaaatctaaaaactgtcctctgttctgacgttgttagcgaggggaatgggagccttagcttcgttttcctgaggaaactgagtgccggctttctggacaggcagcctggctgcttggttgaagcgaacagattctggcatctgcctcaaccccgccccctttaccctcgaattcatttt

SEQ ID NO: 64782 - DNA, 3583 bp, Homo sapiens
cttgcacattgcaagtggcaatctcccaggcctgcctccctccacgagtgggtctgaatgggcctgagaggcaaacatccaagaaggaggaagaggctcggcggcacctccctccccgggagttctgctgattccatcttggggaagcagggtggaccagggcccaaatgcgccctggggagattgcgggggcgggagaggttgcaaggggcaagtggcaagagcctgttaacgtcttagggcctccaggcctttctgtgcccctagctgtgcctgtacgctttaccccacctcaggaggcttggtctccagcggttgaggctggaagcaccggggtgcggtggaaagggctctgtccaggaagaccggatccgcagagccgggagtccgggctaggaagtccctttctcggtgggagactgaggccgccttggcggggcgggacgagactcctccgaggtcgggaaagggggccccgcagcagccccttggcttcccttctcccttgcctcccctccggggctccggttcagaggcactctgggcgcctgctacagcttccaaactgcgccgcttccttcttcggcagaaaaggactttcagatgcggcggcggcggcggcggcgactcaggacagcgccccctccccctaacggccgcctctccctctccccctcgcccgccccggctcccccacctctgggaaggcgctgggggtgtggccagggaccggtataaagtccgggggagccggtcccgggcagccgctcagccccctgcccctcgccgcccgccgcctgcctgggccgggccgaggatgcggcgcagcgcctcggcggccaggcttgctcccctccggcacgcctgctaacttcccccgctacgtccccgttcgcccgccgggccgccccgtctccccgcgccctccgggtcgggtcctccaggagcgccaggcgctgccgccgtgtgccctccgccgctcgcccgcgcgcccgcgctccccgcctgcgcccagcgccccgcgcccgcgcccagtcctcgggcggtcatgctgcccctctgcctcgtggccgccctgctgctggccgccgggcccgggccgagcctgggcgacgaagccatccactgcccgccctgctccgaggagaagctggcgcgctgccgcccccccgtgggctgcgaggagctggtgcgagagccgggctgcggctgttgcgccacttgcgccctgggcttggggatgccctgcggggtgtacaccccccgttgcggctcgggcctgcgctgctacccgccccgaggggtggagaagcccctgcacacactgatgcacgggcaaggcgtgtgcatggagctggcggagatcgaggccatccaggaaagcctgcagccctctggtaaggtacccctggcctcccaattccctcctgagtgcgctcccttcccagcggcttcttccccattccagccgccctggaaggcccttaaaaatcccctatgagttgaagagaaggcaggtacgtggcagggcccgactggcatgggacaggctcatcaaggaaactgctaccgagtccctagcagcctgttgccaccaccaagggagactgtcccatcgctccatctcaaacctccaagggttgtctgtttgataagggggtcccagtgggaggcctggctgctggtgcaggagtggcagattaaggtccagttaagtcagctgtctagggccagagaactggaggatggtggtggggtgtgtgttggggaggatgagggagtggggaaagctttctgttcctgatccaggccgagggtgaaatcccagtggtctggggagccagggcctgaactttttttttacatggtccagtggtggagtgggacatacaaattagagggactttggcgttgaggggcattagacttgcccttccccaaagcccagagccaggtcaccttgttgtttgagaggcagtgggaagacaggggtccctctgccaggcctggacacctctgcctgccctggtatacaggccccctgttcttttctccaggcaggtaggatttgaggtggtagaaaagtcttggctcctagccgagagctgcaggagcctcatgtgtgtgggatagggaatagagaaggggccagggcgccaggggagagaaacagagagagagagagagagagagagaaacacacacacacacacacacacacacacacacacacacacacagagacagagagagagagagagagagagagagagagagagagagagagagagagagagactctgagaaggcccttgccctaacctcattcttacactttctttttttgtttctcagtttctccttagactctcagtctcttttccttctttctcttgctcttttgttcttcctgatttgtctctcaacctctagtttcactagtcatgctctcgagttctgttttcctcagtgtcttctgcccatcgtgcgtttctttctccaccttattctgtgtttctgtttcagttgctctgcttctctccctctctttctgttgctgtttctctgtgtctctgtcactgttggtctttccctgttactttgggaatctctctgtctgtctttctgtatctatgcctctgtttctcattccatctccgaccctgttttgctctcctgtgcctctgtctgtctctgtctcttttcctggtgcttgaagcttccattgttgcagtccggatgctgggactccagccccaagcttcctgtcctgggacccaaaccctccacttcctcaatcctctgcagcttgtcagccgaggagagcaggatgcagggaaaacaggaaggaggtggactccaggggtctgggcctcgggcctctctgcccttcctgcccctgggtagggagagatgggtcagcagaaaacattctaggagaaatgccagcctggcacccagcatatctgggaaggggggtcctgggggagaaagtcgctaatcttggggcagagatgccagtggcaatggtagaggaggggtactgagactgggagggagcaagggccgagcccttgggttcgcggggtacaacagagtcacgttccctttgaatctccatcctccaccagccagagggtatctggcaccagataaggatggctggtagcctcctcctctctcagcactttgaatgcaagacagaagagccctcaaagggctgggtaggaatacctcatcctctggttgggtaggaatactccatcctgtagtggaggaaaataagatcccctaggggtttggggagggcatggcatgagaattttgtggttgtcctctggatataatgcaaactggcctccaggaatatctaggggctgggtgtggaggttcatgcttgtaatcccagcactttgggaggattgcttgaggccaggagttcgagaccagcctgagcaatatagccagacccccgtctctacaaaaaaaaaaaaaaaaaaataggcaactgcagtggctcatgcctgtagtcccaggtatttgggagtctgagatgagaagttcaaggttacaatgagctatg

SEQ ID NO: 64783 - DNA, 3219 bp, Homo sapiens
cttgggaggctgaggcaggagaatcacttgaacccgggaggtggaggttgcagtgaaccaagattgtgccactgcgctttagcctgggtgacagagcgagactctgtctaaagaaaacaaaacaaataaacaaaaaaaacaaaaaacggtgtcttggaatggggtggctttaggtcccctttggatgacacagccaaggtctgtaatgcccctccccctttcctccttgccttgtcctccagcctccagccatgcaatggatgcaggtatctggagagagacgagggaagcctggaggtacctactgagcaagctatgcccgtgccctcccacacctcctagtcatcatagaagtaatcccttgctgtgacctgggccacatggcaccatgtaaaaggcactctctagagttctgctgcagccctgcagggtctgtgggtgagataagacgaccaagcccctacccacccatctttttagccttacacagtcagtaggccactgtctgctttaggtcccaaggtttgggcccactggcccgcgaatagcttggtcgagggtacctgtctattttttctgccttttccttttggggctgagtgtcagcaggtggctgggggagggtggccacttggcatgcccccttctttggctgctatggtccagctgcctcctgtttgccccaggggcagatctcccctttccgtctccagccacccctgcctgccctcctgtcacagctttccatgtgctggccaggttgtggcttaacaccactgaggccaccagagatgaggcggggcgtgtgcatcaaaagtccacacctctgcatcctggtactgatcctagactcatggaatctgggggagtggacagcggaaagatcagcgtttggacggggagttcctaagctgggctctcagtccctttgggacagggttagggaacaggcaggctgggttaatttttagtcaatgcagcaaattctgcccccctacttcagtactgggaatccagttatgtcatgggaacaagggcattcccagaaattctgtgccttgtggggagggggagggaggagcatggccgcttcccatttttaatttagtactggcaaagctagcagtattggtgcctcgggtatcaggagtctttccacttaaagacagagtgctgcagagctaagtctctcctcctccccttccacccagtctacttcattttcctaatttttaaagtggggagggcaacaggacctgcctcacagggttggggcgtctggcatcgggtaagagctcaataaattgaagtgatgaggaagatggtgatgaagaagctgatgctgggacttagggaagcggtaggacgagggagcaaatttggggcaacattcagaggagttgagaggggtggggtggcctttggtgcattttgctgctgtcaacatgggaagaacaggccaagttgccttatctgttttttattctgaggctggcagcatgacacagctgttgggggtgataccccttgagccagacctcagagaaagggcctggtacccagcaccagcggtcttggcttctccagctagagtctaggggaagagggaaaagacctttctagcaggacaggtgggtgaccctctggatcacagctgaaacttctggtcgggatggctgggcccactcagttcatagcctaggtgtctctcgagggccaggggctggcgttggggagaaattgtgagggtaaaatcaggcaacaggaaagaggaaatcctctggctttcgccacaaactttgcagccggtggtgccaaagccgtgtggcctcttctctggcgccttcccttcctctgctgctggagcaaagaccgaggtttcccctatagtcagatgtcaactggcttagctccaagctgggcgctgtaggaggaccaagcctacttggaagtcccatctcccaaacaagctttttggaggtcagacttttcaggggaataggtctgactccactcctgctcagaggggaacccacaggcattggaatttctccagagggcactaccaggatgagtagcaccaggtggctggaactcttgtgtgagcagggaaatagcaagtatttagccagttttggagatgagaaggttaacgttatcaagagactcaatgctataacccttacccccacaaaaacctggtgcttaggggtggatcctggggtggctcttcagtctgccagttaagcagggttgggcaaggaaaagttacagattacatggaaagtcaacaaaccacggtgcagagaagctgttgaagtcagcgtgccctgccctggctctgtgtctctgaccagggcagggtcagagtgcccaagtgcatgtgggtaaggcacatgtggatgaatgtgtgtctggacacgtgattgtttgtgtacacttgcagttcttgagcctgagcctgtctgtgtgagtaggcaaatacggatttaccctgtgtccccatgagactaaggagggagctactctccctatctggtgggtgctactccgtgtagacatgaactggggataagtaggatggctagtggggaacctaacaagggagaagccaggcagtttgctggcttagcttttcgtaggtaaccctctgatgtgacatggggccataccaacccaagagcataagccatgcctctggactcaccctgtgccccatgcagccctaggcttcagtgagcatacctaatcctccttaatggtaaacatcccaaatatccattaataatcctctgagggttagttatttgtgaactttgactcgtaaaagctcagcactgtggctcacgcctgtaatcctagcactttgggaagtctaggcaggaggatcacttgaggccaggagtttgagaccagcctgggaaacacagtgacaccctgtctcttaaaaaaaaaagaaaaggccgggcgcaatggctcatgcctgtaatcccagcactttgagaggccgaggcaggtggatcacgaggtcaggagatcgagaccatcctggctaacacggtgaaacttcatctctactaaaaatacaaaaaaattagctgggcatggtagcgggcgcctgtagtcccagctacttgggaggctgaggcaggagaatggcgtgaacctgggaggtggagcttgcattgagccgagatcgcgccactgcattccagcctg

SEQ ID NO: 64784 - DNA, 4144 bp, Homo sapiens
ttttttgtttttgtttttgttttaagagacagggtcttgctctgttacccaggctggagtgcagtggcacaatcatagctcactgtagccttgatgtactggggtcaagcgatcctcctacctcagtcttctaagttaggaccacaggcaggtctgactaatttttttttttttggtagagacagggtcttgctatgttgcccaggctagtcttgaactcctggcctcaagtgatcctcccacctcggcctctcaaagcactgggattacaggcgtgagcacccagcctggttctaattctttgaggtcttccatttcctttttctctccactccccagttccagcttacacccctgaaacacggtgactccatcctcaagccttatggctttgtgcaaggtgggggtgtggagggaggtgatcactggggcagcttaggtttctttggctggaggaattccttgggagggtctcaaaggaagggcctggatcccagatctttctctggttcctaaccgagggctcaggatccatctccttatggtccccttggcacagtcctcgtcttctgaagtttatgtttcttcttttgctgcctaccttggccagggggtcttgctatagtgtcttctctttggttgactcttaggaacttgatgtaggactggagtcccctctggactgtccttcttgggattttaaatgtgcagaaggatggattatatctgtctactctatttatttcttcccttttattcctcttttctaagccagctctccaccgtaacaaaatcttcttccatccttggtgaattttattaataacctttggtgtggaaggttattgataaagactttctggttagattcctccttgcctggtttgcctttatccacatatttctccccacaccccccaaaccaggagaatgaaaagagaaccaacccccccagctttggctaggcagaaaaataccatttgacccagaggcagctctgggatcgctgccacgcatggaggaacctgctaactcctcaggaaaaaaaaaaccctgacgcaaaccagatgtaacctcctgtccggctgccaacatctggaatgctggcaggggctttgcactcaggccggcagcgagctgccaagcctgagcatttcagaggtggctctgatctgcagagaggtcttccaacctctttctccagctcagccctgtattctggttttgactgcttggagggaggagcagtggttacagttctgggactcaagcatggggtttttcttttttaaaaaaatgtattttattttattttatttttttagagacagggtcttgctctgtcacccaggctggagtgcagtggtgtgatcatagctcactgttaacctcgaattcctgggttcaagtgatgctcccgcctcagcctcctgagtagctaggactacaggcacatgccaccatacccggttaatttttaaattttttgtgaagatggggtcttgccatgttgcctaggctggtctcgaactcctggccttaagtaatcttccctcctcagcctcccaaagtgttgggattacaggcatgagccacaatgccccatttggatggagtttttcttgagctcagatagagccttcaggagatcccacagaggggttgaaggtccagcctcatcactcccgtctccagatccctggtgccctggttctgggcaacccctatggactttggatggagtctgaagtctaagaatgggaaacttcgaggtgggggactgaaggaatgtgtgaggctgttcttgtggtcctggggccacacaggttgtgttacacacacactcacacacacactcactcttcctcatgcaggcggatacactaactcccacttctctcccactcagccaatggggagagccttttgggctagagttctcattgctcatggaaactctgattcaggccatttggaagagggcgagcagagtccacagccctggggatcccctggctggctcagccagacaccgaaaaaatcaggagaggcaacagggagaacgatcagatggagaggggaatggtgggagctgaatggaaaggggacaggatccagcagggggtccccctgcctgcctcagacctccctgcagggcccaggggaccctcctgccatctgggcagctgcagctggtgactcatctgagcgctggcctgagtggggtgagggacaagtcaaggacttcaagaggaatattctcctgagagatccaggggagaggggaggaggtagggggctgctcttgtttcttcccgctccccaggccccctgctcttctccagcgccaagccgaagaatccccaggaaggagaacgtgggtgggaggctgggttggtgtgacgctctgacctcttccggtgctgacctctccttatcgctacctgaatacagacaaggacgagggtgaccaccccaacaacagcttcagcccctgtagcgcccatgaccgcaggtgcctgcagaagcacttcgccaaaattcgagaccggagcaccagtgggggcaagatgaaggtcaatggggcgccccgggaggatgcccggcctgtggtaaggacctccgatgcacaaatgtgcatgtgcatagacacacacacacacatgccccctgccccccacatgcacgcacccacacacaccatcaccaccagatctggggcgtgttcattcagcacacattctagggtgactactgtgtgcaaggtgcaactagtgtgagtcatcaggacccagagaaagcactcattcccttccttgggattcctttcctgcccatcagttatatacatcggggcagcttaagtgattattaaatactgaaaaacttctataccaattggtaaaaagcagttacccaaagcgccctggggtttcttggccttttttggattccccaccccagaccttctcagtaaccaaagggtaatgctggccatagcagggggcctgggaccctgctccagggtctggctaatttcccttctgaaggtcttacaagttgtcagttggaagttttatctgtcccttctgcatagaaatcaccccctccctggctttctgcataggttcccacagcccctttccccacagtgtcccctcacttcccacccctcctttgaagaagctctttggctcgagaccctttcctccacgtctctaccctcccagtgtgtcctccagacccaggcctctctcttcacctcactgggtcctgcccagcccctggggctcaggcctcctttcggggccttcagttctcacttagctctgaccccaggcctgggcctcctgcctctcttccttctgctgagcaattttgtcttcccctcctccagccccagggctcctgccagagcgagctgcaccgggcgctggagcggctggccgcttcacagagccgcacccacgaggacctctacatcatccccatccccaactgcgaccgcaacggcaacttccaccccaagcaggtgggtctctgtctcccgctggcttggccctggactcagctctggggcatttccggcctctccgcaggatggtcctggatggagatctcaggaaggggaaactcctcaaccccaacccaaccccttggagcctccctaaacctacctcagcgtcagaacctcactcattttggagatgaggagactgtgatccagagaggagtaaaagcgccgggctagtccagagtcatagaacaagttaacagcagatcttgcctccctatccagggcaatttccctcacccctggatttcaccatctgtggtgcagacctagcaaccctgacaacctctggctcccaacactctctcattcactctactctattcgtatgagtaattcctcctgtcactgagtgaggtttcttctgggaatggagggccaaagtcatgaggagtcagggaggaaactcagcctacccctccctgcaaggcgagtagcaaaaccacctggggtacagcaagagtgaaggtaaaaccagattggacggttggagacaggcactttgggtagaagcagaggaaggagtggggcaggagagaagacacaaaggcagcaacttccctattcctt

SEQ ID NO: 64785 - DNA, 796 bp, Homo sapiens
gggcacagccctgactgcctcagaacttactgttttgcaaagacaaacattttatttttcatgataggagctgtagcagagtatatgggggcctctgccagcccccaggctgggactggggcctgtgaccttgagaacctcatctcacattctgcagactttggcggcggggcagtgctcgaccactggctgggtgggctggtctcagcctctcctgcaggcccagggctgaaatcataaccgtcaggcccagccttggccaaagataatgcaactttggcagggctggctgctgggagggggcaggcacttgctcctcgtagagcaagagtgggtttcttccctgaccctcccttccaccccggtagggtggtttccttaggaactcaggcctgcgggagaaatggttccagcttctggaggctgggtgggggtggggtgggggtgggtgtgggatagagcccagctcctccaagcctcttagggaagcggcctctttgcattcttgactctctgcttcccccgtgtggctgtgaggctggttgaagccacatagcagtagaggggcgtgtgtgtgtgtgtgtgtgtgtgtgtgtgtgtgtgtgtgtgtgtgtgtgtgtgtgtgtgttggagcgtgggttgggggagggctcagcaagacaggagctgaggcagaatcacagagagatggcccttatctctgcccccgccgcctaatatgcaacattagggcagctacgataccagctttggaatactcgcctatcaaggaatggaaagaagctgggctgggtgg

SEQ ID NO: 64786 - DNA, 615 bp, Homo sapiens
agaatgaccctttcttttcccactcccttccttcctcacgtcagagccaggcctctcagaccaagtctagatcaccgtgaccaggggtaagttatgtgggcctctcagaaccaaggaagttgttcttggctttgggacataatttgctgatttgtacacctcagttagatctgaaaagcaaatcagccatctgtgcccagaaacagataggcggggggctgggcactgccgtccttgggcttgccctcctggacctctcgctgtccttggaggaggggaagtgcagggctgctcttggaggcatcggtacctgtgcagcaatgacccaagctgctggaccgtctgtccagacgctggccaggagaagggcatccccggccagctcgtgtgcgatcctgcatggccctaggcccaaggtgagctcatgggatgagtcaagcctcctgctgagcctggcagctgagtaagaggacatgctgtgctctcacacctccctggccccaccgcggcatgcccacctttgtcttcccttctggggtttggcttgttgtcactgacaacatggggcagcccttttgcacacggcatccctggagccacgtgttaactgtgagt

SEQ ID NO: 64787 - DNA, 1594 bp, Homo sapiens
gccctgttttggtttatttttgagacaaggtcttctctgtcacccatgctggagtgcagtggcacgatcatagctcactgtagccttgacctcctgggatccagcaatcctcccaagacattgtgttttgcaagatcctctggatgtggtatggctaaagggttggggagctgatcaagtgcagagggcaggagcctagggtggtggtggtggagatacaggcacatgactggctttgagaagtacagtacttagtaagtacagtccaatatagtccaatacagtagagttgaatttgtccattcaacagtgttaaacaccatgactctaaggaccagagagccaggctgggttctgcctttaggcagctctcagtcttctgggagtgcaagttggaggcagattggccaggctgaaaatgcaaagtgctcagggatgttcaaatagcaagcatgcctcctggagtgcatgcccagaggaagaaggagcaccttcagtgggtgctttcctgcaaatactgtttgagttccaggcagaagagaaaacagggtgctgggagaggattcattagggtctccttcctgactcctcaccatcatttataggacttttggctacagggatcttccctgcatttcaccggggcctatagtagggctgagagtgtgagagggaacaggggtctccccaagtgcctggggcagcgagccttgtaggtcaggtgagggtggcatccagactgggctctcactctcctcttcctgcctctgactcattttccttggaagtgcattcctctgtaaacctgattactcatggagtctccgccctccacctgcaggcctgcgcccttccctgaggtgtctcagtgagcaagcctgagcccccacccctatccctgcatccccatccccaagtagggcctgggtctcccccttggagtgggagctccctgagggcagggcaggtatgtttctttgcttggcgattagggctcctccaaggccttgaggagggtttctcacccacaggcttgttgccaaccaccctcccgccacccctctgcccctcaaagggctctgagggatcctcctgttatatggagtggcaggttgtgggatgggtttgtggggctcctgctgaggactgtctagagggcttcacaccctggctgtggggagtatacatagtccctgagggtgcttccccatcagagcccactctgtccatttcatccaaagagccccaggtcgtactctctgctgtgactggaaatggggccgggtttaagggactgctgggggctcatggaggtcagcttgtgctctccagcctggctttcctgactcccgagggcactgacagcagtgctgtctcctgacagcatctggctccctcctctgccccatgcctgggctcctgggtctgctttatagacccgcagcagaactgcacagagagggtaagagctgccttctagtcagcagaagttcagttggaaagagactctgctgaccagcaccagggcatcaggggcagccccatggttggtccccagggctgggagctcacagtcacctgctccagtccctgc

SEQ ID NO: 64788 - DNA, 1024 bp, Homo sapiens
atcaaccacccaaaagggcctgtagatgtgagaagtggagtccagcacagagaatcccgggctgagaagtaggatgtctgaaagtccagcctcgaggcagcagagtgagcagttaacagtatgacctatggacaacagatcctgagttcgaattctgccttcaccactaagtgaccctgggcaagttacttaatttttctaagtcattagttttttcatctataaagcaggaattatagcaacactaagccttgaggaggtgagaggaagattaaacgagtcatgacatgtgaagtgcttagaccagggactagcacttggtaaatatgtagagtgagtggtattaccatttctattattcagacggagactccatctccatcagccctgcttctgtagtggctgaccacctcctcttctgggtttccacgtgagaccccaccctggttcttcagtttttcctgggatctcgtctctctgagaccaagaagcagtcttagctttgagatattgagttggatggtccttgaatgcccccttgtggacagctggctttctttcactctttcagctgaagaggaaaactggctgtgtgtgtgtgtgtgtgtgtgtgtgtgtgtgtgtgtgtgtgtgtgtctcggggtggggaagaaggtgggggaggcctccatgtttgcagacaaaacaggaaatagcacgtcatggcatctttcttgccggctaggaaggcatgggtgtatgggtctctgtacacttacataaacatggaggggagctgcatgtgctggtgtgcaggtgtgtatgtgggcatacacttgataccactctccttgttactggggtctctcactgggttctactgagacgatgtgattaatgtgatttgaaaaatgaaagccctgtgcacacacgaggacattgttatgtagaatagcttgtataaccattcggttgatcctttcactgatttggacattcagtcccacagttgtttattgagtacttactatgtaccgggtctcct

SEQ ID NO: 64789 - DNA, 1972 bp, Homo sapiens
taggaggaagtgacatttgtgatggttcatgaagaaggcataagatctgacaggtgaagatggctgggaggttatttcagggagaagggagagcccacgcaaaggtggaggaaagaagtcgggtgtgggggctacgcctgtaatcccagcacttttggaggctcaggcaggcggatcacctgacgtcaggagttcgagaccagcctgaccaatgtggtgaaactctgtctttattaaatacaaaaatttagctaggcatggtggcatatgcctgttaattccagttacttgggaggctgaggcaggagaatcgggaggcggaggttgcagtgagccgagattgcgccactgcactctagcctggtcaataagaacgaaattccatctcaaaaaaaaaaaaaaagaatcaaatcaggttcacctttaaagggaagtatcaggccagagttgagggagagccacaagcctgggcttgcctctcagcttctgactgtgggtcctgggcacattggtaaaccgttctgggccttggtttcctcaacgtgacgtggaatagcagcacccaccgctcatggtaaatggaatagctgctctggcttatttatagttgtgtttaacaaatagtttttcacttggagtgggtgggggcagggggagaggatcagtgaatcggtgccactggtggttcagcctggagggtggctgtggctgcctgtcccttttcatcttgtgcctgaaatgtttgggggaagaaggtcagtggtggctggaagcactaccgccttctcaggcctagctggctccatcccctgccctcatgctcacctggagggacggttatgggactgaggtctgtgtcattctggccactgtcatgtcataagctgctccaatcaggctggcaggagctctgcagcactagaggctgtgggctcctgggagtggaatgtgaatgcctgggaggccggcagccttgggccccatgcccacactggcacagccactcggtccagaagaggggcaggaatccaggtcaccagccgctgcgacacaggctggcttgccgtcccctttcctttggttaatcttccctatgaggagagacagagaggaagagtctacaggatacagctcattttgccagttttttcccaaagtccatcaggagggacgtgtctgagctgcccacttccttcggccagccttggaatgagagcacatgactcatggcctcacttctctagacctggaaggtagtgggagaatcagacagatcttggttctaatcctggctctgccacttattaactaggtaaccttgtgcacgttattaacctcttccagcctcagtttccttgattgtaaaatgggaataataacaccaactcacagtgttatgagaactggatgagctaatggttagagttaacatagtgaccaacacatattgggagcccttaaatatcagtttcctccctcccttccttccttccttccttccttccttccttccttccttccttccttccttccttccctccttccttccttccttccttccttccctccttccttccttccttccctccttccctccttctctccttccttccttctatctggggaatatgatggctgccttgagggcagagatctgagttgagagagctgtacgtacttagaggtggcctccttcatcatagaacccctcagaatcccaggccagaagactggagaacaacaggaaataggtgatctccaagcttcccacgctggctgtacccaatagctgatgagatttatctgaggcaccactattgttaaaaggaatgtagtgatctgagccccaggtgcagaaccctagcatagcgatgggagcgattacagcactcaccacctctggggagagtctgctctggcaccccttgctttagggcccaggtgaggctgagacaagcaagtgtggctacgt

SEQ ID NO: 64790 - DNA, 2134 bp, Homo sapiens
ggcctcagactccccttctggggtccttgagggcccctaggccaccccgaggggttggaggaacactttgtccattccccgtggcagatggaaggactccggagcatgtcagctgcagcctgggcctctgttgggtcctcggctctgggtctctcacaggcggccatcaaggtgttggctggggccttggtcatctcaaggctggagcaggaaaggacctgcctccccaggccctaagcttgaatggtgctggggacagggggcagcactcttctggcacggcagcccctcctccgtcctcttggcatcttgtccttaaagttcatcgttgcctcgtccgctaacctcctccccctcctttccgcctccatctccccaagtccttctcgcctctgcttttgcttccacggctgtttcctcacggaggctcagacaatagaggctaatgatccaactgctgagagcacaccctcctctagcagccagaaatcatctgttacccatcgcccgccctccctggggcccaggcttccagactgagaccttttccttccctcccacttcttactggaaatgagcccccgtccttccactcccccctaaccccccaggcctcccttagggaggttcaaggactcgtctctgactccacctatctactgggtacccctctgcaggggggaggcaggggctggtgcccacgaactctggaggcccttctgggagcacagtcttgccatgacctctctaggtcagctcagctccctgtgctggacacagacccggagaacagctcagcacgaggttaccaggctgacgttgcacagactgtgctggaaattacagagtgccttggagggaaaaacaaactggggtttcagttcccatggaaacgacatctatttgcagaggtgcttgcgtcagagcccgggaccctgtgcttggcagggatggggtggatgttaaaaggcagggtcatctgttgactgtctgggactcttccaggacagtgtctgaaatggggcccttacctttagccatgacaaacagctctttccacagaggggcctgtctgcctgggcatgtctctgcaatgctggggtttttgggtagattttaaacttatgagtcaagggtgtgggaagaccccacattcgccattcatgagcatttattccacgagcatgttttgacctatgatgtgccaggcactgggctaggccagccaatcaggagttggtctggacctgctaagtttggggcctaaagtctcccttcctgggaggagctttggtcagacaggggcaaagtggggacctgccagggaccacgtgacgtgggagcacacaggctcagcaatgccagtcccctcactctgtaaccaaagcaaatgccttctgtcctcgtgtgtcacaggggagtaattcctcatctcacggggaaagatgacccctaaactagccactgaggtccccacagcagaggcgattattccagctattgttatggaagagtgtctattgttaccctctctatcactttacactttacgaagagctgtacatccactacctcgtttaatgtaacactccagggaggttttaacaacatcacacctgttttcaaacggggaaactgcatcgagggaggagaaggcacttgtcaaggtcacacggatgataaacggtgagaccagtatgggaatctgaatgccggaccccctgctttgccccctcctccctgtcctggggcacctggtgaccagacctcccaccctggcaggcctccaaccagcccggctgtttcccacgcctggggaatgggaaccagctgtgtgctagtgcggtggggcatggattgttctggatctggtctcatggagactgcacatcagaaagaccacaaccctcaactctgctgctcacccaagtcacttcactcttccttgactcagtttccctctcagtaagttgacagaaagcctgtgaggggatctgagtgacttatgtcctataagaaatctgaagaaataggccgggcgcagtggctcacgcctgtaatctcagcaccttgggaggctgaggtgggcggatcatgaggtcaggagtttgacagcagcctgggcaacatggtg

SEQ ID NO: 64791 - DNA, 5743 bp, Homo sapiens
attgagcatctgtatgtgtgggctgtttgtgaggtgggacagctcttgtgagtgtgagtgttcttgggcacgaaatctgaaccctttcctcaccaccccaaggacagactcccttagcagctgcctatgcctgccaccgatgcctatcaaaggagaagtgtgttttatttttggcgcccttgccgcctattcccatggtgccctgggaggcttttgtttgactgcctttgttggaagggtgacaaacacttccctccacctgctgccatggtggccccaccagaaaccacagctgggggtggagcagcttcctcagcccctcacacacttgccctgcacctcgtgcaagcatcaacatgcccagagccctaccccgctgagcactggcctcccagactctgcccagacaaggcacccatagcaagtcagagctggaggcgatgggtagaaatgatttggtccagcaacctcattgtacagctggggagctggaggcccagaaaagggaggtgacctgcccatattgcccagtgactagtctgtggcaaagccatctcagccctctcagtcatctgcagggctagcccatggaggaagcctaggtaagaagcagggcctagaggggagaagcagggacaaggtactgtggagcagcaaagacctggttattgcccagctgtgggggtcacagcccctggcaggtgggggctgtgtctttgttatttgattctcccttctcccaggtcagagctctgtgtctggcagggtttgaaagatgttggctggacacagcacagtgcctggcactcagtaggggctccagaaatatttggtattaaacagctgtttagttgaacggtgaagtagggtgactaaagcaagaaatttggaggcagctagaactggttgaaatcacttagtagctgtgtgacattgataaagttacttaacctctctgagcctaagtttcctcatttattaaatgagactctagtagagttgttgtggggattaaatgagataagatactgatgcttaatacagtgtatagtacgtaacaaaatcttaataaagttgctagctgtgtcaccacaggtaagttacatgagctctctaaacctgtttccttctctgttgtcataagaattcaatgaaaggttgtatagctagcctagtccttggtgcatcacgggcacttagtaaatgttagcctgtctcccgcctaggttcattacccctccacctcttcaacgtctctttcctctgccccccagcctctgtgatcgctgccatcccttccatggcatctcatctctcataccttctgtctcccagcctctgacactcccagcaacaaaagctcacaaggtctttcggtccatggtttcctcagggttcggctctgatgagcatgggtgggaggggggcaactgagaaggaggctgaggacaggacaggtgtagtccttggacgaaaatcccagttctgcttttgacaaaggatttaaggattccggcgtgtctagccctgtgtcttgccctggagaacaaaggcagagggatgtcttcctgaacagcccaggcacaaagctgccaccattcttcccattcccttcctcctgatttccaagtccagaggttgtcaatagcactctcagcagctgagcttccctgaaatcggggtgtgtggaggagggcaggtggcaggtaagagatactagtgcaagcaagagggcgtgtccagagagtcagttgtaggagaagtctctggagcttcggggcaggaggcagagctggctcccacataggtgaccccctagcaccggcttcaccataggcctgggccaggccacagaaaacaccctctgggcctgggaagcagattgagccattcagtctttacacgtggtcaggtttctgcttcagtcacttgagtgcagtttcataaaccaaatgagatcaatgagcttgtcctttccaggcctctttttaaacattgggaaatggtttgggggcatctcatctgctgcatctgctgtgcttcccaatgtcagatattatttacttggagcaaatataaactattctgtcctaaataaactctgacacaggaacaagaggacttcagggcaagaaccatctccttaccttccctcttgctagtgggcacggatatgtgacctggagacctattgcatcatgcaggaactgagccagtccagagctggccaagcctgtgcggagatgtttatttacccagagatgagaacctggaggccacactatgtggtggttactgtaccacgtaggacagcccagctagcgaagtccctggggttagtgaacaacacacaaaaataaggttatatccatcctcaaagtgaatatgggcaggagagaatctgacagcggcagaggagtctgaattgggtcatgcacagacacaaagagaggagcccgtggggaatacacatcctggcgtttctgatttcgcacgagatcagctgagattcgcttagtctggagcagctctccacagaaaagggcctggggagctttttctgcacacagactcctgtctgtgtctctgcctgggcccaagagaagtgaaggaacagagggggtggctgctggaggagttgggacttctcagacagctgctcccgtgggttggagtgctaggagggcttgcttttctgaagcctgatagggttgctcttttgagttgagggagaggcccccccccaaccttttttattctccttggagtttctctagggtctcagaccagagacacatgaccgattctaaccatcttctctgcaaagaaggccatgggcccacctgtctctaagactaatagagcccccttctcctcacctgagattgggagacctggggaggctctatgtgtgtgtgtgtgtgtgtgtgtgtgtgtgtgtgtgtgtgtgtgcacatgcatgtgtgtgcatgcaggatgggacatctaactacccactgaagatttgcttcaagtcccgcccccagtgtatattccctaaaacccattcctgccccatcttccccctgcctttcccccatctcctttgccttaattccccccacaatccctttaggtctgtttcttttcctccaactgttcaccctcaacaaagacatgtaactgagaaccattcccagagaagacggcccatcttcctttcttaaaaagatcagttgcctgatttcctttgggaccgctgccatatttcttttatatttcattcattctccagactcagtgataaggacaggaactatttaaaggggagaagggaggttctccttaaggacctaatcaaaggacaagatgaacggtgcctgccggagagaacgagacagcgtgggatgagggcgggtgccacggtggatgtgcagggatgttcccgtgagcccagcagggtctggtgggaagagctctggttaggagcccagggaactaggttaaagttccagcattgcaaagacctcccaagagacctcaggctagttgcttccctctcagagcacgagttgactcaccatgcaatggatggaaaggccagattcactcatctctaaattgccttccagcttgaattataaattctgtggggatggaaatgggctaaggaattgaatttggtttccttgtggttagcaacttttttttttaagttaccgtttcttaaacatctcctaaagattaccaacaacacatatgtaagtttttctaagcattttacatatatggattcgttgccttccacaacaatcctaggacataggtaccattagtatccccattatacagattaagaaactgaggtacagggaggctaagtaaccagcccaggcagtggagccggggttcaaaccaggcagtctggctgcaaagtccctcttcctcaccaccacactcaacattccaggcactgtgctaactgtttacacaaatcctctccattttgcagttgagaaacccaagactcagaccagttgggcaacagctgaaggtcacatagctgggaagcagtagagatgagattcaaagtcggcagagctccagagtctctgctctcccccacaccctcctgcaaccctgccagacgctcaggcttccaaagcaagtttaaccaatatccctgcattgccacgcctcttcaggcaagtcagcttctccccgctgggcctcagtttcaccatctagaaaatgactgggggattggcccagctgatctttgaggtcccttggagctctgtgagtctgtgatgagaaaggtgtggtgcttctagctgaaagggaagacctgtggcctgggaataccttgggcttggcttggggttgcagccagcaaggatgagggagatgagggcctggggatgaaatgaaaaggaaatttcaggtgactggagaaggcttattggctgtgaacctgggaagagggttcagatgtatgaagcaggtaagaaaagaagagagaagccctgggtgggcctcccagggggccttttccttcttcccaggggtcaccccaagctcaagatgggcacatgagagcctcgggcaagggagcagggatcaggccagcactgaaccgaggtcagaacttctgagacacagcagttcgagggaattgacattgctgggggttttgttttctctgtaaatatttggagatgtccagttattctagaaaaatgtatctgcagctgagggggcgcatttgtgcggctggcctggctgccttttgcatgactgctctgttacattcttccccttcaggaaccgagggttgttttcccatctgtaacctcattaggatgtccacaccagcgggctccacacgcacatgcgctccggcaggttcccctcggggacacacacgcacactggcattgccccctggccacacgctcacgcacacagtcgcagctgtgccttttaatatttaatgccattgctgcaaacgccgctccacgctgactgcatccgtgccaggctcattcctctcagggcgccaattcccggcttggagaccagctgacaaatcttgttaaaaaccttccagcccagtgcatctctcggaggagggtaatgtcacgtgcttgcgagatgagcgaatgggtgtcattaccaggcagctccattttcaacgaggctctttccacttggggaaatggatggaatcacctattgcgtgagtgcctcagccctccctctagctccccacggcccagagctattgcagctctgggtccttcagacccctcttgacgcattgtaggttggactgacctgctctctggcttgcagaagtcacggctctgggtggcaccaaggcacgaaatgacacggacacctggcctgtgtgggggcctttgtctgtccctctctccctgctcctccacagtcagtatccacactatggtttgaatgtatgtatctttccgacattcatatggttggaacataaaccccaaggcaatggtatgagaagttggggggggcctttgggagttgattaggtcatgaaggctccacccttgtgaacgggattaatgcccttatagcaataaaagagcaggagggaactagttaggctcattgtgatcttccactcttctaccacatgaggacacagtgtttgtcccctccagagggcatggcaaggccccatctcggaagcagagagagtccacaccagacactgaatctgttggcg

SEQ ID NO: 64792 - DNA, 1452 bp, Homo sapiens
ccctagactctgttgatgaccacgtcctggctgtttatggtggctgtagatgacgcttaggtatccaggctggggagtagagaaggggagctgaggggagagtctgagagttctcgaaggagtctgagaattctaaatttaaacatgaccctttaggtcgttatgaaaatgtatagtttcattatgaaatggaacctattttataagtctgttagctctatttataatgtaactatctgggcaggtagtgcgtaggcctctgtttgtactcttgcctgggccctgcaaatatttgagacaggccgaaatgaatctaactgtgcttcctcagagagttaccaaagctctctgcaggccaggctccctggtggcagccctgaacccctttcctgaggatgtgggagaggaaaagagggagacatttcttggatgtctgctatgtgctggaatctgacctgggctgtttccctcacatcatctcatttgggtctcccagctacttgccagataggtatgtcattgccaatgtatagatgaagaaatggaggcctagcagcatttaagagccttaagtgcccaagctgggattccagcgcagatctgcgtggcttcaagtctggccgtcttccatgctgccattagagttctgtccaccttggctctcctccccgacaggattcccagagggcccgaagtcagttacttaaatgggttgaaatcagacatgtactatgctttggggagaaacgaaaccaaaccataaatttcccgaaccttctctggttggccctgtttttgttccaaagcagaaaagggcaaagtacaggagggggctggggcagagagagtgcaaacacatgggtacagaaggcacgtgataattcgctgtggaagcaagagagcgggtgggtgcggacgtgggtgggagtgagggctgagaccaagaagtttggcttttgagtcagtcctggttttaaatctaggtcccaccacttacaaattgttcaacttagaccaagttgcttaactacatagaatctcggtttcactatcttcaaaagataattgataatagggtttcttctaagagtctttgtaaggaggaaacgaaatcgcatcagtaaggccccagcccgcagcaggttctcgacaacattcattcccttccaccctctccttcctcctattgacagagttgcttcagcccattttggcattctgtagatttctacagctgagaaatccaaaaataaacttgaattatggtgggtttagcaccgaggcacttctgtgtaaatagcagaagtgaaaagaaaaaaaaggccatctcatttctagtatttgaaaccaagcaccctcatcgtgtgggcgactcatagtagagggggcagggggagcgaggtttggcattttttctctgctgtttttgtttttgttctgtgatgatgtggg

SEQ ID NO: 64793 - DNA, 2253 bp, Homo sapiens
taagctccctgtacgttatacttcattgttaatactttaaaattattgctctcttttgctagaatacaaaatttaagagtgggcttgtacatttgtccaccgttggatccatctttggtgcctggcataaaaataaatacccgataaatatttgttcaagaaatactttatacggggtacgcttatgacactatttcgcttaacactcacaagtactttatatgtacagctatccccattttacagatgaaacaagggagtctcggaaagtttaaacaacttgtctgaagccatatgcagccaggaagtgccaaagttgggtttcaaacccaggccaaactatttcagagctctgctcgtcctcaagtcgctgcctgaaccaatgggggaaccttctgcccgggtggggggtgaaccacggacctgccttgcccacggcttcctgaggtcgctctctttgtcttggagaatgtactttactagcaactcccctaaaacggggtattcacaggtgctttgaccaatttcgggggactggccttgcctccaaggagggggccccagatgggactccctcccaaccctcgctctgctaggcctcaaggaggcctcaaccggctcctggctctggccccacggccaaggctgaaccccagcaacccccgggaactcggggtctagccaagcggggacaccacgacttgcacccaccgacccggtccgtcccacttggaaacactcacccgcgggcagaaaaagcgcccgcagctccggcttcgcttccctttgtcccgcgctcgccccgcccctcgcgtccggagcttccgcactcgcactttccacactcttcttaatttttttttttttccgggccccacccgaccctctttagaaaaactaaccttctagtgaagatgcggtgatgcttagcacactcagggatttttttcaggacccattggatcctcaaaactccccgaattttgatactttcccagccgggcgctgattcgtcacggcgaagagggccgaggaggcccgacctaacacagaataggcctgggtttagcggctgtgaggagccggagccgccgcagcgaccgaggaagtggcgggaggtgccgagccttgcggaggggcggtgggggccgcggtgggagacggcggatggcgctcagcgcgaggccgcggaaccactgtggcagcaagcagttcggccagactcccgctgagcccgctcctggaggggccctccccgactccggtcttgctttcctttaggctgtgggtcagagtctacacttcactaaacctgggatggaggcgtggaggacttgcttcgcggcgtttgcgtcctcgcaggcgcctcgcagggcttcctgccctcacggcgggggagtagctttggcgaaaatcagcacgagttctgcagtttttccaagcgcttttagggtgtaatcgtcccaggtttctaagccaaggcccggagagttgaccccctcgcaacagcttgtgtgtccttgcagcgccgcgggtgccacctggtctccgcctcagcgctgcctcggctccttcggttcccaccagcgggaacgaccgtccccactttcagcttaaactcatctgtccttctggatccagctcagaggtctctttgtgatgccctcctggaacttcccccctagtaatccttcctttgtattcccgtggctctttgataataatggttggagtcctgaacccgaccctttgtatcggaccgtgtttgtcatctccagtgctttatgaaggccttgaaagcaaggttcagccgtctgtattggtcatcttcccattgccagtgcctacgaagggcttgacccattcattgttagacgctcagtaagtgtgtattgaggcagccctctgtgccactccagggctctttccactaaatcatgagtatgttggtttaccagatggaatgagtagcctcttctttggatacataaacacccgatggatattgtgggtcactgtggagggagaatgaacgtatgggatccctgacctgtggttactggaaaacagttgacatttagagagaggctgaattcttgggcttcccgtagcccccatcctgagtgtgccaacagggactagaagcatctctagtctgcaaagcgaggaacaagtgatactctgtccaatttttccaatattgttatactcatgaatagagattaatgaaattgaagagcatattcaagagaa

SEQ ID NO: 64794 - DNA, 1810 bp, Homo sapiens
caccttgtagacaccttattttcaaggtctatttccatagaccatcaagacagaagtgttttcttggagactttgttttccatgcatctgtaaataatggtctgtgtgaagggagactctttcctcttgatgcagtttaatagtagtgtttcttggtttctgattcaaccatagatgaaagaactctaccgtcgggcgccacctcttcaataattgtcttgattactctggttttgttagtatctgtgtgaatgatggaaaaaaaattttaaacagtctgtagggatccttagtaattaacaagcaaatattgtaaaaagaaggaaatttcaactttacattgttaagcccaaaaaaatgcttaaggtatgacattttgatcatgccatttttcacggctggtgttaagagtagtttgtgaacaaatgcaaacggaaccgtctctaagatttttaattttttaaaacaactctagagcttaaagcgcaaaaaaaccatcacaggaagttaaaactaattctgattaccccagctagtttctgctgaccttggtcccttagatgaagactcgcccacggacccggaagaggaggacttgtggcctccgctggagctgccgccgccgtatccgccgccggagctgctgccgccgccggagctgccgcccccgtagccgccgccgccgccgccggaactgccaccaccgtagccgccgctggaactgccgccgtggccgccgctggagcttccgcccccgtagccgccgccggagcttccgccgccggagcttccgcctccgtagccgccgccggaactgccgccgtggccgccgccgtggccgccgccggagcttccgccgccggagcttccgccgccgtagccgccgccgaaacttccgccgccgcgtccgccgcctccggaactaaacggggtgaggtcacattcggttatctctaacgttggaaaacggtgggtagctttccagttgccgttaatttagaaaataagcaaaacgtgttgaaaaaataaaaccctgccaggtatatattttaaaacccatcctttgaaaacaatgttaagttcacagaactcttaagaatcattttgggccaaattcatgagaaagtgagattgcggttgcgtactcctttttctgtactctaccctctctcctcccttcctctcattctctggcatcttcttggggtttagataagccttgctatctggaatattgaataaaagaaactgggataacttttcattttaaaatttaccttccctctccttctagcaggctgcggtaggtttgaatttcattctccagtcggatcttaatatccaggagttgttggtattcagtattctggcactcggtttcagctcgaatctgttgcaactgttcttccagagcggatatctgggcctgaatctgtgagagctgcacacagtagcgaccttctgtttctgccaaggaggcttccagggattgtttctgaaacggatttttttgtggcttagtgacttccttgttcagttgagtatggtgacgcttatttgattatttagtaaggcattatatagaagaataagaaaatgaacagaatttgttgtatgtttaatggcaccatttcagtttcagcacttttagatcaacactagtagtacttttcctccattaacatgagcttcactttgttttctctttcttacctccaactctgcatttttttgttgcattgcatattcttaggtgagcatgaaactttgtatgataaagttgaagtcatttcatgagagttaacatacc

SEQ ID NO: 64795 - DNA, 511 bp, Homo sapiens
cgtgaaattgcagcctgacgtgatttctttaaaatcccatgttacttgcaaataaatgaaatatttcaaaatgagtacacttagcagaaacttagtagtgtatgtataacttcaggagatcaataagtgcaagtcagtaactaaaatgaccatattcttaccaaccaaggtcatagcgtcgtgtgtttacggtgtttttaaagatttcaaaatgccgggctaatgtgattatatgtgatattattgttgtctttttgtacaaagtgagtcatctcaagttgagtaacttgttctgagtaagataatgactcactgagaaagcctgaaataccatctaaatggcttctattagagcccactgctgtctgtggactgttttatcagtgtgatttatttacaggtctgcttctaaattgcgtatttgttccatcattttgaagaagagttgcatttcattaagaatatgtacatagtgaaaaaacaatgacatattttagcaactagaattcgc

SEQ ID NO: 64796 - DNA, 3326 bp, Homo sapiens
aggtacctgtggttagtgtctaccttaagggacagggtagttctagagctctgctactcaaagtatggtccttggcctcacagtttcacagtgtagatatgccctctgtcccttccactcctcctaaattggaatttgcattgtaacaagatccatggtgagccctcagagtttgagaggggctgtctgatgacttgaaaatctcatttgaggaaactgcacaccctcccttctagtcatatttgtgcagtacatttcctcatcatagattaggtaaaccatcttatcatagtcggaccaaaggtagagttcagtttagcccttgttggaaccagtgggatctagttgggtttttcttagtcggaaggttgagctatttggcagaaaatgaaggagagacaggacaaagatgagatacgagtgtttattcaaccacagaacaaatgacatcaccattgtcattggagctcttcttttctgacatatgttttgaaagggagaaaggagtgaagaagggaagagagtgagagcttccaaattcatggggttttcgttatgtcagagttcttcccctagggttagcctcatgagcacgtgagcttggaagggcctggcacttggattaatgctctgctgttgcagtgttgaaattcttgacaattgggtccggcatgcctgctttataccgagccctgaaaattatgtagcttgtcctgcctcccctaaatgtccacttactatccacctgcaggtgtaagagtcacactggattaggtaggttttgggaggcattttctctttatgtgtgtgtatgtatgtgtgggtatatattatatatgtggtgggtgtatatatacacatatgtatgtatatatgtgttcacaacattatgatataaaggatatgtgctgggccaggtacggtggctcacgcctgtaatcccagcactttcggaggctgaggcgggcggatcacgaggtcaggagttcgagatcagcctgaccaacatggtgaaaccccatctctactaaaaatacaaaaattagccaaatgtggtagcacgtgcctgtattcccaactacttggaaggctgaggtaggagaattgcttgaggtggaggttgctgtgagcgaagatcaagccactgcactccagcctgggcaacagggagagactccatctcaaaaaaaaaaaaaaaaaagggatatgtcccggatcagctggatcaggtaggtttgggaggtgttttctctttcacttccccatcaccacaatctctttatagcttaagaaataaaaaagagataacacaggcctttgggagaatcgagatcaataatgcattagataatggtgttctgaggcaggatttcaatgaaaggctaagtgctgtaactatgtaacaaaacaccagcacaggacaaagagtaggtttctcaatcaacaaggataaacagccccaccctcccaaccttgtctccaggtttacaattatctgcagtgtttgaatagagctcagagatctctgggcagtgacaatgagtcagctgggcccattcatgttggaagttttatatgggtgaaagttaaaaatgttaacttgtttctatgttgtaaaaatgttaaacaaagaataaaagtatattctcaagatgactcatgaggaaaaaagaaagtatattagtagtttcagagctcagacctgaatcaaatgcctgaatcaaatcaaaaactactcaaagctttgagacctaagaaagtcactttcttttaatactaatggacttggtataatttgtaatgcctgcagctcagagtttaggcggagagtcagccacattggcttcacctgggggctgattacagatctcaggccacccccacaccccacacccatcgccaccactgacctgctgaataaggatctgtattttatcaagatctacaggtgatctgtgtgcctattagagtttaagaagtgctgtaatgttgcactcagcaactacttatcttggcggtggtgggaagggaggagggaaatctaaccccttcacaggtgcatcaacttagtgcctaagacttcttgaagcattatgggaaagcgagggttctcaaagtgtgggcttcagactggcagcatcagcagcacccaggagcttgtggcagtgcaaattcccagactctgattatctggctcagaaactctgggagtgggaccccacaatctgtggctccatcttagcaagtctttccagtgcttcggatgcatggtaaagttggagaaccatggctgtaaagtatcagtagtcgaggagcaggaagatatttccactggttgtacattttagtttagaatgcttgatcttgtcaagcggagccccacattgaatcacatgtttcataaggcagtaattctaactttgaaagaagtcacgatgctctgactaatttgaaatttatttttatttctgagggagatttggacatggaaagggatggcaagaagtgaaatggttgaaaaaataaagagtatgacatgatctggcaattattaacctggggaagtgaagagtgaaagaagaagcaatcgagccacatgttatctctgtaaatggtgaagtgactcaccctagggctcaccaggaacaggaagatgtcgtttctttcttgcctccaagtggcaagcagggactgtgtgtccttcattcatagctgcttgagaatcaattacaataggtgggatgctgtgatagccaatagggttcagaaatcaagacacagtccatgattccgaggaggcggcagcctagccggagacggtgactaatcgggaattatatataatgttcacgaaaagatttgtggatatagaggaaggatccccaagtaaagctgggtgggagggagtcattgaagttttcctgaaagtgcagagtttgagggagagtccaagctggaaaagcacagggacatggaggtggcccacgcatccctaaagtgcagcgatgagtaactggtggataagtcacagcccataaatctcagaattcatccattcactccacaaatatttactcagtacctgctgagggcctggcactgttctaggccatgaggatacttccgtgagcaagacaaacacaaattcctgctgacaaggcttcattctagcaaagggatataaaccccatacagataatatatatgtaaattataagacaatgtgatgtaatcacactggaaaggtagagaaatggcaaccggaggtgtgagatggtgtaagaatcctgtgatgccatcttctacaatggggatttaggtcttta

SEQ ID NO: 64797 - DNA, 2577 bp, Homo sapiens
aactactgcttcctagggtgctggggatgatacatgaacattttcacaatattttttttgtgatgaatctctggataaaatattctcagctgatgactgttgatggtattgggtgtatctgtggcctgtccattattactaccctgtctttgtctttcttgtcctatcatattctgtgagtgtgtggggaaagaaaattttgatagaaaacaggagtgagtgtggagtctaactggacaggttggggtctgaggtcctccaggtttggaacttgctaaactctctcagggaagcaatcatcgtccctgatgctgattcgttttaggctaaaacaagttaagaacacacctctgtatgaaagcagtggatgctttgaggtttgattaatgagaaggtagcttttggttataaaaacctgtcctctggtcctgagtgtctatttctgactcatggatcttgtcagaacaagatccaggtaaatgatgtcaaactaccaattgcctctgaaaaatatgagttctgattttcaaatagaaaatccagatttctcatacctgggctcttaccttagataaaagccatcagcaagggctcatcaaaatgtgttgcccatattcagattttacataactctctagcaagcacttttgacttgtgtggcacaaagagtaaatatactgggtacaaattctgtttccaccattttatagctgtatgaccacaggcaagttaatgcagtccatttgagcctcagtttccccaatcataaaataaagataatgatatgccacaaggttttgataaatgttaaatgagattgtgaatgtaaagctcagtcaaggatagttgttatttaaaaaacttctggtacatgtgtgtgtatgtcaatgcatacatgctatgctgcgtatgcataccatggaattagcaaaaattgacttgtagtttctattagatgactcataattttattagatgaattcccatttaaatttcaatgggaagtttgggtgagtaggacaacccatgtactgaaatagttacacacacacacaaagttcaaggtaaaacttctgagtatgattagatcatcagatcgttaggtatgtgagaagcactgtcttttcctttttgcatgatctcacctccagtatattttagaaactctctaactctcttcagagagatggtgacacgtagatgttgtaatagaatagatgagatgggaatgagtcacacatgggaatgaaagtaggcctatagtcattcggaaaaccaatgttgttaccatagggaaataaccaacaaaatacttcaggtgatatgtaaacaccaaaaatctgaaaagtatttattgattaaaagctgtagaaaagtatagcatttagagtatagcattgtgaataatcatggctagaataaatgaattatactcttaatgacttttaaatattatgactagaagctacgtaataattatgatcaccttaatttgtaaatgacttatagtttcttggtgagggagaacattgcttaactatgttgaaaagagatctcctttcagtgaaactgttggtttgtgtggtattggaggcataaatatttgtagagaaattgttaatgtccctggaatgaggaactaaaagagagtcaaaaggaattgaaactcaacgagaagaaaaagaatttccttgggcatcccagcatgcttaagtgaggagcaggggatgccctgacttcaggttggagctacactgcttggtcccacttgggaaggagcagagaggagagctgtgaacatcatgtgcaatggctttactctttaccatctctgaagagggtagacctttgcttttctcttgaaagttttgatgtcatctattgttattagaccaggactttcattagaggtccatgtcagtgttaaaatgactagtatgctggtcaaaagtttggtgggatgcaaatgaactagttcgccttaaatcagctattgtcactgagcaaataacagagtcttctgtttaaaatactctgtttcacttgcctattgcggcatgaaaaatgaccccaaaactcactggcttaaaacaaccaccattgtatttgttcacaattattttgtgggacagaattttggattcagaatagcagggatggcctgtctctgctctgtgatgcctgggggcagtggcattgtcttgaatggctggaaactggctggaatggcttgactcagtcatatgcctggagcctcagttacagctgttgcctggagcttcagttatggctgttgcctggattcctcagctttccttggtgtgggctctccaagaggctagcttagacttcctcacagtatggtgtctcagggtaattgaacttctcacatggtagctggctgcctatagggcattccaagagaataactcccaatgtgaaagcatttagtaagcctctgcttgtgtcaagcttgttgatgttccattggccaaatcaagtctcatgaccaagcccagcgtcaatgtgggaggcagtagagaaaggcctgactgctggaggcatggatgcattggg

SEQ ID NO: 64798 - DNA, 3461 bp, Homo sapiens
tattgtactaggagaagggccatcagtcctctctgaattgccctgtcatttcagttgtccacaaaagtgatcctgttacagggatgacttcaaactgttctcccttctcctccagggctatcttcttcctactggccgcaaagattgtgaaggttgatacatgatggagaggtcctttacaactgagctccctaacattctggaaaacagaagagttggacctttatgtggtttttactttgggtcaggtgtgactcagctttcttttaaaaagaaaggttctatccttaatatagcactttcattagttatcagaatggctttgcatgactatgccattgtcatttggctcaagtgaaataattcattagctctcatgtgattgttttgccaactgaagtaagcttcacgaagcagtataatgcaatcctactaacaaggttactgggtgccaggcatgctctaggagctttgcatgcattaattaatgatgtcatctcagccctatgaagtagatgctattaatagccccattttaaagatgaggaaatagagagattaagtaacttgcccaagatctcatggtatgtggcagggctgggaatcagagacccagctggtctagattcaagtatgtgttattaatcagtacatgattctgctttttaaacaaaggtggccaaagttcttttctaggtttttctaatacctttaaaagggtgcttgttctgagatttcatcctagtctcctttccccactgaacttaacagagtcctcttacatgggtagtaattttatttaccttccactgtgagacttctccctgcaaccagagtctatgctgggagtggggaagggggtgtttcttagaaagtggcagtgaaggaagagaacacagttatttttttccggtcaatggaaaatgagctgacagacatttatcctccacagaagtgcagagagaagacctttttactcttacatacagttgatgggtagttctttatgaccagctacccatgtttagagatgttcagcccaaagcatggtctctctctaggtcttctgggtcagtagagttaggcagtttctttaagggccacagataccaaatgggtggatacaaccctttccaggaaactcttgagcactagcgtgcccagtggccctccataacgagctgtaatatcggaaatttttgcttctggattagcagaaaggcctttttgattcttttttgtttctgttttttttgtttgtttgtttttggagaaggaaaaagagaaaggagtcccaaacttgctctcctcctgaaaaaagtaagagatcttactgtctgagatgttttctccaggtacgactagtatgtccgccttgactattgggttgttccagagagagagaaagaggggggggggtgagagagagaaagagagagagagagagagagagagagaggatcaagaaaacatattcagaaattttgctattgtgatgccttcttaagatgtttagaaacattgatatacattttttcccatgtgcatgtaagtggtagcctgtggctcaaaagcatcacctaggaaagctctccaaatatgatgtttaacctgaaaggataattacagcaaacctttcaatgttgccaaacagggttgttcccatttgaactgggtgcgtgggttgttcccatgaaacttgtgaatcattcatgaacacactgatcagatatttctagccagcccaatacccagaggattcatttcctataaaagacatttgatcacagtgttgaaacaatgtattcaaggtttgcttgccctgagactaacccaagtctgtgtcacggatgctgattgcctcagcctagaaattcttcctaacctaataatgacctattctcttctctttggggacactttccttttctcttgaattttaatgtttccccccttctctcatttaaagtggatgtttgcttttaaaatgtgttttcattataaaaactttaattttaaatcaaaatggacagaaataggataaacttactcaggtaagggatccgtttctgtctagagtaagatacttttcttcattgtttgaaaaatggaaattatgggaattaataacaacatagagtcattatcttctaaagacatgaagatctcactgataccatccaattgcctttaaaagacactggcaaagtggggtggggggggttggaagactttttttggtgtcagttcttatttacagaggtagaaagctagacatgataagtaatgtcagagcttgtaagagaaactaaggacgtaagctttgaagagtccatggtgactgcccagagtctaagcacagagaagccaaatggtacttctgagagttagagcctgaggtcactgtcttggggtccagtgttcttcacattaggcctcagtccacacctgttcactacagatgtgcctgggaacgaggagagtgaggagcagaagacggggaacaaggagagtgaggagcagaagaaagagcactggtcctcttttcgacccacgtaccatggaccagttactgttctttctgtgccccagattctccatctctcacattaaaaatgctattagctgccatccaataccttccgcattcaaaaatccacatattctctgcatttctggatgagggataaagactccttggatgattctcactggaagctgtgatgagctggagaagggtgctttgaagagttgaaaagcaagctgttgctactacagattatttctgttcttgtatcaggtgctatttgacctttctaaggaaataaaagtactgataattcaatcccattattgtgcggcatggatgagtcagttaaattttctgcccagcagtttcctcatctgtgaaatggggctattaataatatctacttcatgatggggttgtgaggattaaatgagttgatgatatttattaaattattggtcattattgattaactccattttataaacaggcgaatagacacgaaggaggggggaatctgcatgtgtggttgtctatcaagctatgcccaaatctaaaagcctcaaataagtcatcaagtcattcagatctttaagccaaaagcccccatcagtgataaagcagtggcttttaattcagtgcacacacttcagctgagacttttgttaaaatttggattcccaggtcccacagctggagatgcagatacaggaggtctggggtaaggcccaggaatctgaatgatacagactcccctattaatgcaattgcaggtggcttctgggtcacactggagaagttttggcgggacgtcaggtaaggggttaccactaactgaactctggaggaaaagtttctgggtagtctcttctgatcagcaattgctggaattggctctgggaagtaaggatgcaaagggtgtgggctgtgt

SEQ ID NO: 64799 - DNA, 2698 bp, Homo sapiens
aagggggaagcgtggttacttacctctgtgtttggaagagtttaaactagctatgacatgaagtggagtcaacaagaagaaaggaaaaaaatctagaaaaaatatatctaaaatatctccctttttaagaaatataattatggaccctcagagtgagaagcagagatataggatttgacctcaggctctggacaccatgctgtgtttcctgattcatggttgtctttcgaactgtgctaaaattacactttccctccccacgagccccttttctgctctagctgctgacttatgctgaactgtcataaaaccttaaatttcctcctgtggctgtgtaggatacttatttagcctcctagtaaaaatccagtctccttattgcctttaaaagttttgaccacatgcatacaaccagcaaatggttttacattctcttatacgaagaagacacttaaaaaaaaaaacaaaactgcaagccttcgagtggctaactcccctctttactgtgcagcttataatcatatattttttaaaaccatgaatggcatgggggatattttgctctccataggaggaaggcatcctacttctaggataaactgaaaatggcactgctgcatcagttcaatcttagcttgagtccagtgagattcctcaaccctaattttgtagctcggagcagattttagtgtggatgatatatatcaaggtccacctgggcccagcactgaaccagaaagaaaggaagaaggtattgatggaaacgacatgtgtctaggtttaaatatagggaataggaatgcccttctgcaaagcaccttacagtttatgagaccctttcaccattattattccattttatccttgcagccgtgtggtaggcagggcttatattgttatatcctatttactcgaggtcatacatgcccaggctggattgagactccgtcccaaggtttctgaatcccagttccatgctctttccacattttcatcctgcagcctgagatagtacgcagttaactactgaccggaggtactctgcccactcagatgagagagaaattattgatttaaaagaggtcattctgggagttctgcattccacttgcctagtgtaagttgctacttgtctggaggaagtaaatcatcaagctgtaagttacacaatgcatgtgtctttgatgtgggcatcaggcattattgactcattgatatgcgatacataccctaagaactgaaaaatgctttattgagtagaattgtgggcctgatcacaggaaatcatgtttttttttctcctaaaagttaaacactattaaaactccaaaatcatgactggataactaaattcatgaagaaagaattttaaaatgagataattacaaaaataggtctagggctgtagctaaaagcaaaacttacataaaaattacattgggtggtgcttttcagcattcaaagcagtgtcacataaacaatttcatttgatcatcacaacaaccctgtgaagtaggcatgatcctcatttaacaaacacagaaattaaatttgatgaagtctaaatgttttccccaaggtcacagctgggaaatgcaggtgtaggacttcaggccttttgactacccatctgtgtttgattttgaattatttcttaaaacctctggcaatgtccaatgattattgtcaggaatgacttacatattctgagactatcctgtaagaagctgtgatgatggctggtatataaatgatgccttctcacattgggactgccttgcacttacaagcagcaattattcactattgcttttctgcaaaatgtgtggatattatgtccatttactctgatggatagattgaagcaggaatctaagctatgtttttctttgtcactcttcacagggaggggaagaagggttatttcttgagaattccagctaaatgttccttgtcaaacaatcagaacaaactcccattccctaaagaatagaaagagaaatagcaaatgtttaatgaaaagacccatgctatttcttcaaagtgttctagattcactccccacaacttatctgattctcaaataaaatatttggagagcctaataggtcacaaagttttggagaccatggacatttaaaaaaatatctttggaaaggtaaagtatgttagtatagataaatcataattaagacagcagagtttaataggatccatactcgtgactatctacacaagtgaattaaatattaaagatcttttcccctatttatactgttcccatatatgtttctttctgtatccaaagacatttagaagggaaggttgtagcttttcaccttcaggtgccggtggccaaaaacaaccctaaacttgtctgactggctctaaggaggaatgtcggtaaacaaggcctgagtaaacaagagagagacctgcccatcaatcacctgggtagtcaagcaatgtaggccatcttcctgggtgcttacaaatcagttcccatccctcagataaatgcaaaacatccttccagagaaatgtaatttattatcatgttagcagtggtgagttagggaaggagcagaataaaagatattctacctagcaatggggacccgctgtagtagtaagaaactaagtaccttaagggactggggagttttcttaaacctctctggcaggagcatgtattggc

SEQ ID NO: 64800 - DNA, 993 bp, Homo sapiens
tctattgacatctattatgtgaagggaaccgagcttggcacttggtatacaatattttacttaattctctctcacacattcacaaatctatacacgcaaattagatagacacctactatgtgcggcctactgtgttattatttgaccacctactatgtgccaccaagtattataccatatgcttcccatatagttgtgtcttttcatccttataaccacactacaaagcagttacaagtatcccactgtagagtaaagaaaacaaagctcagagcagttagggatgttgtctgaactcaccaagttggaatgaaaagtatgggccttgaaatgtcagcccaggtctgcctgaccctgaagcccaagttctttctgctctgcccagtgacccagaaagggccagatagtggactctggactgaacacaaggccaacactcctagatgccagctgtccaactggatttattcaacaaatagctatgaagttcctgctctgggccacacaacttgcctgaagagctagaaacagaacagagtcctctggaggtttttgagcagatgaaagagagaatcaaaggagaaattttagaaaattaatccagtgcctgtcaacctaaaataatcaaaaggctcaggatctggttaaaaagagttttttcaagcatggcatgtgagagccgtcttctggggacacacgaacaccgaagaatggcaatcagtactcccagtgcagggggaaaatgaagatcacttatataggcaaaaatagaggtgctgaacagaattacgacgttttccacacaaaggctagtgtacagatgtaagatctgattgaccgctattgattacactctcatggggttgcttaacattctattgtaaaaaggtagcagtcacaagggcctccttctccaatgtcatttactctaggtttgaatacagacaagggagtctggttactatgcaacatgtcaacacacaagtcaggaag

SEQ ID NO: 64801 - DNA, 917 bp, Homo sapiens
ctctctacccttccacctcctgccatgggatgctgcagcatgaaggccctcgccagatgcagccccctaaccctggacttcccagcctccagaattctcagaagtaaatctctctactctgttaaatcacccagtctcaagtgttcagttagagcagcacagaacagacaaagaccacatccttccctatatttcgtggttgcttcttgttctccttcttgtttcttaggaactggctgttcctatcctttgcctattcttgtctgcagtcttggccttcctggtttgtgtgagcttttcataaacatgggaagaggccttggcacaggtgttgtgaatgcattttcccagttactttttcattttccaactttgtttttcggtctttctccatacagacaattccctcaggccacattccttccttctttttcctgtgtctgggcatcgagtagtttgaaggagctctcttttgtggcagtgtgaatgctggatagagcagaactggcctcagggctgaagtggtggcctgggagagagttgtgaggtgaggatgggacaccatggccaacagggagccaggcctgagctgggaacagcaggatgactctgcattttctgagctgagtaactgggtgggtgatgatgtcactgactaggatagggaagctaggacaagcggagttcacggaaacacagcaattcccctctatggggcacgtctcaccctatgtggttacacctgcttgtatacctgactccccttctagacatgggacagggaccctgcctccttctctctgtccctggaaatggccatagcaaagagtgcccaataactgcagatatgaataaatgaatgaacaaattaataaatgaatggctccagcactttgggaggccaagacgggcagatc

SEQ ID NO: 64802 - DNA, 2306 bp, Homo sapiens
ctccctgctgcccttggttcctaccccacccctctgtccactcccccactcacatacctggccctccttcccccatgcagcccatctaccttcacagggaggcagcaagacacccccgccggcctaggagggtcgagatcctaggactctactttttccagtcctggtatttgcctacacgccccagcctcccacccccagcgccccccccaacacacacacacccacacacacacacacgcacgcacgcacgcaattataacccccttagggacagccgttgtgtctgctgtagtttagccttggattcatcatggcttcgacatcgccggccctgggccagtgttcgagagcatggccccaaacagttcttgctctgttcagctccccacattgccaagctgcgagcgggctctctgtgcttcctgccttctgtctgcctcgcctgttctctccaggtaggcggctcctcctccaagctcccccagccctgggctgacctctgtcacctggatggtgggtgcgggttctccgggcatgcacctcgttcccctctttactcccagcagtggctgaaacttgtgggtgcttgatcgtgctagttaaatgaatgaacatgtggtggttacaggcaaacccacaatgccacacaggacaccgaccaacaactgaaaacggtgacagctgcccttacccgcagctccccagcgtagccctcccccatcgcagccagaccggcttgcccactgcgcagcaaggcggagccccgcacagctaagcccgggcgtggtgctcgcggcgccctctgctggccgggcccacggcctcctcctgcgcacgcgcgccgccaccccgggaccagacctaaagggagaaggcgcgatctggggccctccctccgcaccccctcgccccgagaagccccaaacccaggtctttgaccctcatgaacatcctttgtccttcctctctcctgctccccctgcaaacattttaggcatccctaaatgatcaccagccctcgcctgctctcttagcaggcctccaggtggggttagaattgtcaaatgctggcacaggacgaaaccctaataataataactatgatgatgacggcagctgctgctgagcgggcactttgtggttaccttagcaaccttccaccatccaggaagtgcagccccttctttcacaggcggcagctgcagccagaggcgtgcggggacttcccaaggtcacacagcaagaatcctaagaaacccggggtgtttcctctgcctacgtggagctaaccctgcctccagaagcaggggccttgagatgggagcagagcgatctggtgccccggaaaccccacccccacccccaccttgccccatgcgcagcgaacgtggctacatttcctatcgtttgtccaacccatcattttgcctttgggaaaattgcaggggaggtggaggccagaggacagggagacaaacgttcgtgggcatctgccacgagcacatttgccacgctttgtgacaggccctttcccgttacacaccacacctgcccaggaccgcagcacagaaccaggacccaaacccgccgactccctccctagtgctccttcctcaccccccaccccctcccccctccgcaagttctctcttggaaaaggggccgctgggaaggggaggaaacgcactcactacaggactccaggtggggtccagaggctctgcccctggtgcctcttccccagccctaaagcccccagccctagagaggggaccctcctgcacaacatctccaggggaccgggtactccactagggtcgagaaacgttgaatagtgcggtgggtgcgggaggcgcgcctaggtgccgaaacccggtctgtgctgccatcctgtggccattgcaggaagtgtgcctgtcaggccgctctgcattgaacctgaaatgccgggtcacccttgggttgagtgaaaccgggccccatgctgaggctacaagggacatagaaagggacaagacgcagcccgtgccctgaaagagcttacagttcggtaggatggccttcaaatgacatgatccaacactcaactcggcgccagataccgcccaaaatagaagatcgtgcaaaaggttccaaaaggtggaggcagcctgccccgaagcacatcgagaaagccctcctgcagcaaagccgtgtcgagactgggccttacagggcaggcggggctggggcaaacagagatgaaggaaggcgctccaggcggagagaccagcctgagcaaaggcacaggggcaggaaacacg

SEQ ID NO: 64803 - DNA, 1225 bp, Homo sapiens
gaaagcaacccaacctctggtgtccttactgcttattatatgctaattataatgtatcagcctcgtggtcagcaacccatttttgggtcccctctcactgtcgagagcttttctgtccctcaataaattctattctgccttactcactctctgctgtccatgtacctcatttttctcagtcatgggacaacaattcggaactcattgaactacgggggtaaaagagcataaaaacttcttagtaattttccaccaatctccctaccctgttccttggctataaatccccaattttccctattgtagagagagtgaaacccagtctctctcctctgctacaaaaccccaatgtaatagctcccccttgaataaagtcttccttcatctttaacaagtgtcatgagtaatcttttctttaatgccacactgacctgggcaggacattcagcacctcccccaagctctgggaagggaaaccagcagtgactacaaggatgcctgtatggggccctggaccagacccagacaatcttccagggcaggcaccccttccaggttaggggcacaggctctggatctgaattccagccatgcaacttaccagctgtgatcttgcaaaaatgattcctctctatgattcagtatctttgttaccaacaaagctggtccccagaaaatggagcctttccccgtttggtgttacaaatcaatatgcaaaactgaaagtgaatgtcaagcagtgcaggctttagattagacggtcatggaattgagaagtgggagcttgggctcggctcctgagagccaggaagtcacagatatagggcacctttaatgaaagggttggatattaaaagtaaggggaggaatattcatttcttttctgggaatgggtggagaactccttgaaactggagtgccgtcttcctttttgtgtttttgtggtttcttccggtcttagtcacagtgattgttaactgtcatggtgctggtgggagtgtcacttagcacagaaattagttataatgaagttagaggttcttcagaggtcaagtgagctgccttggatcccacaagtcttagccagtttggtcagaagggggagcttttgacctcaagcatcctgtttcctaaagataagcagaattaaggcagggtagaaattcacctatgtcacacaggcattacactgggtaacatcctcatctgtaaaagaaaataacaa

SEQ ID NO: 64804 - DNA, 3218 bp, Homo sapiens
ttagtggctctctctcccgctggccttcaactccacaagggcagtgaccctgactgtcagggacataaaccagcagtccatgggcatgcatatttttgtttggcttgcagtgttgtatcaaaaattcaatttattcctgtaatcccagcactttggaaggccgaggcaggcagatcacctgaggtcaggagttcaagaccagcctggccaacatggtgaaaacccatctctactaaaaatatttttaaaaaactagccgggcgtggtggtggatgcctgtaaccccaactactcgggaggctgaggcagaagaattgcttgaacccaggagacggaggttacagtgagccgacacagtgccactgcactccagcctcggcgacaaagtgagactctgtctcaaaaaaaaaatcaatttattggcaatatttaaaaatcaagagattttatgtaaacacctggatttcctggcactcttgaaaaagatctagcacaatgggctggaggtgagcggccactgcagcccgtagttcttactccagcccccagtccaccccattacatcacacttggctgtttgcactccttgatcctacttacctgcctatccccggaggcctttgagtctaaaattcctggtctcttttcaccactctacttacccctacaactgagtgttgaaataaataaactgaaagcaagaaaggttgactgttttgaaggaaatatttcatctaaactctaggaaggctctactccacacaagctgtgccacatgaaggacgccctctggtgccagaattattctcgggggggcccagaaccagttactataccttgaactcatgccaatgagctgggcacactttttccttagatggattaatctaatctaaatgaaaattttagatcggattaacccactttagaataaatctaaatggcaatctaaattatgcggttaccgttttgattatattattgtatgttgattaatcaaagtgccgccctaaatcccgctgtgactccgtgggtagtagggtgggtaggtaggtgggtttgacacaacggggatttctcgtgtttgggaggctcatcatctaaatcctctctaaggagtgttcatttaccatatgaaactccccttttcgagaagacagggatgcaacagggtcaagaaggtggaacgtaccaaaggacacagtgcgtaggcgcgctcgaaacctgggccggtattctcggcacccagacaccgtccactcgcactgcgcaggctccgagacagatcaagctttccctccccctcccagctctcctagagtcaagaggacgccctcctgccgcagacttcctgcgcaagcgccatcccatgtccccgcctccaaaccaattggaagcggcgccgcctgggcgcttggggcacgacgctgtgggtggggtcaggacgtgagggcagcgcgctggcgtcagaggcgcggctatataactaaacacaggcaccgcccctctgccccagtcactgagccgccgccgaggattcagcagcctcccccttgagccccctcgcttcccgacgttccgttcccccctgcccgccttctcccgccaccgccgccgccgccttccgcaggccgtttccaccgaggaaaaggaatcgtatcgtatgtccgctatccagaacctccactctttcggtaagctatgggaaaggtcgcgggcccgggtggggcagcggggccttccgggcccggagacgtgttccgggaagttgccaagcgctccgggccttcgtaagctcgggcaggggaaacttgaccagggtcgcagggcagcgggatcaaggcctgggccccggggtcggaccctgagcgcgaccggaaggagcaggcggtaggtcagcccttgggcgggcccggcgtctcagtggcgcatttactaatggctcctgggcctcctcgggccacacccgcccctcccgtcaccattgcgtcacgtccgttacgtcaccacccgttgtcacggatccggagggaaaggcggtgccagccctaagtggcaagcgggtgcaccaatgggggtgggaggcttagccccgcctcgggagctcgggttccggcgggttgcatcagctgggtggggcaccgcctggcagcccggactcccccgacatgtgatcggcttcccagggagggcgggaggcccgggcgttccccgagcctggggaagctggccgtcccggactgacctgctcggggagagccagcaaaggacacattcggcctggcccaagccctgacgatttcagtgttgttttctgcacgcgcaaaacacctggggaccgaggggatggcagtggcatcctatctttgacagctctgaacgagcttaaccttttttttcagacccctttgctgatgcaagtaagggtgatgacctgcttcctgctggcactgaggattatatccatataagaattcaacagagaaacggcaggaagacccttactactgtccaagggatcgctgatgattacgataaaaagaaactagtgaaggcgtttaagaaagtaggtcttcagtgagattttgggaaagtcataatggatttgtccacaagggggtgccagctgtgttgtatgtattgttagcggaaggggtgataaatgcgttcatgctcttgctaggcctaattcgttttcctttgtgcttgcagaagtttgcctgcaatggtactgtaattgagcatccggaatatggagaagtaattcagctacagggtgaccaacgcaagaacatatgccagttcctcgtagaggtgagttcagtcactacttgatttgtgcctctctgctggcaaatctcagatcctgtctgttagcttctgctggggacataaaagttggctttgtaaggctgagcaaaacctcagttgggttttaaagtacatagacttatttctgttttataggaaaaagcagaagggacttgtctacctttggtttactgtttctgtggatctacttcacagatgcaaatttgaatagcatatagatgcattgtaaaataagccaaatgctgggttgttcctgtatttgtaaggacatgagtttttaaaaatgaatttcctgagtattaatactaaaatactgttacatgatcagctcttgatataattgaagagatttcagatacctgatgagtctcattctcacactaatt

SEQ ID NO: 64805 - DNA, 486 bp, Homo sapiens
ttacatcagtagttctcagagtctggagactatgttagttgcctggggtgggggtgggagagaagagatgtatactactggtatccagtaagaagtggtcagagatgctgctaaacatcctgtgacccatggaacagcctcttacccccacacaaataactatctggcccaaaatatcaacagtgctgaggttgggaaaccctgggtcacatgaacctctgggaactgtcataaacccgggcaagcttttcagagtcacccacgtgactgccttctatcctgtgtcccgcagccaagcagctgctgtctctctcagtgagtctcaacactttttggacccaataatcctttcccctgttatatcagcaatctagaggactaacttgagaattttagatctttttcatcatatgcctggtatatgctgggaattttattttatttatttatttatttgaaatagataaaggcaggatctcactgtat

SEQ ID NO: 64806 - DNA, 2600 bp, Homo sapiens
gctactgggggcacaaaggaggaagtcaggaagcaggaagtcacctggcccagcccccagcttcagcccgtcaccaagccccgcctgtcttcccacatcatcaccatggcccagggatttcaatgaggatgcaggctggggatggggggactgcccagaagggcaccaggcccagggaggggctgcccacgacgagataccctgggagcagtgagccccaggggtgcggctgtgtgtatgtcctgggcttgcatctctgacctcccagggggatgagccccagggggcaggacagtcaagggccagctgccgccagaagcccctgctcacgcaccttgctgccctgacccaactctcccaggggcaagagaaggcactcagggcttctagcagcttctgaggtcccctgggcccaccctcaactactggggctccctgggaaaggctgcagggaggaggcacccaagccattgggcaggaaactgggcggggcagggaagcggtctgacaggtttctctggagcgccccaggctccctcagagactccaggatctggctttcctacaggttgggcaggatcacacatggccctgaggtccagaccctaaggccccctctctcccagccctcccagtccctagacgcctctttgagtcccacagagcaattcaaatctcagctactcactactggggcagttcctctccccacagaacctcagtgtcctcatctgtaaagcggggtcacgccacctccctcagaggtggttgcgaggacctggtgcatagcaggtgctcagaggccacggccattatcatcagcactgcctctcctccagaagtgcttcctcacctcctggtctcctcgagcccaggctagggatctggggtggggcaggcctgtgggtggtcactgccgtcaggaacccctctctctctctgcaaaggtttaggcgcacctgaaggttaatgagtagcagggccgaactttgtaccagggaggtgaacttcccgcttggtctgtgtttggctccactgtcctgggaactgacctgcagaggtcagaggctgcggggagaatggacgccgtgatcccatgagggcctactacgagccagacctttcacagacaccgtcatgctcatgggcgggtttcaaagcccatgcactggtcccccgcgtacagatgcagaaactgaggttagaaatggcagagctgggactgggaccaggtgtgagggcaccaaggtctgtagtctttgcacatcccggcgcagcctcagtgagtaagcagaactcaggctggtccacccatgaagccaggcagcacccgggttgtctcactgtgatggggaccaggtgagggtggggtggctggggcaacctggccccaccccaggaacaaagatcaccaaggataagtcttccctgtgactgccccagtgccgccctggccctccaggaggatgacgaatggtcctgcaggtctcccagccttttatggcaggcagccgtgagcacacccggaacaggcagaggcaggggccaggccagctcccagctgcctccttcctctcctcccgcaatccctagtgactcagagtttcaggctgattaaacagaagcagtcccgccacctcagacggcagaccccagacgacaggctcgggccgccagatgtgcacagctgcttcccaggcattcgaaagtgtagctatttcagaaggagcccccccaaccagccccctttccacacgcaccccttccccacaccccttccccagcaacagaggggaatggccactggcaggaaacaggggcaatggtggggggcggggggcggggtgctcggagaaggcagacatgggaaaaccctactaaaatcctgagctcctcgtgctgtgccgccttccccaaccatttccctgccccaagggcaagtcccaagagagagcagaggagagtttggaagagaagctgcccccaggagagaaggaaggtgcaagtgtacaagtaaacacggtagcaataacccactgaatgccgctctgctgggctcaaggctgaacgacatctggacactgctggacatctgcagctctggtcaacaaacacactgcatcccagccagagggccctcctgcatagacagtgcctaaccctggggcttctcagctaagggagagggaagcgggcctcactccaaacaagggtcaccccttgccggcctcacatctaaagggaccaccacagtcaagctgaggaacttcctcagcaggcccctcaccacccccaccagcccaggtcaaccgccaggagactgctgagggctagacagctacccagggagagacagaagccacaggatgccatgggggggtgggggggtggacgcccagtggcctttattattatgtgaatctcattcttccctcaaagcaaccctggcagatgttttataatttccaatttctttctttctttcttttttttgagacagaatctctctctgtcgcccaagttggagtgcagtggcatgatcttggctcactgcaacctccacctcctgggttccagtgattctcctgcctcaacctctg

SEQ ID NO: 64807 - DNA, 1455 bp, Homo sapiens
tggaacttcgctcacgccaggtggagacactggctgccctatgcccagtccatgctgcttcctgcagccaggggcagctgcacagccaggcgtgaacattccccacatagcagtcccagggggaagctgggctcagcaggatctccagcccccaccttccccactctgtccctggctcctgctgaggtctggccagcagttccaagcacagacacagactctagaaagtccagagagatggacatgatggcttcccttgagggcctgtttccctctcaggctggggctgcccaaggaggcctctcccctctggctggcagctccaggacggaacctcctgcagactacaggttctctggcagacactgtggtctccatcagcaagctggtccattccaagagggcagaactgaagcaggagctgtcagacaagctggtcttaggcttccggaggaaaaccctcacttccagtctggagagcagcccaggctgtggcctgaggatgagctggggcctgggggaggctcaggcctgccgacccagctgctgtttattttcctccttctgggctccttcccaaagcaaacaaacccgggtaggaaaatgaaggggatttgtaggagagggaatttgccacggccaagtggctcgacccagggacctctatgctcccctggagagggctccagctggagctccgttccctgctggtgacccccgtgggcagattcccaaactggcagatgaccccaaaccgggactcctgggaatggaaaaacacttcaccccacaccaggaaacaacaacaaaaggttgacgtgtgttggtgacgcaaaatacacaagtactctcattccactgcctccaaccaccaccagtggggcttgggcagcctggggtccaggggcggcccacttctcaataacagcagctccgatcccagctgactgaggcccactccctggggtgtgattctgcaaggatccctacatataaccctctcctgggaagatccatctgtttattgtacaacacatgctggaaaaccaggattggaataaagttttggctaaaatctgttactgtaggcagggtgcagtggctcacccctgtaatcccagcactttaggaggccaaggcaggtgaatccccttgagctcaggagctccagaccagtctgggcaacatggcgaaaccctgtctctacaaaaaaatgcaaaaattagccgggcgtggtggcatgtgcctgtagtcccagctacttgggaggctgaggtaggaggatcgcttgagcccaggaagaggaggttgcagtgagctgagatctgcactccagcctgggcaacacagtgagaccccatctcaaaaaaaaaaaatgttactatatacaggggatgagctcatcaagatcaaggctaaagaacaaaaggatgttgccgagcacggtggctcatg

SEQ ID NO: 64808 - DNA, 1770 bp, Homo sapiens
cttctgcctcaataaccagccagctaagtaatgtgggggatggggtagaggcaaaaaaaaaaagacaagaacaaccactccccccaccttcctcagtttggcccagccctgccccacccccattcctggggagggggcagagcttgagagacaaccacttacgcaggccttgtctgagggggtgtggtggtcccaggaggcaggaagagaaggaagaagctgcttcccctctcagcactttccaccccccaccccggcccctacctcaggcccctggggcccagcgaacaggatgaatgtgggggcagggaagacagggtcggagcccaggcaccggcccaggttcagccaggggccggctgggggaaggggttttgcaccaggaaggaccccctaagcctaaaggaagttttgggcaaggagacgggaaaacccccagataaagctgctgtgaatacttcctcctgcaaagtttgttttgggtgattttttccaacaataagaggttagagaagacgggtcctgttcccctaccaacactctggcagccacagctactggaaactgggccaggtgaccctgaattcttcatccgtgcacagaccccaccccccagaccccagggcgagccacgggtgccagacaccagctggacactgagccgagccctgcaccccccagtcactccatcccacctccgctgaagaagccagagccgggctcccaccggcgtggagggaggcgccgcaggtagtatcgacgaggctctgggagctggagggcagggcctctggactccgtgcgctcacctgctcggcaggtggggccagagtcgctgggaaaatgtgcgctcggcccccacagttgggcaagctgggcgcaaacaatagggccccacccaggcctgggggagtagggagggagggaaagcgaggatgacgcgtggggtggggtgagggtggccccaaagagaccagcggcagcaagttccccaaacggtaaattcctgactgcagcgtgagccctgggacgcagtcgaagcagagcaaagtctcccccgccagcccagggcgagagtcagggacgcggcgtcgggcgagctgcgcgggccccgggggaggcgcgaccccggaggcacctgtccggatccctccccgccttgctcagatctctggttcgcggagctccgaggcgcgctcggcccgaaccgcgcgacccccaagtcgccgcgcccaggaccccagcgcgccccctgccgccggtgcagggtggcgctcgatggcaccggccctcacctgcccagggacggctgggaccggccccgcggccgctcgccacccctctgtccccaacgatacctgcgcccccgatagcccgcacctgagtatggggcctgaccgggccgggtcggggtcgggccggggtgggagccggcgcggacagcgaactgagctcggcgtggtcgggcggcggctgctccggactctggccaaggcagcaactcagtaaccgaacaaaaggcgaagagacctgacagccaagccacgcccctcgccacctcgaagctccgcccctgggggagacgcccaccctctggtgcgagctcactggctatctcgcctgactgtcccgtggaggggcggagcctcgcctccagtcctcttccacggccgcctctgtttatccgcttgccattggccccggggactgccagtcggctctagggatggactctaacttgaggtctcatcctaacattgcatctattgg

SEQ ID NO: 64809 - DNA, 1168 bp, Homo sapiens
gaaggggcgtggcagggggagtcagggcgcccccaacatctcccctcctctactagccctcctctacaagcctcctcctgaccctccaccccacctcgtagggctgggcctctaggtccgtgagggactcgtcggcgacgtccagcatcccctgatagtagttgagatacttggcggtcagctcgtgcttcgggttcctctggaggaaggtgtaggccgccgccaccgccttctccagccggttagcctggtcggggggtagggggtgggggagcgggtcagcaagaccggagctcgcggccccgagcgcacggcgggcttcgtgccttgggtgaagataacgctccttcgaccgatctgtggggagccacgacgcccagcccgagacaggtccccgggtgggggcgggctcccaccttgaacagcgcgtagtgcaggtactggtagggcaggcggctctggaagtcacgcagcagctgccgcggcgggtagggcacctggaaggcgggcagcgtccgcttgcagcgccgcaggcaggcggctcgctccaggacgcggccgaagagccgcagctcgcaggcccactcgtctgcgcggccgccgtcgggatcgggcttggccgcgggcgcggggccgctgcagttggcgtggcagaaggcctcgctgtcgcgcaggagccggtgcagccgcagcgccgcctccaggtagcgcgcgctctcgcgccagctctctccctcgtactgctccagagcgtgcccgtacgccgcggccagcggcatcaggtcctcgggcgggaagccccggaagctgtacttctcgtactgcgccccggcgctgcccagcagcaaccacagcagcccccacgccacccgagccatgcccgccgcgccgccggctctccggagctgagctggctgccccgcggacggaaggggacagggccgggccccgggcgggcggcgcgcccgctgggtcttagcgccgggcacgaggcggcaaggtggggcggggcctgggtcacgacgtctcccctcttttcccagagggtccgatagtgtcgttaagtcctctccgtcggcccgggctcctgccttgggggtgtcccctaggtagagaatgcgtcggggagcgcttcccgccagagatgggaagcccaggaagcccctcc

SEQ ID NO: 64810 - DNA, 1068 bp, Homo sapiens
agtctcctagtgtgggggcaagggtgaatactcaggacccctctgactccttcaatatcaggtccctcctaagagatctctaccattacggcccatctggacatcttcaacttactggggagccgctggcttggggaggataaggccctaggtactggtgtgggcgccttctgtccaattagaggaagcagcatgaccatattgagaaatctgaaatttgggttttaggacaggcgaaccaacccgctctccttcaagctcccggccatttcttggggcagagagctaggaggggtccgcggcagagcaaagcgggaaggcccaatgggcaggaagcctctccagccgcccccagcccggccggcccccgcacgccccagaggtacctgtaaccggtctccgccgcccttgcggagggcgcccacgatctcctgcacccgcccaggctgccgcatcaggaccgtggccttcatcagggtgctcacctgtcccgagacccgagagaaccactgacccctgcgccacgctgggcccgaggggagcccggggctcgctcgggcgcgcgtgtgaggcggggccggggtgcgcgagggggcggctactggcctgggtgaagcggcggtgcctcggtgaccagctggggggctcgaagcgccccgggggtcggagtccgggcccgccccactccggacgcttcctccctcctcacctcctctgccatcccgttcgaggcctggtcggcggctcgcgggacaacgacagccccgcgaccgcactgcgcaggcgtcgcctcccgcctggagcccgggcgggggttggtggggccgggggcggggcgggggtggggccgagaatcgagcggtcccggagatggccgcgatccgggtgggcttgccggttgcgctaggcaaactggaggagggttctatttattatgaagagcagggtgaaggtcccaaggtgttggggttacgtgggtaggtagggttctgccactctttgtggaggaaaagccttgccaaacgtggtcatttccaggctgaaagtttgtgacaaaaacatgactgg

SEQ ID NO: 64811 - DNA, 1332 bp, Homo sapiens
tcacctcttcagaaagatctttattcaatccctagcctttcattccttttgaacgtcagcacaacagttaccacatactgactttccttttcatcacttttgtcccatcacctagtatctgagctccttgggcgcggggcgccctcgccggacctgatggtgcatcctcctcgcccaccgcggtggctgcccccaagcaggcgctcagcgagtgtgaaaccaatgcattcactcaggactcgcgagctgccgtggcaggcactgccctcccctccgccagcgagcatctccccctctccgcgcccgccgccctccgcgctcccgcctccctcgcctacctgtcggccaactccagcacctcgtgcacgctgcccgtgctgacgcggatgcgcccggtgtacatgtactcgattacggcttccactgtgtcgggttcgggccccggctcggagctccacttgcgcatctccacccgtcccgagcgggactcggaaaactggcccgagagcaggggcgtgaagtactcggtggcggcagccagtaccgagcggtgggcccggaactcgcggcctccagccccgccgaagcacagggtaatgtcgcagaagaggccctggcgccgctgctcgttctgccgccaggacagctctgagcagtgagagctgcactcgaaatcctcggcttctgggcccggatcgcccccgctcgcctccattgcagagatccccggcccaggcccgaagtccaccgtgccgctgcctcggacctcggcggccagtcctgccgagccggcggcggccgtctccatgctctccatctccagtacctgaagagatgcagccgcggccgccgccgccgccgccgccactgccgcagccgccatcttgacgccgctgcgcccggcctccacagcctcggaacgatgcggctgttggtacgacacagagggattctgggattaaatagtgcgcgcggggcggggccaggtcgcccgccggccgcacatgcgccgcctcgcctccagcagcgccgcctcgcctccagcagcgccgcctcgcctccagcagcgccgcctcgcctccagcagctctgcctgccttggtgaggtccgtcagtaacagtcgcccagtccagaagacttcgccccaggcctacccccagggcgtcggtgcgagtatggctcgcttcctttccttagtgggtagcatgctctctgcagtcattttgtcgagtaaagccaccttagaccatcacctgttgttaaagccttgagtggcaatacaggatttttataagatctagccccagctaagtggatgagggatgaatgag

SEQ ID NO: 64812 - DNA, 912 bp, Homo sapiens
cctagttgacatttagtgcatgtctgttaaatttagttatgaaacaaaaataacatttctagaaaactaggtttgcttttagctgcataatcaaaatgtaacgtggctcctgtttcctccaataaacttgtccaacgtgagggaattaggaagttttttctttgttaccttcgaggtggtaatcttctctacttccagtgcataatcgagcagaggagtggcagggaagtgctgcctgacgtaatctttgaggatctgcactcgcatgtctgggttgtttatctagaaatgaacccaacggtacagaggaacactcacacactgctgggatgtgtttgttcatacttgtgttacaggtaggtagaactggacatatcccagcggcgattcaggaacctggcccacgtgtaccattccatgtggcaccaattgtgctaatgccatgaggctggcttttgaagtcctctcatatctcaattgggacacaaaacaaccttggtaggttctcacttttaagttgcaaagaagaaactgagccctgagatgttcagggaactggccaggtcctacagtgttgagcagcagaggtctgaaagttaaccactctccaactcaagagtcttaggttccagcctccagccatgcccccgccagctctgtgcctactcaagctgtgacaaagttcaacactaaacaaacacgtgtttagtgtggggaggcaaagtattcccaaaattttagggaaaactctagacctgctgtgaatgaaattaaccacctgtcagttggggaggaagatgatctagggacataccaaatcgaataccaaagcaacttcagccctcagcaaaagagatagctgggtcagtacatcctctagaaagcggggagctcaaagagtgaatgagtgag

SEQ ID NO: 64813 - DNA, 1538 bp, Homo sapiens
acccctactatgtacccacaaaaattttaaaaagaaaattttaatgcagcaagtatatttaaaaaaaaaaagaaaaaagtgcagtccttagcctaaagggaaaggacttttaccacgcttcaggcagttgactttcccctctgggtccctgcaagtccaagaggaggaaagcagccctcagggaggttctgagctcccctaggaagaatgatgcatctagcccagtggcatctcgtattaattaacctactgtactagagcaggcttggctaaccaagttcatggtctcattaaatccctgtacaggcctgcctcttccatcacagccttacagcttctcatgacagaaggttcctgatgttgcaaatacctgggatttactgtcacctagaccccccgggttctgctgagacatgagatcacagaacaaggggagccacctaatccagttctcccacttcccagtcctaggaaactgaagcccagagatgccaaatgattgaggtccgaggtcatccagcatcagagccaggattacacaatcacttaaaatgcagctcaactgtgaaagtgaggagggagaatataagtgtgagttcatgacccgccatcctcaggggaagcctgcatcatgtcacccccgccaggtgacgcacgtgcacatgcctctgatctatctaccctgccagctacagaaatcaagacaaagcctggaatctaccaacctaccagcatctccagcaggaagggtggaggtaaagtggcccttcctcaagcacagagaaaccaaagctgaagggtgtatcctcagcccaccagcagcagagaggctccagagagaacctctgtgccaggggctatgccccctacaccaggcctcctctggcctcgctgaggggagggctcgctcagccataatctgttctccctgacacaccctccttttatttctctcactccagaaagtaacaaggataacccccctcctcataaccctcctccccttcagagcacagagagctcctggagaaccagggctggtccctgttctttccacactgggctcactctgctcttaactttttccagaggcaaaaacatcaggattaaagccaggtggccacagtgctgcattccaggcctttccagctggttatcgaccctgccaattactccttcccctccccttagcaaggggacaacaaagacttccccgcctccacggctgtgaatgtcaaagttaaatggacgctctgatgccatgaaccaattaatctactcagctaggctggtgggtgaatgcgcatgcacagaagtatccactgtaaaatgtgacctcatacaccagacaaagctcataccccttccaattacccagtcactagatccgctgcacacccttctgcgcttccgtctacctccttcttcacctcttttgttcctccaccacaaccccagaaaaagataaactggtccctggagcttgaggatgaagctggcagtggtgaagccgaggcaggaaaggtgggaaaatgaca

SEQ ID NO: 64814 - DNA, 574 bp, Homo sapiens
gggccgcagggtgcactggactcccaatcagcaggattcgtttataccacctcactggacacccatcttcctcctcccccagggccatttagctgattgagttagcacaaggccatctggtccattagaggggctgcatcctcagctggaatgatttgatttctcgccttcctagactctgccctgagaagtcctggccagagccagcccacgccactctccctcaacaccacctgcttccttcacagcccaagagactgagaccaagctcttcccagcatcaagggttaatgattgaccaactcccacagagggaggcaagtgtgaggcctctgagtgtaccaggaggaatgaagggccaaagggtgagagcagtgcagaggctgcccacctcctgctgtcagaaagcctgacctggcgggaggagcagaagcacacagtcagatcaaaaccaggacttctggccgggcgtggtggctcacgcctgtaatctcagcactttgagaggccgaggtggacagattacctgaggtcaggagttcgagaccagccttggccaacatggtgaaacccc

SEQ ID NO: 64815 - DNA, 856 bp, Homo sapiens
ttttgccagcagaggaagaagatccagagataatgggtgagggaagatagagaaaaacaaaagtgccatttcccctgggactcttgccttaccctgccccattccctctaggcaaactagctgatccacaaccacactcatcctggagcaaaaggcagctggctagaaggccaagaaaaccggtgctttgacccaaatctgagtgctggtcccatctgaggtgggcagacactgaaacacctttctgttctctgaccagtgcagagtacggctgaaattgcaaaaggctagcctttctctccctacaggtttcatctcccccacacccagatttacccctatacacacccttacacaccaccgggccaatggccaagccagcaagtttacttagcctcaaaaagggtcacacccccaggtcctggttagaaggggagtaggggaggggggaggatcatcgctaagctcttttctcctcttttctcctggacactagcctcccaatcctgagtatggagcagacacagggcagggaaaccgacctttagcacattccacccgccccactgcgtcatccagctgctaatttagagcaaaactcactaagaagaacagatgcctctctggggaccaccctgtagtggtcacttctaactggggcggactgagaggaggaggaggaagaggcagaaaccatcctccatcacatgtataggaaaactcatcttggagttcgaggctacagtgagctatgattgcaccgctgcactgtagcctgggtgtcagagcaagaccttgtgtctaaaaaaagataaaaagaaactcatctcatatgagctctgggaggtacactgag

SEQ ID NO: 64816 - DNA, 2669 bp, Homo sapiens
taagaggtgaaaatcacccatctgggcaaatgagacctaccagctgtccctcaccccacattttagttcagctgagccagctgaaaacacagaggaaagttaagggtggagaggagtaggctagctggccaaactgtgctgtgcacttttccttatcgtctcttccaaaatcctcttcccaggaagacctccagggaccccataacggcagaactcggcactgcacggtatctgccaaggttggagaccgcggcaggcgctgggactggcccattgccaggctcgacaggagggcggcggcagcatcctccagccccttgaggacctttccccggccagacttggcgtcagctcaagggtggggtggcaccccggccatctgtcacttaggggctggactcgacgatacctccagtgcgaggagggtccttgctgcgagattccagtcctcgcggcgagacgaggcgaggcctcgggcaccctggggcagcctggccccgcgtggcccgccccggaggcgcgcatagctcattctctccacttgggcgtggagctcaattttgtacccacggaaccaagaagggcctgagcccggccagtgaggaatcggagtgggaccagtcgccaccgctttctctacttcccgtcccggcatccgatgggggaacccggatggagccaaaaggcgtcccgatgagcccgaggagcctcgatagctgtgcccgggaggggtgaggcgcgccaggagggggaccatgcaatgtggcagaggcagaagaggcaaggatggcggcaagccccatgcaaactcccaggaactggaatatgtgtgtgtcgcgcggggggaggggaggggcgtcgacacgcggccaccggccgggaccccgggcgaaggctaacctaaagctaagaccctcaaaacttccgagcagggcgcgtgggcaccgagcccgcgtcggggaaggcggttccgggttgggggacggaggcaggaagctcctagggcgagcgggctccagccagcgaaaacagcctcccgtgctcacctctgccgaagtccgtgcgcggcgcttcttccacaggcccgacgaaccccgcaaaatccggagcaccccagcagccggtagcttcccgggatccggcttttgtcccggcccagccggacttttccccgcccccatcggctcgcggcgagaacggccccgcgattggccacacgcgttccctagcctgagcgccagggctcctcccaattcgctgctggcttggctccgccccacgagggcgggccccggggcctgctgggacttgtagtcccgctggcccatccaccgcctcttgggagcctgcggggccggggcggggccccgggtggggagatgggccgggctaggctgggaggagaacgcgcggtgctgggggttgtggcctgatcgcttgaggggctggacagattgccactcggggagttgggggaggggcgggtaggattagcccaactggctgtaacgcagctttgggacctggagtacccttgctccttcccttgggagaaacggacgtctgcatctcggccgcaccgaatccgattgcttagacagtctccttaagcagcagtgtctggcaggccgctttcctttagcacgtggagcctctctcctccctggactctccccactgggccgatgaggcaaggctgagccgaggctaacagagcatacttcccagtgtgggataaggcaggggccgcggtaagcaagtggggctaggagggtgcaggcacagcgctgtccgtcccactcacctgctcgcctcagcacggatcagggcggagctaggaattcaatgcgagattccagcgaagggctggagccatcccagacagtctcttgttcccaccaaccacaggcttagacactggaatgaatgaactgctgtctcccccttctccattacctgagacagatcgaattttccaaaccaaaaactgggacatccaatctgacaggtgctggtgaacttgtggggcagaatatgtgaaatcagtcctggaaatcaggacatgtatttaccactctgacatgctgcagcctccctccctacctgcaccccaaccctgtaggtccggagctgctccctaagcctaacagctgtctagctccaggaaggaggccaaaagcgtccactgaccgactcaggtgaagaggtcagcccagaatgcagggaagcagcaggcctgtccccctgccaagcactttgggtcatactcacactgcaacagtgttgcgacatttgcagacaaaatcttctccaagaccccctcccccaatcctgttgctgccaggagtaaggtaactgaacttgctacccatgcctgaatcaagtgttccctgatgatgtcactttctggtcccttccctcccattcatctttttgaaatagcagttccttatcacctctcttctcttgtcctaaaatgggggtggccagtcttggtggctcacacctgtaatcccagcactttggaaggccaaggtgggggatcacttgaggtcaggagttcaagaccaacaaggcaaaaccccatctctacaaaaaatacaaaaattagccaggcatggtggcacacgcctataaatcccagctactcttgaggttgaggcatgaga

SEQ ID NO: 64817 - DNA, 908 bp, Homo sapiens
aaactttagtacaataacacaaccagaaaattgacactgatacaatccactgatcttactcaaatatccccagttttacatgtatgccgtgtgtgtgtgtgtgtgtgtgcatttgtagttaaagacatctttttactatttaaactttaacaatgacattaggacgttttggaagtaacgtagtaaaggcagttaagcaagctacttagggtatcgttggagcccagaagaagcacctagtccacttttggaggagtggtgatggtgagggaatggggaaggacgtcagaatatgccttggtcaaggcccgctactagtagctgctcaaataactgcgttaaattatgttgaacccaacgttattttccatgttttcttatgcaaatcctcgcatccctgagtgttccattattttcatatttatttggcaggtggaacattcgaggctgggagcccttacatgccccgcgagaggtcacgcagttaggaagtgacaggagcgaagtcagcccaagtctgctgactccaagcccagtgctctctccccctaatggcggtacgccgtgcacatatccttaccacgtatgcctcatccctattcggaactttgcctccaaccctcttcctgttttcttggctgtcttacaagggagccttttcaggcagcaactccagagagaaccgccagagcgtgcaacagcaaacactaaccagcccagccgtcagccacgcaatcatcactccctggcccagtgcgcggcagaactggcgcaagcgcacgccggcaggttgtacccagaatccgggcccttgccagacgggggcggaaccggaagtcgctgtacatctcatggttgctaagaaacggagcttccacaaaccagatagaggttctccagcttttctt

SEQ ID NO: 64818 - DNA, 871 bp, Homo sapiens
ccaccacactgctgccagtgacaggatgaaggacagaagcctgagatgaatgtcccacatcaacatggggatgggagtattgccattagctgataagcctgagcagggtcacctgtgaatcaaatgcctcttctccagaattggcttcccaaggtcatgtgtagggttccctgttctgtgacacaggaacagcttcactgctggcacatctccttagcaacaggcctgaatgcctcctattctccagaggacccgctgcggagggaagaggtggcttgaatattacctcaagtggccttgtagctttgcttctggctgtaacctctggccaggcagtgggcaggacttgggcacccgccttccagcttccagcatgcacaggcccactgggcacctgggaaatcactgggcactggcagcctgggccagatcgtgcatttagactcagtgttatctgaggacacagcttgaactggggaagccccgaggcttctcagcgagccatccaccagctgccccttctggctagctcctcatatcttgccataaggggcccatagcatggaactccctgatagtggggctctggctgcctcctggcctggataaacccactctgccactatgcgcactcacactcctctctgtttcaacaactccaagcagagcaagttcacagagggccctgcagcggccaccgggaggaaacaggaggcaaatcccttagaggcctgttctccttggcgcctcctcacaccccttccccacagacctgatcaaaggcaccatgaagggcggcctgactgtggaggacctcatcatgacgggcatcaactacctggatactcacagcaacttctggaggcagcag

SEQ ID NO: 64819 - DNA, 2240 bp, Homo sapiens
ctgctttccatcactattttgccattaaataggtgtctttcactcttgcaaaccctgagtctgtcactttgcctcttcacccctgcccattcttggaagagcatcgtggaagaaatgagaaaggtgccaagaagaaagggtttcaggagggtgaagatacgggcgctacagggaacaagaagtcacagggaggagaggggaaggcctgggaggagaggtgcttcccacacaccggtgactgactgagtccctccagtgcgcaggacagcggggaggctttatggatggaacagtggtggggcggccccagctgtcacaggtaggagaatgccgcaagccagaaccaagcgaatgctgggagtgaggccaaagataggggagtggcctgggagtcgggagggcagacagactccgcctctgacacctctgggtggcataatcaggtaaatcaggctctccaagctggcttctcctctgaacaatgggatacctgcctcaggggttgctgcgaggactgagtgcttagcacagcacttggacaggaaactcaaaaatccaacggagctctcagtggtttcacagaggaggtggcagctgaggatctggcctcagaggatgttaggatttcactccgttactcatctgtccctttggccattgccatcctggtctgtctccacagctcctagaaggaaaggtcggggctgagactgactttcggctggcacagggcctggacgaatgaggccagtgaggcatttcagatgcagagtttaccggaatgccagcaaattgcatgataatattttaatccaatgtggtaaaaaaaaaagtttttaattaatgcaaaagtccatgatgaataaaatatcaaaaattaaagacaggatccgactttgcacgaccctgcctcactcacttcctgctaatccacgggaccggggagggtgactgagttacccctcaacacgcagaaaaagctagtggccgctcagctcgcaggcgcagtgggtgggtgcgcgtggggagcaggcgcgcgcagggggcgggaccgggccgaggttcccgcgcgcggcgagagtttcgggttttggttcgcagcgcctgcgcgcagaggagacggcccgcccccagcccgcccgggtgcccgctccgccccccgggctatgtaaagcggccgggctcgggtcgtgccaccgctggactcccgtgtccctccgcgcaggcgggcggccccggagcgctggtgccggcagaggcggcgacggtggcgcccctcctcatcatggtgagaggccgggcggggccgggcacggggtagcaccagggcgggaaacgagtgtcggggcccctcgggaggaagcgtcttgcaaacgaggacccggggctccgggttcgacttccagttttcttggtactcagggcggccctgaggtctgggagaagcggaggggttttggggtgccggagaggccgctgtaaagggaaacggtggtgtttctcaggagggaactcgggaccgcagaagctgctgcgcctctgggagcctgggtgggcctgggccgggagcccgggagctgctcccgaccccacgcaggcccgcgctggggcagccgcttcggcgccccctccccgggcccagtctcatcacgcggaaccgctgccccgcgcccgggtgcgggcgggaggtggagccagttcagaggaggggaccctttacggtaaaagctgccgtcccttgtggcttctagaagataggaaaacaagtggctccgagaggcgcttctgacacacagcacagcggcgggtagagctggatcctaattgcaggtgccctgtgctgccctgttctggacaggcacaaagaccacgactttgtgggggccgggagagggtagaggaggaggtggcaggcttggtgaaagagggcctttgtccagtgctctcctgccctgccccccaccagcccttctgtgggaccattgtacccgcatgccagacaagagagtattatctgttgcggccattgttgggggaagggaggcagtcttggggtaacccttctccactcccccccttctctgtgcactcagccgtggcagctgtggcttggcccagacacagagacccccacctccaaagaggacgtccttagtaggtgccaagcatataagagtgaggccagtcccagaaccgcaggctcctggcgcgccccgcatgcctccagcacgtttaccttt

SEQ ID NO: 64820 - DNA, 918 bp, Homo sapiens
atccacagtctccaacttccaagtgtccacccccaagcccactctcccacttctctgcctaggttagcacaatcgtttgtttgttcactagagtgtcctcccaaatggaagctcccctgagggcgagtttttaagtttcgttgactcctgtggttccagcaccctagcatagtggaatgaatatgtaacacctgagctaccatccctaaccatgccttcatttagcatttattaactacccatttcatgccagacactgttgggacaagggatcgtgagcaaaaatagaaaagcgtttatgctgagatgggatgggctgtctcaaagaatcagatagaagcagacatatcatcagatgggaaccaaagtgtaagagcaggtttccatcaagggcgagtctgacctcagtctgacctcaccctgtcctccagggcgctgtctgggtcccaggggaagctgagcggtgccaacagtagcagctgttgtgtgcgcggacacccctgtgggctgtttacctagtcactctcataaccacattaactctgaggtaggctctggttctccctgttttacgggtgatgaagccaaggcaccgagaggtcagccagcccgctgaggccggaagccagtgtgcagggagctgggctccctcaggaagtccggctgtccccgtgtggccctgtctgagcgccttcgtgtttctcacttgagcctggagcgcctatggaaggtgcgtgccgcagttgttagtggatgctgggcctataccgacccctgctcagctgtgctcacttctgttagacttccccttctctcctccaggagggaccctccctgggtcagctgttcctcaagagcctgccatctctagcttgggcccctctttctcactctccccaggtgttaaagaaatcttac

SEQ ID NO: 64821 - DNA, 684 bp, Homo sapiens
tgcattggtggaatccattcgtagaatgtcactgcaatagtcagaaaagggcacattgagctgtgctttagaatgtccccaccattactaccatttgtggccagttttcctccttgaccatgtgtctagcattcaaaatatccaaaggtagacagattcccaagaactgttcccaaactttccccaaataaaccacctataattatctttaatacacatcttgtgtcttacaatccttattaaactagaacagggtttggcaaactacagcccacagggccaaatcctttctgccactggtttttgtaaataaaacactattcaaacagccacacccattggttcatctattatctagggcaacctttgcactgcaatggcagagttgagttagttgcaacagagaccctgtggcctgcaaaggctaaaatctggccctttgcagaaagtgtgccaaccagtggagtagaaggaaaaggactaccttaaacaaacaaacaaaaccacaaaaacacaatctgttctttcatatatagctcaagtacctgctatactactatactcctgtataccctacgggttttcaaagctggtctaatctttgactttaagtcccaagagggtctgatcagccctagctggcctactctggggaccatatcctgtggtgaagctgccggacac

SEQ ID NO: 64822 - DNA, 1264 bp, Homo sapiens
gggagttcaggactggcttctagaaaaaatgcaaaggatgattttggtggacagttactaataactactgaggccaggtactttccatacagtatcctctataaaacacagtccggtgaacttcattattcccatttttcaaaagaggaaataaggcctgggggttaaataacttgcctgaggtcaggatgttacccatgtttgtcagaatacaaagcttgtgcactttctactatgccaagctttctctctaatgcttgcctccgcttactgctaactattttgaaaattagtctgtactacgaggagtaagacatggacaatatatgtaagacatggacaatacatataaatttgtttaaactaagacacacagtacaccccacatgtaatattcaaccccagaaccaaaatcggtatttaaataagctaaatgacattcctaacaattagtcatagaggaagcagggctcctttctctttaagatgcaagacctagtgaactggactttgcctccccaaagaaatgcatttcattttagtaaatggtgagtagattccattctagagcaaacaaagcaagtaatgtagagtcagcccacagcaaaaagaacaagaagaattgtgttgtgacaagttgccatgtttttaacctcacactgcacagcatcaggccagaattagctattcccacacaactgcctcatgaaaaggacttattttcatagaaacgtggctgattaacagctgcctaaacaatgggcacttagtgcttttagactgaacgcttattttttgccttcaggtccaatgcccaaagtggactggagtccctccttcattttgaacctccccaccaaatacacaacaagctttaaccagtgggcctgaccctgcgagaccagtcgaggaaagagtggatctttggaatccagcatggcagcagcaagaactgaacaaggctgcatcaggaacaattccagtgtcaaatccattcaagtcctgccctggaagtctgagaaagggctgaagcttgttcaagttgcctttacagcaaagggactgaaggatgagatgtcaaaggcgtgggactggaaaaaaaggagaagagctggttaacactggaattgaaggcaatctggtggtggcatctgtcactcactcactgccagggtcaattcatctgatagccaagtgaggttgtaacatgcacctactgaaacacaccagtactgagaaaagaagacttaggattaattggctt

SEQ ID NO: 64823 - DNA, 2178 bp, Homo sapiens
aagggtcagactaacccgcagctgataaggaaagggctccaaacttctagaaccttcttgtcaattctgctttaggattagaacaagtatgactacccacaactctgttccaaccccacttccaataatctggcctaactgttgccagaatctagagcgttctcgaaaaccactcactcagcagctcccttggctagtccgactggcaatctcgaaccactgcggctgcttcggagtgccaacagcgcccaagcagttgccctcttccttggtgcttaacttaagaaagaacagtgctgggaaggataaagatcacccaggaaggacaggggaagaggagtctgacgtagagaacacgagataagcccctcgctcttcctttttttctctgtcatctttgacttctgggataaccgggggcaaccaggtcaattatggagacacacaatcacttcgaacccagactagtgatcgctggggtataattacaagggaaaacggggtgaggagagcaaaggttttggagacggaaagtgcagacaggcaacaatgcacagaagttaacaagagaacgcgggggtcgggggcgatgtaaggaagtcgtcatcgacgccgcgccgcttcccccacctcgcaccagacctctgaaattgccctcggagactcggcctctcctataaggacgatcgtcctctcagctggagaacaaggccatgcctcagctcctacgccaggcggaagcgggagaggaaggccgacccccaagagcgccccttcagggggtccatccggccttgatctcagatgggggggtgtttgcggagggcggggcatcgcctcaacagctgggggctgcatcatggcaggaacgagtttccctgagccacggagctgcaggtcgcctcctctactaccctgctacccggttacctcttcgcctcttggtcgtcgagcagctccggctcggtcgccgccattaccacatcgcactccgcggcagccgccatcttaccgccgggaccagagagctgggtgggaggccggcggtgaagagcacttccggttggagcatagagcagctccgcggcgccgcgcccagaagggctccctcgggctcgtctaccagagagaggctccgcttggggccagagcggcctcccgcccccggatgtccacggtggtctccgcgccggggcgggagcccaggggctgtgccggtgcgtaggcggcgccactttacccgtgggtgggaaggcggggtgtaccggtggtagcctctctagggcttggctgctttcagtattccaagagcctcattgccatagcaacttccaatcctagagagtcttcctgaaaggctccgtggagtctgggttgcgtggggaccaggtgacccaagactctgtagggaaggagtccccactgctacctttccgaccttggagtgtgtccacagcttcttcccgggaaagtcaagagacactttgagctcagttcccccagctttcatcgttctctggaagccctgcccagtcaagccaggggaacgcagggcgtcttcaccctgcgcctttcatccactccggatctccaaacaccaactggttcatcaccctaatgacgctgacccttttacaaggctcctttcatgtcagccgcctgggagtgccatctcagcattaagcctaggaaagctgacacatggcgccccagaccctgccctggagtttataaggaagctcgcggggtgaggtccttgctcttgtgtccccagtactcccacctcttatataaactctctactcatcacgcttgccttgccgaatgcggtctggattgagaattcataggggacaagggcacagtttaactgtctttgttgttattccctcacccaaacgactatttgtggagctgaattaaattggagctttctggggttaaattggaggagtatgaggagtagctttacaatgtaaagctaagagtaaaataagaagagggcaaaggaattttaaaaggatttacctgtttgttccaggaaaacagcatgtgccaatgctcatactctgcctatcccagtgtggagggagctgaaaccacagcgaccactgagtagggagggataggacaagctcactaggttggaaaggaggggtcattcgttgagccaatcac

SEQ ID NO: 64824 - DNA, 983 bp, Homo sapiens
agttactgtactctgatcgcctttacagagagaacatctgggcctcagagacaccagaacacccagcggcccgcgtccagggagtctagaaccttgggctcccgcgcacacccaggccaggtcctggccgtcattctcccgccggcctctgggggagctgcgcggtccgcgctctctctccgctgccggaattcgtcttgcctgacggaagctggggagcgggcaggcggcgggggcggggcctggaggagcctacaccgactctggaggaagactggagcctttgcggcggcgctgcccctcccctggtccccgcgagctcggagggcccggctggtgctgcgggggccccgggaggtacggacctgggaggcgaggctcgtccggcgctaggatcggcctccgcctccgggccgctttaggtggctggtctctgcctctcattccctctgggggctcccccgtgagaaaatctgtggcggaggcacctctggcccactcttatggtgtcctttattgtggggctcgctatatggagagggggtctgtgtcaggagcttcccctggagaggtttctgttagggaccgtctttgggagtgatctatctctgctctctgggggggatctttgtctggagcttttggggggcttgtgtttggaagtttgccttcggggagatatctgtctgggacctcttagggtttctgtatctgagctttctcttttgtgtctgtcagtccaagggcagcaaaaagtatgtcctttctgaagcctttttttccgtaggtttcttcattcttttctctcttgtcttatgttcattttagccatagacttgactggagtttagagggaattgattgttgtccagatgagtcgtacaggaaagcagattgtctttttttgagacggagtcttgctctgccgcccaggctggagtgcagtggcatattcttggctcactgcaatctccgcctcctgg

SEQ ID NO: 64825 - DNA, 2238 bp, Homo sapiens
gtagagatggggttttgtcatgttgctcaggctggtctcaaactcctggactcaagcagtccacctgcctcagcctcccaaagtgttgggattacaggcgtaagccactgcatctggccacgaaggcccttctgttctccagaatcccacagtaagctgcagggttctgggagtgcttcctcacctgttgttgagccagaaactgactgctaataatgagcatgtatgggcaatacagagctggtgatagaactcctaaaaggagggctagatggaggccagaatttgaacagaggaaagagaaaaaaagcaaccatctccttccccacaatgagtggtatggaatctagaaagagatgagatatcagccattgagctttcctctcatagaactcctaggtggttgccagcccccatgtccattcctggttctatggtacattcacaggcctatgctctgtccctcttccccaggtcaccatcgtggtccttggcaacaagtgtgacttacaggagcagcggcgtgtagacccagatgtggctcagcactgggccaagtcagagaaggtgaagctgtgggaggtgtcagtggcggaccggcgctccctcctggagccctttgtctacttggccagcaagatgacgcaaccccagagcaagtctgccttccccctcagccggaagaacaagggcagcggctccttggatggctgaagagctgccgttcctctttcacgatcccagccccatttcagtgtctggggctctggtagatgtgttgagggcaaagtagaggacaagctgtctttcccagtcagccagggagctccccgccaggccacgccccagccactttgctccctctcacctctgggaagtgcaaatactcttggttgacatccccttcctcagccctcccagcctactccccatcccagcttttagaggatctgctccactgtctcctggggcagttgtgggtcactgtcccttccagctgccccagacaggaagcagagtcaccacgcagcagtgtcccttcttgggtctgagttcctattataggtaggggccccaccctctgggcttcccatcagcgacacacacacacttatggcaccagcctggactccagaaaaagggtgtccaggtattgtgtgtatgcatttagttgtgcacacacaaatatgctcctatactggcattaggcgtctcctcatccctcaccctgacctttctcctgtccttttcttggctggaagaagttggcctcctgggagtgtagttttctgttttaaatcccccacccctggctgggctcagtggctcacccctgtaatcccagcactttgggaggccaaggcgggtcgattacttgaggtcaggagttcacgaccagcctggccaacattgtgaaaccccatctctgccaaaaatacaaaagttagccgggcgtagtggcacatgcctgtaatcccagctacccggggaggctgaggcaggagaattgcttgaactcagaaggcggaggctgcagtgagccgagatcgtgccactgcactccagcctggtcaacagagcaagactccatctcgaagaaaaaaaaaaaaaattccccacccctaccaattgttttacttcctcttcctgctcagggagcagatgggcctcactggttgagatggaatagaataactgggctatgagtcaccagcccactttgtgacccagcaagacctttcccctctctgggcatcagtttctcatctgtaagatgaccagagttgcttagatgatctcctagatcctttccagttctcttgatttcgtaaagccaatggcttctccctctttaaggtgctatgccaaccagccctggaggctgggatctgccgctccctccagccaccagggggcaggagtgcactacctgctgtcagtcaccagagtggccgctcagtgcccagcccgccagcctcgctcttggaggctgctctttatcctgcctgtggttttcagctcagagctggacttctatttataagttacctgtatttatatttatatgcccgctctcatggtgaaggctggacaaggtgctcctctggcccctccttcttacctcagatgcctgaacagaacaaggcaaacccgtagcagcctctcaggagctgacaggtcctctttcggggctcaggagggtgggcacacacccagcggcctgcagagtaagcttat

SEQ ID NO: 64826 - DNA, 1447 bp, Homo sapiens
gtccaacacagcagccactggccactgcagctattgtaaatgcagctgtttaaattacttagaattaaataaaacattagcattcagctcacactaggcacttttcaagtgcttagtagccaatgtggctagtggctattgcattggacagcacatttacatcatcccagaaagttctattggacagagctgctataaacaggtcaaattccattgacattctccccacctcaacctcaaggaaacaggctgagtggagtgaggtgtaaacaaaactccatgggtccagttgtgaccaaggctgaccaggagggcacacttgctgcagacacaggtctcctctcatttctctccacaccctgaccagccggatgggagcaggaacaacttgacaaggaccccaaggcatgtaagcctcaaacagtattcatgtggccccagaatgtgggtcccgagcctcctccccgggctcctgggggccccttgctttgggaccccactaagagaagtccagcactcagcagacagggccgggcgccccctgctctgacagccctggtgagaaggggctcccctgcacctcttctcacgcatcctcccgggggctgggacggggagggctgaggaacttcctctggggggcgcgcggtgacagagccctcggtgggtcccgcagaggcactgagcctccgcccgcccgtcccgcccgctccgggagggggcgtccagcccggcctggcgcccccgccccgtccgctcgcactcacggagacacaggagccaccatcttgggcggtggacgctctggccgcggtctccttgggctccacggagcgacagcagccactagcggcaacgggggcgaagaggcgccagcagccagcgccggccagggtcccgggcagggcgggcggcgcccccggggctcacctggccgcgcccacctgcggcgcctcccgcccagcgcgctcagcccggccccggccccaccccccagcccctgccgccccacgcgcggcagcaggagccagaggctagaccgcaggcagcgcggtgccggggttcattcggtccgcgcatgtatccggggttcctcgaggggctcacagcctaagccacagacaggtagagcgcggtagaggctgcaaagtgttctgagagtttggaagcaagtgctttgggatcacgaaggagcgggcgaccagctgaaggtctgcagggcgggtcaattagggttcgcagcattctgggtaagtgaacttttactaggggaagggcactccaggccgtgggatggcagagcaaggattcctctggaagttgacaggtcgctgcaggttcatgaagaattggggtgggtgggggcagtgcctgatgctggatggctctaggggaatgctggggattttgaccttcccacctggtgggaagcctcctccggaggagt

SEQ ID NO: 64827 - DNA, 1074 bp, Homo sapiens
cccccttccagctgggggatcaatctgctgttggctgcgccagggtgcggctccctcgggtctggcctggtcgtggatccagttccttcacagctgcggcctccccgggtccattaacgaaggtggggaagggcggagaaagggtcggagtctgggaggagagcagctgcgggcgcgccagggcgctgacagtctggctcttggaggtaagatgggcgtggctgatcccgaactccgcctgcgtttgcagaagcgaagggaaccgagcgagcggagctgagctcgggtaggccgcgcgaggtccctcctctccgggcgtccgtgcgcctagctctgcgctgggagcctcgcgccctttgacagcagttagttgctgactcggatgcagagagtcggtaacaccttctccaacgagagccgggtggcatcccggtgtcccagcgtgggccttgctgaacggaaccgggtggccacaatgccggtgcggctgctcagggacagtccagcggctcaggaggacaatgaccatgccagagacggtttccaaatgaagctggatgcccacggcttcgccccggaggaactggtggtgcaggtggatggccaatggctgatggtgaccggacagcagcaactggacgtcagggacccggaaagggtcagttaccgcatgtcacagaaggtgcaccggaaaatgctcccgtccaacctgagtcctaccgccatgacctgctgcctgaccccctccgggcagctgtgggtcagaggccagtgtgtggcgctggccctccctgaagcccaaacaggaccgtccccgagactcgggagcctcggctctaaggcttccaacctgacccggtaaacaaacgacgcgatgtgcagcagccttggtgtccgttgtcttttctggggatggaagtcagaggtagagggactggaggcacaggaggcaggaaaggcaccctcaaggtggtggtccaccaagaatcaggcctctgcgggcagatcacttgaggccaggagttcgagaccagcctggccaacatggtgaaaccccatctctactaaaaacac

SEQ ID NO: 64828 - DNA, 1827 bp, Homo sapiens
cacgatctctgcttactgcaacctctgccacccaggctcaagcgattctaatgcctcagcttctaggagtagctggaactataggtatacgtcattacacccggctaaatttttgtgtattttttgtagcggcggggttttaccacgctggccaggctggtatcaaactcctgcctcaacctccaaaagtgctgggattacaggtgtgagccacctgtaattttttttttttttttttggagatagagtctcactgttgcccaggctagagcagtgatgcaatcacgattcactgcagccttgacctcccaggctcaagtgatccttctatttcagcctccagtcaaactcttcttcaccagaatcacccagggcctttagaaaataccctgaccaactgaattagaatctctagaggtggagtccagaaatcagtattttaaaaataagttcccagtgattttaagcagttgatcgaagcacaagagctacagttgatatacgaaggagggagaaatccaagagacagaaaggcacccccgatcagtgctgtgcacaactcgtaagtgtgcatgtgtaagtccatgaatgtgggaggggtcttcagcttcactcagcaactggagccttctccaagacactagatgctgctgcaattcctccccctaacctccctttgaaagtttcacctttcctctaatccacgaagtcacccacttcatatgttttgtccttcctggtaaaagggtgagcaattccagctgatgagtgtctcgtgtacttcctgtttgctttagagacttcctctagctgagagtcctggcacagcctggagagcaagctgattagggaaaccaatcagactgttgaccagggcaggcggggcgtagagactagctcactcaaggttagccaggtggcctgagaaccaagtgaccccgcccagggtcccctgcaggtgcttctgaccagtgactcttcagctacattttaccccggaaaagggcattcctgaatatttaaacaagagtccagcaaaacaaaacaaaatcaaaccaaaaaaacaacagcagaaaggagttgttaaagaaaatggagcaagagacacaggaggaagtaactcggttcaaaggctaaagtggaagacatttgatttaaaagccaactggagtcaaggttttgcaaatgcttcccaggctccgattagttggggagatgatttacccataggctcaagaacacagctcttcctcaaaagggaaaaccactgccagcacacagaaacagaggacagactcacagcaggactatccaggcttctagctggttgcagacccagaggaaagaagaatctgaagcaacgccagccacgatccacacgaggtacccacaaccttccccagcgtggctagcaggttaggacttgggaggctgagccgggtttggttcaagctccactccaccgtttattagccgtgtgaccttggccaagtcacacaagtgatcattatcagcttcagttccttatctaaaaattggtattctttaatactaattgcatggggtagttcagatcaagtgaaacaatgcaccacagtatcaggctgaaggtgagctttcaacaagtggcaggtttattaccccagaggctagaattggtagtcagagcccaaaagggccttaaagaccccatcctactgttgacaattaaagaaaaaaaatgaaggtgaggagaagtgacctgcctagggtcacacagccagctagctggtggcagagcccaagcctgcccaagactcataactcaagcaaggctctcctattaga

SEQ ID NO: 64829 - DNA, 2120 bp, Homo sapiens
actgtaggaatcagatactagccactgtccagaagccctcaaacacacctcaaggccaaaaaacacagcacttttaagtggcaagcgagggtggtaaaggtagcccagaacactgaagagctacagaagttcccacaaactgcacggctttccgtcccttcctccactgtagatagcaagggtcagtcatggcctcagagccaggctactcctcgttaaggtacagtctccggcctgtactttggccacataacaaagcttggtctgagacagcagctatttcacacacctaagccccaagcaacagacaaggatcagtcaatatggttgagggaacctgcactttctggcatgtatcggaattcctcaggctacaattaaaaatccagaactgccattgtgatcttgacttagtcctcagtaataagtccaagccctgaagggattgcagacagaccctggcgtggtgtggacctgttgctcagggaggtgtatgtgtgtgtgtttgggagtgggaaagagatggcccttcaattccagactcctcattttgggtcttattctcctccctatagacacacggacagcagtcccaagaaaagcagtccctttgaggcggctgggaaaccactcacgtgctctgggaggacagagctgagcctggagcaaggggggaggggaaagaagataatgaatgggcacatccaccctgatctgtgatctgtagctaggattgagcaaacctcagctaaattcttcagaggcagaaagagagagacactcaaagaacaacataactagaggacagggctgggagacagaaggggcaaaacaggaaaacagctcatttctagtaagtgactttaaactcagctgaggtcctggttggttctctggcttgaggaaagagaggaagtaaggagttgcgggagcgcacacacacttctgtgcgtgtggaacggtctcacccagacgacccccctcccccaaaggaaatcgagatattcctctagggctagaggggacaactggttttgtgggacaggaggaaggaaaacggcgacagacagcactccctgtcacttctaaaagagaagagggacaggttccttcacacctagcaaagatcctccgattctggaagcagggggagcggaacttagggtacctctctcccacaactagaatggacaggccagaggacagtcatagcggtttccttaaggctcaccaaaggcaggtaagctaaggaaagaagctccccacctcctatggcccgacgcctggggagcccctcaagagggggctacgggtcgggggaggggtcagtatccccctaaactggggctgggcgggaggaagggctgccctggagatgcttcaacgcaggcgagacaccaggtcctgggacaagcatactcacggcggctccggggcggcggcgttacttggggccggggctcggacgggatccgcttctctccccgccggcggtgtcccaggctccggcctccacttccgcctttcagccgctccggatccggatctccacctccgccccgcccctcaatactcccaggtgattgacagtgcggagaccaatgggaggcactcttggccgacctacccagcggcgccggtaggaacgcgggagtggcggtagggagcgcgcgagggatcgcgggacttgtagttcgcagcgctgggaggagtcagtggctgcctgggacttgggcttagggtggagccggctgactgcgaggcggagcccggccggaactttttttttttttttgagacggagtcttactctgtcgcccaggctggagtgcagtggtgcgatctcactgcaacctctgcctcccgggttcaagcgattctcctgcctcagcctcccgaggagctggattataggcacgcaccaccacgcccgactaatttttgtattttttagtagagacgggggtttcgccatgttggccaggctggtctcgaactcctgacctcaggtgatccgccctcttcggcctctcaaagtgctgagattacaggcctgagccaccgcgcccagcctacggccgggaactttttaaggctaaccctgccatccgcgtcaccgc

SEQ ID NO: 64830 - DNA, 940 bp, Homo sapiens
aaaaaactttttggagagatgtctcactcactatgttgcctaggctcgtctcgaactccttgcttcaagggatcctcctgctttggcctcccaaagtgctgggattacaggcgtgagcaccgcgcccgaccgctgcaacctttcttgctttccttccccttccgcgtctctgggtaaagtccccgctacagaatgcctagcagagcatcgtaggagtcccgcatggcccgatccaagcatgcacctgtgcagttctctctgtgccccagggccttgcactgggaactccccaaccaagagtgtttccgattcaaccacgcaaaagctaaggctggtgcccgacagccgggcttccaggcccagctgtcctccgcaagacgctttgccaccccggatgggcaggacgcgaccgcacaggaacagagaccagtcacacgaatggagactcgtctttattgccttttttctgggggctgacgctgggtgggcagagggcagaggcctgggccaggacagggcccgaagaacgactcagatcccggactgtcctccgggcgcgacggaggcggcggccggggcggaacagcggcgcccgaggcaggggcgcggcgctggctctgcgcctgcgcggcggcccatggtcaggatgcccgcggcgtggttgccgctggcctgcaggaggcgctgcagccgaccctggaggcccgggggcccggacctccgcttgcccagcgtgaggatgccggccgcgtgattgcccgcgccgtgcagcagctcgtagaggcggcaagagcaagtcttttgacgacagcagtcgggcaggggctgtgcagccgccccggacgacaacagcgcgggcggcagcagcagcagcagcagcagtagcgtcacggcggcccaggagacctagggagacggagacagggcgctgggggggtct

SEQ ID NO: 64831 - DNA, 709 bp, Homo sapiens
accaggacatttaacattaagatgaactaaaattgtgcacaaaataattgtccacatttactacagcactcatagtgggagtaaataaaatgcaattacttttgctaaagcaacctactttttctggtaacagaccgtctctcactatacctctaatagtagatctacacacaacttagcatggtgtaggaacttgagtgcatgctcctacagcacacaacagatgcactgaaaggctcccacctcttaactaacagcttatgctgcaaggcatcagccaggataacggcagagcccttctgtgtatgtgttctttcacaggcggcactgttaccggaagaagcgaagagcagcgatttccttccaaaaggtcagctgcctcagacagaccaaacagaaagcagcgaattcttgccaacttcccctcctgcttctgcagctagtacgcaatagcatttagtttccagtaaagctccagataaaaacaaagcaaatgtgagacccagaatctacacaatgtcagtgtctcgcttgactgaacgaagggcagtaagatcatatggagctacgctttttcaacgtggtggaagtgttaggaaggtgagattaaacatgaagaaaaggtcaggactggaaccatccagattttataccaatgtccagaagtctccatctaaaaataagatggtaggctgggtgaggtggctca

SEQ ID NO: 64832 - DNA, 513 bp, Homo sapiens
gccactgggcccgacctaggctctgaattttagacaacaaaaaatagtttctcacaaactttttaacttactctcacctaaaggctggaaaaccccagtgaaggcttttaaaactcatcagacatagaaaaaaagaagcagctttaattgtaggatctcactgacacaaacataaggaaattctgagttatagatacctcacattaagctttttccactgacattgtaacttctgtcaacattcaaagaaaattcaaccctggtcaaaggtgacagttgacaatcctggaagctaacatcctctgtttatttgaacaagtttatactctgcacagggaattgaagttcttcttgtctgtgacttgatctcccaaagttaaagcactacgctttagggttgtgaattctgtttccaagacttaacttcacaatccactcccaaggaaaagtgctgagagaaagtaagcatcataaatgaaaaaaaaaaaaaaatctgagactattttctaatgg

SEQ ID NO: 64833 - DNA, 2097 bp, Homo sapiens
cccgtctttctaaaagctgacacttggttttcttctttggcttttccatcactgctggctacaagtgtttgcaaccgcctcttgctccgtgtgagttctttcctctttgttcaccccgaccatcttgccagattcctttagcctcagaccagcttttgtgatacaactccccttccgactctccatatctaccccccgacaccaggagcacttttaaccctttatccctgactagaaagaaaaagcacactgcatcccacggccacacgcacgagcccaggcctggcgggtcctgatgtgggatcccgccccccagagtcttatcgaaacgttcgtatttgttgtcttgattccttataaggccctgtttcttgaagctttgctaataccccccaccgcaccaggcacccccgcaggctcatcccatccccggagtcccgggaacctcttttgaaagaaagaagttaaagcaaggaagacggctggggatattcggaattgcaacgtgaaggtgtgaggcggctgacagcagccccctgagctcctatggggtcggcgcggggtccccacacacccactcagcacacgcgcacgcagcctttaaagcgcacgccccccgcggcgccgcggcgttcgcaagtccccctcgcgcaccccgcattgccctcagcctccccggcagccaacccggaccccctctccccgcgcgcgcccctcgcccagcgcgcaaccaccgcggcccgggagtgatggcggcggcgcggccctgacgggcggctgagcggctggagcgcgggccccgcccgggctggctccccggcctggctcccccggccccgggcccagggctcgccccgcagctcctacctcgctcggcccctcgggcgcccgcggctgctccggcccagctgtctggcttgcccgcccgcccgctcgctccctccctcggccgggccgccgcgcggagttgcctgcgctgggtccccgcccggggtgacggctccggccgccgactctcctcccgccggggcccgcgggggcgcgcgcgccgctcacgcgcggaggcccagggacgcgcgccgctggcaacccggagcgcgccccgcttcctggttccgcccggcgcgcgctcgctagcccgctgtccctcgcgccccctccgcgaccgcccttgaaggacccggaccccctcggcacacccgaggtggcggcgcgctcggcggtgccggtgccggcgccgcgcgcaccccctttctgcggcggtggggtgtcttcccggctcggctccctagccgacgccgcaccgcaagcacatgctgctttgtttgggttgggtcgaccaccactagcagggctagggcgcactgtcgtggtcgttttggttggccccctccgcggcccgcccacctctctccctgggagcccaggcccgcgttccgggtcctctcccgccgaggccgaggtcagaagtccacaggggccccgatcaataattatcctgggtttgcccccgggagggcgtctcagccagggctcctgccgcctgcatgggcacggcaggaattcacattcgcccaggccgaattcacctgtccgagttccagggtgaacctacgggggacggggcgcctggggccggttcccttcctgggaaaatctggctggctcccaccagtcagagctgcgggagggactgctctctctagagaagaaagaataaacagggtcatctgtaggatccaggggaagggggtcccccagatcctttccacgtgctgaggagggggttgcggttgtgggaagccaggctgagtcacccactctcctttcctctgctacgtctatctcccggagctggccagcggtttccctggcaaccctccaagggctagcactaaagcaagacataggaaagctccagaagccaagctgcaggggccaaaagagagagaaggacccctcccgcccccactcagacacacagagctcccctgtgtgtatgcaaaacgttcatgtccagagatggcccagagctgcaagttctcccatagtcctccctgggcagctctttccagcggccttctcttcacctccaga

SEQ ID NO: 64834 - DNA, 1429 bp, Homo sapiens
tgggtggccccgggcaagcccctttccctctcaggacttccatttcttacctgcaaaattgtggagagggggagggctgaaacacatgactgccaagattctttccagttcctccgtcagggttgagtttagatggccggagtaaaagaaggagggaggtgctgcggtggtgggggtgatcttggcttcactagaatccccagttcttcccctctctacagttttgtctctgaggtcacaaaacctgtggcccccaagacacacatgcgcacacacgcgcgtgcacacacacaccccacacatttattttttaatctaggggctcaaaagatgacacgcgccagagctggaaggcgtcgccaattggtccacttttccctcctccctttttgcggatgagaaaactgaggcccaggtttgggatttccagagcccgggatttcccggcaacgcccgacaaccacattcccccggctattctgacccgccccggttccgggacgctccctgggagccgccgccgagggcctgctgggactcccgggggaccccgccgtcggggcagcccccacgcccggcgccgcccgccgggaacggccgccgctgttgcgcacttgcaggggagccggcgactgagggcgaggcagggagggagcaagcggggctgggagggctgctggcgcgggctcgcgcgctgtgtatggtctatcgcaggcagctgacctttgaggaggaaatcgctgctctccgctccttcctgtagtaacagccgccgctgccgccgccgccaggaaccccggccgggagcgagagccgcggggcgcagagccggcccggctgccggacggtgcggccccaccaggtgggtgacccggtggcgcgtcctcggcggcgcgccgagaggggacactctactgccgccccggcacctccggcacccggagctcgacggccgggcgcagcgcggggatcagtccccggcactgcgagggagttggcccagcgcagacgagggacggggggacgtggggacaggggtcggggatgaaaggcagaggccagggagggcgccgtcctggcacgcctcggagagggagcacctgtcgggctggacccggggaggcactagtgcacagatgggggagcagccgaagaggggagcgcccaagtcctcagccctgtctcctgaacagccccagccacgtgcccgaaaagccctagccgtcgagtgggagccgtcgtggcgctggcctaacttcgggttggaatatctccccttcccagaaaccgggcccgaggtgggctgggggatccttgcagccctctccagggggcctgtgggcctcccgccgtcaagtttctctttcagtttctggccgtccccctcactagggaagctccggtggggcgaggggagaggaagacgggg

SEQ ID NO: 64835 - DNA, 1103 bp, Homo sapiens
tgggtctaggatatggtgggtggacaggggccccgggacttggagggttggtcctcttgcctcctggaaaaaacaaaaacaaaaaactgcagtgaaagacaagctgcaaatcagccatgtgctgcgtgcctgtggaatctggagtgaggggtaaaagctgatctggtttgactccgctggaggtggggcctggagcaggccttgcgctgttgcgtaactggctgtgttctggtgaggccttgctcccaaccccacacgctcctccctctgaggctgtaggactcgcagtcaggggcagctgaccatggaagattgagagcccaaggtttaaacttctctgaagggaggtggggatgagaagaggggtttttttgtactttgtacaaagaccacacatttgtgtaaacagtgttttggaataaaatatttttttcataaatttgctgctatggctcctggttggggcgttggtggcctccctgggtgatgggaacccctggagctggttgttctgttccttcccgcgtgcatgcctgatgctgtcatttttagtcttaaattttaactctgcccgctttgctgtggttttcagggtgctggccacccctggaatactgtcaatgcttctcagaagggtaaggagccagtttagggggcacagattccttaaaaagcaggggactcgaggtttggggaaatgatggagatgggcgcgggtgggcagaactctgacccaggcttctccttagcagctgctgctcccagcagcctcgaagctggcggctgagggcccggcgccaagatgcttctcaaccctcggggccaggggcagtcccagagccgcaacaaccgtcccatcctcctccttcccagagaccagcaggtggcaccacgcggctgcgctgttttcagctggctgccggcgactgtgcgaggcggaggtgcagcaagcgggaccggctcgccccggctggacccccgcactgccggctgcagccagtccctgctgtcgctggggcccttgggctcagggacgcgcgctccctgggcggggctgggagccaggtttgcgggcaggttccttctgagctcagagctcaagc

SEQ ID NO: 64836 - DNA, 1793 bp, Homo sapiens
agagtgggtgaatgagacagcaaccaggagaaaagaaatctacctcccacctcaaaaatgatcacctcgactgaaaactgcaaactgtctctgcaccccaactccccaactcccctgtttcctggcaccagcacagcgccttgctcaggaaagaaacatggcctaatgctcagtagacatggcccaaatgaacagccctatgggccggatcccttttctgggcgggtgggcgggagggagaaggggtgaaatgcggacccaagagtttctctgccagtgtagtcagctgctcgatgctcagtcctcgcttggtggtggaggagaactgccagctcaggacctcggccacttgatcccaggttccaattgggggcttggtaaaaaagtttacattctattggaaagaacacatttgcttgtttagatgagggatggtgctcattgtctatactaggtacccctaagtcgcaagagatcccggggcaccaactaaaaggagggggcactaaccttgggattgttggtcagcatgttgtaccacaggatggacgcccaggcatttggcatctgacagatgttggagatcaccacaactggcaaggagtgggtctgcggagggagtggggactgagctggggaggcagaggggctctcacagccttggaaatctcttcacccgcatctcacggggctcagaatgaaaggacatgccataaaccacacctgctgccaactctaggcgaggagtgtgagtgagtcagctcagtgagcactcatagtggaaagaatgcccagcgtggccacacaactcaggctgcagtcggaatataccggtcccttgtaaaacctgacttgctcaaagcttgactcacaatccacagattccccatttttaagaccttggaggcattctccaagacttgaagctgtatcttcacatgaaacagggaggtctcaggaatcaaagaccaggattcctgcttttctaggtatatcttaatttaaaaatcaagaaagttgggaaaggagaatgtcattgccacaattttctgtatactaaacacactggctgctaagactcttatgcccaaactttataaagtcagttctaatttcttttttttttttttgagacggagtctcactctgtcacccaggctggagtgcaatggcacaatctcagctcactgcaacctctgcctcccaggttcaagtgattctcctgcctcagcctcccgagtagctgggattataggcgtccgccaccatacccagctaatttttgtattttagtagagacggggtttcgtcatgttggccaggctggtctcgaactcctgacctcgtgatccacccgcctcagcctcccaaagtgctgggattacaggcgtgagccaccgcgcccggccaatcaatttctaaatagagattttcatatcaagtttgctgaaagctgaatatacacacatcttctaagcattcaagcaagactttattgccagatgggatgccaaggatttttttggagaaaagtaagcaaaaataaacacagtgttaagcaaacagtaatcattccaccttctcttgtaaaaatcccagtggaagtttttgtcctgagtcacccctgtacgtagcctctcaccgattctgctgcagaacttacctctaggtcaatcttgaggccttggtgatacacctcggtctcaaaggtgatcaggtgcagctcctcagtcacaatcagggaagcctacagtaacgagaaggacactcttaggccaggtgtggtggctcat

SEQ ID NO: 64837 - DNA, 1393 bp, Homo sapiens
tgtatctttagtagagacgggctttcaccatgttggccaggctggtcttgaactcctgacctcaagtgaccagcctgccttggcatcccaaagtacggggtgtgagccagcacgcccagctaggactgctacattttaaagaggaagaattgttcaggggacaaatgtaagaaaaagaacggggcatcacaatttttaaaaatgactgaaaactagccttccgtcacatttacctttttttgtttgtttgtttaaagtttattcttgacaataagaatccaataatctgaatcaatgaaaagcagaaaataagggggataaagaacaagatgggtttttgtttgttcattttattttatgtactcttttcctaagcaagctaatgcaaggtggtcatttattttaaagtttaactcaaatctgttgcttttacaccctctatcccacctcagtgggagagaaaaacagggcactaaaaatggagccaagcagggtcagccgcaggagctggatggggaatttggaaagccccaggcaaggtggaaagctgctttataccacatgggtgtggagaacaactcagcaagggactttccacttctccttaaggaggagccaactcccagatattcacggaaatgttccaagccagagagctccatggcacatggaacttctgttcatgtcactttggcctgaagtgactttttggaataactacagctgaaagaacaggttgatgtttctaattctggggattaagaaggatctttacccctctctccctcaaggaaaacaccccagttgtctttcatccccaacaaaacttacatcacaattggctcggcccccattcccacatctctgctccctcagggtctgtaagaaaagaaaaaggcaggtgtcctgtgaggctctccctagccctctccggcagccagaggccctttgtgaaggggagctcctcccacataccaagtgtttgaattctgcagagaggctgccgttgttggattcttccatgttcatcacttttgtgtttgtgcccagaatgttaaatttccgggatctgaatcacaggggaacaatcaactatgtaggtgaccaagtagccggaggatgaagttaggttaaacggaacaaaaggaagcctctaggctgaacttaccctctgagagctgcaacgtccccagagtctctgtaagaacacagactgttgttaataaaataggctctgtgtttcttcaaaaagcctactttgaccacctgttatttactgtcatgaaaaaacctctgtgctcctgggcatttctttaaactattcagttacagttgatcagcgcaacataacacctctgcgtagcaggcacagttggttgcctccccataggaa

SEQ ID NO: 64838 - DNA, 515 bp, Homo sapiens
caaaacaaaatgaacatgagaaaaaatgtgaaaaaacatgcattttaggaagctttcaccgaagcaggtgctcaagttcagactcaaatcttccaactcttgtaataaaaatgagaggtcagaataccacaaactaatcaaatcaatcaaacaaagcgggaaacaggtggctgacaccagactgggcagggttttcctaaattgggcttaccttcactaatccaaatcagttttcagaaatggcttctacaaaaactacccaaacatccccctaataatttgcactcctcctccacaatagggaagccaagccgtttatttcccagaaggtttactttctctttcaagctctgctggcttcttcctgccccgcatacggccaggaaaaaagaaaagcactgccttttctttcctgccttctctaaaactggggagatggggtgagagaacctgtttcatggacaagctgggtggttcttaactgcaacactgttctgaatacagattagtttgca

SEQ ID NO: 64839 - DNA, 2767 bp, Homo sapiens
tctaaaacatttttttttaaattccagacttgtttccccatcccactgtgcaaactgaacaaaaactgggctagcactcctgtctggaacatgtaataaggaaataaatgtgctgactcagagaacacagacatatttaatataaaataagatagaaaactggctgaaccaagtcataacacagtctaaatccacatataaaagattgagatgattttctgctttgctttattcaagcccaatgctttatcagcacagccagccaaaaatttacaacccatacacagactatgtaaacctttagttgcacatacagtaagaccagcaggtacacactatacacatttttaattaaaaaaatgactaaccactgattttgtcaccacacttaacaacgacctgatatggcacagagtgatgtgtaccaaacatggaaataccaacttgggcgacggtttgaatcttgttaacttcagtgcaaccacaccccccaaatgcatgtaaagtttgcacacatggttttttcaaggccagcctgtctttgtttccctctcctctgcatttacccaagatcttggctctgagacagaaaactcccactctcaattggttcattccgtcctatgcaattaagcaacaccacaatccagtaaatgcaatggctcaattatttatcttctggccgactttaccaggtatttggaaaaggacaatgtcaagaggtttatttctctctctagagctggcttgacgggttgatggggattttattttgtctttttttctcttttttacaaggcggggacgtggggggagcataatttaacctagaaaaagatgcgagggaatttagaaagagtaccggtctgtcaatttccctacaggaaacttgattcttatgcaataaagcctacccacgaccagccagcccgtaaggctgcaggcgacagacacacctattcctgcctccaaaagggcacagctgtctcctgaaggagcgggaacagggcaagcggaggaagtggctcagcgggagccgccgaccgggcggggaggaggcgctttccgaccccccactcgcgccggtgatccccgtcggcgtgacagtcgctccggtggccggaacgtccccagggccccagggagcaggaaatcgggggactgtccctcactcctgccgccgcaaccgagtgcgccctcgccccacggtgccccctcgagcgcgttctgtttctccgaagaacgaaacttccctccagcgccccgagtcccttccgaggcccgctcctgtcatcccgaagagtcttccctcagggcgaccctccgcgtctcttcatctctcccggccccactgcagcgtccatcacaacatccccaaggtcccagaggccccctgccgctgcggagcccccgggtccccaggcctccccaacggccccaccctgcacccccttcacctgtttctccggcagaggccgagaggccggggctgcgcgtgtgccggggacgggcggcgaggctccctcaggccgaagggcctctccgagccgagggggagagacagcgccaagccggggtgcctgtccaggatccggttggggcttgttccctcggctgcgacgtcggaacccccggctccccctcccagtctgcgccgccgcagctccggaaaccgctgaattacagccccttcagccaatcctcgcccagccccagcctggccgaggcacgccgtcatgcataattcatgaaaggccagctcgttcggccacccagaggtcccagtgcgtgtgcggtacagccgaagccccgcccactgaccaatgaggagagcagctaggagaaagggcggagccaagaggagactgatacgcccctgtgctggctgttccgacagttcggtgctcctccctccgccacagcgagggaagagccgaggacttgggcacagaagcccggggggagggagggaagatgaccggaatgtcctgctgaaaactcagctgagttcctggcagtgcgtgacgtcaaggcactttaaatgcccctgatacagctccctcctgcccgctctcccttttcccggcccttggcaccacgtggtggcgaggttgagagcctcttaccacgcgggaatcagctagttagatagtccccaggtatctccagatcctctggggacccaactcctgaattgggttctggggacaacaaaaagaacatgggtgactccgcctgctttgaacttcagtttctgcgtgagcagggacacacacacccggaaacatgacgtggaaatagagtaattactagagtgcgtggggagagggtagtggatttaaccccgtactccgttccatcacttcaagcatcaaacgccgaccagctagcccattggcccgtacaggcgaatgcagaagacggtgtatacgaaagctgataacgtgtagggcttgacatttttatgcgtctgaattgaaatacatgaaatgttctgcctttttcttttccaccttgcctacttggtatgcaagttttactgaattgaagccagtggttgataggaaatgtagacattttgcctttcataatagaggatgaactttgcataatggagtgatttctgtgtatgtgctgatactatcagggtttttaatttttatttttttgggtctttaaaaatatgttattaatatttgtgtttgtttaatacgaacaggtataaagacaaaaatctaaaaaggacccattatctcactgctcagct

SEQ ID NO: 64840 - DNA, 1164 bp, Homo sapiens
tgccttggcctcccaaagtgctgggattacaggcttgaactaccgcacccagcctcacaccataattctataattattaatcaagccttcagccctatgcctttctgctttcacgctgttcgttttgcctgaagaacctccctgccccgtatcactgcttgcatttcattcacacgtattgtgtacctgcctagctcacaggtcctcttttcctgggagtttcccctcctccctgcaatcagacactgaaatgggtcccttcagccacatctgtattatatgatcctgtcctcctggcctttgattatttattttttgtttatttatttatttattttgagacggagtctcattctgccaggctggagtacagtggcgccatctcagctcactgcaacctctgcctcccgagtagcttggattacaggcgctcaccaccacgcccggctaatttttgtatttttagtagagacgggggtttcaccatcttggccaggctgatcttgaactcctgacctcgtgatccacctgacttggcctcccaaagtgctgggattacaggcctgagccactgtgcctggcgggcgttattaaactcagggcaaacactaatgtgaactagcttactcagagtctctctgtcaggaatttggaatgttgaaatagaaaggcacagagcctgggagcccttagagctgagttccattaatatcagcactcagggagcactccctctgcagaagtccctggaaatcccctgattcctactctttcactaagtaacataaaccactataattgtgtttgagacacttttaggttctggtgacacaaatatcaagtaaaatgctgcctctggcctccaacagttatctattgaaatcctgcccatgtttagaatcacagctgaaaagctcccttcttcctttaagttttctcatattccccaagcaggattaacccttctccagggtattgtcattgcactttgctttacttctcttaccttaagtcatgtctttgagcttgtatttacttatgatgtatttgtttgtttgatgccttgaagatctttctggatattattgtgttcgtgcaaaggtaattgtcgtttttgtcaaagtaatggcaaaacccacaattacttttgcaacaacctaataa

SEQ ID NO: 64841 - DNA, 1767 bp, Homo sapiens
tccaaaagctacatttttatccaagtgtgaagaatggggagagctgcaaagaaagcaacaagtggccccgggcggagccggggggtgggggcgccagcctcctcccgccggctgcgctgctgcgcctggcccccgcccccgcaggcatgcggggtgattcacctcgcccagactgcgcccagaccgccggaccccgcaggggctgtccacccactccaccagcccctcttgcactcctgacgcccactcttccccgcccagccccgcccgcttccaggaggcccagggtgccagcgcgccgcgggtgagggtgtcctcaagggcctgaaaatgcctggtggccaggagcagagagcagcgaggggacaggggtgggccgccgaggccgatgtgggggcgcgggggcgcagggtctggggaggaggttggcggtcgcgttccccgcttggcacagcccccgctggtgcgtgcctgagccctgaatcacccgctatatcaggcccgcaggcgcagaggccccaggcccgggccccgcagccagtgtccgcttacagcggaccccaacgatcgcgagggacccctgactttcctagaaacttcccccaagtaggaagaagtttgacagagccaattagggagggagcggtctgcgaggggcagcgtcctcgagtccacccgctaattcggttctgctacaagtttgggacccgagggaaggatctgagtggggaggtgcgaggtgcagagcgcgcccctctacgcgccccaggagtccgccgctccctccaccccatcctaccccacccaaccccaccccagccgcgctcaccggaaggagggtggatctgccgggcgcccgggccaggctgggaggggagcagcgccacgggcaggtctccccaccccaactcccaggcaggggacgcgggccgggcgcgggagctctgggcgccttccgccctgtgggctcacctggtagatcatgactttaaagttgcggcgccgcagcagctcggcctcgttgacctccagcttcttgatctgccccgcctggcgctccaggctgccgcgcacggtcttcacgttgacgctgaccttgcgcaccttctccagcagcttgctcaccgtattgctcgtggtggcgtgcgccttgcccagcttgctcagctcgccctggatgctctgcactgcgccctccatctccgcctgccgctcctccagctgtgcttgagtcagctggatctggtctacggccccgatgattttgtccaggaggctcagcaccagcacgccgttcacctggtccgacttgatcagctcttctgagccggcccccgacggctcctccgctgcctgagccccagcggaggaaggctccggggcctcggcgtcggggtacccgggaagcggccgctcgacaatatagagcgtggggtcctccatggctacccggagccgtgcgggaccggccgggtggggctggagctggagcgggagacccggagagaagcaggagcggaagggaggagagctagcgggcgagagcggagagcagaggaaactcgagccacgtccgtgcgcaccgggacagcggccagaactgctgggcgggggatcggtgagctccccagctcccgggccaaactccggagtctgatcgctgattggctggccccaccccagaaagggagggaccggggcagaaggggagatcgacgaggcggggcggcggagggggacccaagagccgagcgccccacccttccc

SEQ ID NO: 64842 - DNA, 650 bp, Homo sapiens
gggctcaagtgatcctcccgtcttggcctcctgaagtgctgggattacaggaatgggccactgtgcccagcctcatcaggaaagtatttctataccacttcttcaaacaggaatgtcagaatttgtggatgagtcaagttatgtcccaggggtagtccagtgaatacatctctgactcatttaatgcctccttaatggatgatttctgtaaaagggccctacccctgcatgcctatgttggagaaaaatctgcatcaacaagtttctctcacattccttttcttactaaatgccagctaagtccaacagggggcatgctgaggcatattgtactagctccaccagcacagatgccgcaaactggagcagagcagtcctttccagagcatttcactccattccagtgaaaataagcagtttctcttcatttgtaactgcattcagcatgccattgcctgcattcagggttgttggtttgcattttccattgctcactctatttgcttgctgaaaggcacactgttccattgtgtgctttcagccactgagacagaatccataaaagggatagtgaggtaaaagcaaacaacccctttggcccagaaaaaggacaccaggatgcaacatgtcagcagttagaatcttacagg

SEQ ID NO: 64843 - DNA, 2434 bp, Homo sapiens
tgagccgagaacgcgccactgcattcccgcctgggaaacagaccatctaaaaaaaaaaaaaaaaaaaaaaaaaaaaggccgggcgtggtggctcacgcttgtaatcccaacactttgggaggccgaggcgggtggatcacgaggtcagaattcgagactcagcctggccaacatagtgaaaccccgtctctacttaaaaaaaaaaaaaatacaaaaattagccgggcatggtggtgcgtgcctgtagtcccagctacttgggaggctgaggcaggagaatcgcttgaacccgggaggtggaggttgcagtgggccgagatcacgccactgcactcctgcttgagcaacagaatgagacttcaaaaaaaaaaaaagaaagagaaaagacaacctaccccagtataaggggtaagaaaaaggattcagggaggctcaggaacttaaggcctcgagcacctgcacctccagccccacccgctaaccctccccagcgtggagatacagcacaggggccaacatggcgtcagcacgctgggtctcgcctgcgacccccgtgactccgcactgctgcagcccgggcgaggctgcgccccattggccaactgcaatgaggtcattgcgggggcgggggccggcggcggcgcaggggcggggctttacggacgcaagcacgtcgaagcgctgctcctggagccgcggagggtgcgggtttggctgcggtggtttctgtggcggttgctgtggcggagtttggaggtgagtgggggctgtaggtttagcgcaacagggagcggccctcgatggacgtaggaaatccttctaagagcccccttgattgtcagaggaattagcggggatctgacgtcttcgagataaaatgggggttcgccccctccttgggcacccctcctctgccctgaggaaccggaggctcactgccctttggaagccccgcatctcttccctgctttaaggggtaggcggaggaaccggaggttattggataggcagaagaatttagggggcttcttaaagggtttctcagtttgggggttttcctctccttttttcccatctcaaggtagatgagcctgagtccagagaattcctgctcattgggtagacaggaaatgaagcaggtgaataccgtgggaggaggcgaggaccggatgacaggagtgagattcttctaggcagggcgcgggggcgctgtagttggactcatcttttgcagaattgctgtttcttcatattttgttttgtgatcgtccagaactactttggcctaattagttttctgttagcctccattgctatagagatattcttgggagacctataatcattaaagagcaggaggacggaggcgactcgttggaggcttatcattatccacagctcctgaactatgctgaccaggcctaattttatgtgtttagaggttgtagaatctctctttgtttaagggtggtgccggtaacagctgatttggatgattcagatgtacagaatcttaaagtcagcctgcatattctcttgagaagtccttgcttatgtctgagcttgtgttactgtcttgaacatcacatgcacaaaggtttgttcgttcagatttctcaaaatgtctcccagccttccagaagagtaaatcttcctttgatgtcagactcatctatcagtactcagtatagatgcccttatgacactaaaaatactgtgcatttttctgagtttggatactggacaggctgtgccttacattagctgatcgagaataaataattgcagtttcaggaccactgatagcgccagttgtctcatacccggcaacagtaagacagcactaaaacgaaacctttattggctcatgagatttgacagatggaagaatgtaattaatcttgaaggtagggttgagaaacagaaagctgcagaggtggaaggcttattctctgtggcttgataaaactgctttgtcattatcagtgtgttcctgtcatgcttgatttgaaattgagcttaatatgcaaactggttgctttttccagatgacggttatttgtttgaattcctaagtggggaaatattgttttctgaggaatctggaagattaaaccctttagtgtagccatagctttaggatagtgccagaactttgggcttttagaaatgcgcattgtcagtagaagggagaaggatagttacaaggcagacatctttatgagagggtattgaaggcctcttctgtttgtttcctgcactagcaaaaacagattgagcagtgtgaaactcactgcctcaatattgtgtcctgggtatttaaagagttgtttgaggttcccagttcctgtctttaatctggatacattcttatcagttgagttgcccaaaataattgtcatttgatcctgatgttgactggaatggaagtgac

SEQ ID NO: 64844 - DNA, 1111 bp, Homo sapiens
gattacagacgtgagccaccaggcccagactgaacattttcatcagtccagaaaagtatctgtgtctactgctagtcagttgctacccttcataggtaacctctgttttgattgctgtcatcataggattagttttccctgttcttgaattatatgtaaacgactcatacattgcaaactcatgtctgacttctttcactcagcctctgtttcttgcatgtatccgtagttcatttttaaaaattgccgaacggtaagtagttcattgtatgattacaccacagtgttttcatcctttcttttgtcattactcttttggggctattatgattaaagctgaagtaaacattatcataaaagtcttttttttagtttacaagttttgatttttcttaagcaaatacagttgatccttgaaaatgcaggggttaggggtgccaatctccccatgcagtcaaaaatctgcatacaattttgactcctccaaaacttaactattgatagcctgcttttgaccagaagccctaccaatttcataaacagtcgattaatacatattttgtatgttatatgtattgtacactgtattcttacaataaagtaagctagagaaaagaaaatactgttaagaaaatcataaggaagataaactgtatttactgaaagtggatcatcttgaaggtcttcatccttattgtctttatgttgaggaggctgaggaggaggaaggggaggggttggtcttactgtctcaggctggccgaggtggaggaaaatctgtgtgttagtggaccagcagagttcaaacccacattgttcaaaggtcaacagtaactgagtagtggaatgctcagtcatgggttgggtaggtgtatgtttaactttgtaagaaactgccaacagttttccacatcttttacttcctttttaatagcatttatcacaacaaattgtaataattggtttgtgtccgtctcttctgtagagctgaagactgggacgtagcttattattaatcttaattgctaataaaaatttttgccttagattcctctaatattaatatattgagttctcgaagagagaagtgttgaatacatggatatgtatg

SEQ ID NO: 64845 - DNA, 449 bp, Homo sapiens
gctgatagtttttatgataataattttttaaaagtatgcttagttaagacaaatatatatcaaacaatctaaaaatacatgagtagtcagttctgccttctcccacacaccctcctgaggcagctggtcccaatagctcggcatgcatccttgcggtcacctttgatcttaaccacacagactagccaaaaagctctggtgtgacttttgtacccaagaagagactgtgttggagttttgccaaattgcagtaagtgtggtttatgcacaccacggttatcacagggctctgagggaggagttgtgaactgtgtgtacatggaaggaaaggctggtgagtggggctttgttccctttgaaagaatgaaagtgatgattgcccccttagaatattaataaacatacttaatcccaaaggcagttccttttggcagtggcagaattgtcag

SEQ ID NO: 64846 - DNA, 3197 bp, Homo sapiens
ctcctgagttttctctcttttcctccctcctgccacatgaagtgtgcttggcttcttacctaccataattagacatcttttcttcctcagagaaggcatgagacagggatttgattgtagttatcactgtaaacatcaaactgatttttatgcagaactattgccccagggcataccttccaaggaacctggtctctccttacctagcgaattccacatacacatagatgtacacctacctgtacactcacagattgggtggtgattaaagggacagaatcggggaccagcttcttgttaggaatgcagtgttgccacggcatgacagcatggagcagttgagggaatggctgcccaggagaactcagaactcttgaaatgtagttccaggctgccatcattgccctgatattcaggccgtcagacagatgtgtgttgtaggccctgaacggcacagagagtggcagaacaggctacataaacagctcagcccagaattgtctttccagactgcctgccctcagtcacaacccccaccagggaagggaagcggccccaagactccttcctccttcacccactcgaggaaacagagttcctgttacgtggcatgaatgatgtcttttggccccagttaatccctctgagtcaccaggtggcctttgccaagtgctggagctggaagagatgatagagacactcatctggcgtcctgaggctctcctcacagctgttgaattctagaggtgcatttcagtgtcttggggcatggcaagactttggaggctccctgagcagagcagtggagatgcccaaaaagaaggaagaacctaggatggcagatggggccccccttgccctggggaacttcatgtttgtactttctcaggaagcacacatttccccagttcagcgggagagagtggggagactagcagggaaattgctttccagctttgtgctgggtggttggggtgagggtggccacggaaggaggtgaaatcaggctgacctcaagatagacccaagatgtcccagttctggccgctctaagtctctaaagcagcagctggtgggaggggcagtattgggcagtatgtcagggaggccacctgtctgctcacacagtacaattgatgtgcccctcccaggcatatatccctcttcctccttgctgggcccccatgggtagataaggtgactggaggggtgccaagaaaagggcggtgcccccacaggcatctgaaaacaaagctgctgctccatttgcccagtttgaagattagaatggttttgtgattagccaggagggggtgggggtcagagttctggacacctcactggagtcgggggtcagcataccctaccaaggctgacattcactcctaggtaatggcctgggaccctcaggtgacttgtccactctctggctatgtattgttgaatgaaaaggggacatgtaaatctcgtttcagctgttctgaaataacccttgccacatgggaacacagtctattcaacatgaagaattcaaacctaacacaagtgggtgagaagcaggaacccactgctaggccccaccgcgttccctcagaggtggtctcagtagctggaacttggagaagtagttttggtggggtgttgggacgtgggtgaatccaggtcctggtttggaattgctctggtgggaaccgtcagctaacgtcagttggaagctctgtgtcctccccctcctgagtcctgtttttcctggaggaccttggcccacccctgtggaatgtggggatgtggggaagaaagctgactgcttttactcccactcagaaaattcggttgcgctcttcttcaagggggtgctcctcagcctgcaccccagtgaaggggcctctgaggaactcccagtgccactggcaaacagtctgtaacctttgggccccagccacctcccagcccctgttctcttaattcctgccttcttggcttggagggaggaatctccatttgtaaaagctgagttagggaactagagggttcctgaagctttaaagcgcctcaaagccctcaccctgcacgtgacctgtcacctggagcctgccccagcccccacgcctgcctgttcttataggggctccggtgcctccagggtcacacagcaccatgtggaaactattcctcagggcagctctccttggcctttttatcccctgaatcatgcatttttctgcccttatttggtgtggtttggttgctgggcagctgtccagggtgagtttgcaggaggaagcacagccaagcagcctcgctctgcttatgggacagtcttcctcccaccctccctgagagtgaaagggccccacagagaccatcaggcatggatgctgaactgctgggaagggagctcaggctttttctttttagtccccaagagaagaattctttctcagatgtttttgtggttggagaatatttttgccattgctttgagaagacttcccctcctaactccccctctttccttggaatttccttccttaaatggaaagccttcaacattcactccaagctcgcccttttgctcccccaaggaaaaataacaagcaaacagaggtgcttgcccagtgtctctggaggggcttcccttagaggtgggctgtgtgatcccctgccaggagggggcgatgggggccacttgttcattaacgatgttaggctcaaggtaactgaactttttttgcacatgcctctctgcagagagttgtgcataaacacactgctcggcaggacagagcaagattgggaactgagggcaaatcccttcctccgtgcgtcgaactcttgatcccaggccttaaaagtgggatctctgcactctgggctttctctagcttccccagggaagggaggctcggggtgaggtgggcacggggcatctttcctgcccaactgtgaagtcctaaaaagcttcacaaagtttctattgaatgacagctttcttcttctctttctccagggttgagttccagaataaattctacagcgggaccggtttcaagttcttacccttctccttcgagcatattcgggaagggaagtttgaagagtgagtccctgtgagggccgtgtgccccatgctaccctccccgcctccctccacagtgatcagctgtgcctctctgcctgttggttgtgatctgtgg

SEQ ID NO: 64847 - DNA, 1097 bp, Homo sapiens
tagaaccagtgtgggagagggtggccttggcatgcttggcctggggagtcccaagctttgtagagataggggacaagtctatcaccaccttcactggatgggactatacttctttctgccccaggaaccttgggtagagggggcattggacctcaaagccagctggcagcctcagcatttcagatcaaagtggcctgcctcttcaacgtctcagcctacccaaggcatgtcctaggtgtaggctgctctctggtggccagatagggaaggactcattcatcctttggcaaggtgggctgcgatctgagctgggctgtgtgataggcaggcaactggattagacgggcagagacaaagcaatcctggggtattctggagcacataagcagaggggtaggctagccaggagcaaaagatgagatgggctggagagcacgcagagagcccagccaacttgcttcacacacactactggaaaagtaatgagttgtgtcacaactcaggctgggcgcagtggctcatgcctgcaatactagcactttgggaggccaaggcgggtggatcacctgaggtcaggagttcaagaccagcctggcgaaaccccgtctctactaaaaatacaaaaattagccaggcaaaaccccgtctctactaaaaatacaaaaattagccagccaatgcatgacagtagtcccagctagtctggaggctgagacaggagatggcaccactgcactccagccatgggggacagagccagactccatctcaaaaaaaaaaaaaaaaaggcgatcaaacagtactaaaggccctattatcaaataaataaataaataaataaataaaggctttcactcacagtgtgactctccccctccctcccacaaccactgtttacagagccttaaaaaaaaagcaaacaaacagatgataatgtgttatcttgctctgtcactctgtggcctggcctgcagtgctgtggtgccatctggactcactgcagcctcgacctcccaggctcaagcgatcctcccctctcaacctccctagtagccgagaccacaggtgcatgccaccatgccgggctaatctttgta

SEQ ID NO: 64848 - DNA, 733 bp, Homo sapiens
ggagaatggcatgaacccgggaggcggagcttgcagtgagcagagatcgaaccactgcactccagcctgggtgatagagcaagactccgtctcaaaaaaaaaaaaaaaaaggagcaatccaaggagcaaagaccacctgttgaccatcaaacaggccatctggaggcgaaactccttgcctggggaatttagaagtaataaaggccaggcatggtgaatcacacacactttgtgagcactttgggagccaaggcaggtggatcacttgaggtcaacagttagagaccagcctggccaacatgatgaaacaccctccctgcaaaaattagccgggcatgatggtgcatgcctgtaatcccagctactcaggagactaagacaggagaattggttgaaccagcaggcagaggttgcagtgagctgagatcaggccactgcactccagcttgggcgacagagggagactctgtctcaaaagaaaaaacaaacaaaaaaaacttccctagtatttaaagtcggcatctgattccaagcctctttcaacttttataagtaactaaaatgtctatacattctttttaaaaaaaaaaaaaaattcaacaaacacttatttctcacacttctggaggctaggaagtccaagatcaaggtgcttatagattcagtgtctggtgggggctcacttcctgctttatgagctatgccttctcactgtggtttcacatggtagaaa

SEQ ID NO: 64849 - DNA, 801 bp, Homo sapiens
aggcaccaaccccattcctgagggctctgccctcacaacgtaaaatttctgtacattctatgccatgctgaagctcattttacaaccctaagctctcaccttaaggtccatacatgctcctaaggaaaatccaccacagcgcactcagtcctcccgtggaggcacctgctgcactctgctgcagtgttcttcctttctaataaactttccttttccaaacctatactgttgtcagtaagttctttcttttttgagacccctccccccaccccaagacatgccagtagtcccagctagttgggatgctgagacaggagatggcaccactgcactccagcctgggcaacagagcgagactcatctcaaaaaaaaaaaaaaaaggatcaaacagtactaaagaccctattataaaagtctttcactcacagtgtccctgaatctccccctccctcccacaaccactgtttacagagccttaaataaacagatgataatgtgttaccttgctcagtccctggcctggagtgctgtggtgccatctggactcactgcagccttgacctcccagactcaagcgagcctaccctctcaacctcctcagtagctgggaccacaggcacatgccatcatgctgggctaatctttgtattttttgtagagaaggaggggttttgccttgttgcccaggctggtcttggactcctagattcaagtgatctgcctgcctcaacctcttaggatcaggggccactgcaatgggctagacatttttttttttgagtcagggtcttactctgttgc

SEQ ID NO: 64850 - DNA, 809 bp, Homo sapiens
cactgcctggggaagagcagcaagaaccctgctctggaagttaagagttcccggttctagcccagagctgctttccttactagttattgatcttgccgaagtcatttcctgtctctggctctgtttcccaatctgtaaaattgttactggaaaggggtcccaatctagaccctaagaaaggtgagagagcgaacgggccccggagacaaaaagttcttatctgagcaatttagataaggagcaatctaaggagcaaagaccacatgttgaccatcaaacaggccatctggaggcaaaacttgtctggagaatttagaagtaatcccagcactttggaaggctgaggtagatggatcacttaaggtcaagagttcgagggagcggcagcggcggccaggcacggcgcgaggcgacgccacaggacagcggcggcagcaggaaatgcagcggcggccgcagcagcagcaaaacggatcggtggagaggcgccgccgccgccgggccgggcgtcgcgcgccgaggctcggggggagtcgtcgcagccgccgccaccgctaccgcagccgccgccgccgccgccgcccaggtgactgaggagagaggcacctcctcgctcccgccgccgccggacttcaatgcccagtccccagctcgccagcgtttttcgttggaatatacgttgcacatttatggcgattctgaatgtgagagcagatttctgccaggctgagcacagcgttttcgctgacaagtgagcttggaggttctatgtgccataattaacattgccttgaagacttctggacacc

SEQ ID NO: 64851 - DNA, 2408 bp, Homo sapiens
aggttttgaccagtttctttgctgcattctgttttatcagcggggtcttgtgaccttttatcttgtgctgacctcctgtctcatcctgtgacgaaggcctaacctcctgggaattcagcccagcaggtctctgcctcattttacccagcccctgttcaagatggagtcgctctggttggaaacttctgacaaaatgacagctcctgttatgttgctgctgctgccgccaatggacagcctttaacgtgcccgccagccctgctccaccgccggcctgggctcacatggccccatccctcctcgaacctcctagcctgttagttactcaaatctgcaagctctctgccttctcagggccttcaataaatgcatttcttctgtctggaaggctcttcctttccctcttctagccaattcctattcatccctgagtttcagattaaaagtcacttcctttggaaaccttacttcgctacttcgctacttactgcactacttcgcagcatcacaactatgatggaaatccttacttacgttaaatatctggtttctaggtcacctccctgacggggacggtagggaccgtcttctcgttcatcagtagggaagtagctatggcagtgcctgatacaaaataaactccaaatgtgtatttattagatggttggatggaagttatttgcgtgtgaaagcgcgttttacccgaaggcgctctgtgagggccagcgggtccccttcggccctggagccggggtcacacgctccccaccgcgtgcggtcacgagacgcccccaagggagtatcctggtacccggaagccgcgactcctggccctgagcccgggcttagccttcgggtccacgtggccggaggccggcagctgattggacgcgggccgccccaccccctggccgtcgcgggacccgcaggactgagaccatggaggcggtggcggtggccgcggcggtgggggtccttctcctggccggggccgggggcgcggcaggcgacgaggcccgggaggcggcggccgtgcgggcgctcgtggcccggctgctggggccaggccccgcggccgacttctccgtgtcggtggagcgcgctctggctgccaagccgggcttggacacctacagcctgggcggcggcggcgcggcgcgcgtgcgggtgcgcggctccacgggcgtggcggccgccgcggggctgcaccgctacctgcgcgacttctgtggctgccacgtggcctggtccggctctcagctgcgcctgccgcggccactgccagccgtgccgggggagctgaccgaggccacgcccaacaggtaccgccccgaagcttccccgcgtccgcccgaggcgcttaccccctcccggagccgctgccacccaaatcgggaggctgagcggggagcgctggccggaaggcccagctgcgccgcctccagcagctgtgtggccttgagccagccactctgcctttcagagcctcggctggcccacctgaaaaacggaaagaagacgcctaccgtgcagtgttattgtgaggatttgcacgatgatgggcatagaatttgtggtgcacaattggtgatgagtgaattttcttgccttcctcccccaccttctctttgaacctgcggactgaggaaggacgcctccatcccccaccctacaggcctgtgttccagcgcctgccacactatggagtgatgtgttcacacagctgtcctcccctgcccatctgttagactgtgggggcagggattccccgttccaggaaaacaccgtgcagaggaggggctctggcagtgtggcatgaaagtggaatatgccacccaaatacccgccaggctagagggccctgggagagtgcaggggacgagtgcctcagaagcccagccccggtacctggtctcagctccacctggggtgggtcccagtgtgcagcagaagggccgagtttggagcccctcccctctcctctaggtgggggatgggggatttgttccagggccgtggaccctccagggtgggatgcgcccctgctcatgacactgcccgcaggtaccgctattaccagaatgtgtgcacgcaaagctactctttcgtgtggtgggactgggcccgctgggagcgagagatagactggatggcgctgaatggcatcaacctggcactggcctggagcggccaggaggccatctggcagcgggtgcgtgcccactgtcccttccccaccctcctctatggcgggagccaccgtaggtgttttcacccgccccccagcatgggcgcagtgtctctctctagaagtgctttcagcgtgcacagtggcttgggcctcctaaaaactgaggcttccggccgggcgcggtggctcacgcctgtcatcccagcacttcgggagg

SEQ ID NO: 64852 - DNA, 1566 bp, Homo sapiens
ctccagcctgggggacagagtgagactctgcctcaaaaaaaaaaaaaaaaagaaagaaaaaggagcgttgcttgtttcaggccacaggaaggggagagatagtgaaagtttttcagagaaggtggccagggaaggagaagaaaggactgtaggcagagagcatagcctgtacaaagccatagaggcaagagaaaccaggagctgtagagaagttggcaaggctgttgaacactatggtgaacactatggcggcttccatgaaatatctgagcttttgctccccactagggtgttccctcaggtcaatgtcacgaagatgggcagttggggccactttaactgttcctactcctgctccttccttctggctccggaagaccccatattccccatcatcgggagcctcttcctgcgagagctgatcaaagagtttggcacagaccacatctatggggccgacactttcaatgagatgcagccaccttcctcagagccctcctaccttgccgcagccaccactgccgtctatgaggccatgactgcaggtacagtgcctgggtggggtgggagagccccccagaccctcaaaaagaagggagtagcagatgtcagtaggggtaggcagagggactggaataatgcctcgccataacacacagtacttcatagtttaccaagcacgtgtacacatgcgttgtctcagtgaatcccactgtggttgagaggtgagctctggaagccaacaacctgggtcacacctcgcgctcctatttcctggccgtgtgacttatgactcatgacctccttcccagtgtctcgtttgcttttcctgtaaactgggactacctcataggtagaataacgcctggcccagagcaaaggccactaagagctagctatgaacaaggattttgtttcatctctgcgtggttgctgaagtaggcactgcaggcaggaggtgagtggatgtgcctaaaggcactaagtgcgcatcctgctacaaaactgtgaagccagggctccttcctgccacttaaaggaggagtggagcagagggcgcccaagtcaggaatgacttagtggagaggcgtctgtgttggccaggaagggaacagatcagctcagcctttcttgagcagtactgctccaagtgtgacccaaaaccagcagcagcagcagcagcagcccgagctgtgagatggcaaattctcaggccctacccaagacctgaaggagaagctacattttttttttttttgagacagatttcactctgttgctgaggctggagcacagtggcacaatctcatctcactgcaaccttcgtctcctaggttcaagcgattctcctgcctcagcctcccgagtagctgggactataggcacccgccaccacgcccggcaatttttgtttgttttgagatagagtctcgctctgtcacccaggctggagtgcagtggcacgatctcagttcactgcaacctctgcttcctgagttcaagcgattctcctgcctcagcctcctgagtagctgggattacaggcgccccccaaccacactcggc

SEQ ID NO: 64853 - DNA, 828 bp, Homo sapiens
tgtttgtgacggagccttggtctgttgcccaggcttgagtacaatggcacagtctcggctcactgcaacctccgcctcctgggttcaagcaattcttgtgcctcagcctccccggtagctgggactataggcatgcaccaccacgccaggctaatttttttttttccaagatggagtcttgctctgtcgcccaggttggagtttagtggcaccatattggtttactgcaacctctgcctcccgggttcaagcaattctcctgcctcagtctaccagggagttaggactacgggcctgtgccatcacgcccggctaatttttgtatttttcatagagataaggtttcaccatgttggccaggctggtctttaactcctgaactcaagtgatccacctgcctcggccttccaaagtgctgggattacaggagtgagccaccgtgcccggccacgtctctctttttaacactaatgttaccctgacctttgaacgtagaatgcccttctgttgcaggaaaacctcttttcaaaccatgtttgtcctttgctggcatgccacagcaacagtcaccaacacagaagacttctgtgaccaaatatttggaggattttccccacacacaccaagcagcagacatcagctgggtgtcctccaattcagttccaatgtaatcaaccagagacagcatcagatcccacagggttagggtgcagatccatgagaccaccccctccttcccaacggttacaagtcctgatccctggaacttctgactaactggcttcaagttggagttcccatgacccccttcccctctttggagtcaac

SEQ ID NO: 64854 - DNA, 1885 bp, Homo sapiens
cgtctgcccggggatgaccccctggccgctgcgcctcaggaacctcgtctccccacctaagggctgcctttcaatgacgtttattgcgccagcaagttcgcgctcgaaggcttatgcgagagtctggcggttctgctgctgccctttggggtccagtgagtcaacacccccgttccccgaaccctcttaactctgacctagagacgccgagcaccctgtcctgcgggagccgctctggggcgatctccctggccctctctgcccggctcacattagctgtgtgccaggcacttgggctgggcgcatggcacgcattgtgccacctgctgacctagctgctgaagtgttggtattgttatggggaagctccagcccagagaggttaggtgactggcccaaggtcacacagcggccagggaccccgctagattcgaatcctgacaccagggctcccttgtagcctcagatggatttgggagggctgctccggcaggaacccgcgtttcaaatgttctggttatccccagcgccctttccgcctcacttcccagcgcagcggtgctgctcgcggtcgggggccgggacgtggttggggctgggactggggttggggctgggactggggcctggctggcgtccgccccctcccactcgttgctctccggccagcagcttgagcctgatcgagtgcggcccagtgcacaccgccttcatggagaaggtgttgggcagcccagaggaggtgctggaccgcacggacatccacaccttccaccgcttctaccaatacctcgcccacagcaagcaagtctttcgcgaggcggcgcagaaccctgaggaggtggcggaggtgagcgccgggctggactccaggagtgggggcggtgcgtcctccggcgcgcagcggtggccacagctctcctcccgccgccgcaggtcttcctcaccgctttgcgcgccccgaagccgaccctgcgctacttcaccaccgagcgcttcctgcccctgctgcggatgcgcctggacgaccccagcggctccaactacgtcaccgccatgcaccgggaagtgttcggcgacgttccggcaaaggccgaggctggggccgaggctgggggcggggccgggcctggggcagaggacgaggccgggcgcggtgcggtgggggaccctgagctcggcgatcctccggccgccccgcagtaaaggcttcctcagccgctgtctcccgcgcccttctttgtcccctgggtctgtgtggtccctggggatggggcggcggtagcagctgtgggtggctaattaagatagatcgcgttagccagttttaccagcgcagctaggcgcgatggctgtcgcctgtaatgccagcgctttgggaggcggaggcaggaggatcgctcaagccccggagttggagaccagccagagcaacacagtgagacccccatctctacaaaaataaagaaaatttaaaaatcagcacagtggcaccattccttgagcccaggagttggagggtgcagtgagcatgatggggccactgcactccagcctgggtgacagagtgagaccctgtcaattaatcaaatgaaccaaccaaccgaaaaactcagaaaccaaggtccagaaagaagccagcccaggatcacacctcaagtccatattaaaggccagacacagtctctggataaccaaggggcatctgcaggaggagttaggtgggaattggcttggggtagagtcaggttgtgacttggaccccattagccatgagacctcaggcaagttccttgctttctctcagtctttcttttctttctttctttcttttttttttattttctgagacagagtttcgctcttgttgcctaggctggagtgc

SEQ ID NO: 64855 - DNA, 2747 bp, Homo sapiens
cgctcttgttgcccaggttggagtgcaatggcacaatcttggctcaccgcgacctccgcccacgggttcaggcgattctcctgcctcagcctcctgagtagctgggattacagccatgcgccaccacgctcgtctaattttgtatttttagtagagacaaggtttctccatattggtcaggttggtctcgaactcccgacctcagatgctctgcccacctcggcatcccaaagtgctgggattacaggcgtgagccaccgcgcccaatcagcctttgcctttttctcctgtccacagagaccccgcaaacaagcgcatcagaggatctgggtggtgcgagagcctcctacagcagccaggtacacacaaggcctcagtttttccatctgtgaaatgggtacgtggacagacctgtccagtagcctcccatgtgagaatcctcggactgagagggtactaggagggctaatacagcgcagccctgtgattccccacctctgtccctggaatgaaggaaatctgggtgttagttctggctttgccgatgcctcttgggtggcctggctgaaactaatctctcctcatcaggccagaagggaatctgtgaaatgggctttgaaacctgccttgcctttctccgcccggtcccagcgggggtccgatcggcatcaaggcttcacccactcccagagccttcgggatcagccccaccccatcagcaggacacagcccatgccactggaaatctcgcgagaatcccgcgctgaagcgaagtcgagacgtttgaccttcctccgtttccgtagttccgagttgcggtttctccgttagtgcttccgggttgcagccagggaagcctccgcggtggtgcaagtggaacccaagccttgaggtttcagtgagtagggggccgacgtgagctttagcgtccccctttagcctccctcttcgattccttgaagaccctggtgcagcttagcaagagggcccaggatttttggatccccagccctgtgacaagggttcctgtccagtttccccctcccaggatttcgactcagttcagcgaagtcaccgccccgtctgagaaatgaggacaccaaggcttagagcacagccccgaggcgccgtctaccaggccccgtcccctcccccggctcctgtcggtcagcactgaaaccccgtccctgctccaggcctccttctctggggtccaaggtcccatacaggcctctgcctcggccgcaggcccttcagtcaccgtcgcctcgtctccctgactgtccgcaggcctgggcagcatggccgtattccggtcgggtctcctggtgctgacgacgccgctggcctccctagcccctcgcctggcctccatcctgacctcggcggcccggctggtgaatcacacactctatgttcacctgcagccgggcatgagcctggagggcccggctcagccccagtccagccccgtgcaggccacgtttgaggttcttgatttcatcacgcacctctatgctggcgccgacgtccacaggcacttggacgtcagaatcctactgaccaatatccgaaccaagagcacctttctccctcccctgcccacctcagtccagaatctcgcccacccgccagaagtcgtgttgacagatttccagaccctggatggaagccagtacaacccggtcaaacagcagctagtgcgttacgccaccagctgttacagctgttgtccgcgactggcctcggtgctgctatactccgattatgggataggagaagtgcccgtggagcccctggatgtccccttaccctccacgatcaggccagcttcccccgtggccgggtctccaaagcagccggtgcgtggctactaccgtggcgctgtcggtggcacgtttgaccgcctgcacaacgcccacaaggtgttgctcagtgtcgcgtgcatcctggcccaggagcagcttgtggtgggagtagcagacaaagatctgttgaagagtgagtaagagggaccctggactagggtggaggatccccaaatctccccacccccgacccttatgccgagatcaaggaagggtagggccattcattacttcccacccttcccaaatgtcacagtggttgacactcaattggtgctaaggccattttgtcaaatgaacagctttctcagcatgtggtccagtcaccactcaatcagaataccccaaatgtgaagcaaagggatctgcattttagcaagttttccaggtgatacaccctaatgagacactgggaatgaatgggtgagtgagctgcaggtagcagtgccacagacaggaggaggaaactcaagcatggcatgggtcttggaattttccatctgcctctgatgccctctggcactgctcgttctctggagtggtttcctggtggcttattctctggacacatgccagcccttggagtgactattgtgcttgcctgtttcttcaccttcatgctcccctcaccatcaccataggccttaccagttgaaccctttctgccaccccctctggggatactgtacttagggacactttttcccaaactggcccatactctcctccccaataaaaagatctcactgttcttctgggctccttccccaggcaagttgctccctgagctgctccaaccttatacagaacgtgtggaacatctgagtgaattcctggtggacatcaagccctccttgacttttgatgtcatccccctgc

SEQ ID NO: 64856 - DNA, 1681 bp, Homo sapiens
ggtcggacgatgtggctgggggcttctctgcccggttcctgacacaccggccagcagtgcaggtccggtgagcgcggggaggccgccctcagggtaacgtggggagccggccggccggacagtgcgcgtgcacacactatctgcggcggtgtgctgacaagccaattgaggggactccatcttacaaaacgcgcttcatgtcgccgccattccactgcctaacccggggagggcaggcacggcggggagcagtctcgaaggaggctggcgccaggccaagcgccgggccttgacggctggaaccgtggagtaaagtctttgggctgcgcatgcgcgatgcttcgccctgccccacctctcggtcgcggattggcgggcgcgggtcacgtgggcacgccacccgcttcctcgccgcagggggcccgcccgctggcccgtttccggtccggtgggtacaagatgacggagccgggcgcctctcccgaggacccttgggtcaaggcaagccccgtgggcgcgcacgccggcgaggggagggcgggtcgggctcgtgcacgtaggggggccggaagacgaggggcttccctcctgtccccaaagtcccccacgctctccgtgccccggggctgcagagaagacagctctcaccccgcgtgtgccaaggtggggagacaaacgaggcgtgtgcgcgcgagtcgggggaacggggcactggggtggagtaggggcggaagggatcatacacaggggaggcactcgcacgccctagcctgtgccagtctcgggggactcattaagctgcccgcgcaccccgggctgtgtgtgtgcaagcgcgcagggtgacagaggcgccttcccggaatggggggcgcgctgtgcgtgcctgcagtggaaggggcgcctccccctaggggcggaggtctgacgggcccttcccgtgctctgtgccgcaggtggagtatgcctacagcgacaacagcctggaccccggtgagtagctgccccatcttaagctctagagggacactcccgcccaggctctctagattcttgtggcgttgccaaccacgcctgagcacagtccactctccctgagcagagttcctggcttgagacagcaggagctgaaggacaagggcagaaaacaactgagggtgacacctagttccctctgctctggaacagggaagtggtggaactgatcactcaccactcagtggagcagctgatcactcacaccctcatcacgtccacatgcccgtttgtgagccaggggggtatcatgcaggcctatggagcagtgtagacactagggagcagagcactgcagcgtggtctggcaggaagtggggggcccagtatggttggctttgggttgaagggaagaggtcagcatttaagaaagccattgtgtggccgggcgcggtggctcacccctgtaatcccagcactttgggaggccgaggcaggcggatcacgaggtcaggagaccgagaccatcctggctaacacggtgaaaccccgtctccactaaaaaatacaaaaaaattagccgggcgtggtggcgggcgcctgtagtcccagctactcgggaggctgaggcaggagaatggcgtgaacctgggaggcggagcttgcagtgagccgagatcgcgccactgcactctagcctgggcgactg

SEQ ID NO: 64857 - DNA, 1546 bp, Homo sapiens
agccagtgatgtggaaaacgcccaaggctccaaagggcacgaccccagcctgaatccagggagtccgacggagagggaatcccgggagaaggtcctcaccgccttgcccagtccgtgttcccgctgtaggttcccgaacacatcctgggagctgtagggccggttctgctcctgcaggtacctcaggaggatcccggcggctacggagagaaaggcaggggagggggccactcaaccgacctcctcacccactgccctcccgggtcttccccgcgcccacggcgccgttacctcccgccgcagcttctgcccggcctttactcatcgcctttcccgccacccaactcagaaagccggacgttgtagttgctcggggcgacggctccttccggcgacgggggcgggcctcgaacggtgattggctgaaggggaagccttccggaggagcaaagcgacccctcccggactccatagttcatttcaggtcggaacttgcgcattcgggccggacctcaagccatgggcctctgcgaaggcgccggcgtgcccacggctaagaaacttcctctttctgctcccgggaacgaaggctgtagcagagaaggccttcaagtttcgagacccagttccagccgcagctgagcactggtgaccttgaattaagtctaatgttgggattggaagacgcttcagacatccgctgccgccctgggcaagcgaccagctcaaggttaccccacagggacgtgctctggtcccacggtccagtgctcttttgtcggttagttttgtcatttgtaaaataggaacagtagatagtggtaggaaagtggttgtgaaaacttaatagaaagctaagcgccttggtcgggcgcagtggcatgtcacccctgcaattctatcactttgggaggctgaggcgggcggatcgtttgagcccaggaattcgaaaccagtctgggcaatatgaaaccccatctctgcaaataaagtacaaaaaattaagagtggtggcgcgcttctgtggtcccagctactctggaggctgaggtgggagggtcaccagagccccggacatcgaggctgcagtgagccactatgagcgcgccactgcaccccatcctggcgacagagcgagacgcagtctcgaacaaaaaaaaaaaaagtgggaaggggggacagctaagcgccttggagagcaaccacccttatttgcctaataccgagcttcgcacccagggggcactcgacacctactgtagtttggacgccaaggaacgatagggttaggagggggctactgttcaaccacaaagcttgtggaaaagtttgttagcccagacaatctcagggcaacacctggcaggtgctttccacccctgaccacagtggccaatgggacagagcctgaaataaatatttctagtttctgaggtgagctgaaggccaaagagcagctgtccctgcagctcagaccatccagtgaaggagtaaggtgctactttttaaagccttctgctacctacaacctccttagcctttaaaa

SEQ ID NO: 64858 - DNA, 2077 bp, Homo sapiens
gcaaaaacacaattaaaaaacacacatattttgttgtttcaggcttatccagaatagtcttaatccattcagcagcagaaagccccctataagtcagttcccttggaacctcctccattacaaataaatccaaaattatggttggtagatcctatgaagtcctaggtccacttcaggtgatgacaactgagagaagcagcagttccattttcacagagcatgacacacacaaataaagcatatttacagtgctacttttccagctcaggaaaactcacacacagtattagacatcaatttccttgcctataaaccatggctaaggatgcctctctaattccttggaacagggaggagttacaatcacaggtggctttgacacgcgtgtaatctccgtcatcatttcctaactgttctttaaaagcttgtaattttctttcaattttcagctttgggggctcacactgacgcttagacttcataaacttccttcctagatatataacatgctaattcatgcgaatcgctcaagcttgttttataatcacacctatggatacctttgcaagacttcacgcctctactccaacaataaactactaaaacctctggaaacaatctagaacttgcacttgagcagacaagagaaaggaagtgatggctttaaagggacgcagctttgtcgggctcaaaagaggagccctcgctcactcttgagcggctcaagatgttaccagaagctcccgccagatgtgcggggcgggggtgcgggcacaggtaaggcagagaagatgggtggacggccctgggaagaactagggtgccgaagcctgcaggcgggatggagtggaaggaggtgaggcaaaattaggcaagtacaggaaggagccagtgcagcgaagaaaacagggcaggcgagaagtagagccctagaggaaccaacgaattcgggactcggagggtttccgagggtccagttctctcaccagaaagccgcgttcagccccaggcaccacagagcgctcctagctggccgctcccacaccagggctgcctgcacccgactcagcagaggctcgtaaggccccagcacctccaccagggcccgctgcgccgcctcaacctgctggtcccgctcccaggagcctgacacatctcggcggcccctgaaagtcgaccccgaagccgggcctggggtcgtgggaaccccttcggcctcagccatctccccgcggcagccacaacatccggggccgtggcccgacaagtcacaataacagcaactgcgcagatgcgcgattcggcgggggaggtggcttcgcaccacagcgcgcttgcgcgcaggcccaagcaggcgcccacccagaggggagggaggacgccgtaccccgccctcactgaggcgcggagccggatccggaggcgccgagccgcatccggagccgcgcacgcgcaatctgcatgaacgaaggccagtgcttaaagacgtgccattcattgccagaactcgattctcattggagcggaggaagttcgtgggtggagctggttgtttggcgcctgcgtcttgcggcgagcgggctggcgtgcggcgccgttgcgggcgggagcggctgcaacgccggtgcctgaggagcgatgccgagggaaatcatcaccctacagttgggccagtgcggcaatcagagtgagcgaaactccggcccctcagctagccaggttccttagggtcaatgggatctcgctgtgggatcctggactccatctgtccttgccagaatcgtagttctctgaaaggcgagacatccctgacccagtgtccacttgcccaaccccgaggggccctcccctgcccagtccctggcgtacagtcctttcctcagacacgggagagtcctgcggcttgacttcttatccctggacgcaggcgcccagtcccccggctcctgattggaacctgcccggacctagatatcttctttctcccctgcccgccccttccccccagttgggttcgagttctggaaacagctgtgcgccgagcatggtatcagccccgagggcatcgtggaggagt

SEQ ID NO: 64859 - DNA, 1303 bp, Homo sapiens
cgtggtagcacacgcctgtagtcccagctactcgggagactgaagtgggaggatcacttaagccagaagttcaaggctacagtgagctatgatcgcgccactgcactccagcctgggcgacagagcgagacccttctaaaaaataaaaaggtaacatacatgtgtatgtattgtaacaccattaaaaaacagaaatttaaacgaagaaaagttggcttctagccctttgatctagcaaagctgacagtgtcctcacctaccaatataggtagatgactccttacacgtggacaagcacatccacctggccgcttctcccctttcctcccctcccccgttcctctcctccccaacacatccaggttccgaccctgccacccccaacgagtctcactgcgcaggcgcggagcggtgggcaggagcgggcgtggcctgactctgcgcctgtgcggaattccagctgcgactgctgagggagaaaatgatgcccaggttgggctccccggcccaccggccgaggagaggcctgcgctgcacacgcgcagaccgagcatccgcgtcaagaggcgaagagagcgcgcgctccccacgtcctgcgctcctggctgccgggcattcgtctcagccgtgactctcgccaggccggggctggcgcgcccacgtctgaagagcgatgccccgggagatcatcaccctgcagctgggccagtgcggcaaccagagtgagcaagcgagcgccggccccgccggtctctggttctgccccttcgggtcccacccaagtgcctggcttccaccagtccccctttcccttccatgaaccccctgccctgctgctctggataacccagaccgagagctgcgcctccagcccggggctggggcagctaccaaacccaggcatcttgggtccaccctctgatcgtgtcagcctctgagactaaaactgggctcctcaggccttaaggctccagcagacccgggcatctcccccctcccccagttgggttcgagttctggaaacagctgtgcgccgagcatggtatcagccccgagggcatcgtggaggaattcgccaccgagggcactgaccgcaaggacgtctttttctaccaggtgcccccagcgacttggccgggggcggcagtggcccaagggggcggaagggaagggagtggcctggtactgggaaccccgctgggcagtagggccaggcggctggcttgaggagggagggccggagggagccagagttgggaggacttcggacttgggccgccctagctgattgggccccctcctg

SEQ ID NO: 64860 - DNA, 1770 bp, Homo sapiens
cccagccagactacatttcctggggcacccaggagcagtgatttccctccccactactccttctccttctagatggtaaccacagcctcgaccatgcctgctccctctgacccagcttcacctcatggacaacccttcttggttcatctccagcccgtgagctggtcctgcttcctcccttccatgccctaacttttaatatgcttgttcagctctaataaagtaataaagcttggttgtcagtatagccagggcttgatctgtgaatacgggggggtggtgaaggggtccagtttctaggcatctgacagtagggtggccttcacctcctccaacgtcttatcacttagtccaaatcttagtgtgttcactgtttccattggcatccctcaccttgaactaggctgtttagtattactagagtcagcccttgtctcaagattacagagctttactgaggtttgctgtctcctcagcgcctaagctttgccccagtgagggtcaatgttgccccaacctcttccactcagggcagaggaggtggggtctactgaaggagggcacactacattctgagcaggccaggagagccaaggttccagattcccagtgcccagggccatgagagttccaggaactcaatccagttcaacccaacctgataagtagaaacagaattcaagagtagggctgagcacatcctgagttacttttctgtgccagagaaattcgtgggtttgttatctgccccaagcttctctccattctaggcccaaagcattaggcacaccaatgatgggcccagaggtggacaacgagtaagaaatgggcagtgccagatctgatgactcactgccctccagcctcagggattccaggaggccatctgtatgccactcagtggagaagggagggtgagtaactgccagcttccaatgaggcctgtttgcctgctccacccacaaacctgtggcagcacactggccaggaggaggttaagtctggaaggtcaaggagggggagggtgaagcgctgtggtgtccagacttcccccagagcctggtaaaagcccagggtgtgggcatccccagaggcggggctctgcgttatggggttccaacttgtcccactgaataacactcccacaggaagggtttgtgtaaataagaaactttttttttttttttgcttctcttctacaaataaattaagaaacaaactagaaaattacccacacccattgtagcccttgggtgtgggatgtgccctgtccctgcagggccaaaagggtccatgtttccctcaaatctcagagcagtcctggcccaggctgcaggcaggagggaagtcgtgacctcttggcaggctcagtcctgcagctgccccaagcagccagactgtccctggggctcgtccaggcccgggcgctggctgggaggggaggtgtctggcaggtcttggcatggaggagaagagctgctgcagggcctctcgggggaggggttggccaagtaggcattcaccagctgcatgatctcttccacctaagagagggcagaggtcagtgtgcaacaggggctgccaggttctcttctttttctcatcctttctccaggctctagggctccagcttccccaccagggtcctacgtgctctggccctgcaacctttccttccttatcaccactctctccttcatttcttttttgttttttgagacggagtctcgctgtgtcccccaggttggagtgcagtggcgcgatctcagc

SEQ ID NO: 64861 - DNA, 5133 bp, Homo sapiens
tttgccctccccctccccctcctcctcccttccccctgtcctggaacttcaactgtagactggggtctgagagaggccacaaacccaacccggaggccagtcaggcgggaaccgtgccatcctcatattgctcccagactgctagagccaagagggggaggtgggggagggggccagggacacctgtccccaggctcagggaaggggggagttgaggtggagcatgagggaggcaatggcctggtaaagccgaccctgcccaagctggaagcttggggacgcctgggtcctgcacccttcctacgtgaacctccacctattttctggaaggtctgagtggggctgtcagccacaccacatgtggcaggtactgaccaccctcttaggctaactcccctaatcgcagtgccctgcttccctccctcccccctcctctatatttatccaccctccgcctccgccaggtgctggcgccggccccggcggcgcagcccgccccacccgggcaccgagccactgggcctgctggggacccctgcgcgggggatgggagcctgacccgggccacagcacacgggagtctggccgccagtgtgcaggagggatgggggaggagacgtcaagggatggaggtctcccacaccaatcgtgcctccgtttccccacggggagattcgacaaaaccaggcagcagcccagtgtccctcaccatccatcccctcaggggtttcccaggagcctcacccgggaaagccgagagttctgtcctgagtggcagggtaatgaggaggggtcctcaaagagctcccacctccctctccttggggtccccgccacagaccccaatcctgggatgacttctccccctcgtccaggtctccgcagcgggagctctcgcatctggcctccgcacttgcgaactgggagcggagggggacccaggcgttcgagccgcccagccggcctcgccacattcctcggcgctggcggaggcggaaggagacgggatgggacgcgggcccagcggggaagggagaggcagggccaggtcgggccacgcgtgacgcctcccctgcctcagggcccccagcaggtggatagcgcccagcctgcagcgggaggcccacaggcacatcccgagtagggctgctgctccgagagctcccgggggctttggcccccaggcaaaaaactctccctcatccctagttcgccaagcgcgcagcgtgtggctggaggctggagcggatcagcgtgacggccggttacagcgagagtgattgagacgaggctccgaacccccgggacttaccctcccgccgcccgctggactcggggtccgcagctcaaaggtttcctcgtcctcgtcctcgtccccgtccccgctaagctcgccgtccccgtagtcccggtgcagaagagtgaagcctcgacggcagcagagaagccaccatagtcccccggggagaggcatccgggcgaggagctgcggatgggggcgcgggcagccgcggccgagcagtagggggtcggaggaactggcggggctccgacccgagcaggggaaagatgaggtgggaggagcagaagggagaagaggacagggaggaggcagtgtcctgggctggggtgcaaggggacgctagccagacgctgaggggggctcagtgtctgggcccccggaggggggagggggaaaagcgtccagggccccgggagaggagggagcaatgtccggagctgggaagtagtgtccgttggagtgtccagccctgtggggggcagtgtccggtgcagcgtccgaggtgggcagttgtccaagctccagggagggtcgtgtccggtagggcgtccggtggccggggcccgggccgcgcgcgctgcgctccctgcagccccgggactggcgcgctgggggcgcgagcacagagctgggaccccgcccccccggccccctccctcccggggggccccccctctctcttctttctctcctcccttctttactaggcagggtccaggtttcgtcacagtctcctctgtccaatccctgtgcctggcgccgggcgcggctaccaatcagacggctgaaaccgcgttgggttgcatcatgtgcccctggcttggtgacagcggggaggggcggggaaacagggagggaggggacgaggctatgttagccacgccccagtctctgaggtcggacgcggggtgctagtgacgtcacggaagcccgccttcaggctcttgttttaactcttggctcaccaaccaattaaaaaccctgttgaggagttttggcacaggacagaggaaaacccaactgccgctctctgaacccctgtctcgtctcagggtccctgagaaagggaaacgccttggctactaagaggatgtccagacctgcgaggacacagctctggaggtggccctccacgtctggggagaaggagtccagtttctccagtttctcggtctgattcagctctcccccacccttttttttttttcttccagacagggtctcgctgtcttgcccaggctggggtgcggtggagccattatagcttactacagcctcgaactcctcggctcaagggatcctcccacctcagcctctccaggagctgggactacaggcgtacaccaccatgcctggctaattttttaaatttattttttgtagaaatggagtctcactatgttgcccaggctggtctttaactcctgggctcaagcgatcctcccagcttggcttcccaaagtgctgggattacaggtatgagccactgcactcggcctcacctccttttcgaggtgaaggagttgaggcaggcactctgggaaggtgcagacctaggccggaaataaaatcgaatatagagctcacagctcaccgaactcagctggggagactgacttggattctaaggaattctgtggtctccgaatacagtggaggcctcttagggctaatatcctgcggctctgtataggaaggggttaactcaggcgctaggcggccggggcggggccgcggcctccgcgggcgcgcgcgcgcgttgctgactcagcggcgattccagagatcttggatggagggttccaggtcggtccccagtggctggcgtgtgggaccctttgaggatcggcgccgtctccgggccttccctggatcctggcccctagaggccgtgggggaccccttttcgccgctgctgcgggaggctctgaggactgctagcctgggcagggctgggctgggcggggaggggcggggaagggcgggacgggcggggccgtcaggccagcacctcccttgagacctcctcgccacgccccgcccttctcgaccctagactccaggctggagcggtggggacagctttgctgaccgatattaaaccgcgagaactgtcgcacgtgaacaccatcctgcccgttgtgattgtgtaaaacaaagaccaggaatcaatgcgagcgtgtctaggaggccatctcggccgtggcctctctccacatgagagtggcctgtactgagagattacctaggaatggagataccacaaccatcttccaggtctggatcccaggcccttgcctgcagagaagttttttcccatatccaacctctctctttccggccagctcagtgcatttcctctgacccagtccccagagaagatggagaacagcaaatatccctcacccccaccacacccgtgataactactctggaaatttgcagattgcaatccctcctaggtttttcttcaaggtggaaaaacttcaactcaaattttacaattcattttttcattttttctttccatcacagacactaggaagggattgtaaagtggttatgaaatccaaacgcccaccaaaaacgggaatcccctgcccctccccctccccccacaccacgcaaaggcccacagcgtccccgacagtctgaacattccaatagcgggaactcagtatttgctaaggcagccattactggagagcgctctggttgttagaaagctcttccttacagtattgcaagaggaaccaccgcccctccttgcctggcagctttcccacctcacctctgttggctgaggccaggtgacggtggagggggtgtcagtggctagagctttagcagactcagcagccccccacccccacccaggccctcagcgtcttccactcagagagccaagcgcggggcagggcggggggtggggcgggggcggggtgttaacccaccggttctgccccgccacaaatcacttccaagtcggtgactcaaaaatagtaacagttgttgggttgcatctcatttccatgttatcaatttaatgtggcaaggcacagaggtagtccctttaggtccctgcctctttctcagtgttcccccacctactcccctttcccacgaccctcagcctgccccctcctctagattcgcagccctagttgtcccaggagagactgtgggtctccgtgggagctgagcaggaagaaaggcggggccggcgggggcagccgcggcggggttgaggccctgaggggcagctcccaccccgtagcagcctccgcaggtcctggcggaagcgcaggcccaggaaggcgtagagaacgggattgaggccacagcgggcgagggccaagccgctggtcaccagcagtgcgacatccttgcgtttgctggcagggcagctccgctcgcgcgcagccagtagatcggcagtatccagcagcagggcgaggctgtagggcagctgcagcaccacgaaggccgccaccagagccaccacgacgcgcagcgcacgccggcgctcgggccccctggcggccagcagcgtgcggcccagaagcgcgtagcaggctaccatgacgcccagcggcagcgcgaagcccagggccacctgcgccacggcgctcgcccccttcaccgtctgcgtgaggccctcggggaagatgaggcgacagcgtcgttggccttcccgctgcccatcctggctgaagagcagcgcaggcagcgccaggagcagtgacagcagccacacgatgacggagaccaagtgtgcgcggccgggagtggagggccgcggcccggctgggagcgctcgcgcgatggcc

SEQ ID NO: 64862 - DNA, 1513 bp, Homo sapiens
taagtaatctcttttatcagtggcatatctggggattccaagacttaaaatagacaagctttcacagaaacctctaatagggttagcaccttctcaggctggaaacctccttcaatatcagtttcctaaatttaaaaaacatggggtgtgggaatttttttattcagcggcagtatggcagcaaacgtggaggagactcgcgttttcattgccatccttgcacccacctaattgttagtgtacctgagctcctttgctttcatcctcccctgccaagcgtcaggttcctatcggcctgggctacatcacatacaaccctgtatttcaccctccatattccttcacattccacggggggcactaacatccttcaggtatcccttcccttccctgctcaagaaacaattcctcagtagtcactttttattgaaataaaagtttgtcccacatttcctaacaggcatgtcccaaatacaacaccttgtctgtgcttcaaggcacttttatttatatcatttgatcctcggttgaatggtgggggtgagcgatcattggcgtgagaccaaaagtctggagtgaaggagattcttgctcagggccaggcctggggtgaggcgaccgaggcacccaggacgcacgtgaggaggcgctcactgcacttgcgcgaccctgagtcagtgctcctttacactttgtgccttgggagccttactcacctcaccctagtcccggccttgtttttactgctacccctcctcaacatccccgaaagccatcgcaagatcagccccggtctctagccctccccaagcacagctccaggtccccagagtccacctcgctaaaggcccccgcaggtgccaccgccctcccgcgccctttgggcgctggggctcccgcccaccggcccacaccgccatccaacgggattccccgtccccgagcccgcccccgccgctcctcctcccgggcacacagccctcgcagccccagacgctgtcctcgcctgggtctctctcgccccgtcgcccccattcccccaccctcggaatgaggaggggcgcctgctacccccggccaggcaggcagtgtgtccctcggattccttccaatttcctgatccctccgcctctccctccctcaggcccagggcggcgaggggaggaggcccggccccaccgcccggcccaggcttgtttactcactcaccctccatcccgagccgcgggtcccgctgctaggacgcatgcgcgccgcggccccacccctgcgccgtgccccgccccgcgcctcctgtcggcgcgtgcgcattgacttacccgtgccgcgcggacgcactactgtcatttgccgccaaaaccccgcactcaggagtcctggcgggtgcagcctcccagacggcttccaaagcggcgctggcaggggaggggaagggctctggggaaaccttcgcagagccactaatatcttcctgaagaccctattcagcggatttgccatccccacgcgctgg

SEQ ID NO: 64863 - DNA, 2012 bp, Homo sapiens
caacaacaaaatgtatttaataactgggtgcggtggtgtgcacctgtagtcccagctactcaggaggctgaagccggacggtcgccagatctcaggaggtagaggctgcagtgagctgtgattgtgccactgtattccagcctgggcaacaaagggagacctttctcaaaaataaataaacagataaataaataaaaaattaaaaataaaacaaaggacattggaattgagcttgggtaattgtgagttgatcaaattaaatggcaattcacagaaatgttaatattaaaagaagcctagtatagaggaaacaaaggtaggctgggatctggagatctgggctttatttgccgttctacttcagcaacaaaaattcgccgctttggggaagacatgacctttctctggggttgaaccagaagacttcccaggactcttcctgctccaaaagatagggctttttaggataacagcgagggactgggtcatgacgaggactcctcctgccggtctctctctttccagaaaggcttccggaacctttctgcattgccttctgcccggacgtgcggaagcgaaggccggaagtccttagccggtagcttccgggtttcctgggctactacgatggcgatgagtttcgagtggccgtggcagtatcgcttcccacccttctttacgtgaggctcagaccccaagaagcaccgctgtgcctccctcccctcccccggaccctgggctcagccctgatgcttcatatggggagggggagaaaagacccgtcggccaacaccctcagtcccttactttcttcctgaaatgcgtcccgggcaagtgctgcctcccgccctctaattctgcgccccactcccttcacccggcaggttacaaccgaatgtggacactcggcagaagcagctggccgcctggtgctcgctggtcctgtccttctgccgcctgcacaaacagtccagcatgacggtgatggaagctcaggagagcccgctcttcaacaacgtcaagctacagcgtatcctccctcaggctcttccacagcccatacacatgcacttctgcgctttcacacatgcccagacgcccccccgcgccagcccccttttacccatggtaggcagattcccacccaaactggacttaaagagtgaaaatgtgtagctgacattttcccctggcaaatgcagtaccataccctcttgttcttggcagtgatgactgctcggatgtcattaaggtcttagaatttctgccctgaagccaagttccaagttttttaacctaaacccttttgactatttgtatcttccatccttttctgtgtgaggcccagacttgggtaactacctttaattattttctctgcccccctcctgccaggaagtaagggtcatttgtttttgctgcctgattcatccctaaaatatctgtggagaaaggctgaaggaaggcaacagacagagggtgaggaatgacagtacctttcattttctaaagcttctttctttcttttttttttttttttttggagacagggtcttcctctcttgctcaggctggaatgcagtggcacaatcacataaagctccttttaattggaagagtttctctttaccttcctcctttgaatatccaggaaatgccaattcatatcatgttgggaaattgcacacatatgtgtgtgggagaggaaggggcaggtgtttctcaacatgggactggctctgaaaatttttatcctacccaactcatgtgtatgccgttcccttaaccttaaaccaggaaagcttcctgtggagtcgatccagattgtattagaggaactgaggaagaaaggtgggttcagttccccagattccttatttttcttcctagttgggttttcctgagggcaaattaggataagtctttttccctttaataactttttctctctcctggcttgaaggccagagtcttctgtaaagtaggcagcccaattcccaagtcctttcttc

SEQ ID NO: 64864 - DNA, 1613 bp, Homo sapiens
tgggaaaagcagtagagttacagtatgttcttgtgggtagaggacagaagagtgaccttccttcccctaagacgtgggttcagtctcaaactgcccagtgatctctcccttaaatcaggtggaaagatctcatggaaaaagtaattctagttaaacatttacagctccctggggcaatgccaccactgcagctactgcttgtgaagctttccagcatgaagtgccatatgctgcctctcagcctccatactcacttgactccaggagaatgactcagtttattattctcaatttgaccctatgtatcccactgtaggctcaaacactgcacagagctgccacgtctaacctcgtaacaactgcgtccctggaaggtgaagggggtaaaccacaaagtcagaaactttgggaaaagccacggtcgcatgcacacctctcaaacaaggaaacaaactacaagaaagggctcagtcattgtacacagcaagtgtgcagtgggcaaagttctgttcttttgacattggccaaatgcgtaagtccctggtttcttgggctcaatcacggtccaaggttagtaagaaggccaacaatgttgtgagcaggattcaatttctacagggtcatggggcatcatccaccatgtgaaggggctccagcaggttggacatgatcaatacccatccagattaggaccctgacgcccttgccagagctcgggctcgggcagctttggcctcgtcttctagctcatctaggaaacgctcctgggaaatcgagtagaaggtgtaaccatctggggaggtaggttcaggaaaccacacagaatatgcacattcccctttcctagatttgctctaccactcttgttactctcccaaatcagtgattccggcttcccgccgctgctgtttctaaaccctgaaccccaattccgttattattaataaatcaaattaaaagagtaccttaggaataacaaaggaaagtactacccattttaccccaaaattaaacgggtggttcagccctcttgcacactctgttcccctgcccctatatgcggtccccttgagtctacaacacggacggatacaaatagccaacaccagggccccgatgcctaggccggtcacgatgttccgggttcgccgccgtggtaggaccttctgccactgggcaagctccgcctgccgcatggaatgcagttgctcgggtgtcagcttctcccgagtcgggtcgatacgctgagcgaacggggcctctccacgcttagaatccagagggtcaccagctcccgaagacgccatgttgccactcctcccttcgcggtgccgccgcgcgggcctcgctgggaacagtagcccttggccgctgcagtggactctgggagttgtagtccgcgtgccctttgcggggcagagccgcggttcccgggcacaggggatggacgcgggaggtgagaagcggacgtgctttctgattggctgaggagtccgtggccgttggggcgggaaaaagctgtggagggttcgaggctgtggtggtaattgggttttcctcagacttgaggcgacgacacactcattggaaggggacgaggaatccagggtgtg

SEQ ID NO: 64865 - DNA, 517 bp, Homo sapiens
tttacaattgccttgagagaacatcccaagtaatgtgtgtgtttgtgcactaaaatgtgttgagattttttagtaataagaaatctgtctctatttctgaaggttgtggggcatttgcagagcatcactggtattgccttggcaagcattgctgagttctcttatgcaatcctgactcacggagtgggagccaacactccggggagacagcagtctattcctccccacctggcagccagagctctgaagactgttgcttcctctaacacatgagggaggctgaatccaccaaatataaacagccatccgtcactgcactcatgcctccctctgtttactttcatactaagggtacaaaaattccaagtctcttttgaactgtattttgtatgccaatttcatgcttatttttcctttatcagagagagttaaggtggacgagcatgccctttttgtcatatcagcctgaaaatgttaaaaagctaggtggagacagattagttgtttcatttttgtt

SEQ ID NO: 64866 - DNA, 1326 bp, Homo sapiens
caccggttcaagcgattctcctgcctcaacctcccgagtagctgggactacaggcacgtgccatcacgcccggctaatttttgtatttttagtagagaggggtttcgccatgttggccaggctggtctcgaactcctgacctcaggtgatctgcccgcctcggtctcccaaaatgctgggattacaggcgtgagccaccgcgcccggtcggaaagctctcagaagtccacaatgtcagaatgctttatgtttccaaggagaaaacagggagccagatgaagtgactttcctaggttcacacgatgagtttgtggcagactacacagccaccataagaattatatcaccaaagctgcccaccttccacattcttgaccaccctctttccaagggtctcgctgacctgtgagttcctggatggtgacacggtccaggatcttgaaactcgtgtccagtttcaggggctggctgcagcgctggcacacgaagctcacctgcatggtgctgttgttggacgtcttagacccttccatccctgaggccgtggaaaagaggcaacattagggagaagcgacgcccttgacctccggcccggggttaccacatgccttggtgacgatggtaaagggagggaagtcccaacctgcgccgttccctctaggaatggtatgatacggggaggacctgcttccgggacagcctgagcaaaggcagtttagagcccagggtcagggaagggactccaataagagccgtgagggttcccagactcccttctaaggtcccacctcagcccccgatgctcttcacctcgggagcccggagcccgtcacccaagtccggtctaccgcggaggcactgtggcctcgggtcggccccggagcgaggcctccagaactaccatcgctctgtcttcagcgacttcccggtagccgccggaaaacttccgccgagaccggacgtgacgctacgacggcagcaggagctcctggtccacaggctcacaggcccggcagcggcccccagaggccgggctgggaaaagcagcgggcttcagcggatgaacaaggttaccacgggaagtgtaggagccaaggccgcagagaatggggaggctccgctattctctaaattcagggggcggcgggcgcggtggctcacgcctgtaatctcagcacttggggaggccgaggagggcggatcacgtgaggtcaggagttcgagaccagcctggccaacacagtgaaaccccgtctctactaaaaatacaaaaactagccgggcgtggtggggcacgcctataatcccagcttaatcccagctact

SEQ ID NO: 64867 - DNA, 2247 bp, Homo sapiens
tgcctttgatttcccagagctgtgctcttcaatacagaagccagcagccacatgtggctactgagcactgtactacaaatgtggtgttgccttattgagatgtgcagttaagtgtaaaatacgcactggattttgaagacttggtatgagaaaagaatgcataagatctcgatttttaaatgttgattacatgttgaaatacttgtataaactgggttaaatgtatgactaaaattttcacttgttttactttttaattgtggctactagaagatttcaacctacatatgtgactcacatatttctagaatctgacacagtgccctgccccattttattgaatgatatatccaatgtcgagagagagagatcgaatgaatgggtgcatgaagaggtatagtctcatgcttccactaggcaaatagatacagcactgccgtagaagttaggagatctgggttctggctcaggatgtactggaaacgccttggacaagccctaccctactctggggatcaatttgccaattaggtagttgatctttgaggtctggaagcttacgagaatcagttggcagggaaatgtaccaggaaagcttggtacaacggcgcttgtctttttcgctctagcctaaacacttgagcctcggcaaacgggcagaggcagcgggaatcagggactacacccccgaacccagtacccgggtccccgacttccccgagcctacgtcactggggcgcgacggcgttgtccccgggagtgcagcggctgagaaggtcccttcggtgaaggcgagttccgggacaacagagagggccgcaccgtttccgagtctctcggaggctcagttctcagcgcaccattccccacagctctcctttttactttacccctacccgacacttgaccccggcagtgtgaaccccgctgggagcgtccaaagccatgcctcatcgcggctgcgcagcgcacgtgcacagcctcgcaggagtctcggcgattggctgtgacgcagtttccggcgtgagcggcgaaagccgggagggcgagcgagagagcaagcaggcagcaggctgccggcgggcgggcggacggcacagagggagggagcgagcgagcagtgagtaagccagcaagggcggtcgggtcccgaggtcagccgagatttctcaggtccctccggccccctccctggagtccacagcgcctccggtgtccagaggatcggacacggcccggcccggccatggcctcgttgctgaaggtggatcaggaagtgaagctcaaggtagcggcaccggtccggcctttttgcccctcgctttgatcccccagcagtctgaccggcttcctactccccatggcgtctttgtctccctggggataccagctctgagcttccgctcggctcagcccagcccccaactcccggggtcggcttcgcgggagaggaaaatataggatggctttctgtaccgcgtctgatgatggagagtcccggggacacctccgcggacacgtgttggactcagggctttaggcccgtgacagctggtaatcccccagcccaacaacgtccctggacactgcccctgcccttggcggctggcctgcctagtatcatagactaggtctgggtgggggttggcacgtttgtgagctcacatcttccctaactacctgtcttttgtctgcttatcaaattcagacagcttcagacacaggaggaagggagggaagggggaggacagaggagacaggcaggtgctgtcctcaaagccctgcgttcttctgagatggaaaaatggatcctcaaaaaaataaagtatttgcagtctgggggcctctcagcttcttattacagttacaaggtgagggaaagacagttggattgggattctccatcctgctcttacctctgtccccaggtactgaattgctctctttgttaattttaggttgattctttcagggagcggatcacaagtgaggtgagtgaaataaatagaaaaatggttgttggttgagaatttcccaaagaggagatacctggagagagagagagagagagagagagagagagaccttcccacagatattaattcagctgtattttccctcttccttaggcagaagacttggtggcaaattttttcccaaagaagttattagaacttgatagttttctgaaggtgagagaccctattctttcctcaaattccccaatttttttggccctggtattac

SEQ ID NO: 64868 - DNA, 1028 bp, Homo sapiens
gggaagccccctaccccgctacctctacctggctagcaaccagactaatgcgtggggtcaccagcgcgggtaccgaatccagatccacagcccccttggcatacacatacccctggagagtgacatggagagggccctcagctgggggaggtgaggagggccctggcctgggtggaaggaaaggacagcccctcccctgccccagtccttggagacaaactcccttcccacggctaccattcatccctgtacctcccctcaaacccaagttagatacacggtgggaaatggtctcacacagaatcggatctaagggactcctgggccagtaaaggcacttgacatttcccaaaaccaccttcttatgattcctggccagataccagcttgtggtgacccagagaaaggaggaggagtcacagagcagtagcatctatcaccagaatgacatctggacacccacagttacctttgctgacttcatcaacaatgaaaccctcttaggagaggttggttgccctagggacataggaaagggacacctgtgggcatggcatcttggctgcccagcctctggccaaaggttagagggaatggctgatttccagttcgcagattcagaggccatggagttttctgatgaccaacacaggtcatccctcctggggtgagattagctctgggacactggctcccccctctccccgcacagctgcttacatggattgctccacgtgttgtatgggcatgaggctggggagagtggaagccaggctgagactggaggctgggattgtgactgaagggtggttctttgggtcacgcttccatagtcctccagctcctccttcttcttgcaggatctggtggcttgggtcacagccagcttcctgcacattccccatgccgaggacatcccaaacacagtgactctggggaacagagttggcttcttgctccgaccctataacttctttgatgaggacccctccatcttctcccctggcagtgtctactttgagaagggc

SEQ ID NO: 64869 - DNA, 414 bp, Homo sapiens
tcttctgttttggatgggagaggggttgtactgttaaatggctggggataaacaggaggacttgaccccccttagggtgacgtcggggattctgtagcgccgagtcagttgtgtgactgcaattggggaagctgagctctgagcactcagttccctttcatcataatcaggcagcaggatggggtcaatggccatggaggcctgaccagtgcctccctaggtaccagctggctgtgacccagcggaaggaggaggagcccagtagcagcagcgttttcaatcagaatgacccttgggcccccactgtggatttcagtgacttcatcaacaatgagaccattgctggaaaggtcagctggccggggtagagggtacaggatgagccttgctttctcttgggagggtccctgaaaa

SEQ ID NO: 64870 - DNA, 941 bp, Homo sapiens
tgggattacagacgtgggccaccacgcccagctaatttttgtatttttagtagagacggggtttcaccatgttggccaggctggtcatgaactcccaacctcaggtgatccgcccacctcagcctcccaaagtgctaggattacaagcatgagccaccactcctggtctttttttttttaatgttcaataaccagctctgtgccctcagctactcggctggcaggaaattaaactccaggcatgtttgttgagggtgcttatctttagggttaggtaagactctggaatctgggaattttggggactgtcagctagtcttcagtggacagtgatcactgctgttaaactcactttccactgccttgccaagtcttgccaaggcggggacagaggaggggcctaggcatgagttccactctgaggctatcacttccctaaggccttgctgggcgggagagtgggctctagccattctttccctccatacacacacacacgcatacacacacagacagacacacacacacacactccctacttgtgaatcccacaaaattccccgaatatctgccctcactctgtaggggatctctcaaaaaccttcctccttcccaagttgatccagggagctgtcatctgtaatccaagagcttagagaggctgcagcgggaagactgcttgagcccaggaatttgaggctgctgtgagctatatatgacatcactgcactccatgcacgctagcctgggtgacagagcgagaccatgtctcaaaaacaaaacaaaacaaaacaaaacaaaaaaaaccaactttttttaaaacagtttttttcatgaagagcttctacagagcataaaaaccagatcagcaagagaaaatgtggttcttggtttccctgaggacaagaagggctcacatgcctggagggaggagttgttat

SEQ ID NO: 64871 - DNA, 1995 bp, Homo sapiens
caggaaaattgcttgaacctgggagacggagcttgtagtgagctgagattgcaccattgcactccagcctgggcaacagagcaagactgtctcaaaaaaaataaagtcaaataaaagaacaagaggcaggaaaaccaggcaagtttccttatcaaaatacaaccaatggcataaacatttctggatagcctgacccttctggtgttgatttatctggagggtcctggtctctgtgtggtgctgccagtcaagaggaatgatggatattgtgaaaaacccaagggcagaggggtcgggggtggagctagaggggactaggaatcaggtcgtgttcaggaggtggggcagagttaaactttgactttaaatgacccacataagcctccgtcctcctgttccaaataaaacaacgcactcagggtcagggtcaatgacctggtctaggtttccaggtgtctgtctcactgtctttctgcaatgactaccttgctgaaaacatgcgccacgcgtcttcatgatcttacctcctctgcttactcccctcctccccaactcccaccaaataggctgatccttggctgttccctgcttgtgctgagctgtttcaggtttctgtgcctttgctggaatatccttcctcttctctgccaggtgaatgcatcatcttcaaggtcggctcgaacatctcttcctgagaagtcttcctagatgtgtccaggttggagaggattcttccccaggtacacgagggaagcacatcccccttctggaaccctcagtctcttccagttcccctcaggacctggctgcccaaatgacagtggctttccacatgtttgtcacctggaaaagaagccgctcagccattggctgtgaaggacagaggtggcttcactctccatgtcggcaccattttggaaaaggattttcaggcccgagataagtccacagccagtttcccagccccacctgacctctgccctggcctatccctcagtccagtacaaggggaggcatgaaggtctcggttatactctggttcctgcccccacactcacccccaccccaatgaaccaggcagcttctagcttgttctgcaccctgcacactcccctacagtgacttagggcacttggggcctccacaaagctgacctggctcagcctctcagccccccagctccctgctagatgctttgctttctcatcattaccctcaggcttccctcaggctgctgctaggattctagtggatggatggaggcaggagagagaggtgggaggcagagcctggaggacatcaaaaactagaggagggaaggagggaatctggctgtggaggtgtggccaggtgattttcccttgcagccttgcagccaggagaaaagttccacctggagggaaaagaaaggagagccgcaggacagtcggcgccccccacttcctcttgcaccttgctagctcttatctccaaaacacacctctctgcctacttggttcattgaccctgaccctgagtacgttgtttgatttggaacaggaggacagaggcttacgtgggtcatttaaaatcaaagtttaactctgccccacctccttaacacgacctgattcctagtcacctctagctccacccctgacccctctgcccttggggtttttcacaatatccatcattcctcttgaccagcagcaccacaccaggaccctccagaggctgtgagaaacatcctgcacccaggtcctctctatctgtttatcattgtctattttgtattctgcattcagaaccaagagcctgaagacgacccaggagctttagctatggctgtcttcattattttgtccctgtttagtgttctggtgacaggcatgggtgaaggtggggctgggagtgagaaaggaggtgagagggaatgtaagctgaaccagcttccccattgcccctccgtatctcccagtgcccagccttggacacaccctggccagagccagc

SEQ ID NO: 64872 - DNA, 504 bp, Homo sapiens
ctgggaggcggaggttgcagtcagccgagatcgcaccactgcactccagcctgggcaacagagtgaggctccgtctcaaaaaaaaaaaaaaaaaagtctcaggagctcgggcagccaggtggggagctggcccatcaggagttggcatgcaaatgagccacgtgcctcccagcgggggaccagaggccaggtcagggcaacagcctccagggctgcccgtcatgggctgtggactttgtataggcataaataagaaccgggacaatttccaggaggggatttgggagtgggagtaaggtaagggggaggtagggctcaaacaccaagctttctcaggtgtgtcaaggcaagagaaacttacccagtatgtggcgtccacacctctgctccttcagtgtctttcctgggagtgagatcaagaagagaggggggggtcccgtctcagcaggaagcccaggctgcccacccagtctgaggggacggcactgactgggcaggatctgg

SEQ ID NO: 64873 - DNA, 1447 bp, Homo sapiens
gcgatcacagctcactgcagcctcagcctcccaggcccaagcaatcctcctgcctcagcctcctgagtcactgggattacaagtgtgcaccaccatacccagataatttttaaatattttgtagagacagagtctccttatgttgcccaggctggtcttgaaccttgagctcaatggatcttcctgccttggcctctgaaagcactgggtttataggtgtgagcaactatgcctggccccctcctatagtttttccctggccaatatccctcttataaatccacagagcttctcactctctgcagggaatattaggtcattcacatacctgggttcagtccctacaccgcagtcatcgtgatgcttacaccccagacaccccagacgtgtgtcctccttcaaacagcctattcccacccactaagcctctgcccatgtgttccgactcctccctcccttccttcctctgcttccttcctctttcctcttccttctccatctagtgacagcttattcactgtctaaaacccaactcgaatcccactctctcgacctttccctgaacaacattatttactttgttgtctctgctcccatagtactttggacagaactctgccatggaggttcacaaactgaactctagttccttgaccacgtgtgtcctcccctcactccccacactgaacctggctttggtggcctggtgcccagcatggtgttgtgcccgtgtgtggatgcttaaatacatctttgaaatttgaataaatagtaaacattgttatacatgagtcatgtttttctctttaaaagccacatcatatccatttgctcattggactacttcaaaagagaagctctaaggacatccaaagatcctaagtgaaaaatcaccctggctgcacgggtcaagccaggacacagggccaaaggtcggtcagcactgacacgctgagcccaggcgtttgctttccagatgagacctgcaccgctggaccagcaatgcagcagaggcagcaggaagagggagatggagccaaagggtttctggacaggcggttgctggcagatctataaatcgatgccccacaatgggctgtcactgaaacaggccaggagtagcccagagcctggaggtagacctgagagggcagggtgtgggaagattagaagcataggctaggccaggcacagcggatcgtgcctgtaatcccagcactttgggaggccgaggcaggtggatcacctgaggtcaggaggtcaagaccagcctggacaacatggtgaaacccatctctactaaaaatataaaaaaaaattagctgggcatggtggcacatgcctgtaatcccagctactcgggaggctgagccaggagaatcacttgaacctgagaggcggagtctgcagtgagccaagatcgcgccattgcactccagcctgggca

SEQ ID NO: 64874 - DNA, 1996 bp, Homo sapiens
gattaagaatgggagaagaggttgggcgcggtggctcaagcctgtaatcccagcactttgggaggctgaggcaggcagatcacttgaggtcaggagtttgagaccagcctggccagcatggtgaaaccccgtctctactaaaaatacaaaaaattagcagggcgtggtggcacgcgcctgtaatttcagttactcgggaggctgaggcaggagaatagcttgagcctgggaagcagaggttgcattgagctgagatcacgccaccgcactccagcctgggcaacagagcaagactctgtctcaaaaacaaaaacaaaaaacaaaaaacaaaacaaaaccagaaaagtctaccatctgtttgtgagggaactagttaaatgttcgtggaaacaggttacttcctggagggaacaacagcttcttttgggaagggggctaaggaagagcgaggtgaagaagaggaagggcagttcgtgcttcccataaaggttctggtgactcatttgattttggaagaaggcaggccctgggatggcaggaggaaggtatctagtggggagttctgagatgtttacaatgcggcaaatgacttcaggttttcttctgtgcacaaaatgtgcagcccatcctgagacacgctccacgcttcccctacctgctcagttcaaggtcctaaagctgaactttctcactgtgccagagagaagccagccctttgcactggcgaacaatgattaacccgcctctccctccacctgtttttctcaacatgtttttctaaaacataaactgggtcactcacttagaaggtgacagcagttgatctggccagtttcccatgtccaccatgaaacacttcctccattgatcacttggtagggaaaaaaaaaagcatacaaaagaaaagtaattaaaaacaaaaataaaactgtacattttgcactttgggctgtagccctgctgctcggacgaagctgtgaactggagctaggtttcgaatcccatctatagtatgtagaaaacacccattctaggtcaggcacagtggctcacacctataatcccaacactttgggaggctgacagaggaggacacttgagcccaggagttacagaccagcctgggcaacaaagtgagaccctgtttctacaaaaaatacaaaaaattcgccgggtgtggtagcaccggcctgtagtcccaggtactggagaggctgagctgggaggattgcttgggacccaggaggtcgaggctgcagtgagcattgatgggaacagtgcactccagcctgggcaacagagtgagacccatctcaaaaacaaaacaaaacaaaacaaaacaaaacaaacctattgtaggatgataactgagtaaaggaaaggtggctcctctctcaacagaatccagagcccccacccagaatagaagatacagcttcaggtaaaatcagactttctttttggtagtaaatgcaatttttggatgaggtgtgtggtaagttacagctccttttccctctttgctttctcgtctgcaaataaacttgttcgagtgaatgagtcaaccttgccctgggagaatgtgccagggccctgggcccagctgcacttactcatcagcagaccagactgtacttcctggcatctttccttcatgttcttctcaagatccaaagcctctggatttctagttgtggggaaaatgcctgaggagtggcttgcttgggtacctaccaaagaggagcccaaatgattttccatcctcattccttccccaactcagctggccatttccctagagggtgttaacgaatcttctctaccgaggacaaaataatagggaactcactgatatttctacaaaggaaatcaaaatatttcatcccaaactatggctcccaatataataagtactttttttgttcgtttgagacagggtctcgctctgttgcccagcaggagtgcagtggcacgatcacgactcactgtacctccc

SEQ ID NO: 64875 - DNA, 2266 bp, Homo sapiens
tgggactacaagggtacaccatcacacacaccaaaacaattttttaaatttttgtgtagaaacgagggtcttgctttgttgcccaggctggtctccaactcctggcttcaagggatcctcccacctcagcctcccaaattgctgggattacaggtgtgagccaccacaaccagccagaactttactaattttaaaattaagaacttaaaacttgaatagctagagcaccaagatttttctttgtccccaaataagtgcagttgcaggcatagaaaatctgacatctttgcaagaatcatcgtggatgtagactctgtcctgtgtctctggcctggtttcggggaccaggagggcagacccttgcactgccaagaagcatgccaaagttaatcattggccctgctgagtacatggccgatcaggctgtttttgtgtgcctgtttttctattttacgtaaatcaccctgaacatgtttgcatcaacctactggtgatgcacctttgatcaatacattttagacaaacgtggtttttgagtccaaagatcagggctgggttgacctgaatactggatacagggcatataaaacaggggcaaggcacagactcatagcagagcaatcaccaccaagcctggaataactgcaagggctctgctgacatcttcctgaggtgccaaggaaatgaggatggaggaaggaatgaatgttctccatgactttgggatccagtcaacacattacctccaggtgaattaccaagactcccaggactggttcatcttggtgtccgtgatcgcagacctcaggaatgccttctacgtcctcttccccatctggttccatcttcaggaagctgtgggcattaaactcctttgggtagctgtgattggagactggctcaacctcgtctttaagtggtaagaaccatatagagaggagatcagcaagaaaagaggctggcattcgctctcgcaatgtctgtccatcagaagttgctttccccaggctattcaggaagccacgggctactcatgcttccaacccctctctctgactttggatcatctacataaagggggaagacagaaaaaatcctaccagtgagttgaaaatacaggaaagcctatttcatatgggttaaagggtaggacagttgaatttcgtgaaaagtctgagttatataggctttgagcaaagagttttattagtatgaagcagaagaggtaacataaagaaagatgtatggggccaggcatggtggctcacacctgtaatcccagcactttgggaggccgaggtgggcgaatcactcctgggtgaactcaggagttcaagaccagcctgggcaacatggcgaaactccatctctacaaaaacattacgaaaattagctgggcgtgttggtgctgtagtcccagctactcaggaggctgaggtgagaggcggaggaggttgcagtgagtcaagatcatgccactgcactccagcctgggcaacagagtaagaccctgtctcaaaaaaaaaaaaaagatagatgatgtatgctgtatgaaaaaaggaaacacacagatgattcaacagcctgttttgtggggtaatgaaaagtcaccctgggaactgggctccagccctcgttctgccacccaccaactacatgtccttggcaagtcatatcaattatctgagtttctgttttataatctacaaataggttatctctggcagcttaataataatcagggttaacatttattaaacagtgtgtgccagtccatgtgctatgtgcttttctgtgaggtagttactgctatttacagaaacagtagatgcagagaccaaggtgctgagttaaatgattaggccaacaaggttagtacatgccgagccaggatggaagcccaggtaggcaggctggcttccgcggcaatgctcttatgaactatgttacgtccagtgctgataaactgactctctggggagcaggggaaagccctgagtttagcatttgccaatttctatcacgtaaacattcccattctggccactttctttctttctttcttttgtttgtttgtttgagatggagtctcgcactgttgcctggctggagtgcaatggtgcaatctcagctcactgcaacctctgcctctccggttcaagtgattctcctgcctcagcctcccaagtagctgggattacaggtgcccgccaccatgcccagctaattttttttgtatttttagtagagacatggtttcactatg

SEQ ID NO: 64876 - DNA, 892 bp, Homo sapiens
gggaggatcccaggaggtagaggtcacaatgagccgagattgcgccactgcactccaggctgggttactgagccagatcctgtctcaaaaaaaaaaaagataatacattcaaacagttcaaaatgcaaaagttacatacataaggaagtgtcatgaaatatctccctctcacacttctccccagccacccagttctcccttctagaggcaacatgtgaaatccttctcaggctacactcttcttgaaggtgtaggctttgggcaaaagcattcattcagtaaccccagaaacttgttctgtttttccataggattctctttggacagcgtccatactggtgggttttggatactgactactacagcaacacttccgtgcccctgataaagcagttccctgtaacctgtgagactggaccaggtaagcgtcccagcccctgcagacagaagctgagtggacctcgtttacctgttatggatgaaactgaccttgaggggacatgaggagagccattcctttgtacttttgtcatgctcttcaattggcacaaattaattcacttctgcaatactttcctgaatagcacagtagtattggaaatctgcctattacagaacctggatggagtccagagaggcacgggcatccatgggcaaagggctcgtgagagtcaccgccctgcagcgctgtgtcctgagaaaggagggggcagaagcctgagcttctgggggtccttcccaatggcctggcccactggatgtgccctcctgagctgaccgtccaatcccttgccctctctgtgcctacgttttattagttacagccagatggttactgtcaaatcaaatgatagatttcattttcagtatgtaataggaagcccctccctca

SEQ ID NO: 64877 - DNA, 871 bp, Homo sapiens
cgaggtgggaaaattggttgagcctgagagggtgaagctgcagtgagccatgattgtgccactgtactccagcctgggtgacagagcaagaccctgcctctaaaaaaataaatacataaaaataaagctgcatctgggctgctcttctcaataaaagaaagaagtctataaatattttttatttgtcctgagttggcctttatttcaaaaaagaaagttgctcactataaattctactcaaaaacatttttcatttcatgaatatagaaatgaaggccaagagaggtgaaatggtgcctctaagtcacgtaactaacatgttcacaggtctcttgattctcagcaaagagcagtctcctctctgccagtctcctgcgtatatttgggctgctgtgtcaacatgcagctgttgaaacagaagtaaaagacatatgtaaacagtacagtcagattatttgagccagactgagggcttattaaccaaattaaaggcaaagctagaataattgtgtttgaagtggccttctcctaattatgttatgggtttctttcttcttttactttcgttaagtctccccaggacacagggtaataactaactacaaccaggaacagctgggtgtgtttatggggtttggggttttttttagcaagaagctagttttccagccagcaaattttcaatactttcctttctgccacctcctcactttcttcttctgctcttctcattccataattattgccctcagaacagttcaactcagcttcaacactggaatggtctcattctgctccatcacagaactggggattctaatcctttattattctgtgctccttcctctctctccagaggcaaaaagaatga

SEQ ID NO: 64878 - DNA, 1423 bp, Homo sapiens
ggattcaagtgattctcctgcctcagcctcccaagtagctgggattacaggcatgtgccaccatacccaactaattgtatttttagtagagacggggtttcagtatgttggccaggctggtcttgaactcctggcctcaagtgatccacctgtctctgcttcccaaagtgctgggattacaggcatgagctacctcaactggctaccaaattgtgcattttaaatgtgtgaattttgtggtgtgtgaattatatctcaataatgctcttaccaaaaaaaaaaaaatctttatatggcctctgaaagcttacctcagctggaccttgtctaccgcacctcacctggtctccttcacctcattccacaaagcacagccaatgtcatcttggttcctccaatgcaacacactccagccctcctccgagcttgggcttttacacaccccccttcttagaacactcttctgcctcttcacataattcagtcctccacattggtatcactttctcaaggaagcctccctgcccacccaccatgagtcatgatcaagttcctcttctgggcctgccaaagcaccccttttactttgctctctaccaaacgtcactttgtgattatttggatcatgtccgtcttccccactagactaggccccatgagtgcagctccatgcctgctttgctcactcttgcacttaaaccctgtgcctagccctggcctaacacatgaggaggactccagatatcttggttgaataataaatgagcaatatattactgtttgcccctaacttggaaaacaaatgataggttcaacaattctagagctccacaaatgactcagcaaaaacatgttcggaggcactcccaacgtgaaattagaaggttggaaactcagaggacgggacaggcttagatagaaacattggcctcttcccaggtaagttctccccaggaggtggggagcaaactctctgagcagccagttacagggaactcatgactaagctctgttgctgtttatcaagatacacactgactctcagaagttctagcgtgaaccaaatcctgcttcaaccccatgggctttcagtgtaggactttttctttttgttggtgatcacacaccctactggtggcttaaccaattacattgcctcagcccctgtgacactccagctccgcgtcccctttatgatgcttcaaatatcataaaagcagagaaaaatcatatgtcatatatcagaaaatcatatatcaacttttttttattttgaggtctttcacacactgaacttattttaatcataattgtcaattataaataaacataattactatgttccttttttgatgtcaaattgttgcaatttggacagtggcttccttatccttctaccattgctggcctaaaatccttgtgt

SEQ ID NO: 64879 - DNA, 1468 bp, Homo sapiens
ctactgaaataacttacccttcatctagacaagcatcccatcactctctttccctttacttggtttttgtttattacttattatacctagcacacacagttgtcttcaataaacattccacgtatataaaggcactgtgttgttcaccggttatccttacagcctggaataatatctagcatatgttatgtctagataagcaattgctgataaatactcattaaatgaataacaaaatgaattaaactaaagctcatctgaattcattatggctgagaaaaaaggggcaggagagcatttcggcctgagcacaaagaaactgggggcttcctgggaagagatcgttttggtacctgtcccccgccctcagggaaaagcactgtgtcttccagcaccacttggaaaccgctcagcacttctttcttgccgttgctcccttcagtctgcagctccgcgggacagcaggagaccacggtggtggtgaactgaacagagaggaatgagagaataagccccgaccccagccctagccctagccctctccacaccaggacagaatgccatgttggcactccctacacgtggcgccctcttccccaaaccgccttgccggcccggcagtctcaagtgcctcgccgtgacgccgtacctctcgggcataactgtcacgctgacaccagaacgccatacctgcaggcgtgtgaggaggcgcacgcgcagagaagcctgggagcgaacggagagcgacgtgggacaaacgtcatcaagggcgcttgtctgcgcagaagcaggagggtaaggaatggaatgcggtttggataaatttactgaaaacgcgaattgcatatttgctgggttgtttaacgactgttctaaggctttacaaaggacaagaccaggaggaaaaaaacaaacaaacaaaaacaaaaaaacgcgacctggacaaggcacgtggtttagtgagccccttggggccccagggatgtaagtattctggctgcggaatcccagcgcatagaggcggggacgggactggcatggttactgagcagcactgcccagtagaaatagaaagcaaggagctgggggaggtggctcacgcctgtaatcccagcattttgggaggtcgaggcgggtggatcacctcaggccaggagttcgagaccagcctggccaacatagcgaaactccgtctctactaaaaatacaaaaattagccgggcgtggtggcgggcgcctgtaatcccagctacccgggaggctgaggcaggagaatcgctggaacccgggaggcggggttgcagtgagcagagattgcaccactgcactccagcctgggcgacagagcgagactccgtctcaattaaaaaaaaaaaaaaaaaaaaaaaaaaaggccgagcgcggtgactcacgcctgtaatcccagcactttgggaggccgaggcgggcggatcacgaggtcaggata

SEQ ID NO: 64880 - DNA, 1778 bp, Homo sapiens
agcccttcaccgtggggtcttcagaaatgcatagactatgaagagacaacccatctgctggaaccagggcaaaggctgccctagacgctacacacagggaatgacttttccccggtatcattcacctgtttctccgacgcttactgctcagtgtctgattcacaataggcgctcaataaaacattattgtcctgaattaaattcccggggaaggcgcgccctcggggacttgggtacttcaggccccgcccaccactcccctggggttccaggccaccgcgccgttgccatggcagcaggggggcgcggctgacgtgcggtggtgtttccgggaagatggcggctgtcgaagcggctgcagagccggtaacggtggtggcggctgttgggccaaaggcgaaagacgaagaggaggaggaagaggagccgctgccaccgtgcgaggcggtgcgctgggccccagtgggggcggtggcggaggcccggcctggggcaaccgcgtttttagaagaggcgacggccgaggagcctggcgcggccccgggctccccgccggattcgccgggccggacgctgcggcggctgcgggcagagcggcggcggctggactcggcgctgctggcgctgtcctcgcacttcgcgcaggtgcagttccgcctgcgccaggtggtgcgcggggcgccggcggagcagcagcgccttctgcgggagctcgaagacttcgccttccgcggctgccctcacgtcctaggttacgaagggcccggcgaccccgccagcgatgagggcgatgggctgccaggggaccggccatggttgcggggcgaggaccaggtgagtggctggagccgggccgcgaggaatatgggaatagtggggtcgtgtgggtggcgatccagacccggatgatggtgcatgcggggagaagcctccccgactcggtcggtgagtacgtgtgtcggagaccaggggactggagtgcggggccggctgaagggcaagaggacagaggcctgggaacctgagggtgagcggtgtgcacggaggatgtggagagatgtcggtgcgtgatgacgtgagtggtagaggagcggtgagcgaagtgagtcgttgagagggcagcagagcagccaagagcagtgctgcgcccactcacctttccctcacgtatctcagtcttgaacactttggctgctagaggaccccgactctggggattgggaaaattggcaaaggaaaggaaagtgagttggaatccgtggaaatttaggttaactccctgtccctgctttcctgaaatctaggcagtctttacacttctttgggtgggagtttggattaacagcagggtctcttagtaactgaaataaacacaactcttgattagataaatttcctaatgttggaatttttcctttttaagagacgggagggtcttggtatgttgcccaggctggtctcgaactcctggtctcaagccatcctcccgcctcagcctcaggactacaggcgtgtgccaccgtgcaggctataatgttgaaatttttaaactcttcctccatcctgcttaatcattaggcattctgaatgaggtcctctgataactgacaagatcgattcagtgtgcctaccccagaagtagtgaaactatgtataagacaccaggtaaacgtttccttacaagctttgcatctctggaagtgcacaaagtgctggctttattggaagtgttgaggtacactgccttttcactttttttttttgagacagagtctcac

SEQ ID NO: 64881 - DNA, 2184 bp, Homo sapiens
tatgatgaccaaatcagatgatgtgcataaatagattaacctgacctggcacagggtaagcagctgccattcttctcctctacctccctcatgcttattctagttggtaatgtcagtgacaccactagactttaactgttgggggtaaatatcctttttgtttgtttttttaaaaccaaatttagcagtggggggttgtataccaactttagtgaccctaacgttgataagttctgataacccactactatcggaccagccacccttactgatctttgtccctccctctttagctaacagtgcccccgacaggcaccaataaatgccctatttttttccctgtgtctcccaagagaaaaagtaaatttcagattgtgttccccctcctagcgccagagaaaggaactacaacaaagcctagctgctgagtccagagcgcacagcacagtcgccctcccagctcttccgtcggccgggaggagtctcctttgctcttgtctactgctggagctgctaataaagtttcattcgaatacttgagctgccgcgccctgcgtttccctcatgagcttcttccgcccgcaacacgagactcagcaccacacaatcagcgtggcaaagcctgaagggcgggacaggaagtgaggtcactcctcaccggggtgaaaggttagcggaagtgtccttctttcctttttgctggtagggccgggtggttgctgccggtaagtagaagcttgggttgaatctttcaatccgctgccatccgcggcttgggggtcgaaggtccgggcggcgccgggtgcattccttccctaggtctctggcggctacgtatccgatcctgtcctgcgagcagggccctcgggcggccttgaccaaggcgacagtgaacacagtctgaagttccggcccaagacctgggcttgctggcaggagtcagctctgggcatctttggctttacggatttttaagtggccctttctccttgctctctgcagaaatgggcaagttcatgaaacctgggaaggtggtgcttgtcctggctggacgctactccggacgcaaagctgtcatcgtgaaggtatcagcctcgcgggactctgcgtccttgcatgccgggaccaggctggctgcggcggggcgggcaggcttggaattcaaggcctgtttctggggcagtagccagtgagcacggtcagggtgaacgtgggagagtttttgagagaggaagaagcacagtaaaagcaaatgtgagctgaattgggctcccaacgcataaagccttctccaccagaggctttaaatatatagtaatagtggctgacattgcacgcttgctatgtgctcccactgcctttcaggtattgtcatgtgcagtccttgaagtaatcataggggattccttttcttttcttttcttttttttttttttgagacgggatctctgtccaggctaagtgcagtggcgtgatcactgcagcctcgacctcccgggctcaagcgagtctcccatctcagcctctcgagtggctgggactacaggtgcgtgccaccatccccagctatagggggttccttcctgttgctaaggtttggaggtgttctgttatttacctgaagtgctgcagctgggaatctgtaagaagaggaggaaattgcttttagaaaggtcacatagcccctcactgttttcctcttatccatgattttgtagcttcttgagagagttccctaggctctggccacatacaccactgcgttttgttgttgtggggacactggagtacccctggattcccctctcccatctcctgagactgatctctggagttaggctgtggtgtcttaaccttggctgtacacttcactagcagtggagcaagtgaatagataccaagtcctgtgagcagtgcttggcatatagcaagtacttcttaaatgttaactgttgctacttttaaatctcttacctctagtaagccgttccagatgcttcctgatggagataaacactgttctgtttctctttggtcatttctcatagctttctgtgatttttctctttataatggtggatcttggagacctgagggtggaaatattttttggacactgcactacctctaacacagggcctaaataggccctcagtgaataacaaatgtaattcttactcattt

SEQ ID NO: 64882 - DNA, 898 bp, Homo sapiens
agcaattattttatcaatgttcaatgtgcccagcattattctaggctctagggaaataatccattgacaaagcagggtctaccaatgggcttgtcggagattgctgggaatggttgatgggggccagtttgcagttggggtgaggtggctttccttgaggcagcctggctgagtgaagtcgactttgctgaccaagaaggctcctcccaggggtggggaagcctcggcagggggcggcatgtgagcgccagaaggcagggatttcacggaaatgaaagtggaagcaaacagcctgcgagcagagcctcctgaggtgtatttcgggtcttgctggggctgagagagaccacagccctttggggggtacaaacaagagttcagttgctgtgaattctgccactgtgcccagctctgaagcctcagctcttgccaaacagacccgagacccatgtcagccccactggatgccgtaagtgaggaggagggagttgggaagtggggaaacaggagtaatcctcttggctaggaacctgcagatatctcagggcctggcagccaagcctcaccctgcccatctcagacctgctgaagggctggggagaaacacagggctggggttgcctctgcaagagttggttccctaacctattgcctcagacaggaggagctcattaaatcctgtgtgtgtacacttctctggagagagaatctgtagtttccatcagatactcagcgggttctgtgacccaaataacaattgttctaggccgggcgtggtgtctcacgcctgtcatcctagcactttgggaggccttggcaatacagtgaaaatccgtctctactaaaatacaaaaaattagctgtgtgtggtggtgtgcgcctgtaatcccagctactt

SEQ ID NO: 64883 - DNA, 1559 bp, Homo sapiens
taaatgagaaggagaaacaggcctgcagacttggccaaccagttcaaggcgccgcacctctccgttccagtccaaacccctggcactggggtttctgaagtgggggtcctctgcaggaggaaggcagaggtgggtccccccttccactccccgccccaggcattcccaagggcagccccgggtcgtggcccgaaggctgagggctgagtcacaggaggaggagatactgcagtcacgggagacacagagcccaagacaaagatcggatgacccaatcccgcctcccccaccccaaaatcagatcggcggtgtaaggctggtggcggtggggtagcaaaggctctctctcctccgtgatgggcgtgtctcgtctctttggccttgctttgggaggggccgcctcacacccccacagaccacggggctgcatgtgaccaggactctggcacggccgctgtgcccccgcccaaccccgacgacatagcccctcaagctccctcggggaaagggggcactaaccgtcactcatagtcacagaccacaattacccagagagtgtttggtgggtaggggtacaggtgtggttttaatggggggggggggggggggtggggacggtagtgtggttgtgcgcatgcgcatgggcaccttattgttttcccccccaccagcacagcttctgggcggcggccacaactaaaaatggttggggaaggggcgataatttcgtctcccctccccacataaatgccgctctccaggagcccccaaacacaagttccttggctacgctttccacgctcgtgcacccaggtccgcgccagtttctcccgccctgccacacccccggcgctcgcccactcgtgccccactgcccagtggcctgcgcagccctgccctgccctacgcaacccgctcaccttgcggtcgctgactccctcgcccactgcgatcacaacacccgcgccctccatgcccggagtgacaggcagaggcgggagacggtcgtacagcccctgcctagccatgaggtctgcgaagttgagcccgcaggcccgcagacgcagcgtcagctggccgggcccaggggccgggggcgctgccggccggctctgcagcttcaccttgtcgtagcctccaaagccggtgagcactaggcagcgcagcagtggcggcgaggcggcggcggcggcggccccttcggaggccgcgggatgctgggggtcgctcgctgcctcggttttcggaggcggcgaagaggcgtcttccccggtcgctgcctcggctacctctctctcgtcggacatggctgggactcccgacgagagcgcacagctggatggagagtgcacagctggggaaggcggaacgcgtcgggaagagccgcggctgcgggatccagcgggaggggcggggcgccgggcgaggcggggcctcgcgctcagccttaaagggccagggccatagtggcgcaagctgggagagcacgaaaaggggcaccaggaacgtctgtgctcttgggatcaagccgactgtgatttatttattcatagtaaacc

SEQ ID NO: 64884 - DNA, 1083 bp, Homo sapiens
tgcaagctccgcctcccgggttcacgccattctcctgcctcagcctcctgagtagctgggattacaggcgcccaccgtgcgggtttcaccgtgttagccaggatgatagtctcgatctcctgacctcttgatccgcccgcctcggcctcccaaagtgctggtattacaggcgtgagccaccgcgcccggcctattgtcagactcttaatcaagcctgacttttgggtttagctctggctccagcagagcaactctggcggttggttctttctcttccttatctccttgtccccaagcatccaccagaggacgcagctcccccaaaactttccacccagtgcttggctggaggaactcagtccacgcttctctgctagtctaggccggcggttaagtcaatgtaaccggagacccggctgcccgttgccatggggacggaaagctatgatgtcaccaccgtccgggtgggtgtgctggggttcaccctcccatttccccaagaccccctgccaggacataggcggacgcgggagagaaaaccaaagaggctccctccttccccttagcatctctctcccgccgtgttcaggaagtggatggctgccccagctcttgtccgcactggtacacctgcgtgcacgcgtgggtacacagcaggcccgagcttcgcgcttgtgccgctcatattctacccctaagaacttcgcttgaactctgacctgcccttatatccgagaaagtcaaataagcccagttcggcctgtcccaaaccggcaggggcccctcagaccacaccggcgggctggaccccggctctgaggcctctgttcccagggctccgcccagatcttctgggccccgccccccggctgcgggggtgggaggaggggccgggggggcgcggccgcctggctgggggcggggcggagggggggccgcggacccggggcgggggctcggcgcgggcccgcgagatgccggtgttggcggcccgagcggctgcagttgcaggggcgggggaggcggcggcggggcccgggagaggggtggcgtgggggaccggcgcgtagccgggaccatgga

SEQ ID NO: 64885 - DNA, 496 bp, Homo sapiens
tagtcattaatgattattgttgttgctgctgagagccagcaagatcagatggtctacaggacccagggctgggtttttattttccttcccttttaatttagttgtcttcttctcccatctgcctgctctgtgtctttcctgtcacctgtctatgggtcggcctgcctctccctccagcctggctttctcttctctcctcagagagctcggctgttgctgactctcacagggtatgggctgtgccttgtgcaacatcagtcaataaagataaattacaaaatcatttgttttatttgttcttgttactttgagggctgtctgaaattgcctttcttttgaaagccatatttgcatatctctatgctggagtcaaaggctgcagctgtggtttcaatacaatttaaatattaataaaacctcctaaacctttagctgttttttaaaaaagcagtcttgcccttctgctcctagattgctaatataatttaatctttgt

SEQ ID NO: 64886 - DNA, 1187 bp, Homo sapiens
agatttcatgtctttaaaaaaaaaaaaaagtaaaaagaaaaaatatatattaattttgctttaatagcagatatcattcgattccctaagatcgtttctttgcatagtgacactctactgtactataaatttatcagcctacactttataagctgagaggtaactagcctacacagaaagttatgctacagatatacatggcttaaaaccaagactcaaccctctgatagttacaaaacactgaaatcaggatgttactaaaggtcagtgcaaaagcgatcaattctctcgtaagaaggcttagaaggggttcatgttcttccccaaagaaatttagagtcctctagctattatctatcaaccaaataaaaatcaataggcagcaaaagaaattaaccagatcaattatgggcacagttgacctagctggtaggtattgtctgataaataactttgtttaccaagggccatcatttactagccatagccacagccactcacaccagtatttacgtgttgcacaatactgccatgaaggtcaggccatctttctttcatgttgcctcactccatactgccacagggcactgaaaaaaggcaggctagagaagctaatgacatcctcccccttttgctaccaccctccgccaggatcattagcaattctgaactgattaattgctgaaatcccagccttgaaactgttcagttagaagagcaatgctgaactgctgaaaagatcatcttaatatgggcttcagaattaatcatgtgtaatacagtcagtagctttcatcataaatttaccacacttcaccaagtctgaatagagctcaaagttttcctcttcgcttgtttaaagacaacatgtacccaagccacttgtagtctaatctgcagctcagaattgcctttgccaagaaagattagaccattttagccatctctaaaaagctgaacttgcaaaacaaagggataaagaacgctaattttcaatgaataaataaggaattctggacgtgcaggcaagtgatcaagagccattgaaacagacacaggtaagagctttcagagcaaattgctggtctggacatgggattatgagatgaaaacatttatagccatcactgtgcacttactcattgtatctaccagggcagccacagcttactttgcccttttagtag

SEQ ID NO: 64887 - DNA, 933 bp, Homo sapiens
ccaccacacctggcctaatttttgtatttttagtagagacggggtttcaccatgttggccaggctggtcttgaactcctgacctcaggtgatctgcccgcctcggcctcccaaagtgctgggattacagacgtgagtcactgtgcctggcttcaaaatatacatgtttaaaaatcacttttagaaggaacagcaatggttgccaaaaagtccagtgggggagtagggcaggaacacattgtttcactctccgtttcttcttctgatccttaaaaatgactttgccctttactaaaaacaagccatcttctttctcctgctacactgagttcacaattttcaggaggtttttatgaccagaaaatgtattcctagcttcacaaaggtttctactgctactctaacactgctttgctgccaaggtctgcagcaatgccattgccaccacgtggtactcgtgagtagttacatcactgatcaaaccctagccaaagtcttgcctcagtcaacctggaatgaaagcacatagatatctgaccaaaatgcttcacaggctgtattagtcactactgtcacaaccatcacatctaacctctacgtggccattacataaatcagaaaaagtagtggggtaattattaatagataactttcctttgggtttcccaaaggaattattttttataacttagacaaattccccagcaggtaagtggccaaatacattagggagaataaaaccaataggtttctaagacttcttgattctaattctgaagtgctccttcaattagctctagccttctacttctactatgctgctctgatctctacttttaatacagctacattactgtagaagttccctaaaagccttgtttatcatgtctttttcttccataaagacccttagtgctccatcctggccatcaca

SEQ ID NO: 64888 - DNA, 1381 bp, Homo sapiens
cagagcagagggtgaaggcctcctgagcgcaggggcccagttatctgagaaaccccacagcctgtcccccgtccaggaagtctcagcgagctcacgccgcgcagtcgcagttttaatttatctgtaattcccgcgcttttccgttgccacggaaaccaaggggctaccgctaagcagcagcctctcagaatacgaaatcaaggtacaatcagaggatgggagggacagaaagagccaagcgtctctcggggctctggattggccacccagtctgcccccggatgacgtaaaaggaaagagacggaagaggaagaattctacctgagtttgccataaagtgcctgccctctagcctctactcttccagttgcggcttattgcatcacagtaattgctgtacgaaggtcagaatcgctacctattgtccaaagcagtcgtaagaagaggtcccaatcccccactctttccgccctaatggaggtctccagtttcggtaaatataagtaataaggattgttgggggggtggagggaaataattatttccagcatgcgttgcggaatgaaaggtcttcgccacagtgttccttagaaactgtagtcttatggagaggaacatccaataccagagcgggcacaattctcacggaaatccagtggatagattggagacctgtgcgcgcttgtacttgtcaacagttatggactggagtgttatgttttcgtattttgaaagcagaaactaggccttaaaaagatacgtacaactctttagggagactacaattcccatccagccccaggagtctggggcaagtagtcttgtaaggtcagtggcctgcggggacgcagtgagcgccgaatttgcctggggcaggggaaatgcgctctggcccatgtctgcgcactcgtagttccacccctcagccccagtgtttgttatttttcgggttcagcttgcttttgccccgtctccgtcgacgcaatcgccaccagtcaatggggtggtcgttttgagggacaagtggtaagagccaatcttcttggcgaaaacgcggagaaacgggactagttactgtctttgtccgccatgttagattcaccccacagagatagcggcagagctggcagcggacggtctttgcattgccgcctccccagggggcgggaagctggtaaggaagcagcctgggttagctaggggtggggtcacgtcacactaagagggtttggagaagttcaagggaggaatcctgcaaagaagaggggcgactttttccgtgtctccggacagctaatcgttttagtgacaggatgagagagcccttcgtgttctgagggaccgagtgggcgaaaagcgccggagagttggagagtctgtg

SEQ ID NO: 64889 - DNA, 2999 bp, Homo sapiens
ccgcccctcgcataagaatacccatctgcctagcttcggaaattcactttcccccgcccgtcccccggagcatcccttgggcccctgtccctttcccggggctcttctaccttaacccagagcagagggtgcaggcctcctgagcccaggggcccagttatctgagaaaccccacggcctgtcccccgtccagaacgtctcagcgagctcacgacgcgcagtcacgtttttttccccccctctacactgcagatgtggctcccaatgttgacgttggccaggacctttgcaaacaagccaggccaaaaagtttcaatatttacactggctgctttaataagggcattgatcttatcctccgtaaaggtcacctcatagtcctgcagaatgagggcagagtagatgcaggcaagctgggagacggaggccatagcgcgggcgagtgtggggctggggctgccggacgcggtgctactcaccggatgaagtgagggtctcaccccaacgcggccttagcttcctcggaaggaccgaacaccttggcggcagccgaggaaaggggttccacagttttaatttatctgtaattcccacgctttactgttgccacggaaaccgctgagcaatagcctctcagaataggaaatcaagacacagtcagaggaagggcgggacagaaagagcctagcatctctcggggctctgggttggccacccagtcctcccctggtgacataaaaagaaagagacggaaaaggaagaattctacctgagttcgccgtaaagcgcccgccctctcgcctctacgcttccagttgcggcttattacgtcacagtaattgctgtaccaaggtcagaatcgccacctgaggcctgaatatcagcgtaagatagtgtccaaagcagtcttaagaagaggtcccattaccccactctttccgccctaatggaggtctccagtttaggtaaataaaaggattgttgggaggtggagggaaagaactactatttccaacatgcattgcggaacgaaaggccttggccacactgttccttggaaactgtagtcttatggagaggaacatccaataccaaagcgggcacaattctcacggaaatccagtggatagattggagacctccgcgggcttatacatgtcaacagtaatggattggagtgttgttatgttctcctatcttgagagcagagactaggccaaaaaaagatacctacaactcctaggaagactacgattcccatccagccccacgagtctcgggcaagtagtcctctaaggtcagtggcctgcggggacgcagtgggcgccgaatttgcctggggaaggggaaatccgctctggcccacatctgcgcactcctagttccgcccctcagcctcaatgtttgttattgttgttcgggttcaggttgcttctgccccgccccatcgacgcaatctccaccaatcaatggcgtggtcgttttgagggacaagtggtgagagccaatcatcttggcgaacactcggagaaacaggggactagttactgtctttatccgccatgttagattcaccccacagggatagcggcagagccggtagcggacggtccttgcattggcctccggcaggcgccccccgggggcgggaagctggtaaggaagcagctgcggttacctaggggtggggtcacgtcacgctaagagggtttggggaagttcaagggaggaatcctgcaaagaagaggggcgactttttccgtgtttcgggacagctaatctttttagtgacaggatgagagagcccttcatgttcagagggaccgagttggcgagaagcgccggagagttggagagtctgtgggtcagaacatccggcttctactgatggaaggccacgactccccagtggaatgagggcctaggcaaagaaaatgagagagccctcggggtagtgacactgtcttgggaacatggagtgctaggaaacgaaaactggaagactaggatgaactctgcaagtaaaaaaatgacactacttacacatccttctcatcccatcctcgttttttcgagaccttaaagagatctccttggttagggaccttcggttttggaaaggcactgtttttcctttttgtcaaacactcagctttcaggccacacttttttgagacagagtcttgctttctcaaagaccaacccaggctgggcttgaactgctgagctcaagcgatcctcgtgccttggcctcccaaagtgctgggattacaggtataagccaccgctcccggcctcaggtcacacattttaaagcctggataacttggcttgtaaaggcctctggtggagacagtaatcaaagctcaggttgccaggtctgtttcattaaagggattttgttgaggctgaaaaaaaaatcgacgtggaggaaaagctaacttgtgccaagcaaaggtgagtcagtggcatggacttacaataatgccagttatgaaagctgaaggcctaagacccagctatctgactctactggctgtagacctaaggggcagatagggttaaccatagctttggtgtttacacacgtttaagattaatgctcctgctgaaagaatttttttacatgtcagccaaagagagttccttatgaagacctggatatggtccagccaagctagaatctcccacttcctgttttctcttagttggcccaccagctggaggagctccagagtatctaaatttccaattgtgtaatttgagaaaaagagaggaagattcatttccttcacaagtagggaagtgtgtttcttgaagttggaaagtgatatttcagaatacccacttttggcggactgagtcacttcatttccttgattttttgcctaaggtcctggggaattgacaaagattctcaaattttaaggaccccaataattacatttcatatgaatgaatactagatgtcagcaggattgttgttaagagactaatat

SEQ ID NO: 64890 - DNA, 1581 bp, Homo sapiens
tctttctctaggtatccatttttggctctaggctctctgcttcacaggtggatggagtgatggggaagatgctgtggccagtgcacctaggttcaaatcctacctccctgtggtcttgggcaagctgcttaacctctctgcctcagcttctgcatctgtatgtaacttttgcaagtttgtaatgaggagagcacttaacacagagcctaagccaaacagtaaatgcttcctattttattgtctcagtcatttcacagtcatgaccccttctggggaagcttgtgggaaactctgactcacattgcagactaccgagccacggtcccttcctcggctccgtttctgctccctccaccccacgaggtaggcattggtgtttctgctttccagctggggaaacatagagtccggaggttaagtggtttgcccccagtgccccgccgacaaggcaaggcgcgcggacggggctgtgactcccagggcggcagccccctcggcgcggtctcgcgacccgacttctctctgtggccccgggaagggggtggggggcggcggggcctcgtcggctccgccttcgcttgggacccagccaggccgcgggacgctccagtctttacagtgatgacctgatggctttcctcaaaagagctcggaccactctcctccaactcccttccacagaccgctagtgacgcccacgcgcatttccccctgaccactgtcttgacccccggatggtccagaccgggagccccagcccagcttcggccggccgctgcgagcagagctggaccgcagcggggactcagatcgccgtagccacgcctacccacgcgggaaagggcgagacatgcaaattagaaatggcgcttcagccacggggcaaaaacagagctgagaattcacttgaaaacgtagccaactataaaccatgcccaaaggcttgctgttttcaacaggcctattgagaaacgaagttgtcaattgcccctatcgttgctcaccgtgggtgtaatatggtgatatgagggtggtaatggcgaaggcaaagatgctggattcgaccaatttttccagatctctgtttgtggtgaggtgtaattatgtgtgtttttcctagcttagtgtgtgcgttctttctttttgtttctgagaatgctgtgttgagggggtttttggagaaaacggtggggttgggaggttgtagtacttcaaacaaaggtgaacggttttttaggtgagtgagcgttgtgttttaaaggttatactttgttatattcacgttcttattgcgttatatcatgcttcagaattggtcgtcaatatccttgtctaggtgagagtatgtgtgaccagccccctccccgcctttttttttttttttttttgtcttatagagtgtcacttttgtcatccaggctggagtgcagtggcgggatgagagttcactatgatctcgacttcctggactcagatggttctcccacttcagcttccggatctaatatttcaataatttcaagaacactgcattcattcctctccacatgagcaattgccaaaagtaggctttacattttt

SEQ ID NO: 64891 - DNA, 1728 bp, Homo sapiens
agcaaaattaggaacgcctttgttctccagatatccagctatctggacactcgggtctcttcagtaaacattaatttgttcccttaaccgtaagtatctgaaagctaggaatatccttctgagaatgcaggcccgtaagtcccggcctcatttttctagccctcactcaaaatggggtcgcttcaggttccaacgtctctgacagtcatactacatatgactcagccacgtcaatggaaaaagtagactggatagtgacgtacccgcagaaaacgaatgcaacaatctgtcatacagatctgacggcagtcagattctgcagtgaagtagaggcggtaaacttgaatgcaacgatcttcataccgcatcccacaaagccacgtaaatccaaaagcagtccgactctcgatagtgaaacacatgcggtaaacttgaatggaaagatgtttatactgcctcggatagagacacgtaaatgaaaaagcagtcccacttgggatagtgaagtatgggcgctcaacttaaataggaccgtccgcatatcgtatgtgagtgaagcaagtaatagcaaagggcagtcagattacggagaccgatggcgactgaagtgagtgcagtaacctttaactcaatgatcgtcacgccgcaaccaagtgaaaccgaaagcaactaagcgctcgaaagcacgcccggccagctcaaaaactacggcgctgatggaccccagtgatccgacgtaaaggtgcaaacgtaaagcgcacacggccaatttaaaagcagcggcgctgataggcccggacgaaccgacgtgaacgcgtagaagtaaggtacgcgcgatgagcttaaatacgcgagtactaagagaccgtgaaacccggatttaagcgtgtaaacgcaacacacaacctaggaggtcagtaacaacggtcccaactgatgcaaatggcccaatgcaaacacgttgacaatctcccgttagcgacagtaacagacgctaagcgcccaatgcgaacaaaactcccgcttcgaaaactacacctcggaatccttccagcgatcaagggccagcaacaccacaagccttccactgtatcaacaccgttttcaaaacgaaaatgttaacgatcggccactgtactccttctcccacacatcctaacctcagggtgacagatagcaccctgaataactctctctcctacgttgagattgtgtatctttatccaaatctgaacacctgcgtaagtaatattgttactattttggaggatattcactttccttttttgctcccataactcccgagagaagcagccattttaaatttgcatgccccgccgtgccctgcctgccaaccactgaacagaaaagcgcctgtaaatcactggaatcttgggaaagctccttcggcttcattgcccttcaggaggaaaaacccacaacggaaaagacacgaagagctctaggaggctcttctttcctcctcctccccctccccttcccctcccctctccctccgcctcccttcccctccgcatcccctccccctcccttccccctccccctccccatctcgtcctgacctagctggcatccaacattactttaaactttttttcacacatacgttgaaagaattgtttggtgaacacccgtatgcccatcacctaaagtcatcttgctgtacttgctttattacatgtgttacagacgtctaattacattttt

SEQ ID NO: 64892 - DNA, 2791 bp, Homo sapiens
caataatatgaaaaatgagagcaaaagtaactgcaacattggggaagactaaacaacgtcgcttctggcgttggcttatggatgaccaccctgctttcttcacgttttaactgtctggagtccagaaattagcaatgcacctccttggcatatcaggatgccaacaagcacccttgtccccagtttcaggactcggcggcgtactttcccaatacgcattcccttattctcaatccggttagaagcaaagaagtaataccacccaccaatactttccttatacaacacaaaaacacacacacacatacacaacaccacataatgaaaccaacgcgaatgtaagtaaatctgttctttgtaaaacgtgttttgaccctctttggaaacacggcaataccaagtcgatgcgcagagtggaaaaaaccagctcctatttcatctttctattccaaaaccccacttaaatatatcgtcctcagaccaaaaaaaatcagttattcaactgaaaaaaacatgctacattggatcttagtcaaaaagccaaaaaagaaacaagccctttctttcggccacagcactccttctcccactcatcctgaggtcacggtaagaaaaatgatcctcaagtaaagaagcactctcttccctaagttcacacagtgttccttgttacaatttgtaacattgcataagtaatactgttacaaatttgggggggatattcgctttctctttttgttcccatagctcctgagcgaaacagccattttatatttgcatgccccgccccacaggctccgagctccgtcctccccgcaggctggccctattaccaccatctaacatcatcttgctggacttgctttatgtatttatttaagacggattctcgcactgttgcccgggctggagtgcagtgccgccatctcggctcttgcagcctccgcttcccgggttcacgcaattctcctgcctcagcctcccgagtagctgggattacaggcgtacaccagcacattaggctaaatttttgtatttttagtagagactgggtttcactatgttggccagactggtctggaactcctgacctcgtgatccgcccgccttggcctcccaaagtgctgggattacaggcgtgagccaccgtgcccggtctggacttactttattatatgttatagacatgtaattacatattttgtatagttgaccacacagaaacaggcacttaggtctccgtccctctagccatttctcaaccgtctcgaccggcgagttttcgttgaggcgagggagcgctcgctcccacaggttcgagggctgggcggagccttgggaaacgggccctggtaatctccgctcagtgagtggcgctgcgaagctgcttctgcccgggaaggaggagaggggcctggaaccgccgagggaaccaccagttccgacgccctggggtgggcccggaggaccgagtggctggggcggcacggggcggggggctgggcgggaggagcgggggtccaggaggtgacccaggagggggtaggatcgggctgggcctcgtgggctccctgcccccggagggggcgcgcagagggagggcggtagcccagtgagcgcgaccactacttccctgtgaacgcgagagctcagacaagccacagggggccagagccgagaaaccggaagaccggcgaggagaccatagcacactcccaggaaagagagcgcgagggcttgggccaggatgggggcagtgcgggggctgaggagtggccagattctgggtgtactttgaaagcagagctgatggcctttgcggacagttgggatgaggggtgagagaaaggagtggagggtgactccaagggtttggccagagcgactgccacattcagcctgggcgacaaaagcgaaactacgtctccaaaaaaaaaaaaaagtctgccaggcgcagtggctcacgcctgtaatttcagcactttgggaagccgaggcgagcggatcatttgaggtcaggagttcaagaccagcctgaccaatgtggtgaaaccctatctctactaaaaatacaaaaattactctggtgtggtggcaggggcctgtaatcccagctacttgggaggctgaggcaggagaatctcttgaacccgggaggcagaggttgcagtgagctaagatagcaccactctgcactccagcctggggaacagagtgagactctgtctcaaaaaaaaaaggtcgacaacacataaggctgaaggagacttaaagagacctgacaaccaaaagtgacaagtgatcctgggccagaaaaacctaaaggactttattgggacaattggtgaaatctgaactcggactgtagatccagtatggaattaatgtgaaacttccagaaggcctttgttcttaggaaacacaccgaagtattggtggactggggggtgaagggacatcctgtgtgcaaattacttaccaatggttcaggaaaaaaatgtatataggtgtcttcttatgagtgtgtgtgttgtgtaagagagagtgagacagagaaagagtgagagagaaaattataaagtaaatgtggccatcaaggggagagagagggagtgaaggagggagggagagacaacagagagagagagagagagaaaagaaagagcacgaacttgggagttaagaagtgtgtcactgaaccccagacttctcgctttaccaactgtgtaccttgcggggatggggaagagggtagagaagttctccatgtaagtcttttaacttttctgca

SEQ ID NO: 64893 - DNA, 675 bp, Homo sapiens
aaaagagacagggggtgaaaacaagataggtctgtggaagagacctgtaggcggagagcggtccctgttttcctggagaaagacgagtcgcaagatatcatcaccaggggaaaccaggctgagctggatctttacgtcgtcaccagtgggcggggagaccagccttgtacccactggacagcgggcccattccgagtcagggaagcagaaggcctggaggagcttcggggagcaggggctggagttcctctgccaggcaggaggctgacaccagacaccgggcagagggaggcggcgcatggacggcgagggcccagcaaggattctccccagcccctgtgcctgcgtctcctgcggcttctgtgcgcggaccgtgtcctgtgctgtgtagggaaagctgcttctctgcttgggacgtggattcctttaccctcctcctcgcctgactacttctgacgcgggtcgtcaggactccgcttgggtgtcacccgtccaggaagcctcccttaattaagggccctcggcacccaccccatatgtgattagcagccctcctgtgtatttcatcgcacctcgttgtttatatcaactactccactcaccacccttctgggcagtcctttatctccccctctgaaatccgatcgctgagggctgggaccctcatcagtactt

SEQ ID NO: 64894 - DNA, 1704 bp, Homo sapiens
ggagtgtccatgtggggtggtatctcggcctggtggagggggatgcgatggtagtgagaatattagggtattcatatctttcctcccgagtcaaacgttgccaggcacgttcctttcgcccctcccaccctccattctgcattaattccaagtttaattccaaatattagagtgtggtagaaaaggtcaaatagagcagccacggattaagcaaacgcccctccgcgtatggtgggggctgcagcgcccgtagctccacgctccgccccgccgccgctgattgtcccgcgccttgtgacgtcacacgcgggtttttaaggccgaaccctaggcaggctctgcagaggcagcggttggaggcgcggtgggtgtctgcgggggtctcgcggggcggctgcggtgtttcaccgggaaaggctcgaggagagcgcggctcacgagaggtaaacggaccctgcagaccgtgctgaggcggtcccggtgccgggccgctggagctggggtcggccatcggaggagggcgggcgggcaggagagtgtcgcggggcggtggggcgagggtcgcggagtaaggaagggcaccgtgtcaacggcttggggctgcggagggcgggtgggagccggactcaatctccggtctcagcgtctgcaccctagctcttagtttgggggcactgtcgacttcccccgtccctcggggatcttgcctgggggatggcgccataagctctgagaagaggctctagaagcccactgtccatggatcgagccctcaccccccacttgagtggcccaggacctgggagtctctctaggtcccatcgcccccctcacgacccccccagggagtgggggaacacctctgttatgccttaaaaaaaaaaaaaaaaaggaaaggaattttaaaaatgaaggatgggagggtgatttaggaagggatcaagaagttgcaaatcttgtgtgtattattaaacgtctcctttttctcccatgaccttttcttggttcagataacccagctgtgctccctggaaccttcaatttcaaggcctccctgcctctactaggcgccttagctcactatggggaaccacttgactgagatggcgcccactgcctcctccttcttgccccacttccaagccctgcatgtcgtggtcattgggctggactctgctggaaagacctccctcctttaccgcctcaagttcaaggagtttgtccagagtgtccccaccaaaggcttcaacaccgagaagatccgggtgcccctcgggggatcgcgtggcatcaccttccaagtgtgggacgtcggggggcaggagaagctgcgaccactgtggcgctcttatacccgccggacagacggtctagtgtttgtggtggacgctgcggaggctgagcggctggaggaagccaaggtggagttgcaccgaatcagccgggcctcggacaaccagggcgtgccagtgctggtgctggccaacaagcaggaccagcccggggcactgagcgctgctgaggtggagaagaggctggcagtccgagagctagcagccgccactctcactcatgtgcaaggctgcagcgctgtggacggtctgggcctgcagcagggccttgagcgcctctatgagatgatcctcaagaggaagaaggcagctcggggtggcaagaagagacggtgacccaagccccccctcc

SEQ ID NO: 64895 - DNA, 2236 bp, Homo sapiens
gtctccccaggctgcttttctaggaataccagtcacatagtttttatttttgtgtctgtgaaagtgccaagaacccctccccacatttgtagatccatgaccctttttataagctgtgtgtgtcctctgtattattgttattaactattttttagcatttgcctgtaagttattaaagactgataactgtagctcttaccttggtctggggcattttcctctccttatcttgccccagagacaattcaagatttctatatggggttgtggcgcagggggagggagatttatcttgaagctgaatttgcaaagcaagcacttataaaaattagattgtgtgttacgggatggcttgtgaaaattataggggggagtggaaaacccctcaagctattgcctgatctctgtagttttttgggtggggtcacttcctttttctctgatttaacacccctcccctcatcctctgggtcttacttgtcccttatatcaactgctccttgcagatttaacttcaaattttgctagtctgagctactcctaggttcttgaccttggtgacacctaagtctatataggtaagtcctcaaagagccattctgttcccatcctccccacttccccagtcttaggttggtttgatttttttcctccttgtaagatgtggtgagagtggaaagtaattcctccctggccttaagtcacctctgtgtactcaatcctgctgactggctcactggcatgatggcagcggctggtgctagggaggcctgggctggattgagccagcctggccctggtgactaagccatgagttttccagctctgggaatggtagctcttctcacgagaggggcagaagtagtagctgtttgtgcttggtggcagagaggactgctggacatacaccctccagactccaagatagaagggggaagacataagcccccagtatttgtggtgattgtaagaataaaatgctaatattacaagggcttgagtgcccctactcaccagcaccagggccagctatgtctgataacagaacccttagatcctcttaatcttctgggtgggagcagtgagtaagaactaagcacaaggccgggcacagtggctcacgcctgtaatcccagcactttgggaggctgaggcaggaggatggcttgggcccaggagttcaagaccagcctgggcaacatagggagaccatgtctctaaaaaagaaaaaaaacaagcacaattctttccagttgtcgagccctccagccaccccctgccaccttttgtgcaaacacacaatccccagagcaggttcagcgttcacaccctgcttctccccaattctgtctcctcttctccggaatcagatgaaaggacctggggagaaagagaaggtgccggcaacccccacttctggggaaggtttcctaaagaacttgcttcttcctacccagcgctgccagaagctcagatttggtcccctccccatccctgtagctggcaggattggggtgagtgtgcattgatccggaagggtgcccaagtgtgcgtcagtgctagggcctgcttgacagaactgctgggctggttctgctgggaacatgtgctacctgcccctcccccagacacacctgcgactcctctcccagtctttttggggcacagtcctatagcccaaggacaggttgaggccccagtccaggctggaaaggaactggccagaactgaccctctgtcctgccaggagatctttcctccccaccccacccaaattctgctcttttgtcttaaaatcttcaattatacattttcatttcttgtcacttggtgtacttaggtctccagatttgggggaagaggtgcagaggtgttccccaatccctagcagaggggcctccaagatgtcagctcctgattctggctcttccaaccacactccttccctacctgcttaaaacaggtatcttctgcttccccatgcccagccctgggggcggtcagggatcatggtccacaggaggcctttgaatgtcccaggctcttccccagtccctctggcctgactgtccagctggtggcactaaaggaagatgggggcttgtgtcagagagagacggagaagccaactgctctgccagagtagtggggagaggggaacactggggaattctgagtagaaagccacaaattgtggccgggtcagagtcaggagctttggaataatcctcctgcc

SEQ ID NO: 64896 - DNA, 717 bp, Homo sapiens
catacttcttttcttggaaagctttcagaataggagaggactttgcatatcttaaatcattttaagatggtatcttatcatactatgattctcagtgatccaaacttggttacttagcaggtgactttcctggccttgttcaaggtgttttcaccacacaaacaactcttaattgtctacttggtgatgagcccagatacctggaatccatagaaaattcctaacatgattttacccaatagtttctaatctttcatcagactgctgaggcagcagcaacagtgttgacagactgaggtttcatcatcctgccctcccctgctgcctgtctctgcccaccctctacccccgggaaagtgctggagcagagggagggttcagggaggcaatattgagaaggaacatgccagctgggggtctggataatccacaaactggattatctgtccctgactttgcatagatgtaagcaggtggcctatatgtagacaggatgtactgggatgagccatgggcatctggttaacgtgtgtgtgtatatgggggggtggtcctacaataaattcccccacctacttatctcccatccagagcattaattcaaccaatcactccttctttcaattaaccacatataatatgaatagtatttagcattatttactgtagtttcatagtgagagactagaattttttttttttttttcaagacggagt

SEQ ID NO: 64897 - DNA, 806 bp, Homo sapiens
agcgattctcctgcctcagcctctgcgcctggctaatttttgtattttttgtagagactgcgtttcgccatgttggccaggctgttcttgaactcctgacctcaagtgatctgcctgccttggcctcctaaagtgctgggattacaggcatgagccaccatgcccagctgataagtagaagttcactttcatctggggttaatggagggtcaaaacgttttttggatatctcacttatctgacattttcttctttcttttctttttttttttagagggagtctcactctgtcacccaggctggagtgcagtggagcaatctcggctcactgcaagctccacctcccgggttcacgccattctcctgcctcagcctcccgagtagctgagactacaggcacccgccaccacgccggctaattttttgtatttttagtagagatggggtttccctgtgttagccagcatggtctggatctgacctcgttatctgcccgcctcggcctcccaaagtgctgggattacaggcatgagtcactgtgcctggcctctttattttctttattgcaattggattgaatgaaacccgtcatgaatgttgtgtatgttttttctcttcctgaaattttgaagtgacaatgttgacatttgcttttggtgcaacttcacaagatatggaaattctcagatagtcttttttgaaagactcatggactaaataactaaggattacaacactcaaagtttattttgcttaaggttataaaggctagttcaccaaacaattctactaagactagaattatg

SEQ ID NO: 64898 - DNA, 1269 bp, Homo sapiens
ctaaacttgcttgagatggtttttgtaatctacaaccagaagtcttaattactaagacaaggtgaaaagactcacctgtaggaaacacagtagataatacaaaagggctttcaagttagtgtgagactgcttggcatagaaagacgataaatgccacagacaaaacctaatcgtaactgaaataaataaattcgaacaacaaattgttaagtgaatggaatgcagctagctaggatctcatgctctgttctaagaaaacagacaggtcaaacaatcaggaccagtccagacatgtgtctgggaagttaaaggaaagagaccctgtccctcaaaaccttccttactagtgactcatgtcttcgtttaccaggaggtcttctttgaaaatatgaatgtttctgggaagggtaatccagaaacctactgaggctcaccctactaggaatgtatttaccatttttcttttctttcatgtctgttcattgagaacacagagaatgtatttattcagtgactttctctctcctccacttcccaaccccagctacaaatggggacagcaagagagagaaaacctggggagaacggaagaaaccatgctttgtagaatggatcctgcttcagaattgctgatctcatcaaccacatgtttatagagagagcagtggcccttaaggaactggagagaatgctctgatttacttctgtccggcatggtgaacagcaggattggctgtagctgttctctttgccaaggacagatctgatctgattgccttgaggtgaaagtgaggtaaggtggggcggggattagcttttggctcccaagaatggttgttcatcaaccttttgctaagcccgtggttctcaaattttgctgcatgttagaatcacctgggaagctttaaaaaaacatctcagtacccaggttgtacctcagaccaattaaatctgaatgcctgggggcggttgccaggcatcagaagttttcaaagacctcccccaaccaggtggttcctggacatgtacccacgtccgggaaccactgtcctcagcatttattgtatgaggcaacttaggtgacacacaacaggtgagaacctggctcctgcctttcggacacaggacttaattttttttttattttttaaattatgcagtaaaattttttctgttggtgtacaggtctatgaatttttttatactgagtttttcatactgcctgagtacaatttaatggtataccataaagtataccataattttatg

SEQ ID NO: 64899 - DNA, 926 bp, Homo sapiens
cccaaaccatatattcctccccaaagagagaagttttcctctttcttgttccatcccctcctctcttcatcctgcgctgtcctctcatcaagtctttttctttcttttccctgtctctccttctcacctgccagaggcttctatgggcccctcttgtgtccttggccttatgaagtcaccgacacttgggttatgggctgctgctctgaggctgcagggtcaccttcggcccctcgatggggactttacactctactccaaacagaagcaggatgctgtcttggggattctttccccctgcagtctggtgccctggtgccagtgctcagggaatgaatttagtgctgggtcacttccagtacaaattattgagcaattttctgtgtggacatcaggcctatgttgagacaacagctctgccagttcgagcttgttccgttaataatttactggcggagaaatgggagttaaatgagccaggaggcatattttgcatgaactttgagggtacctctgacagcagttcatgtaatttgtccgggaagatactaaagctgtctgaaatctaatgtcctgcctgccacactgaccctttggatccattttattaacacagttggctttgatttatgtttattttattgctttggtttctcttctgaactcataaccagagtggtggtgcatgtggaaaatggctctgtgaagaattaggttcccaggtgtgcttgtggaaggaaacctagcagcagctgtgggtttttctcggctttgcaggactgggatgtcttgtggcaaaactgcccctttctgagtgactggccactgtgtgtgtgcaaggccagcaccattgatgtgtgacctgtgcagttaagcagggccccatgtttagaaggaccccctgcttgatttaatgctctgctgtc

SEQ ID NO: 64900 - DNA, 2370 bp, Homo sapiens
gcaacaaagcgaggctcatctctatacaaaattaaaaaaaaaaaaaattagccggatatgctggcatatgcctgtagtcccagctactttggaggctgaggtgggaggatcgcttgaactcaggagtttgaggctgcagtgaactatgattgtgcaactgcactccagcttgggcaacagagaccctgtctctagaaaaaaagaaaaaaatgaatgaatgaataaatgatccctctcctgaatgaaagcccgtgagggcagctactttgttatgtcctctgcgctttcttcaatgtttcttaggcatttgttcaatacctggacaaatgctgtagtgaatgtcttcatgaacgcttcatttggcccacgagagaatatgtttgtagaataaattcatttgtttgaatgcctgatggattctgcctaattgcccctccacaggcctccaacacttcttagccaagttgtccaattgtattcctgctgtcacctaaagtcatttaacctttggggaacttcctccctgaggctgccctaaatggggttaggaaaggagctgaaagtgccaaccccattataccacccctttatgccccttccgtcaatccacacgaggaaatgaggaattttagatgcaaatggcaggacataacatctggctcatcagagccccagactgtcttgtccccagaggtgctgaggagcccagtgggctctgccagctcctaatgatatatggttcacatgggttgagccatcccagaggctcactcggttcattgtccacctgcttccagtcttacaatctgtcaccagcacaggacgatttaatcatcctaatgaggctgtcactgacagcatgctccaccacctcacaagggaaagtcggttctgcctcttcccccagccaatctaagcacatgtggtctctgtttgccaaccacagagatgtgggtggaggagcagctgaggttacatggagcagaggggacacagggttcagccttttgaactaggaattgagaagcttggatccgatccctatttcaccacttcctgtattagcttgatgaccttggacaagttacttaccctctctgagtatcagtttcctctgtatattgtccagtgtacagcatggatacactggacaaaggggtgacttaagtcccaggcaggacacagcgggaaggtgtgagatttcatcatgctattcagaacaggatgtaatttaaaaattatgagttgtttatttctggaatattccatttattttactacatttatttctgtagtaaaatggggctaatagccctgaactattttctcatgggttcatcatgaagttaaatcaataacttaaggaggaaaaggatgtataaattatgaagcattctataaatatagaatactttagggttgagagtgtggatggcagacggtcttaatcagcttccaagctattgctattattatttgtactagtgtggcttcaaaatttctatccagtagggcataaagggtgaaaacatgtagggtaggaggggggcttgccctttaccaaagactggggaacagtcagtatcaatcaatagcacccatcaaagtcagggagcaggggtggctgattacaggacgggggaaagcctctctaaaccatcttttggggaccccattgtctcttcccaggactaggcattggggtcctgctctactggggtcctctttctctatgtagaagcctctctcgaagctgttcatggaaacagaagataataaccccattagcttctgaaaacctgctattctaagaaggcagctgtccaacctaatttaagatggggcttctcctacattctcttgcactttaagaagccagtttctcagcacccttggggaagggagagccttcccagaagtggctgggaagcagaggaagtgctgagccctagggcgagggagggtgggtcattcttacatcagtgaatgttgaagagaaggccctgacccaccccgttctgcctgccagctctggggtgtggctctgaactcccttttccctctaaagtaaatggaaaggtggcaattcacagttgtgtgtgtgtgtgtgtgtgtgtgtgtgtgtgtgtgtgtgcgagagagagagagagagagagagagagagagagagacagacagacagacagagagagagagagacagagagagagagagagagagagagatgcaaaaggcatcagtgacctggcctagaggggcccctttctgggagtaccactgagttttatcactgtgtgaaatgccagcaagctgcaaatgaagaataactttcaacatgtcctttcagtgtaaattacccccaaaagcatt

SEQ ID NO: 64901 - DNA, 1060 bp, Homo sapiens
aaacaacttcttcttcttctccttctccttcttcttctttttttgatggagtcttgctgcaatgccccggctggagtgcagtggcaccatctcggctcactgcaatctctgcttcccgggttcaagtgattctcttgcctcagcctcctgagtagctgggactgcaagcatgtgccaccatgcccagctaatttttgtatttttagtggagacagaggtttcaccatattggccactccaactcctgagctcaagtgatccgcccacctcggcctcctaaagtgcagggattacaggtgtgaggcaccatgcccagcccaataaacatcttttgcctgcagagcttgccacgtgttccaggtttttctgagttagtaggagtcaggcatctcctgagtgacttggccagacaagtggatgttaatgagtgactgatgagaaaacatgggaacaattgcccctgctggatgtcccagtgtgcaggagaagctgtgctgatatctgtgctcaggactctttggaatgccattatgattttatgcaccaaggtgtattattgtattgtaagggtttcggttacccttaagggcttgcaattaattttcatttgtcctagtcttttacaagagggttacaaatggctcctttcctagtgttctacaaaagtctttccttttaaaatagtgccctatgacacagacacgtggtcctagagcttgtgtaattttttttttttttttttagacggagtctcgctctgtgcagtggccagatctcggctcactgcaagctccgcctcccgggttcatgccattctcctgcctcagcctccccagtaactgggactacaggtgcctgccaccatacctggctaattttttgtatttttagtagagatggggtttcaccgtgttagccaggatggtcttgatctcctgacctcgtgatccgcccgcctcagcctcccaaagtgctgggattacaggtgtgagccaccgcgcccggccgagcctgtgtaattttaggctggagtcctgctagcactggaaagctttgccct

SEQ ID NO: 64902 - DNA, 633 bp, Homo sapiens
acaaaaaattagccaggcatggtggcgggcgcctgtaatactaggtactcgggaggctgaggcaggagaatcacttgaacctgggaggcggaggttgcagtgagccagttgcagcgagctgagatcacaccattgcactccagcctgggcagcaagagggaaactccatctaaaaaaaaaaaaaagcccaaatgaagcccaggtgaggtttggaattgtgaatctatactgggtcaaaccagcgtgaccttgggactttctccagcaatatcctgcagtgtgggaggggagaaacagggcaataggagccagctggggctgggaaaacacgggcagtagaaaaccagtgaagggaagaaatccttggcatttatgagcaaatttcaaaatggctgagcatgagatctaggccaggaggaaatatgagtgaaatgaaaagagtgctgataattggagagaaaagtgtagatgaatgacttagagacaacatgaaatgttcagtggtagagaaaaagcagaatatttccagttctaggtgcttcaggagccacagcttaaggtgcagacatggccaagtccaagaaccacagcacaaacaaccagtcccgaaaaaggcacagaaatggtatcaag

SEQ ID NO: 64903 - DNA, 727 bp, Homo sapiens
agaaaaaagaaaaaaagaaaaaagatgaaaaactgataaataaatatgaaaaaattccttgccatttccacagaaggtggagaggccgagatgggggaataccattttcttgacaagttcatatcataatggtgtctgggtgcctggctttgtgtttgtttttgcctgacattttgaagagtcttaaaatgcaagagaaatgggaaacttgactataccaaaaaaaaaatctgcttaggaagaacatttttttttttttttttttgcctaatactataaagccttggagaatttagaatctaaagcatctgttattgctgatggcaggttgatggcctaaaaagagagggaactgtaggtcaggaatgttttgcgcaaaaatgaggctgcgcttgggtattagaaaataaggcaaacaaataacagattgcaacaggataaactgccctgtgaagtagacttgccctccaaccccaatctgcctgccctcagatgacggtaaacagaccagcttttttttttttttttctgtcttccaatcacctgccctcatgtttaggcagcagagatctaagttataaacacagctctgccaggagaccccttggctgagaatggcattcagagtattctagttcttccttgatgtttttccactttcagacctcctatcctttttagaacctgccacagtgcctggtcacaaggttgaagtttaatacaaatt

SEQ ID NO: 64904 - DNA, 2224 bp, Homo sapiens
acgcccagctaatttttgtatttttagtacagacgaggtttcaccatgttggccagagtggtcttgaactcctgacctcaagtgatccgcccgtctcggcctcccaaagtgctgggattacaggggtgagccacagtgcccagcccctgggggaataagttctgagaggacacaggaaaactggggattgaaaagcaggttttcacaagagtggaggcagctggctctgtgggttcccagactaaggggatctgtgcttgacagaccagaggccagttctgtgaccatcatctcagccttgaatttttttttttttttttttgagacaaagtctcactctgtcgcccatgctggagtgtagtggtgtgaactcaggtcactccaacctctgcctcctgggttcaagcgattcttgtgcctcagcctcccgagtagctgggactacaggcgcccaccaccaccacgcccggctaagttttctatttttagtagagatggagtttcgccacgttggccaggctggtctggaactcctgacctcaagtgatccaccagcctcggcctcccaaagtgctggcattacaggcgtgagccactgcacccggcctagccttgtgatattaacagtaactgtcatttgcggtgtgcctactctgtgtcacactccttgcagttattccatttagggtagagcaacattattctagtttacagatgagaaaactaaggccccagagattgatttgcccaagcagccagctggcagtggaagtgccagtttcttcgtgtgtaaaacaagagaaggcaatctactgcctactggcttgtcaagggtcacttgagatcggacgacaggaaccacaaagaagtgaggccgggaatttgcggatccacagtaaagcaagtttgtctttttccagacgtgcattaagattcctttttcaagtgttctaaagcgcaggcgcaggctgttttgcggttgcctcccggcgcctcttgtgcaggccggggtcgccctctgccgacccagggcgggagcgcgctgagtgaacgtttccaggcctgagggcgggcggagatttttctcgcctgtagagggcgcagatcggcgtgcagagtaacccactctagttgtcccttccttaagcacttcctgtttgatctctatgatccatcctgttgggacttgattcgttcctcaaattttcaatttaccgtaaacaaaggggacgcgcgctgacccggaagtgaaagctggaacccggccggagtagctctgagcgccggctgtgaggaaggaggttctgggcaagctatagccatggctgtggctgtagccatggcgggagccttaatcgggtcggagccaggccccgcggaagaacttgccaaactcgagtacctgtctttggtgtcaaaggtttgcactgagctggacaatcacttggggatcaacgacaaggaccttggtgagctcggggaggtccctgggacctcagtttgggattgagggaagcggaaggaggaaggaggaaggagaaaggtggttgatggaccgaaagtatgttcgtgtgaatctgtctctctctgtcgcagacaccggtgcccagggtacacgctgccgtggcctcggcttgagagccctcgagaaactttagaaactttcccagagctgtcagtgaagcccggggcggtcatctctgcttgattgttttttgtttgttttttcagcctcaattaaacatgtttaacaacaacagcagcagatgctgcgatgacgacgatgatggctgacgtttattgggtgctcactatgtgctagatgcgatgctcagctctttattgacattattttatttggtcttcacgccactctgtgacatagtagttagcgtctgtgcttttaactgtgttctttgaccgttcatcctgtactcttttttgaggcagggcctcgctctgtttcccgggctggagtgcagtggcacgatctcggctcactgcagcctccacctcctgggctcaagcagtcctcccacctcagcctcccgagtagctgggactacaggcgggcgccaccaagctcgactcatttttaaattttttgtagagacgggggtctcactgtattgcccaggctggtctcgaacttctgggctcaagcagtcctcttccctcggcctcccaaagtgttgggattacaggcgtgagccattgcgtcctg

SEQ ID NO: 64905 - DNA, 859 bp, Homo sapiens
caggaaggggggaatttgcctggaggcagaggtattcaagcgggatggaagagggaggaacacttgctattagaattacaatcaaggctatttggggagggagccctgggctctctgtgccaaaggactgccgaaaagaattatttaaacttttgttgttcttttggcttggacagtaaattgtttggtgctgggggttgggaagaagagaaacccaggggataagaatcaatgcttgggcaactctggaggatgagtgacaaattaatttctccccccaccccccaccaacaacaccccaacatgcaccttggcctggcggcttctgcaaaacaaactttacaaatgaaaatttcaaccaggaaaatgggcctggggccaagttccattcaaataagcaaataccccacacaatggtctgattcatcctcaagcctagttacacaagcctggctcagggtagagaaaataaatatcaatataagtgtccacgctgggtgctggggtgagtagagtggcaagggacctggggagagggccttggagaactccttgaggcagggaagggagaggagaagtgtagggcttagggtggaataccaggggctacggagtgtccccctgtccagcctcccaaaatagaaaaggtcacaaaactactcaccttcagcgagccacgtctcctggaagtgacttagatcctggaagagatctgaggggtaaatagtggaattggaggtgaggtggaggggacggtaagagagaaggggccctagcaagacccggtgactcccctgccttgggagtagggaccgagaagaatgaccaaaatcccttggagggcgagttttttggggaa

SEQ ID NO: 64906 - DNA, 1008 bp, Homo sapiens
ggtccatgagcttccccagcgggccgatcagcgcttcgcgcaagctcccatttccgggcgatttctgcgagaagcggggagaatgcccgcgagtcaccctgaggcgcttagtctgggggacgaggttggggtcctcgggtgactcaggggcggggcagcccaggactccgctgggactgcggggaggggggctgtggtgagagtaggggctgggtgcggggcggggcgggcgtggaggccggcgcggcgctcacgctgctgaaggtgtagggcacttgctggtccaagtatccggctttcatcctccgctccatccggccgctccctccggccgcacggccggggccccaagcgggggccgagacctggtgggggagggggctgcgttcgcacaccgtccagggagggctgcgatgggggcggggagggggcagtcccaaggctctgggtccgacggcgaaacttctccgactcactggggcgatggcgaggtttccgcctgccaggccgagcgccaccaccactcccctcccgccaaaggccaaaggaggtcccacctgctcccaggagccgggctcgccgtttctgctttctgcagccctgctttacccgggctcggttacataagaacgtgtgtgtgtgtgtgtgtgtgtgtgtgtgtgtgtgtgtgtgtgtgtacgcgcgcgcgcgcggaggagcaggcgaagcgcacaccatcgcatgcccacaactcccgcgccccctccaaccctgaatcccagcacctcccacccccgccctggaatctgcggaggcgggtggtgagagtgagtgtggtgtgcattggaggcgaggcggggaatcacagacactctccctccctttccctcccgcagcctcacctgaggccggggcgtctgggctggagccgcggggggtcccgagcatgccctggagcccgcaccgagggccgcggggctaggccggagtaaggcggccccggccccgggtccccagcgcaccgacttg

SEQ ID NO: 64907 - DNA, 2106 bp, Homo sapiens
tttggaatcacagtttgtggtaccgaagtggtggctgtggaggggaagggttttctagaatttaatgtggtcttctgtttagaatttctgaatggtaatagtcagtggggctaaagtttctagctgcgccaaagtcattggctgacccattaggatattgattatgcgactggtatttggtttgaatttcatacatgctgattgatggcaggtagccatttgtgagtggaggaagatctgttgtaggtgagtattgaaagctttgctgcaaggtagcttcgtatggtgtctggccaccatcttcagcaatgtcaattttgttatcaaaggcatcctcctgacggatgctggcggagtcagtgagttgaggtggttgttgaactgtgtttcccgtgatcccttgcatgaaagagaaagagaaatccattgttctgctccagcattcttaactttccctttctctcatcgggccttcagtttgtcccgttctaaccgcccggccgtctcaatgcgatcacaggagggacacggagatcgaggagggccacagccggaccaggccaggcgtgctgcggcaggaggaaggctccggaggtggggtgggaaggggaggccgagagacgggtgtcgccgcgcccccgctgccgccagagaggagcctacggctggcagcctggcctgggcagcagggtcctcggcgctcggctgggaaatcgcacgtctctccgcggtgacctgtgcacagcccctgggcctccgcctccgtgctggcagcctccgcctcagcgcacaaagccccgtcaccccgactctcggggcgccgccgccgccaaatcctcagcccctccctcattggccgcggcgtctgccgggaagtgcagtcccgggtttggggcgatggagcccaggaggaagcggcgagtcagcgcggcggaaagggcggaggggacggagggggcggaggggacgaaccacgaacgcccgcggccgcgagggtctggacgacaaaggagagactaggcgagagggcttgttgcttttttttttttttttttttttttttttttttttgagacggagtctcgctctgtcacccaggctggagtgcaatggcgcgatctcggctcgctgcaacctccgcctcccgggttcaagcgattctcctgcttcagcctccgaggagctgggattacgggggcgcgcctccacgcccagctaattctttgtacttttagtagagatggggtttcaccatgttggccaggctggtatcgaactcctgacctcgcgatccacccgccttggtgttgcacttttataactctttttaccttctcaccaaactagcatttaggaaaaaaaaaaaatcaacaaaaacaaaacaaaaaaaccaaaaacctctatcagtcatttacacgttagttggaaataatttagaccagtgtggctctccttcgcagaacacattcagtcctctgtgattattagaagcaaggttcaccttttgatcttggttaaagaaatttcaggctaaatttctggggaggagatgtatttcaggttccaggatcccagaattgctctgcacaagtcacagccatccttgttccctgaagtctctgttggctgcaccatgtctgctgctcctttatgagtggttttgggagaggccaggctgagctcttactagctccttgcaacaaaacaagcgaatgtgaaaagtcttaaacactcagctttctggtcagaggaaatcccaaaatcagcatgactcaggattttaagtgccccatagagtgtccaagagaagaaacctaggagtctagggtctttcaaaaccccaaagttaaaaccttttatcaccctttcctgaccttcctggcttaggattttaggcagcctcttggaggcctcccttgcctggggcacacttggccataaacccattcattcagccctactgatttagtgcccattatgtgccaggcagaggaaaagtagaaatggtaggatctatcttcaaggggctcaaagtctgcaggaaacaggatccgctaacaaattagagcacaagggtgtgccgagtgctataatagcagtgtgggt

SEQ ID NO: 64908 - DNA, 477 bp, Homo sapiens
tttttaacgaaagcagtaatcaggagaaattcctaattaaggtcctagaaccagtggcttctaattgtttgctgccacaggattgtaaacatgttgaagatgaggccagtgtcttattcaattgactgtccccagaagcaggcacagtgcccagcctagggcctacacaccgtggtttctcaacgatatcaattgtctgaatgactcaggggtaaaccatttttcagtgctgggtcaggcagagccccactgggacgtgacctgcacacactttggcagtcccctgggatgcagtggtagcagcagcagagtcataaagcctggggatcagagccacactggatatcacagctggaaaggcctgagatctcagccagtcccttgctaagcagaaagaagaaatgaattagctacaaatcttggggcctctaaaaacacagcttcatttttctgtttctcctatagactccccattct

SEQ ID NO: 64909 - DNA, 1888 bp, Homo sapiens
aatacaaaaaattagctgggcatggtggcacatgcctgtaatcccagctactcagaaagctgaggcaggagaatcacttgaacctgggaggtggagggtgcagtgagctgagattgagccactgtactccagcctgggtgacaagagcgagactccgtctcaaaaaaaaaaaaaaaaaaaggcaagaaatgtggggcattgatttttggatgcgttacaatctctagcatacactatgtgctcaataaatatttgctgactagctgagtgaattattacctactaacacctctataaggccattgtttggcaaggaatctgctagcccagagtccaacagagtctcttctgctcctatcaccctacccccaaaacaccactctattttcccaatgccttccaaatcaggaagcaggagtcctccactttcttgcccattcaccctccggcctgtatgcccgaaatattcagagtggggcttcccctgccccaccctaggaatgagaccctctgcagagcagccaccttaccatctagaacatactctgcatgcccagtgcacacagagcctactgggaaaggggccagttcaacctcccattcctctaggctcagcccagatgccacctcctccatgaagctgttttcccagctagaagtgactgctccctcttgagtaccctcagccatcccacccagctctcagtgatgggtccctgggccccacacactgttggaggccagcatgtttctgttgactcacttcgccactcattcttagaagcatttatacttggcattagagcccatggaattcttcatcacttgctcattcatcatttgcagtgtacctactatgtgcctgatgctacatcaggtgctaaggagacagacaaggaacaaagtagacccagcctgagggcaggcttcatggaagagaggacaccatgccaaggacaaggtggagtttgccagaggaaggggtagggagaggcagagagaacttttcagactaaagacccagcacacctggactgagacaggtcaaaaaaagggcgtgttcctagttgtttggaaagaggaaacaaagtcagagagcttgaaattccctgaatgaataaccaattgctattatacgagaacaacaaaatccttccccttcgcccagcctatgtttacacagggtgaggaactcagtacagctggagtggaggaggtgagcagggttggggggtgacagtgaccaggaaggaccatgaggggcctgtcagcaaagtctgcagatactccacagtaaagcttctctctgagccctgagcgttcactgtccagtggtctagaaaattctgtttactggaaatcattcagacagtgagcctgctgggcccaagagtcatcagtgtagtacagccaaggctgttcacacctcatgggggtcccctccgctgggagggtttggggtggggagagacgaagaggtaaagggaggagctgagagaaacagctaaaagcagaaagggagaaagggcaagtggcccagcctgctcagctgatgtctgctttgtggccttctagggtttcttgctggaatgccttggtgactgccagcgccttggtagttctccttcagtcttatcttatatttgggggctgcaggaagtgtttcgtaagtggctggaagatttggccaggggggctgtggtttgctgactgccaacctaagctgaccgcagctaccccttttctccttgccaggcaatcacgtgaatctctagccaatgagatgtgaggggtatttctgggaaatgttttacttgttcttaaagagagagactgggcatggtggcacgtgcttgtagtcccagctactcaggaggctgaggtgaga

SEQ ID NO: 64910 - DNA, 2168 bp, Homo sapiens
acacactctgagccaccatttcctcctctgtaaaatgggaggagggttagttttgagttttcaacatgccatccttgggctgagccatgaagcttaggattttggtaactgggtcctcagagtatcgtgaaaatccaacttgaggctttccaaggctgtacaggcatgctaatatattctttcttgaggctcctatttcacatctcagaatgttaacactggttctttcctgctgattagacattcttactagaaaaaaaatttaaaatttaaattaaaaaaaatctcttactgtccgggtgcggtggctcacgcctgtaatcccagcacttttggaggccgaggtgggcggatcatgaggtcaggagtttgagaccagcctggccaagagaccagcctggccaatatggtgaaaccccgtctctactaaaaatacaaaaagtagccaggcgtggtggcgggcgcctgtaatcccagctactcgggaggctgaggcaggagaattgcttgaacccaggaggcagaggttgcagtgagccgagatctcgccattgcactccagcctgggtgacagagcctgggggtgaaaggtcaagagccttttctaggtggtggctcaggtccttaggggggttatcactggaccgttctagaatctcctgtaaatcaaatcacatctggaaggtgggggcctggaaatcccggcccagctccccggactcgctcatttggggtgtttaggttccctgatccgggactgccgggccgggaaaattccatgcccgaattgtgacgtcggcccgttgccatggcggcgaaggcagacattccgcggtgacctcactgcagaaccaggcagctgtcacatgacgcgcgggcaggagaccggccgggcgaccgagggtcacctgttaagtgaacatggtagccccgaccccgcccaaggccaagccccaagcgggtggcggctgggacccgggcaggcgccacccgggctccgtgcaccccgccacggggaagggccgcgcccggccaggcagggttccagttccttggccccacgcgcgggggtaggcgtcgactccaggcccctcccaagcccccgctgtggctcccggaggggccatcgcgcccgggctcccccaacccaagactcgcgacaccccgaccccagcctcgggtgggcggggcgtcccgagagggacggcggggccgggctcgcgaaagggactcacgcgttgcccacgtagatccgcggggtgacctcgttgcagggctggctcgggaggctgtagcagccgctgccgtccgagagcaggtcgttgagatcctgcaccgagagctcgaacgagcccgacatggcggcggcggggccctgcacgcccggcaggagcaagcgaggcggagagcggcggatcagctgggcgggggctcgcgccgggagccgccccgtcccgcccctggggcgggcccgccgggctccgggagctgcggagcgcgggcgccgtgacgcgggggccccgcgcgccactcctgggcgcgtcccggggggaagacgccaccgccctggagtctcaggggtcctcgccccatcccggtccaggccgtttgtgtatctttgtaaactggcaagcgcggtaacttccttccctgaattaaatgcagggcccaataaacatttcgtggcggaggtacacctaggggtcgcttcagtctttcatgattacagggaccgccgggttcggctcgtgagcggctccctgcagtggaggcaccacccgggcgcttgacagaatccccgccccagcccagccctgctggatcagagtggacattttacggaccccaggaggtccctacggtcaaagtctgagaagccctactctggggcgcatctgctttcaacattcattgagagtcatcgtcgtgcttaaaagcagtcaggtttggaattctgaggaattacttaacctgagcctgtttgcagggaaaaaaaaaaaaagcgggatagtaatggtacctaattctagggttgctggaagggttaaatgtgacattcaaagaaggcacccagcactgcatggcgagcactcaataggtgttagtccttcatcaacaaatgcgttgagcacccagtgggtgctataccctgtgctggggtggagata

SEQ ID NO: 64911 - DNA, 402 bp, Homo sapiens
gattagatcctggaccaagggaaaatgtcataaaggacatgatggggacaattgttaacatttaaataacagcatataacagatttggatacattttaaattctcagaatttgatcactgccctgagaaagtccttggccttaggaaatacatgctgagagatttagggttaaagggacacgatgtctacaactaagtctcatatgactcaggaaaaaaaaattcagagatgtgggaaaggaaattgagcaaacatggcaaaggagcaactggtgaatctgggtgtggagtatatgagagttctttgtataattcttacaccttttcagtaagtttgaaattacttcaggacaaaagttaaggggctgggtgcagtggctcatgcctgtatcccagcacttt

SEQ ID NO: 64912 - DNA, 1365 bp, Homo sapiens
atgtgccaagcattgtgtggggtgatttctatgataaactttttgtctgcacaaagtcctgagaaatgactgcgaatgttcccattttattgatgaagaaacagcggcgtggaagctttcagtaagctgtgggtcaaaatccatattcaagcaggctcttccaggctggccttggaggtgccaagtgaccctgcctgacagtgtcagctgtcctccgcagcgcgccccctccactgcaaccttctaagagccctggctcaagtctcctgctgggacacaccttccacaactacctggctgggcctacaagccccctgtccccgaccccccaagacccaacccaaagggagcctccagactggagtgcagagaggagggggggaaatgggagtcgggcttccactatgcaggaggggggacccctatctcatgaggccctccaaaggtgctctgcagcacgtggacctcaaaaagtcctccttaggaagaggagaaggagagtcatgactgattcattccgcaaacatggagccagcccgcagcgccgagccccggtgccactaagaggcgtaagagcggccccgggccctccagcctccgccccgccccgccccgccacgccacgccggactcaccctcgggctgctccccgcaggaggccgagcaccgactcccgctcgctctccgaaggaacctgtgggagaacaaggagcgcactgggcgcaggagcagcgaccccgggggacctcggagggcggtcccggaggacgcggagcagcagggagcggggggcgcgcggcggggcgggcgcgggaagagggaggcgggggccgaggggcggggttgagactcccgcggtgggctcggtgggccgcgaggctgtccgggagcacgggaggagggtctcggcccggcctcccgcccctcccgccgcggcgcccagctccctcgtccgttcccctcgcggcctcctacctcgtcgcgccgggatgtgtgctccgcgaacgggagccgcgcgagtgcccagagcctgggccgccgctggctccgccttcccggacccctccctgcggctgccgcgccgggcgggggtggcggagcctgaggaggcgcggcgcggggaggaggcgcggcgcggggaggaggcgggggaggagcggaggccgccctccgcgtctggcaccgccgcaccctccgggccgggctccgctagccggcgtcgtacccgctcccgctctcccgctccctgagtcccctgcctgtgtccccccgcaccctggcacacagccagacttcccttccgcccgcgcaacccaccctccgcgagtggaggggtggacacctgctcaacagagaattcgattt

SEQ ID NO: 64913 - DNA, 1073 bp, Homo sapiens
ggcaatgtcccttgttaagacaaaaatgtttaagtctgttgacatccagtgctatcaaggatgtggggaaaagacacatttacacatttggaaggaatattatttggtgcaaactttctgggacacgatctggtaatatttgttaaaatattatatgtacatgtcctttagtccagaggatatttgggcaagcagaatggaagaaaagagaagcagagagagatgtttaggtggatgagagcttggagcaggagtgctgggagaggctgcatcataggacagggcaggtgcagccagggcggagttggcccagatggccggaagctcagggcaggagtcgcctcacccagccagggctcggtcaaggtgctcgtttagagcagctgcacagggaacaggaagatgagctcaatgccagaggaatgaatgactttgggtccatctggacagggagaagagactttaccaagcatgctctggaaaaaaagagaatgccaacgatccttgaagaggtgacagagagaatctgcttcaggctacaggtgtgcattgtcattgcatttggcattcagcccagacaccatagggaaccagaaataattccaagaggagcaatgggctagtgcccaggcatgcagcaagagggcaagtcagaagcgggtggagaaagggcaggctcagctccatttacttctcaatgagaagggaaattactgtactggggttttggggtttttttgttttgttttgttttttgagatttctgataacttttcctattgtttgtggcttttgttacctatttctcttatttttatttttgttttatttttttgagacagagtattgctctgtcacccaggctggaatgcaatggcacgatctcagctcattacaacctccgcctcccgggttcaagcgatcctccagcctcagcctcccaagttgctgggactacaggcatgcgccaccattcccagccagtcctagaattcttatgttgtgcttttttcaaatctgctgtcactttttgttctttccagttccctgccaaaaatgtcaagcttgacttt

SEQ ID NO: 64914 - DNA, 741 bp, Homo sapiens
attgaggctaggactcgaacctcgcgttttgatccagggtgcggcaagggcgccccattaacgtgtcccgcccgaggatgcctgagccccctcctccgtggctcagcctgaggggagaactccccaccttcgtcccaaataaaacctcctgctcctctcaacgcctttgcccctgattcccccgttaggctgcaccctcactcccccacccacgagctgcgttttcccggaagggttggggtctcgggatccgagacagagccctgcctgggcccaacgaacgggagggcgctggctggggccgggggtggccagggccccgggggaaaggcggtaagcatgagcaagagggtatcaggagtcgccccagcctcgccgccccggggcggttcccactagcacctcgggaggatcccttcactccgccggtccccgcagggcaggcggaccccacgcggccagtccgggactacccgggactacccgagactttgcatcgcgtggccgggccggcatcgccccttggtggcaattgtttgtcattacaacctggggcgcaaagtggaatccctgtcctctatccaccgaggacccctggggtattttggcggctggacctgcgccctgagtccaggaggctcgatattcacccttaggatattttcctgaaccccgataccccacaatctcctatccgcacattaactttaccttgggatatgcaaatattaagtagaaccc

SEQ ID NO: 64915 - DNA, 2673 bp, Homo sapiens
ggctggtctcaaactcctgacctcaagtgatccgcccgcctcagcctcccaaagtgctgggattataggcatgagccaccacacctggcctatgtgagtgcacaattctgtatccaaacgtgtatgagtggatctgtgtacctctgtacacctgtatggtgtacaggggcattcctctacgtacagatgagtgtctgtgtgactgtggctggtgtgggtctccaagtttgtctactgtgtctctttgtacacccgtgtgtctacacatcgtttatctgtttgcatctcaatgctatggggctctgtatttgtgtactgtgcatgtttgtgtgtgtgtctcccctcaggagctgtgatgtggtactgtcaaatgtcaaccccagcccctcaccctggccaattcctgtcacattcatgccctgctgggctgagatgcggccaagaagggctgtattgggagggaaagccttgggcttaaacctggctactgtgctcggggcccaggacccttctgggtggaagttatgtctctgctcccaggatctccaagacccaagcctggtgagaagctgggcccctgaacctgggcacaatgacaacaggctctgctctaacaaaataacacccacctttaaaggaagaaaaatgtgagctggacccatacatcaacaatgatcctgtaggccttcaactcagaggggtggggctgggtaggagtgctgaccccagacactcacactcttctcctccagaaagcagggccagtccccaaccagaggagaggtggaggggacacagtggccccagggtcaatgggcctggagttaatcatctactctggtatctctgggccccattggctgcctggggacacggccctctgggatgaagcccaaaggagtcagaagccgcttcccagcccatttccacctcataggctcaggggcaatggagctgattcagtcagcagggactgaattgggtggatccctaggaagcccccatctgagggagataccagtcctgccctcagggagccccagtctgagtcaaagaggacagagacaagaaggaattctgagtggagaggggtcagcaggggtggcctgctgtgatgaagagctggccttgcagcctagggaaagagaagcacatttgggttgaaggagtttggagaggaaaactattatgcccctggaggctaagacctcctcctccagtggattctgagaagtgtgtgtgtggccgggcctgagagtaaagagggaagagaaagaaggccctggaggtggccccaccaggtagggggtgcagcccctccacgccattgcttcatgctttgccttggaacccaagatttctaagtgggaaaacaaaaaaactcaatgaggaggtcctatgtcagcccctccttccactacagagtctcccccccgggacagtgtgtccgaggggtgggggactgcggggaagatcccagaaacgggtaagcgcactcactcggcctcccctggagactcctcaggagggaagtagcccaagccctgctccccaaaaaggcagagccccaggtgtcaggactccagcatggggagacaaaaccacgtgcaagaaagcagggaggagcaggggtaggaactgagggtgcttagggtctggccatgccactgacgagctgtgtgaccttggccaggtcacctcccctctacaacaacagagggtcctctttccccctctacaacaacagagggtctgactggatcagagtgtacccaagggcaggatgtgtgcagctgacagtgcccagcacatggacacagtatgaagtaacattgaatcatatcctgtgaatgttttcaagcctttcaactcctttccaaaacttgcttaacagcatggatctggagcagaactgcttcctagaccagctccacggcttgtgagctgagtgaccctgatcctcacatatttctgtacctccattttctcatctgtaaaatgggaataatgataatagctatcctggagtcactgagaggattaaatgaatgactatttgtgaagtcctttgcatagtgcctagcattcgacatgtgttagctattcctctaccacacagaaggctttgcttggtgctagggtatctttaacacatggcacctgctaaccttccatgttaccaagaaagcaggcaagctatgcagatggaatataatggaatgtaataacattgttttcctctcacttgattcttttttaattttgattttaattttaattttaatttttttgagacagggtctcattctgtcgcccagacgggagtgcagtggcacagtctcagttcaccgcaatctcctcctcccaggctcaagtgattctctggcctcctgagtagctgggattacagaaacatgccactactgcctggctaatttttgtatttttagtagagatggggtttcaccatgttggccaggctggtcttgaacttctgacctcaaatgacccacccgcctcctcacttgattcttaaggcttatggcaagtgatactggcctagttacagacctaacatggataaactttaagtttaaaaaggttaaagagggccgggcgtggtggctcacgcctgtaatcccagcactttgggaggctgaggcaggtggatca

SEQ ID NO: 64916 - DNA, 3399 bp, Homo sapiens
tgcatttgtggtcccagctactagggagactgaggcaggaggatcatttgaacctgggaggtggaggctgcagtgagctatgattgcaccactgtactgcagcctgggcaacaacagagtgagaccctatctcaaaaaccaaaataaaaaactctattttattttatttttaccagatgtgatattcgataaagaaaagcattaacactaaagtattataagttttgaggggtgttttgaggatatcacagaattcctcaagctggtacccagtgactggagtttggcaaaccctggtaacctcatggtcattcattaggatcttttttgagctcaggcaacaggacagacaaggccagcaccacccgcccccgccctcccactgccccccttcttctactctttccagcgccctccttccagccccctgcccagccctgtgctcaaagccacctacagtcccttcttctctggtcagaatgccaatcatccaaggccctgcagactcccaaagccgcccctggaacctaccttggcagcagattaaagacaacccgccacatttagtctcggccccatgaccgatagtgggttcagttcctccaggggcgggggagcctagtggccccgccccctgactcatggcctgaccctcctcaaacgcacccagaggagactcctggtcccctgtccggaccccgccccgaccaggtccagccccgcccaacggcaagttaagagccccccagtgccagacgctccagacagactgccactcttggggggcaagagttggttgtcgtcatggcgacggcgctgatggctgtggttctgcgggcagctgctgtagccccgaggctgagaggccggggaggcactgggggcgcccgaaggctgagctgtggcgcgcggcggcgggcggcgaggggcaccagcccggggcgccggctcagcaccgcctggtcgcagccccagcccccgcccgaggagtacgcgggcgcggacgacgtctcccagtcgcccgtcgccgaggagccgtcgtgggtgccgagtcccaggcccccggtgccccacgagtccccagagcctccttcgggccgctcgctggtgcagcgggacatccaggccttcctgaaccagtgcggggccagccctggggaggcgcgccactggctcacgcagttccagacctgccatcactccgcggacaagcccttcgccgtcatcgaggtgagcggagcccggcgtgggccgtgacgcagcgaggggatggggttgtgcggccacctgtcctcaggcatggcaggatacgctgcgggctctgcgcagcggaagcgggaaggagcccggcagggcccagaccagcgccgccgggaatgggagaggccgtaagctcctccggaagcctcccgcccagcccgagtgaggatcctgggggaccccacccgccaggtgtgatgctctgaagaaggcccccaacatgggcgcagttaggggttcagaaggacctggacaggagccgcttgcactgcccctcccccaaagatgtcccggagtccaaggtcggagggaggagggcgggaggtaccccagcgtgagacaagggagtggcaagacccaacggggcaaagggcggagcaggtgggcactggtggccagaactgggtcctgacagcttctggaagggtagggtcaccgagacggccctgcaggccaggctgtgggagccagcggctcaggtccgtgtcacgctccttgaaagcccactcctccgcaggtggacgaggaggtgctcaagtgccagcagggcgtatccagtctggcctttgccctggccttcttgcagcgcatggacatgaagccgctggtggtcctggggctgccggcccctacggctccctcgggctgtctttccttctgggaggccaaggcgcagctggccaagagctgcaaggtgctggtagacgcgcttcgacacaacgccgccgctgctgtgccattttttggcggcgggtctgtgctacgcgctgccgagccggctccccatgccaggtgagtgcccgccctgcccgcccaggcgtcctcagagcgtgctactctgcccgccctgccccgtccggcaggcctggagggggccctctcgagcaccacgtctggcccacagctacggcggcatcgtctcggtggagacagacctgctgcagtggtgcctggagtcgggcagcatccccatcctgtgccccatcggggagacggccgcgcgccgctccgtgcttctcgactccctggaggtgaccgcgtcgctggccaaggcgctgcggcccaccaaaatcatcttcctcaataacacaggcggcctgcgcgacagcagtcataaggtgcggccctttctttcaccttcccccacgccggcgatccgggccttctcttgcgcccctcgcacttctccccgacgggccgcagactcactagcaagccgggtgggtagaaaagcctaagggagtataggggaggagttcagccctgggtgcccagatctgcgccctccctggctaaggactccgggcggaagtaaggataaaggggtcagagaaaagagaggtccgtgggggtaggggggcagtccgtgccggctgtgggccaggctcacccgctgactccggacacaggtcctgagtaacgtgaacctgcccgccgacctggacctggtgtgcaacgccgagtgggtgagcacaaaagaacggcagcagatgcggctcatcgtggacgtgctcagccgcctgccccaccactcctcggccgtcatcaccgccgctagcacgctgctcactgagctctttagcaacaagggtgagggcggtgggcgggccggggactgggtcccgggagtgagtactggccggggctgggtgtctgcggtcaggaggagcggcttctcctcctgtccaggagccgtagggggaggcggggggtgtcacagcaatggctcctgctgctgccgaaacccgggggaggtgagagaggaggagacccagtgtactggaagggaactccgaaggaattaaaggaatgggcgggactaggggggagaaggaggggccccccggtgggcggggccaggggcgggaccataagggaggtgttcgaccgggagagatgggcggggcttaggtgggtgggccgggtcagcggcgggagacagacttcaaggagcgaggcaagactaacggaagtgggtggggctccaggcgacaggaggaacttggggcacaatctctgcctggggaaagcatctccttgaatgaaaatcacagacaaatctatgcagaccactgaaatcatttcactgtggaggtctcccaaagacggaaattgtcccaccagcgcctgtcctacctg

SEQ ID NO: 64917 - DNA, 1527 bp, Homo sapiens
atcttcctcccctaagggtctgacagtctcttcctcaaggacagtgcctttgtccaaccttatctccagcctgcagggcctggcacaggttctggcttaaatgctatactaacagtaattacattttcataaaatttattttatgaaaactaggtactctccaaggtcctttgtaccccatgagtctgagattactaaactaacagtttaaaagattctgggaaccaggtgaccggggttctggtcccaccagtatcctgtattgtggctttgggaaagtctgtttcccatctctagacctcagtttccacactttgaagaggaagtttgtgtggtctctaagatccatttctgcgctctgtaatctccataagccaaggggttcgaacctcccaggcttcacactgtgcagctggccagcaccattcatcgcccaccaacagccctgggcattggcctctgattccccgtcacccagagggaagacccttttggggccgaggcgctcaccttcagccagtccccgtagtggacgtagcccccgatgtaggcggcgtaggtgctaatggccaattggagtgcggcccccagcgcgaaccagcgccgcttcacgccaaaggacatgaaactagcgcacagcacggctgcccccatgtcgaaatacaggtaaggcactgggatgtcgggcttcctgcgagccgggagtggggaagcaacgaggacagaatgaagcggtgggggaagaagcttgagaccccttgagttcccacaggctccactgctcccccaaaccagactcccctcccatgggcaggaccgccctaccagatttggtccgacacccagaccagaacccctcccagggaggtcccaattcctcccagttcaagggtcccgacttctagcccccaatttcttgcccacatcaccgccccctgccgcgtttagcggctgcgtaggcctgctcaccggcgtgcctcagccctctcagcgtacagcatgagctggctgaagcagccccaaaaggggcagcgtgtgagcagcaccgaacccaactgcatgatcagctgcaacatccaccgtctcgaacctatcttcgacgccatcttgggaaagggcagtccgctgcggcctcaccccagtcagagaagcaggcgcggggatgggacacgcagcttccgggtcaagcgctttttctttttcctcccggaaacaacggtgtcattctctagttccggatctaaggtgacccagttgcgaagtccagccttctcgtctgctcatggagccttcagggccatatttgtccctgcgaatttgaaaactagactagaggaaggaacagtgggttcaggatagcagaagtcttggaccgtagtatgatgtattgaagcaaactggtctttgaatgcagcccgatcagggccctaatcctgattccaaccctgtgtgattctgggcacatcacctaaactttatgagactcatcatgaaatggggataattacacctacctcagagttgtga

SEQ ID NO: 64918 - DNA, 1723 bp, Homo sapiens
ctcacacatccccaaaccacataagcccctggcaagccctctctggaacaggtttccagtgcaaacatcccctaaacagcaacttccaaatgaccgagaagcctaaaaatcagcacagcccccccaccacacatacacacgcatcagcgaaacaagccactatccctagctcagatacaaactctgccctgaacttactctcccccaaaacaggcaaggaccaatttggtcaccatcccaccgcccttccttggacgaaatcccatcagtgcacatgccctcctaaattccatacctttgccctaccagcagttccttaccctaaacacccctccccataatatttcacccgcccctcctttccatccgggctccaatccatcagccccctcccaccaccaccccctctcctaattactgtgtcccctctcataacgttccccccaaaaagccatccccgtgtcaagccctcctccacccactgatcctcggtaaagccccagctcccgcaaagagagagagacaggatccccaaagctgaccgaagggcccgcgggagggggaggggagctcagggccgtgcgcatgcgccccgggcgccgcggtagccggtcgcccctaggcccggagagagccccagccgccgccgtcgtcccccaccccccgaccaccgcacctacacgccggcccggactcgggcttcacgcagggaaggatacttaaagccagcattttggattggtagtcaaaggctaccacctcgccctgcagccgctgctcctggcacgtccggcacgacacctggctcccaacgctgaagtactcgcccggaggagccgccatcttgggagtgcagccgcggccggcggcggcggcggcagcagcgggcgaaagccgggcccccagtgagcgccgcgacgcgacggcgcgcacggagcgtgcttgcgtcacacgccggggcgtggcctggcgctggttggggcgggatcctaggtggagtgggaaagaagaggaaataaaggggaatctgaaaagtatttgtatagctgcgtccgctcggttaagtgcttgtagagtccattttagaagttaaggataaatgacctacgtggaatgaaaaggggaaagaggagggagctgcagtctccattatatgcacaccttccacacaagagtttaatgaatgaattttataaaatatgttaaccccattttgcatatgaggaatcagagcctcagaggacttaacgatacttggacaagatgattataaggctgggagcggtggctcacgcctgtaatcccagcactttgggaggccgaggcgggtggatcacctgaggtcaggggttcgagaccagcctggccaacatggtgaaaccccgtctctactaaaaatacaaaaattagccgggtacggtggcgcgtgcctgtaatcccagctactagggggactgaggctggaggatctcttgaacctggaaggcggaggttgcactgagccaagattgtgccactgcactctagcctgggcaacagagcgagactctgtctcaaaacaaacaaacaaacaaaaaaagatgattataactactgagtgatagtggaaagaacattggctgtggagttagataagctggaaccagaatccgaggtcagcctcttactaaatcacctgaccttgagcaagcaaattacctgatcctgtttcttcataggcatt

SEQ ID NO: 64919 - DNA, 1879 bp, Homo sapiens
gtctggaactcctgaccttgtgatccgaccgcctcggcctcccaaagtgctgggattacaggtgtgagtcgccgcgcccggcaaaaaaaaaaaaaaaaaaaaaacttttcaagaacaaagttgattgaggtaggaagaaactaaggagacactgttcaacagtattctaggcaggacctcgcctagaatagctgagatttctattttctatgtgagttcccccagatgactgtttcaaactctgtcgcgggtgtgtgccaatcctcttcccataccaacactgttactatctcttggtttcatctgcctaagcagggttttggatggcaggaggatgggggtgggggaagcaagggaagaactggaaggaagtgtgactttgcgctatatgtgagaattcgcctttttagggaagacccctcaaaatcaagagacttatctgtcagcctccagattaatagcaggcgaattagaaagggggagtcttgaggctggggaggaaggagtgaactgattaggggtgtatgcaaatttaggatcccgcttcagctcccaggaggaggggctgtctgcagccttttctccaaaggatctcagatttatttatttttttgctgtttgtttttttttttttttttttggtgggtattggtgctggagaagagaggtccggtggggaaagaatcccggccctggagattatatatccgccttcgcatcagcggagcagggacgctgggagcgcgcgcggcccgccggctagtcagtcccctgacccggaaccgcactggtgccgccgctagccggctgcccacgtgcctgcaacagtggccacgtggggccctgaggaaacgcctttacaaaggtttgtcccctgcgctgcccagtagggaggaaaaccggaggagagcgcaggaggaaacagtaccggctggaggccggtcttgcaggagcgggggactgctgggggcggggcttggtggtgaccgctggcggggcggggcctggggctcagaggggtgggctttggagatcagagggtcgacgctgcttcgttgcctggactctggtttccgccctggagcaagccggggcctggtcggcagctgggccgccatggagtccacgctgggcgcgggcatcgtgatagccgaggcgctacagaaccagctagcctggctggagaacgtgtggctctggatcacctttctgggcgatcccaagatcctctttctgttctacttccccgcggcctactacgcctcccgccgtgtgggcatcgcggtgctctggatcagcctcatcaccgagtggctcaacctcatcttcaagtggtgagacagagaagccctccggcatcctggtccccacccccgagggccctgagtcatgtgtaagccctggtctctttcagcaactgtctcaagggccttcccacccctactctgtagtccctgattttttttccccttgagcatctttgtgcagcttggactcaaacctcagagtccaaccatcctactcattagaccagtgttcttcaaactggtctgatggaaaaatcacctaaggggcgtgtctaaaatgtaaatatcccatcctcatctcacacttactaatttagaaactccaaggggttgggaatttattttttattttttatttttggtttatgggaattcatattttaacaaatatggtgatttaagtagtggagagtcctacctctcaactcactttttcattcatgtattcattcatttgctataatttttcagaagcatgctttgtgctgggcatcacggtagctgctaaggacagagacaccttgcagattaaggtgtggtccctggaccatgcccaacggcataggcagcac

SEQ ID NO: 64920 - DNA, 1044 bp, Homo sapiens
ggccaaggccatgccacccacatgcctggagtatggcctctggaaccccctgcaggcagggtggggtgggagaaggtaaaagctcagcatgatgtagcagtccccaccagcctcttctcccccaggcatggttgggaacattcctctgtggttttcccgccagccatactgacgactctgtggccacaaggccagagccacatgtgcagaagtggccagatgtggccagagggtggggttacacatactcatcttcattcccaacccatgtcctgccccagcaccaggagaaagggtccttggaaactgcagaaggccttcctggaggtaactagccacagcccacgatggtggcaaggaaatggcagccagctcaggtctccccagcccgtgaagtgctcagcaaggccctgagctggccggagggttatctgttcttagtcaagcttggcttggcccgtggcactctgatcactcagccaagcaatggacagccgtcaacctgctgctcccggcaatgccggggttgtaggagccagattccagcctgcctgcccagggaagggcagaggtccaagcactcctggctcccagcagataaccctgcctagggctggaactgtcgccagcagtactggcttcccttgcaggagccctgcagagagcacatgggctcaggcaaggggaatctcccaccagcctgtcactgccactgcagcagcagagatgttaggcccggagctgcagcgggaaccacagccctattggtatgcaggtggcagggcaggcagagggctctgccatgcagcctcgttcccatgcaaacaggaagcacaggcgactccagaatattaatttgcaggacctgcagggactgggtgacatgcagcaccccaggggtttgccaggtagcaacctgctccacccaaagtggaaggggccatggctactctgcctgagtcagggaaaggaggggcatggagccccatgaatagagtctgcccaggcacagaccctggagcctggcgggccttgcactctctc

SEQ ID NO: 64921 - DNA, 1644 bp, Homo sapiens
ccaagccagaactaagctgggatgatggtggtgcccactgtgcactggggagctgtggtagggtggccaggcagagaccccatccatcaaggaagacctctgatcgctaagagcagatgctgagatccgccccactctttaagcaagaacagcagactgcccctgtccttcggtaggctaaggctctgtcttacccgctggggtgactcactaaagctgtctctattcacccagaggtccaggccccagaatagagcccaggaatcctgccagcaattctggactccagccctccccatgcgacattcattcatccatgtgccaggcactgtgctaggtgctgggcaatggcaacaaccaagacagcccagagagcaaaggctatccctaaaatagggttctaaagatgctgctggaggtggcaggcaggcaccaccctcgaaagacccttgccccaaccccttgggcttgggagacctgcgcaactcacaccatccaaagaagcttccctggacacctgctttttcagccataggatcttgcatcctgtctggagaccgatcaagagatggggagagggggtggggagggaaacaccaggctgcctgggccctcatggccgtgtttatccggggtggattttttttaacccaaaggttaaagtgtttctatttgaaacatctatttacattccagagtccaaaaaaaaaacaaaaaaaaaacaaaaaaaaaacaaggctgccgagctccaggcctatatctgtccctagccgcgtcacagacacagcatcagagctgcgcagggggaacattcttagccctctccccgagccgctgaggtgactcacgcctccctcctgccagcatggaccaagccaccactctgaaggccagccagcgttgggggtggagtggggagacagggatctggacagaggggctgcctgggagtccatgcaggggcagccaggcttagggaggagatgagagagcagggtcccagcctgcaaggtttctggggtacaatctggaagcaggtgaatgaacaagctgaggaggaaacttccggccaactgctggctgctgctggtagcaaggaacagaggcgacagggcaggatgggtggacctgataagccagatggcgtggagctgtcccaagcagatgctctgggattattctgccttccaagagaccaccttgagtcccagaggctgtgggctaggggccagcaggcagggtctttagctggacctgtggactccagaccaggataagaaccagccctctgggtttattcctcatcccagggacctgtgtagggggcccccaggcatacgcccctacctcaggggactacgtgggtatcttgtagagccggttcccaaggttacacccccatccccaccccagcctacagggctggccccagggtaatgcccctatcctcggggcctgcatggataccctgcagggctagtcttcagggtcatgctcctacatgagaaaactgcatgggcatccctgcctgggcagatgataagccatgttccaaagattttttgaatcttcccaaaacattcatgctctgacacatccaagtcccactgcaaccttatccctgggcagctcagagccaaatca

SEQ ID NO: 64922 - DNA, 1348 bp, Homo sapiens
cggaagtcactgtactcgatcctgtagccccaagaaccaagccagaggagctggagtaacctttattcttgtggacacccagctacaccttcttcccttgcccaaacttggggagcgggcagcatggaggcgggtcactgacccacttcctcccctctgaccacagtgccaactaggccaggatcctccagtaacccccagcccccagcagtggatgccgaccctgccagagactgaagggactggaagagatgcagcagagtacagcggaggggcaccggggagcagcaggctctgggcagggagggcaggggcctctctgagcagggatcccccagccctgtgtattctcaacaaaactctcaagacagatctatgcaggaccctatctgtgcaaggctcagggccagatgctcagcccagggacaaggatgccagatgacagagggcaggcagggacatcaaggcacttacctgtcacagggatgctgtgcagagaagtccgcggcaggatttccaaggatggttcccgacctgacatcccatctgctgagaaacaggattctgtctcatagatggtctgcagcatctccacgagcccctgagccttgggcaccagcagcatgccagggagggggccgccagaggcggggagcagaccgaagggaaggtggtcgggcagcccgcacagcacaggttccctcaggccactgccgacgggacccacactgtagggaagtgcctcatccggcctgggcactcctggcggcaggaggggcagggaggccctagagctgcaggcccagctctgctctagaggggcatccgaccaccagcctctccctggttcctgggagctggggtatggctgagcacttgggacaggaaggggagctcagcgggcaggcgggctctgtgttccctcccaaccctgggtgacagctctgggcccggctccctgctcctccttcccgaatgagccgccgccggcagctggcaggagactgaaatagcagttgggggagggccctgtctataaataggtggagcatgctcagggagctgcgggcgggctgccaggaggccccatggggggggaggcggttctaccccaggaggaagcgccaggcgagggggatgggaacaggggagggcctgcactcagggccaaggccacagcgctgggtggccagaggctgggctggggaagggcgccggccagggtacccatgcatctgggagcggctctggctgctactcttggcaagcaagccaggggatggagaccaagaagccagactcaagcctccgtctttcttcttgccttccagaacaggtaaaggaattg

SEQ ID NO: 64923 - DNA, 1879 bp, Homo sapiens
gggtggagaagctgactccccccaagttaataaggcactggtagtgcccccgcttccatgagatacagatccaggatgaaaaatggggggcatccacccaagacaagaaggggttgggggggagctccatttcatctcctagctctcgcatcctggctccaaggtgtcagacaggagaagagggtggcaacaaacgcagtaacgcctcacaggagacggggtgagaataatgggagagagaagtaaggtggactccgcagtccccctcctcatgcacggaagtcaaggacataaaatcaaggatgcgttcgtagctatggggagaagcgctctgggtggacagcacccctcacctcagagtaccaagaaaggggtgtccagcgaagaggggtctgcacagaatccgggtgcagggctcaaatggctctgcaacgcaacatgcgccgccagggaaggggcaaatcagacaaccccggccggtctccgagccatttgggggcgcagggcgcgagaaggcgggcccctcccttacctgtagggaaggcgcccctgtctgggaggggcagggaggggcgcgcgcagcaaccccgatgtcccgctcacgggctgccgatgctcccggggggcgccggctggctcccagggccgggaggaaggaaggggggcgcggagcgcggcgcgcgcgctgggagcccgcggacagagacagcaggaggagggggcgccgcctcgcgtcccggggtccggggaagatgggatctgggccggggcggcgcgctcacccgctgcggctcgagctccggcttcgcgggcggcggcggcagcagcggcggcggcagcggcggcagcacctcctcgacggctcctccatctttgcggcggctcctccggctccgctcgccgccgccaccaacaacaacattcggagacgtcactcccgtcacgtgacccgacccggagctaaaaatagacccagaccccccccccagccccccccgccttccccttgcccgcagccaccaccaacccctcccctgcctctcggccctccccgccgggcggggccagcgacgccatcgtgacagctccttaaagggccagtgcccagcacagggttcggccgagacggggtggaagggaagggatcggaacccagcgagcaggagtggaaggatcgctgcaggggccgagtatggatgctggggctcaacctttggattgtaaaagtttcctccttgcgctccccggactttcttttcaaaacgtggatggtgcaatcgtcgcttgcctaagctgctcccctaacacgccctcccgcggtcggggaggggacctggggatagattcccaggggctgggagggccaccgcagcctctgcagcggggcctggctgcgggtggatggttcggacaagtctcgaactcgccagctctgaccgcacacactgcatccgtgccagggaaagaaaagcctgggaaaggccagggtatggctgtaacactccaaggccttcaaaagggcagaccagcagaccaggagccggaaagacttccctgactttggtgccatccacgctacatctcctcttggtacacagtatgaacatgtttaattagacctagacaatttgtcaatgacccagcaattccactaacaaaaatgtattccaaataaataaacgttgttatgttaaaaaatgaacatgagattgtttgtaatgatgtgaaaagttgaaaacaacctaaatatccatcgatagggaattggcaagcaaagcaggagacattcattcagtaaaatattatccagacattaaaagttttataggggaccgggcatggtggctcacgcctgtaatccccgcactttgggaggcgg

SEQ ID NO: 64924 - DNA, 1029 bp, Homo sapiens
ctgctttgtcaaagggtgtacataacttcaaggcttttgagggtattttctgatccagtgaaggacaccactacccagttgtccaagtcagaagcatcaggtaatgttaagtccaagagaataaggctaattaatgaaagaatgggccacacaacccattctctaccagggggtatgcagaggagagaagttaccaggctctgaagattgtcagccactggggagatactatgagggtctttcctggaaaccagaggaatacttttgccccctgcctacctggtcctccccggaagccacaagtgctccacatagcatccctgggcaactcctttcctgctgcccaagcaagcaaggtgccagttccgcaggatccagccagctgcaactgaccctgagccaactcccacagccctgagtgggtcagctttgcttatgaagcaggaccctggcacctccccagggggtccagcttcccttcccccagcccccagccttgagggagaagcaattgggataggcttggggaggtgggtgtcggatcaggggtgtaaaggatagaggagctgaatgtctctgtcctcagggagatcttgagatgactcacatgccactggaggggagagagaagctgagggatgaatggattgcaaactagagggaggggccgagcttccgtgccttgattcgcccgcgtcagttgcttcaacaacatctgcagtgcgtggggttgagcgatcccactggtggggctggggtgggtagggcttccaggctggctgacgtttgcttcccgcccgctgggccagcctggagcagttcatgaatgactcacctcattgtcaggctgattcactgctcggctgggtacttgggtaggggggcggccccctaggtacggctcacacccacacacatgcgcacatacacatgtacgcacacgcccaggtggggctccactggggtcggacacgagggatgggatttctgtggtaagaggcaggggcatgcacaccatctagtgtgtga

SEQ ID NO: 64925 - DNA, 1087 bp, Homo sapiens
ctctgaagcagtattaagtcaagcagggaggccgggcgccatggcttacgcctgtaatcccagctacttcgaaggctgaggcaggagaatcgcttgaacccgggaggcggaggttgcagtgagccgagatcgcgccactgcactccagcctgggcgacagagcgagattcggtttaaaaaagaaaaaaaaaaaagaacggaaaagaaaggggcgggggcaggattaggcatcgtggggccaagatgcttgatctcacctgaaccagtgctgaaccagccgactgggaagaggagccgcttgggggcgaccgagagcccatccgtttcccctttaagaccagagcggaagactacagtgagaaggccctttgtgtcggcgggaaagaaatatgcctgcccctttaagaaggcggagacgccccagtggcggcgtcttcgaatgcggcctaaggcgcctgccgccagtctcctggcgactttccctatatcgcagagactcatccctctgaccccagcccggaagcactgtccctcggagtccgagacttccacctgggtcgtgtccaaggccccggcgactccccggactcggggtgccgggccaacctccccgccgaggcccacccgccgtcgctatggtaatgccgcgcccagcttgggggctggcgggccgcagggccccctggcctccggaactgctcatggggttccagcccctcgcccgcgcaagttgcaggaccggggtctgggtgggggttcggcggagtcgggagacctgggctgtcgtcagggcttgtcatggacgcgccggagaccctgagaaagcattctcctcccccgggcctcagtttccctcctgttgccttcctaccctcctgggaaacccccctttccagtgcgctcagacgtcactaccgcttgggtccatccctttcccctccccgccccacactttctactttttttttttttttttttggacgaagtctcgttctgtcgcccaggctggagtgcagtggcgtgatctctgctcactgcaaccgtcgtctcccgcccacccctttcactctgacccttagagtcttgg

SEQ ID NO: 64926 - DNA, 2011 bp, Homo sapiens
tgcagtggctcagatcatagctcactgcagcctcgaactcctgagctcaagcgatcctcccacctctgcctcccaaagcggtgggattacaagagtaagccactccccccggccacagtaagtttttagaaaaaattttaattgcggccgagcgcggtagctcacgcctgtaatgccagcactttgggaggccgagacgggggcggatcacctgaggtcgggagttcgagaccagcctgaccaacatggagaaaccctgtctctactaaaatacaaaattagcggggcgtggtggcgcatgcctgtaatcccagctactcggcaggctgaggcaaaagaatcgcttgaacccgggggggcggaggttgcagtgagccgagatcgcgccattgcactccagcctgggcaacaagagcggaactcccgtctcaaaaaagaaaaaattttaactgcaaaaatctggataagttcttgaaagctggacttttccccctttttgtgtcctaagcctgcgccgaatctgtgccttctttgaaatgctttcccgccttctttctccgggtcccacactacctggggccgcactcttcaagcactggatgctgactaactggtctccttatctgtcttcccgactggcccagagctgagttcttactaatccccgctaacctggagttaggtgcgcgttgcaaagcagtaacgaatccaatcagccggggaggcagacagcagggccggaagaacaaagctggaaagggaaacgtcgcaccggctctgcccagcggcgccagcccgggcaaccttccgcagtcgcgaagccacgcccctttcccaagtacctccgcgctaactcctcccccctggccccgcctctcaccctggattgcctaaggccccgcccaccaggcgtggccccgctctgggagggccgcaatcccgccaacaatgactccacccctccttccgctgagaaacctgtcccttttatttaaagaataccttttacgtcagcccgtcttacgcagcttcgcgtcatcagtgcaaggcgcggaggcgggacttcctgtccctggtataacagcttccgggagaagccggaagagaccggaccctgaacagaatcgcagattgccagcccttttcccgacccctacggaaagacgagtccaggggccgtcctggcgaggtcaaaacatttagtctggtcttttcaggtgaggacttccccatccaggcacagtgccggtccaatccccctttaatttcccatgactcctcgcgtcctgaagccccgcccccagttccccagccccgccccgaagtttgaggggtgtggacggtttgtgacccccttagccgaccctactcctcactggccgggacaactggtcttatcacggaggctggggccaggcagcccttcggttcgggtgggcccatggaccccagtccaacgccgagggaataggaccatccaaaagcggaaccttcgcctcagaaaaagggtgcgggacccctcctcaccgtgcggtcacggtacggacagggtagatcacaggctgagggacagagcaaagacccctgaggccggacacctggggtcctgccgggcccctccccacgagagttccctgtgtctgtgccaatcgttttcgtctttctttgccgcagtttcttttcctgtaaatcatggttaataacattaaccttcttaccatcaggggttagttgtggttgtgataaataattactaccgttattaagcaattgcaatttgcagtgtgccaggcactgtgccaagtattttgcttcgatgatttcacgtcatcttcaaaacaacctcatgaggtaggtactgtttttaaccccattttactgatgagaaagctgaggctctgagaaagttgtctgaggtgttatagctagtaagacgcaagactggggttataattagttgtttttctaactccagggccggtatattaaataaggatgttgatgtgttcca

SEQ ID NO: 64927 - DNA, 3057 bp, Homo sapiens
agtcctggcatcagggtctctccctccccaaggcccaggctccctaagtctggatggtccttcaaggcctgaaacctaaagggggcctagtctttcccaggcctgagctcaggccctggactccactgccaatcagagtctgggtctataggaggcagcagctcaccctaggtccccaaaactcaaacccctctttgatacccatggtgcaatgcagcagggggaggagaaggaactccaaggcctcaaagcaaacccacagggtgtggcaaagaactgcacagactcctaaatacaccccccgccttccctaaagactctcctcagagtcacctctgctttcagccaggatgtccacttgggggggtactgctaccagaagtagaaatggccctaggaccctacaaccttcaccccactctgtcttcccttgaaatcagcctgccactccacgaggggagcagagcccacaggagcctagagctaagggacatttctagccaccatgagcaggaacggcggggggtgggggggaagagcctggtagggtggcacgccaggagcgggcactccccttacctgttcttcctttaaataaccacccgccctccctcaggaccagcccggaagtctctccaagagccccaaagtccaggaacccccacccaaggattcagacacagaacccacaacccagggcccctcggaacggtgggtacgagtttcaggagctgccggcctagagtggggtggggactgacgaatgagccgggggcactgggaagggtaggaggccgggcctcggctcttcccccgtccctgcggcactgctgctgcatcataccgactggggggaggacagccgagccgccggggccggcgccgggccgggacagaccgacccccagagagtgggacgcgtcccagcccctctccttccccgcccgccagcagccccggccggccggggagaggagtccgggagggtgtctctattgtcccgggggctggggcctggctccctaacaaaggccccgcgccccctccccggccggccctgccccgcccaagggggacccagacgggggagagccaggggccccggcccggccgggaagctgggggaagccgggcgtttccgcgtcggcccggggggaggggaaggggcgctgacccagacctggggggagggggcccaagccccgccttgggccccgccccccgccccccacaggcccctcccccgtccccgtccccgtctccgtcccgtactcaccccgcccggggggccgcgccggggcccggcagcctctcagggccgcgtcctccggcggcggcgacggcggcggctgctccggagccccatgtccgtcggtccgtcctcgcctctccccggggcccagggcccggggccggggggtcgggccgcccccccgcctggccgcctcaccgggcggccatggccccttcccctcccttcttgtcccgtcgccgcctcctcctcctcacctcaccccgcccgcgcgcagtccgcgcgccgtccgcgcgcccctccccccgccccccactccagcccgcctctcccgggcggggggtgcggcgcgagcccggagcgcgcgcgcgtgtgccgcgaccggaggatggatggatggagcgagcgtgaacgcgagcgtgcgcgcgcgcgcccctctccccctccctctgcgcgggcgcgaggccaagcgcgagcgcgctccaacctcctcctcttcctcctcccgcccctccccaacaccccgccctccccctcccttcctcttccttctttcgctttcgcgcgcccagcgactgctcgcgcctgctagaagggcccgagcgcgtgcatctgccccgcggccgcagctcggcagcatttgctccagggggcggggaccgggaggggaggaggggcgccacgccgccgtccaaagtaccggcggacggggacgggggcggagagatgggcggggccttcgcggacctccccgaccaatcgcagggaggcctcggcccgggaggaccaataagatgggggtgggtggggcggcgttcaaggtgaggtgcgcggtgcgctgggggcggagacgttttgccgtcccggccggctcgggggcgggggcagcgggtggcgtcgaaagagagcgccggctgccagccgagcctgggacgccttccggcccaggctcccccgcccttccctcggggctccccgctctctcccccgccaccctccgctcccccctttaccccgaggcgtgcagccacttctgtgaagaggccagacttgaagtggggcgcagttaggacctcggggcggaaagcctgtggagcctaaggggctcgcccgcgcctcagttctcccggtttctgggcgggtctcagcccactccaggcttgcggaccaacaagcggccgagatgagggtccgctgctgaggtcggaggccgagctgcgcccttctgcgcggagcgccctccccgcccctcgtcctaatttagatcccacacctgctcgcctttcctgcttccggaacccacgctggacccccacccctccagacagcctccttgtcactggccagatccttcccccgacccagtgctgttcccctgggtgcagcgtgtccctgtgctcacgctctcagtccctctttaccttaggaagggacaggccttttcccagccgcggtggatggctggattggcgctttcatctcggttactctgtgtgtggtgtcctggaacggttgtgtgacagccctctcccctcaagagataagattaaaaaggaggatagtctgtaatcacatacttggagccatctttggtttttagttttcagcaaatacttatttttttctcaccgatttctcccgagaaacagcaaacatttattgaggcgatattccagagtagttcagatcaggcgtctgatttgaatttaaatcgttgggcctagcaaatgagtttcctgtgcctcagtttcctctgttgtcagtgggcataatgatagtcctatctccttgcgttgctgtagtga

SEQ ID NO: 64928 - DNA, 5186 bp, Homo sapiens
ccccttcctgacccttcctctacactcatccttcctcccattccaggacactgggctgggacacacttcaggctgaatgggaaccccagaaggcaggcctcctctaacacagagggtgagggacagggagagaggggaggtgagccactccaggccaaataatttggattcagccaaaccccaagtgtgggagatgcttgattcataaatactcaaggcactttctcccccagttcagtgtatgcagactgaaaaagcccttgaagaagggagtgagccccgcagccacgagggaaagagggtttaagtttcagagggccgggggtggatgcccctaccttggcctttgggggcggccatttccaggtctgtggggcagtcggcttctccgttcatcctccagctgtccagccacctcctcggtcgtgctggccgggcaacccggggtcaaagccacctcaccctttggaagacataccagttcccactcaggaaggctgagaggtgaacgactaacgactttctaaccgcccagagtagaagggggcaggtccacactctgagagactcagccatgaccttattagacttaaggggtctatgggaatgggagtgcgcccctcctcttcctcgtgaccccctcccccagcccctgcagcccggctccgcggcgcgcgccctcccctggccacgcgagggcctgctcctagctcccgcgtgcagcgagcgcccgccctccgccccgcttcccaaccccagccaaaaaaaaaaaaaaagaaaaaatctcctcctcctcggagcgcccgccccggggaggccccaggctggagggcgggggaagaggaagggcgggtaaagggcgcgcgcggccacggaagcgggcacgcgccccagtctcctcctcccgcctccccccggccggttccccccgcctccgcaacccggcggggacccggacgcagcgcagccgccgccagccccggagcggagcggccgcaccgcccccggggaccggatccggattcccgccgctcccccctcccgggctcccttcgccgtccccgcccgcacaggcgggcaagcagccggagagaagcggcctagcctgccccccgcccccgagccacccaccccggccagaggcgccgccaccgcccagccaccccgacgcgcacggaggagcccggcacagaggcgcgaccgcggcgggaaccgccgcctcctcccccgagcctgcggcccagccccgccggcgcccccgccccggcctccggggagccgagccaaggagagggcgggaggacggcggccgggaggcgggggcgcagcgctcaccggccccgccgccccctccggcggccggggagaactgcgcctgccggctccgagaagcgcgggctcctccgccagcggccggggctcggctcaggcctcgcttcctgccttcccctcccccggctctcggcgtcctcccaagtgccctggtctgctcgcgcccggtcgcctgctcggtggtcgcttcgggtccccgctgggcgcccaccgcaccccgcggttcgctcccgccgtccggccccgaccccagcgcgcgtcctcagccgcctcggttacccggcgcagcgcggcctccgggcttcccgctccagcggctccctccctggctctgagtggcggcgccctcccccgctcggccgggcacagccgcagctccctcccgcggcggcagcggctcctcctccgggcgaggcggcggcgctggggcggcggctgctgctgctgtggcggcggcggcggcggcggcggctgtggctgctgcctgctgctcctcgcggcgaaaagcacaaagcacagcgccctccgcctgcaggcagcccgcccgccgccggccccggcctcagctcgcacaccccccgccgccgccgcagcctcagccgccggagcggggaggaggagggagaagggaggaggaggagcgggagggggggcgggagaagcggggcagcgagcgcgtccttccccgtagagcgcacaccgacccccggggagcgagcgccagcccgcccgcctcgccggctccgctccctcccacagcctgcccgggcgggctccgcggggggcagctgggaggaggggcgggagctggggggacccgggcggccgaggcggagggaaggaaggaggggaggggggtggtggtggtggtgctggcggcggcggcggctgctgctgctgctgctgccgccgccggggaagggggggggggccggggcagggagacacgcagccgcccggatggcggcggggctcggagcctaggcgggcgggcgggcgccgagagcgacctcgccagacccgcgggggaactagcaggcttcgccggcgagggagggccgaggtgcggccgcggagagggtgcccggaggtgcccccggcgtccggggaggctcggggggcgcccacagccctgctccggagctctcccccaagttctcccagctcagactagggcttccaggccagctctctcccgcctcccggagcgagcggtccgcgcccaccctcatcccccggagcgtggccgctggtttggggcgcacgcacgccgatcgcggcgtccagcttcggtgcctacctcgcggtcctctccttgccgaacggcacatacgaaacttaaaaaaaaacccgaaaactaaaacctctgcattaaaaaaaaaaaatccccgttgctctttacaccccggaaacggcaagggaacgacgggctccggcggaggggccgctgtgggagccggttcaatccagcccggcatggttctccaggcctgcccgggcgcatgaagatcggcgccgccgccactcgtagcaacccctctcccccgaaatccgcggctcccgggctcacttaccgagcgtgtggatgggagcgcaggccgggggcacctgggagcacggcgggccgaacagtcgagccgcagctccgctgcagccgacgccggggcagcgagtcgccagacaaagcccgagatggcgaagcggagcgacggctaatggcgagccccacgcgccgcgctccgcccgccccgctccgcccgcccgcccgcccgcctcggcgcagcgcagcgccgctccgagcgcttgcccgtcagagccgcctcggcgccgccgcctcccgggccaccccggcctcgcctggcccctccgcctcctccgggcggctcagcctcaccccttccctcccactgctctaggggttgcacaaaaaaaattttttttttttaaagaaaaatggttttcgtcttttttttttctttttgcagggcgggcatgttgagacttttggatatttctgcccccagctcgcactcacctgcggagccgccgggagggctaggggtgggggcgcgcggggctggagccggcgagcgcgggttgaaagccagccaagctctgcagcgcccgacccgggcgtgtacgccgccgccagtccccgcagagaaatcgtcctcctaccccgcctccatcgctctgcgtttctcttccaatcagccggtcgcttggtggctcctccattctccggccaagcccagctgcctagagcgagctccactcctccatctgttcgccggggtcctcgctcccctgccggggccggcgagacggcgtgaggccggagggggatttgcaaggaaacctgcctgcttcccgctcccattgctccatccccgctgcctcctgcctcctgcttctctcctgcgtctttccaactctcccctgtcgccactggtgtgtgtctgagtgtgtgcgcggttttttttttttaattgctctttgcttttgcaaccctgaagcaaaagggggggggggtagttacagggaaaaaaaaagcgagaaagaagctcttagatttgcaacacatcggaaaaccgggggagcaccccgccttatccgatctccatgctccgcaagggccttccgggttttaggacaagcttctcaatgtcccgtttcgctgggtttaggatccgaggagtccgagcaaaaagttctccccctgggtcgtagtgacgggtgtcggggtgggagttgcggggatttttcaagaagcagcagctaccccggcgtcggtcactgggccggggtaggggaaagagcaaaatcccagtgggtttgcgcgagggatcttctagggtcgaggcgggtgtggggggagttggaaccgggagacaccgcttggcgcatctctccctcggtctctacctcctgtcctatgccagctccccctttaatttttttcctctcctttaatctaatttcttccaactccacctttgttgttaccggcgtcacacccggaccagccaatccccgccacgcaatcagcttgtcaaaaagcctcggccatccctaggaaagcaggccgcaggcgctgccccccggcggcggcgggcagccgcgaggggagcccagcacccggttctcgctgccccgggtggcagcggggcagcctccgacaagacgtcccttggttcactgtcctgcaggccggggatgaaaggcctggacagggtccaccacccactctcccactgccacggccgtggttgactgtctttgcctccccttttcagaggaaaggttatcaggacaggacgcagggagccagaagaccatctgaaggaagcctgcttccaacgggcccagcctccagccaccgctcctggggcagcgccattgctcctggctctcaggctgccagtctcccacaccgacgctctactgcccgcatctcggccagctgggtcacccagcccctttcgactctcccctggcacgcagccttctccttcactcggcctgcctcgctgctgctgtaattcctcttgtctcctgggagaaatgagattgctttcccaggacttccacatcccacttctatcaggtttcaccaacagggaggaagccctgtcaagatctggtgtgtcctgttttttttttttttttttcccagagggcactggcatgtaggagaagcggatttaccactagtagatgttaatgaaatttcagcttctaggcccctaacttgcaggacctgcccaaggccctgaacttaattttgttttcatcatttggtatttttttgttaaaagagccaccgaccacctccccgctaccccagaactgca

SEQ ID NO: 64929 - DNA, 1077 bp, Homo sapiens
ttataatatgtcaaaaaaaaaaaaaaaaaaaggaaaagtgaggcatagaactgactttattgttttgactaggaaagagcaaagggtttggaatcaaaagtcccaacttccccaccttcttaatagtgtgtgaatctgagtgccttattaaccttccctggtcccagtttcgtatctgtaaagttagaatagcaatcctgtttaatttgcttctctcaccagggatcagaaggccaaatgagatgatgtatgtaaaattgtaaagtcctccacagatggcacttgccacattacagagaacttgagacccccccccaccaataacgttccaaatcttccacatgcagatctggagtccaggtgtcctggctcctggccctgaactttttggctgggccaaggggcttttcggtaaagtgctttggaataaaacaggatgaacatgaatcataagaatgagtatttattgattccttgggcagcaaaaactatggctggcacccttcccacttggaaacgaattggcttgttttacatctatttcgtctgtggtgaggtcaggagtccaagacttgggctaacggccagagtatgaggaatctgcccttggccctttttctttgccccatttcccagttcatctccctcctcaccctccagccttctggcatgtgccttgaagcagagcgctggcattcaataaccccagcccaggctggtgacaaagcgggatcctagctacacaatttccacttggcctcagtatttccccaggttgccagcatccaagcaccagcttatataaaacccccagagtgcctggaatgcgttaaccaaagtgtggtacttaaattaccagtctacagggagtaattttagatggtataccaatattttcagatttatgtattttaatgcatattggaaatgttctgtttttaaatttttatttaagatggtataaagacacacgtttttgggccaagaatgttattgtcccttgttactttttttttttttttccttgggacggagtttcactcttattgaccaggctggagtgcaatggcgcgatct

SEQ ID NO: 64930 - DNA, 2085 bp, Homo sapiens
caccacgcctagttaatttttgcatttttagtagagacagggtttcaccatgttggccaagatgatctcgatctcctgacctcgtgatccgcccgcctcagcctcccaaagcactgggattacaggcgtgagccaccgcacccggcccactgtgagactttaacccaaccctcatccaccgccctcgaaacatctgttgcctcaacaaccctggcaatgacctctaaagcagggactgtccgcccccctccgccggggaaaactaaggctcggggagacgaggtggcctgcccaaggtcactcaggagtggttccgaaggaagctagggtgccagacctatcgctcgaatgcagtaggagccagggtccttccctcgtccacctcgcacgtgtccactgcgcacctcctacgtgcaggcgcggatttggccctcgtggccccaaaatcagagtacctgtgctgcccccacagcccccactccagcaccaaggccccgggcaggcacctgagagcccaagttactgggcgtggagggacggccgggcatcgagggtgacgtgtaaacagatccggtgaccaagaagggcccgtcgcctcctcaggactgcgggctgggatgcccggccctccccgcccggccggacgggccagacccggggcccggagagaaagagcagtctctgggttcccgccccaaaatgcaggcccggggcgcagccgggagagcgggaagtaggaacgtaggaccaggacgtctccccgaccctcggcgacactcccggccccgaacggcggagagccgccaggtgagggggaccacgccagctcgacggccccagcacctgccctggctcgcacggccgcccggagacccccgcttccgtctccgcccccagccccggcccagtgccgcctacctggctctaggctggtgctcgtgcggcgcggcgcccagggtcaggcgggcccataccggctccgccgcctgtgcgcggtccgcgcgcgctcgcagcgcacctaggccgacgccgaaagcagccaagggggccccgcccctacaccgcgccacgaggccccgcccgccgcgggccgaccagccgcaagcccggagtgtccccggctccgcccactcgcgtctccgcccggacctgcgacggtcccgcccccttgacggggccgcgcgggcgagttccatgcctgtccagcgctgagagctgccggccaacttcgcggtctccacgtcgcgcttaacgtggcagcagcacgcacttccagcatctttttttagacagcatctttttcagcctcgctctgtcgccgaggctggagggcagtggcgcgatctaggctcactgcagccttgacctcccgggttcaagcgatcctcctgcctcagcctccggagtagctgggaccacaggcgcgcgccgccacgcccggctggtttgttacttttatttttgtctccctattttgcccaggctagtctggaactcctgggctcaagcgatccgcccacctcggtcttcgaaagtgctgggattccaggcgtgagccgccgcgccggccttaacagcgcattttcaccagccccgccccggccgcgcgcggcactggaaaccccagcgccttctggacggcgagggtgacgcactggccctcttcctcggtgtcctcaggtgcgtggcggcggcagtgagaatgagttcttcgagatcgccgggagaccacacaataacgacgaagttacttgccgggctacccgccgagacttgaaaacttcgcggcgacttctctcgccggccttagcatcgcccccatttttcaggttacaggacaggcctgcaactgcaaaacgctttgtaaaccacagggccccgcgcgggtgtgcgccactgggttagctgagctgcagcccgggccgggcgggctgggacgtgagcaagccgggggagacgggagagccatggggagccagatcccaccttcgcgtgaccttgggcaaatcacaacctcgcctaaggcccggaatgactctgcgcggagaggaagagcactgagtgcgggagggcatcgacgttttg

SEQ ID NO: 64931 - DNA, 431 bp, Homo sapiens
gggcgggcggggagatgggtactcctagcctgcgcctttaagaagggtaggcctcgactttgacgtctctgccttccccgcccttcaggcccccactggtcgcgtccggcgctggaggagcccagtcagccggcgcctgccgggttagcacgtggactccgaggggccaactatcagctttccctgacaaaatgcctttgagctcccccacagctctgaaactccagcttgggagcagggagagtgcaatctgtgacctgtaaaggggcgctgggcaaaagggcccgagagaaggcgtcctttccattcccttcccatctcaagctgagttcagaaatgacacgaaataatttaatcaactatcagtcaaggtcgggctcacgcctgtaatcccagcagtttgggaggccgaggtgggcggatcacctgag

SEQ ID NO: 64932 - DNA, 875 bp, Homo sapiens
gtagttttagccatagctatgaaaattctaaacgccaaacccttgatccagccaggccacttctaagcgtttctctagtcatctgctcatacaagtgtgaaatgatggtaccagcttggccttcttcattgcagccttctttgtaacagcagaacatcccgtgaaagggaactgttaagtacgtgaccctatctccatgtgacaaatccacacagccttgaaagggcggcattccctgacctatccaggtggggtggggggtgagggctgcagatctctatatcattatgtaaaacaatctcaaagacagagttaaattaaacagcaggtgctgagagcgtgctggacactcgttccaaacagcagcgttactgccccctagaggacattttttgaaatttatgcggccactgtcatttctggttgtcacaagactggggcttctggcatttgatagatggcaggtcagggaagctaaatgccctgtaaggtgtaggacagtctgacacaatagggaatttccaacaacaagaacacatctctcaatttccttctgtctttctgggcaattacatacatgaggaaatgtttgcaattctcagacctggaaaatggttctgttttacccatatacccacacctttttttttttttttagacagggtctctcactctgtcgctggttggagtgcagtagcacgatcacagctcactacagcctcgacctccccggctcaagcgatcctcccacctcagcctcccgagtagcacactcctctgcctgactaattcgtttgtatttgttgtagagacagggtttcgctatgctgcccaggttgtaaccatacttcttttgaatacttatattctgctat

SEQ ID NO: 64933 - DNA, 1284 bp, Homo sapiens
gaggctgaggcaggagaatcgcttgaacccgggaggcagaggttgcagtgagccgagatcgtgccactgcactccagcctggcgacagagtgagactccgtctcagaacaaacaaacaaaaggatagaaaggcgagcacaaatattcccaattcataacactccctcgcactgtcaatgccccagacacgcgctatcatctctagcaaactcccccaggcgcctgcaggatgggttaaggaaggcgacgagcaccagctgccctgctgaggctgtcccgacgtcacatgattctccaatcacatgatccctagaaatggggtgtggggcgagaggaagcagggaggagagtgatttgagtagaaaagaaacacagcattccaggctggccccacctctatattgataagtagccaatgggagcgggtagccctgatccctggccaatggaaactgaggtaggcgggtcatcgcgctggggtctgtagtctgagcgctacccggttgctgctgcccaaggaccgcggagtcggacgcaggtaggagagcggccgcgcagacctctcgcctgctcctgcccaggggcccgccagggccatgtgagcttgaggttcccctggagtctcagccggagacaacagaagaaccgcttactgaaactccttgggggttctgatacactagggggagttttatgggaaagaggaagcagtaattgcagtgacgccccgttagaaggggctttctacctccccagcattcccccaaagcagggaccacaccattcttgacccagctccacccctgtcggtaggtgctggcttcttcccctctcctggtggtggtgggtggttcccgcggcggcctggagccggaggggcgcgcgaccctgggctgggagctccgagggcctgggaacgagacctgagaccttggcttctcgaaggtagtagggacttgggagtggtgactgaacctggtctggctcctccttacttcctcttgttgcgggtgggacgagctagcttccgcctctcccagccactttttcctgctcatttgcagctaggttggctccccttttgggaatttcctctccccttggcactcggagttggggggtgccacctagtggaagataacggagctagggtcttgaagaggctgctgtcccctctggctgttttggcggtgtagggtggcatgagagactgcgactcgcctcctcatccctgtttctgtatgcgagtgcttgtattcagtagaagcatacactatactccct

SEQ ID NO: 64934 - DNA, 2053 bp, Homo sapiens
aatcccttttagtcttcgagatttccgcggtaacaatttcaacagaaaggtattttcaacagcgaaaaaacaagttattctaatttggcctttattttttactcaatagagcttgccatcgtaagggcatttttccatactaacatttgcaattgaagaaagaaaaatcaagcttttggcactagtgaccccatgcgtggacggcctattatcatcacgcttctcacaaatctttcgagataggatttgaggttaggctcacatcggatcatagtccagtaacttactgctttccaagcccaattaacagcctaataacagcaacacttatgccccgcgaaatctcaatgtatgactaaccaataaggcgtctgatagcgaaggcaaccttttcccaggtaaggaagaggaaaagcagacaatgaaaggaattgatttatcacagtgaagaaagaaaagagaaggaccccaaaaggatccgtgagagcaaaatcccggggttcggaagccttggcctcagcaatactctcccccaagccctctcagcccaacccaaccacccctcttgtcccctgggagccagcccttcgccggcacagatcgggcagacctggagggcacagcccctcacacggcgctcaggcccggttccgaaatccgatgccaaacaggcggaagccgcaagccccgcggcctgagtttcaggggtaagagaatgcgggtgcgaggagatgcggcctccctcaagccgggaggcctcttgagaaagcagagacgggagaagagcgagctggttcgcaagtcggagcaaaactggaaggaaagagggctgggagccggagatgaaggaggttctgggctagaccagcgccttccccgcatcctcggcgacgcccgtgtttacctgaaagtctcggtcttcgttgaagcgggagaagcggtccgccattttgccgccttcactcctctcaggacgacgctctccggttcgctccttccctcctgcgacacccacccctccccggttccccgcctcctcccacgcccaccgggcgcgcgcagccgagggagggagcgagaatgcgcgtcctgacgggagccccgcggcgcaggcgcctgccagccctggaggctgacccttccctctagcccctgctccgcgcgcgacccggagcgaccccggtggccgcgcgtgcgcactcccgcccgagagccgcgagagcttccggagggaaaggtcagagggggcaccgtgcggacaaatctggatgttttgctgttgctcacttccgggtgtcttttctcactgttgcttccccgtgtgcgcagaagtccatcgtcttcactaaatagcagcataatgttgggccgaaagcgcgaccttagagccagactgcttagcttcgaatctcagctcaccctgaggattcaacggtgaacgagacaggaatgatctcctcttatggggatttcattccagtggaagaactcacataactcgtaaaataaatatttttaaatatcaacaagtgccacaaaaaagtaaaactggccacagtgctgagagggacagtctctgaaaggacctttgaccgaggcacagcgaggagcctacagcattggggcatagggaacgttagacccaaaggcccaaagactgcaaggagcttgacttcgagccatcctttgagagaagtatttcacaagggaccgaagttgatccagatcgactaaagctctctgggcttcagtttcctttttatacaatagggaaattggattcagtaatctctgatgctcctgcctagcgctgactatgagagtcaagaatcggatttttccatcccttctgaggacctcacccagtgctccaggactcttagccaaaatacataaaacacatagaagggtggcaggacttctctccttttgaaaagagtagttgacagaaatcacacaatggaaaaatgggtcttaccctgccctgaaagagtcaaatggaatgtaattttttgaggaagggtgtgtattttctagctgttaccctttgccc

SEQ ID NO: 64935 - DNA, 668 bp, Homo sapiens
taactccctaagagttctgggcttaaaagttgccccatatttccagcattttgcacctctgacccatcgctttagctgggttccccatgagattgcctatgctgaaaaaaataactggatctggggccggtggggagtgcacagaaaggcaccagtgtgacctccacatttgtgagattgaggacacccaatgagaatccaggctgagagaggccatgggcatgaccagccagggagctgcagcacttgacagataacattgttagactgtgactcactctctgcagtctggaaagctcaacctctctgcttggccttcccaggagggccactcagatcatgcaaccctctgagctccaggttgggcaggcagagcgggggcctcttaattccagagctggactgtttcctccccttcaccccacatggaaaatcccacatgttaaaaggttatgtgttgggagcctgcagggagaaaaaaacttgccccgtttgtgctttccaagagagaagcaggagccatcggagctcctgaccctgtccaggaccctgtcctctgctgacccacggtggggacccaaacccaagctctggggttattttcttcctttgctgaaggctgttcctcgaccttgaggcactcacatcactctctcctcattcccctc

SEQ ID NO: 64936 - DNA, 1908 bp, Homo sapiens
gttgaaaaagtggacatctgggtgacttactatgtaaacatagcttaaagtacacatttctgaataccttgcttctaacaggctaaggactaagtttctctctcttcgttaaagctctgatctctctcataccctccttcccaccaccaatgattactgtaaatactgtaatggatcaagcacgacgtttgcttcagttctgcgtgggcatgaaaagacttctaccaccagcttaccttttatggactcctacatccatataagaatcaaaagggcacttcctgcaggcttctgtcatgggacagccctgggaactgccttgtaataggcacagacctcccaagagcattttaatacccccagtgaacactgtaaacggatggaaatggaattggtcgtcagatatttatgataacattcccattctgacatttcaatgccttcggaagaaccctcctcggctcactcacaagcatcggagagggccttgtccccaagaatacgagaaagcccttcctctctgtgtacctgcagctttcaggcttcccacacctggttggggagcaacctccttcccccgccgcccagatatcagaggagtatacctctcccaggtgagaccactgagcctctgggatacccggtaggggagggagggtgcaaagtactgacaggtcctcagatgctggccagaggctgaaggaatgtgtccaggctactcaccaggaaagcagagaggatcccctgcagagcgtccagcttctcttcttcctcctcctcctgcaggatacccaagatgtaggctccataaacggctcggtccactcccagtgcctccaaccgtccgtccagccaggagccaaagccgccgcctccgccatcgccttcgccaggggctatcgcggccacttcgctgggcgccgccatcttggggtcagggtcctgcaagcccctagggcgcctaccgcagtgcctgacgggccgcgccgcaggtccaccgcgcatgcctgaagaggaagcccaggcccgtaagtgcaaagagcgcagccgtgtcggccggcttgagagttttgtgctttctagatgaagcgcgtcttcgcatacgtgcggtcgcgtgatctcacaagatgcttggcatgtgagtattcttaacagactcattctacagttcgggaagttgagagaggtgcagtaatttggccaaagtcacgcggctaataactacccaggactggagctcagcgtggatgccatcgcttcctccacccgaccgagctgccttccccgcgctttcgggggatgctggccgcccactcccacacagctgtctggcaagaacctcctgacagcctggaataccctcgtcgtcgctaccgacggctaccaccttcacctgtacaagcccttccctgtcaaagtaaaggttgcagaaaaccttccctgattccatggtaggcactcagtaaataaacaggcaacctcaagttatttcttccactcattgattcaacgcgtgcacgggactattctttgagaagcgtaccccaccctctgctaggcactgtgccaaaagcttttcatgcattatctcttgtaatcctccctacagccctgtggggagatgcttttattgtccacattttaaagataaggagacaggccgggcgccatgtctcacgcctgtaatcccaacagtttgggaagccgaggcgggtggatcacctgaggtcaggagttcgagaccagcctggccgacatggtgaaaccccgtctctagtaaaaatacaaaaataaggccgggcacggtggctcactcccgtaatcccagcactttggaaggccaaagtgggcagctcacctgaggtctggagttcgagactagcctgaccaaaatggagaacccccgtc

SEQ ID NO: 64937 - DNA, 1150 bp, Homo sapiens
ggggcagcgaaacaaatgttctgttttgaatgtgttcagcctgaggtgcctattagacatccaaattgaaatagccagtaggcacttgaatatgtgagtctggagatcagacaggtcagagctacagaaaatctgaaggtgtggcagagctgaattgtaaagctgtggagctggatgagatctcctagggagataagggagagggataagggctaaagcgttggcatactccaaaatatataggtgaacagtggctttggatccagcaaaggggactgaggaggaaccattgagatagggaaaaaaacggtagagtgctgagtcatggaagcaaaaagaagaaagtatttcaaagaaggaatagtccatctataagttggatatgataaggatagtatttcagactgtggaaatcacagttgacctggataagtacagtttttgtggggaggtccccagctctccactgaatgatctcttattagatcaaatttgatctctaattagcagtctaattagatgggttgaagaaaagatgggaagtgagggataaagatacgtcttttgagaagttttgttgggcaggtaataattgaagaacgggagggggacaaaaatgtgaagatgaaatgatgtgtaagtgaaatctttatgtaaactgcaaatgctctgcaagtgttaggcttattttgttatttagtattcaaacttctaggaatttcaatgcagctcagtgtgaagaatcactaaaaagcgaccactagtcctcaacttgagggccattaaggggcaaagccgtctagccagtgaagagccaagaaatgaagagacggtttgagaagacgtaggcggtgggggaacggaaagaggaatcgcgaaactaatattgtccttccaaggacaccgtagggcggatctcgcagctacggcgttcttttaggggtggagccggcaggaaatttaaactgaagccgcggccgaaaacgccaagagattgatgctgtagctgccctgagataaccaggactgtggaatcgggaagagctcatggagctcgcgaatgtaatacggaggcctctgaggaaggagtacggaggccgagaaggagccggcatttgatgagcgaaccgggaaagggtacggatgccgg

SEQ ID NO: 64938 - DNA, 541 bp, Homo sapiens
gtacactgaagaaagtctaggtgtggggccaagatgaagagctcactttggacaacacaattcaaattacctcctctgagtatctctgtggagatgttgaacaggcagccaggataaaaaaagaggtctggctacagataaaaatgtggcagtattcaaaatatatatggtaaccgaagccacagaatggataatttcaggaaggaaaattttgaatccaaataaacatctactctggatgggcaattaggaattccaagtccaagaatgactcaaggggaattcctaaaatagagtccagctctaatttgaacgttcccaaaaggaatgttataactcattagttaagtaataataaattaagccaaaactgataaatactacaaacatgtgaatgaaaataatctctataactattgggagttgaatatagtttagagattagaggataagaataggggtgtgtgaagtttatccgatttatatagaggaaaaacatcaaaacttactctgaaaccctatgcatttctttcctgttttt

SEQ ID NO: 64939 - DNA, 1411 bp, Homo sapiens
tacatactctccaacttcccactttcactgttttattgctattcacaaatgttatacatttatcactagctgacttgtatctagttgtttactgttcatttccccaactacaattgaagcaaagactttgttcacttagtactgtgcctagcatagactaagccctcaataagtatttactgaactaatgaatgactctaacaaggtacacagaatatagctgatttgcccacagttacacaaaactagcgactcatggtaacaaacctcactgccgcttcccgctacaatgcaggagctcagaggacttcggagggaacttggcaaagaacggctgaaagcggcacggatagaagaggaagtgagcgaggggactggacagttagagcaccactcctacctagcgatacgattttacggactgaggctatagaggcagccccgaaatcgaggtgtgtgcgtgtgtgcgcgcttcggaagccttgggaaggcacgaggacgacagggtcttccattctttttcccgctccaggcctcaatttaccgatccgtaaagcgaaaggggccaatagcatataaggccccttccagatctgacgctttttaatttcctatcccacctggagcaacccttccgtgccgctgacccgcttcaacttacctctcgcctgctcagctaagagttcccaggccgctgccggagatcgtgcttccgccccacgccgaggaaacgcctgcgcccgccgccaggaaggaccccgcagacgccgctgtcgcctttctgcccgggaggacaaccctctgcctgaggaccagttccgaggtatgcccgccgcggactggcaaggcggagtagcgggtccccaagacgagtagcccaagacgtgggctgctccaaagagggtgagagctgaggatgaacgaatctgatcaggcgcctcgggaccaccctgaaaatggggggaggggccttcgggcagatcacgtggtcaggctgttagcgcagttgctaggcaaccacagctgcgggcgtggtctgcgcggggttgccctcctgttctggtttatcaggggatccccaaagaaagcaaggggaccaaggccgggactgctggggtgaaggtccgggaggctgagtaaggggacggaagggttagttctatgtattaaatgcctggggagggctgagaactggacacctgatttcggttactggccaccccagccccttcttggcgttcagattccctacgttggggtagggtggctatgggattggttggggacttcctgcttccttgcgctagggctgttggtgatgaccccgccacaaaatctagctcaactcactaggagtttgcagttcagagaggtcccacaagtaaatgccagagccacgactagaacccac

SEQ ID NO: 64940 - DNA, 1555 bp, Homo sapiens
tcatgcttgtaatcccagcactttgggaggctgaggctggaggattgcttgagcccagtaggttgaggctgcagtgagctgtgtttgcgccactccagcctgggcaacagagagagaccttgtctcacaaaaaaaaaaaaaaaaaagggaaggaagggctgtaccagatgacctctgacctgctttccaactttttgatttcataacccaggcattatctcactcagctgtaagtgcctgcaaggtgctgggaatttggcgaagaatgaacctgttctgtaccctcaagggccacctcatttcctactaggcctcattcccagcagactcctggagtccttcccttgaacacagatgtcccacattcctgctctctgcccattcattccctggagttctggggctgggggctgggattggacaccagccctttgtctaagggtcaatcatggcctctatgtggcagtggaggtcctgatagggcaagagggggccggcactctcttgccttatcaggactttagcccctggatctgtccctccaggtcaccccttccttgtctggcctccctgtgcctctctcccagagaccaggccttgacagctccacaaagccgttacacatgagctggctgtgctggctcgtctttattcctgcagcgccccgtttccctggccacccctccgtctcccactggagatttatttcctcgagttcccacacatcagcctggagagatgggaagaacctctggggatggatgggtttggaaacgctggagccactgggcccaactaggagcctgagacctgggccctgttgtccctggagacttcaggtccatctacgccctccactctggtcccacagggtcagaaccctgcccagtcccctcacccatttgtgtccttggacttctgggaagcagacagccctcctctccccccctgccacccactgtccatgcctgggcatcccctgatcccctttcctgggcacaggctgaatagagccttgttctccaccgccggtggcgccacacagcaagggcagcccctagggggctgtgctgcttttatcccaagatgccaggctgtcaggctggggtgcaatgcaagccccctgctcaatgggcttctcggaaggcatttgaggggggctggggtgcggcgggaagcaggcactgtgcccaccccgaacattgtgtctgtgccaaggtgagtcattcactgggcatgaagaggaggccctggggggcggccagcccaatgctgccaggtctgcttgcagacaaggcctggctgtctgcctcctccccagctcacagagccagctcaggcccccgagcctctgtcagagcagcgtcccctactccacaccaggatatgttctttttttttttttttttttttttgtcttttgagacagggtctcactgttgcccaggctggagtgcagtggcgcaaccacgactcactgcagcctcaacctcccagccttaagtgatcccctcacctcagcctcctgaatagctgggactacaggtgtgtgtca

SEQ ID NO: 64941 - DNA, 1148 bp, Homo sapiens
cacccgccttggcctcccaaagtgttgggattacaggcgtgagccactgcgcccacccactccttttaaaatcacattttcaaactccttctttccagaagataggaaagctactgatttctgcatgcagatcttgtatctggccacattgctgaactcccttattggttctaatagattgtcattgattatcttaagtctttcaattaaatgatgatatcgtttgcaaataatgagagttactttctatttttagctcttctatgtttagctccccacctccactgcccattaggaaggtaggaatgggtgttgaattttatcaaatgctttttggcacttgttgaagtgatcacacatatttctcctttaatctattaatgtagagggtgactcaacagatttcctaatgttgacctggtaataattccaaacatatatttactcattcactcttatatcatccccagacctctctccctggtttttcatttctctttcgaaacagcgtaccaaaggtagggatggaatttttggaatgcagcgtaccaagggtagggatggaattttggaatgcagcctggaaaagttcagcccaactctggggatatattgacaggggtgaggaacaggggctgttcctgggcgttatgaatagatggatgccttccaggtaaagactagcttccactggtgggtcacaaatgccaaggtcattcagcaaagaaaagtggggtttctacctgacactctagcaaacagctaaggttttccttggggaatgagacagaactgagctgatttgaaactcctgtcccctcatccctaaacttcttaacttcgtccccatataaaacaagaaaaagatatcaaccaaccataatccttttacatgtatgtaattctattcctgtcccagcaatcagattgccatagtaagcatattagctaagtgctcactgcatcaggaactgttcaaagcaccttatgcatatcatctccttttatccccattgcaatctcacaagatggatactattattatactcatttttcaatgaagaaattgagacagagagggttaagcaatttgcccaaggtctcaatgctagtgagtgatggagccccattccaatccaggcagtctg

SEQ ID NO: 64942 - DNA, 3219 bp, Homo sapiens
ttgagagacatgactagaaggcaggaggttggctgtcgagtggggagtgcttatcaggtaggggtggggcaggtttcccatgttatcttggaaggtatttctggctctacagttcctgatgaagacatactcgagcactttaggccaaccattggtaaaactaggagcagaactcaggagtcctggatgcctgcctctccagtctccagtgcagtcccacctctcctccccgctgctcctcgattgctagctccctccctgccagtttccaggctgggagccccagctggcggaggatgtcttgctcctcagcagctgggatttgtaaatatttataggaacatggaacagatcagtggctgacaggcccagggagcgggcagggccctgcccggagctcagcagcttcactcccccttcccacaccctggcctgatttgagggagcccaggatgacaaagagggggtgatcaaggagggtatggggccggcagcctctatatccaggaacacgagcttgaaggatgcgtttgtccatctgccctgggctccgctttcacacccagtcactcacatccttccaccctcaccacagctcacctgcgtgctcatgtggccaaggccacactgacccccaccctcactctttcaacacttcactgtcacactcacacatgtacacacatgctttccaactcccacgtccacgttgatactcactctcataggctcacacttttgcacactcaccacctcatgctcacagacccactgggggcccagatcccagccactccccataggtcttaacacaggtcctgggagggcaagtcctgtttcctatctgaggtggggtatgagtgcgtgtgtgtgtgtgtgtgtgtgtgtgtgtgtgtgtgtgtatgtgtgtgtatgcatgcttgtagggagcaggagggaacaggtcctgaagtcaggaagtgaggaagagggaggagagagggagagaggcatggaccaagggccattcagagctgatagaagcctggtgtggaagcaaggcagagacaaaggcaaggcaaagaaatagagactgacaagggtcaagccagagggggaagggggtggggaccgaggcccccccacccagatgagaagctgtcacattgctgctccggtggccatgagaccagcaccacccccagctggagcctttcccctctggatcttgtcactgtggctttgctgcttgggcagccgggagtggtgacaagcagggaagacagtccccagggcagctggccatgccactccagcctggctgccagctcacccatcactgcccatctcatcacccacaggggcccagatgaaaccaggaatcggcctggctgcccttgcctcccagtgtcacagtagagagcaggggagccactggccccctccccaaaacgtgggcagtgttaaccacaccttgcccaggtccctggaccttgaagctggacttggggagaatgggccaactctctgctcccaggcacccaggacctgctagacagggaaggaactggtgaatgagacagggtgcttgaggagggggttggggaatgaagccactatgaggaacccagtgtgttttgggcataaactttttatttcgtcgctttaccatgcacaagaatgatgaccccacatgcccctggtgctgtgttaaataatcgtccttctcgcctcgggtctgtctcacggtattagttctggggcatcaatcagccagtttgtgctctgcaatctgagaacaatcatttctataaaatcagtaaggcaaaaaaggaatcataatacaaaggagggaaagttgcactgactgctgttttcctgtttttttaatcagcagtgcagctttccgtccaggttttgatgtcctgattgattcatgctttcacgggttcattcatgtatttactcaacaaccattgctcatccgagtgccaggtcctgagctgcgtcctgggagccagtgagaaagccagacaaggttcttgcttacatagtgtttagagttgatcaaaaccaaacaaacgcacaacaaaatgtgattcccccaaggggccagagagcagtgtcagagtgcccagcctggggacccagacattgggctcttccagtggaacacttggaaatcacccagaattcttctctcgtcccaggatcaacatcttcccatccctctcctgccttggcagtttcgcttttcctaacaatcaggccatctggtaatggggggatgtacgaatgtgaaactgaatctcagcttggacactcgctggccaggtgaccttaggcaaattgcttcatctctgagtcacagtttatttacttttctgtgaaacgcagtaagtaatacccatcaccagggtaccattgactttttaagtatatacgtcaccaaagaaggtgcctggtacacagtagggcctcgaccagtgctagtacctttccctgcccctttgccagtgatatatgctgcatctctcctcacaggcaaggaaaggaagcttagggggtatggggagtgcaggaggacccagcattccatgtgccattaatctatgttttatgctgtcttcccaggcatctgattctgttctgctctatgggaagcctcttatttaaggggaagagggtgaagaggcctggctttgccacctgaaccacctgaatactccagagaaacagcccctttcttcactgtttcttctttctctggctttcaagtttataaaagcatattgtgggtctggtggttatggaatggtggtggtaacagtggtgtgatggaagtggtggtggtggtaatgatattggtggtggtgatggaggaggtggtggtggtaatgatattggtggtggtgatggagaaggtggtggtggtggtagtgatggaggtgctattggtaatgatggtattggtggtgatgatgcaggtgacggtggaggtagataatagaggtggtaattgtggtggtggtggtagagatggtggtagcgatggaggtgatggaggtagtagagctggtggtagtgatggaggtgatggaggtggctgtggtggtggtggtgatagtgatggaggtgatgttggtaatgatggtattggtggtgatgatggaggtgatggtggaggtagataatggaggtggtaattgtgatggtggtggcgatggaggtggtagtggt

SEQ ID NO: 64943 - DNA, 1355 bp, Homo sapiens
aaggggtggaggcccaggttttcctgactctagatctgagacaatccagagagatgtccctgcttccccatgggcattgacccacactggatcactcactacacccagcccctcctgcagccactgcccccttcccacactccaggaatcttccactagaaacagccccctgacaaatcccattaagacaaatgcctcttgggcctctgttgaagccgaagtctgatttgagttagactctggcctacgattccccgtcaaagctgctgccttcaccctgcaactaaagccatggctcctttgtacctgctgccactcacatacatcagggtagaagaagcaatggccactgctccctgggacatgcccatttctctcccacccatactcctccacctgggttccgccttatctagctactccttgaagatgggcatattcagtgattctaggggactgtttctttaatttcccccccgtctgtccctggaacgtgataaaaatacccagcattgatctttttttcttccctttctgccaggataatgtttacccaggtgtcaatcaggagaagaatttggcttcctaatttctcttctcctccctgggggccgcacatctccctgcctcgcatggacactgagctggaatcaaggttactaataatcccccagcacacacagacaccgaaagcacatatattaaagtcacatattgatttatattttcgggtccctctgcctttctgcccagcctcagcctttctctttgccaaggagaaaaaagaattacacagccatatttttcgccaagatgtttagtgtaaagagcattgtgtctgaaggtaattcccgctctcccaccctctttgcgggtattttaaaaaaatagtgtggcattgcctatccatatgcatttatctttttgctgttcgttgtttcaattttccctgagggtaccaaagagagatttaaggtagactgtcagaaggtcttcctggcttgacaaatggtgggctgccatctccaaagaggctggttgtttcgccagcagagataatcctattgcaggtaggggtggagtgggtaagagtgagtgtagaaggcagggcaatggattcagcagcctctagaggtcaccccaggctgggtgtggtgactcatgcctgcaatcccagcattttgggaggtcgaggcgggagcatcacttgaggccaggagtttgaaaccagcctgggcaacatggtaagaccctgtctctaaaaaaaaaaaaaaaagaaaaaaattagccacgcatggtggtgcacatctgtaatcctagctattcgggagagtcacctgggcctagaagttcaa

SEQ ID NO: 64944 - DNA, 1125 bp, Homo sapiens
tttggtatttttcagtggcttggttgagtcgcctcgaactcactgtctctcatttcattctagagcctgttttaacccctagcagggtgagaactaatatctgtggaaagtcactgtgtgccagccctgggcagggtgctgtccctccatgctgttgaccccacaaggtgaaggttgagcccccatgttatgggggactccgaggctcagggagcataagtaacttccccaaggtcacccagcgggtaaggggagttcctatgacggggcctggtcttcctgaccccaagtccttgctttgagctcgctccacccatctgctgtctccgtcagacaagccaggtgggggcaggggccagacagcgcagggcgcggcgggaatcagcaacaaggaccctcccggggaacttttcccattgaaaatctgttccctcgcggccacgggtgatgtctggctggagctgatgaaaaacgtgcagtgtaatggaggagggcggcgagggcggcgagggcggcgcgggcggcccgggcgggggcagcgtggcattgagattctgcggggcgcggggggcggcgagggccctgacactggccgggtaattgatctggaggtgccaatttgcagcaactaaatatttggtttctgcctttgcccgctccgcgctctgctcaaacaaacttcaattaaaagcgaaaagcgaggggtggggaggcggctcacccgggtccctgcggcccgatcgatggcgcggagcccgcgggctggcgagcgcggcgcgccgggcggggacacggcggacgtgggccgggcgggcgccctcttccggatcgccgagcaccgggcgcccggcccgcgggaggcagcgcccgagggtgggatggcggaggcggtgctaggagcccgggagccgcggctttagctcagctcagctgagcggaggggtggccaccgtgtgccaagcgggggtcacacacagggccaaccccaacacctccaccgcggagtgtgagcctgtgtactaggctagaaaacccggggaaggagacgtcgcggggcgctgaccctgttctccctatgcacctctccaaacaaactttgaagatgaccttgttgttcggtgcaat

SEQ ID NO: 64945 - DNA, 1420 bp, Homo sapiens
cttctctcccaccatgtccgggggtctccctgcccactcctatatgaccccatggcctgaagtcatcactgccatcgcattccccctcctgctctgagactgtttccttctgacctaaagtgccttggtgagaactaggggcgctcagcagcgcgcctatcctgctcccattcaatttctagccatggaggctcatcatggaaggtcctaaacctttccctgcctctgccctgccccccatgaggagagagagagaatgaacatttgaagaagagttgtcaattactaaagagccaaagtgtataatgggggcagtgcagatagccggaggagcactgtactgggagtcaagaagcttggtggttatacctgttggctacttaggccccttggctcaacctctgagcctctgtaaaattctggacctgtctgcctcacacagctgggagatttcaaggggataactggaacgtgctttgtaaactgtgaaactgcgaatgaccttcgggccagtcgggcctgggggtgggggtgttttagaggcctgcctgcgcccttcgtcccccgcccagaaggcgtgtgcgtcttcaccctcgctggtgtcttattgctccgctccgggtgctaaggcccaaagtgagggaacggaacgcggaggctgcagggtcccgtcgccgtcgcggtgggtgggcaggggacacgccctttggcacccagggcccgcagcccaggctcagaggacgtgggcgaacaacgcaccttttgagttagcgctcagggtcaggcagagcctccgcgcccacctggcccgtgctcccgcggcagctgctcggcaggagtctgaggccgcccgcggcctgggaggaggaagattaggccgctcggcgagcgcccgccgcggaggcccggcccagcccgggagggtgctgccacctgccggccgaacggcaggccgccggctcgggcgcgggcctgggtcccggaggcccgacctctgcagttgctgagcggcctcaacttcaagtccccttcggagaaagtagtccttcttttaaggccgccttggacccccaaggccgggaaggggatcctggggcagggaggcaagaggagctggagagggagctctggcgaggcccgggcagggcagggctgaattcgaggtttctccacacctgccatgctctgacattcctgcttcaaacccagctcactgggtcagggaaggttaattctctggaactttacagtttgctaagggttttcagtgtcctccactatgaagcctaacgatgtatgagtagaaactaaaggcaggaggtcacatggcaagcggagccggaatgcgagcccaaggcccaaccccaggctccagctcctcctgacaagaggctcagggcacaggagagagttcagaagc

SEQ ID NO: 64946 - DNA, 1364 bp, Homo sapiens
tacaggcaccaagaggggctcggagaccatttaaacgttatttaccaaggggacagattcagaccttggtgaagacagacagaggaggatttggtgggaatttagggccctgctgagacaaaaaccacccgaacccgtctgtccactttctatccatctaccagatctctagcatttcacccctttccccaggcctatgccagcactgtgccacaccaactcaatcttgatttattcaggtaaaatgagcactctccctcctgcaaaaacaaacacgtttaagacataaaacatattcaaaggcttccatttcctcaccgttagaattgagacttaatgtcaaagttcacttgggtaggttgaatcattttcccacaactaagggagagtgaaaaatctttgaaaactctgtaagcaaacacctgaaatgccaacgcctcctttgcggagctggggaaggaagagacgggtggccggatggcctccctcactagttggtgggcgtgagatccacgccgccccagtcccgggggccttcactaaaaccttaactggcctcccaggggagagggaagcggaggagaggggtctgaaaatcggagatgatcactcagctcaacagtaaagcactttatacccaccctatgggacagatactgtagctttattcccatttttcagatgagcaaacttgggatcggaaagataccccaaggtcacacaactgaagtggcagaagctagattcaagaatcaatcggcccgcaaagttctaaagggcagtggctttggtctgatcctgagtttgaatccacaatctccagccctttctagctgtaaaccttcctgcgcgtcctcagccgtaaaacagaggaaataacacgttgcttggtagggttgctgtcaagacaatgggccgtggatataaaagcacttgccttagtgctggccgcatacgacgcgctcaatacatcgtaactcaggctttcaaaagaggcccgtacgccccactaggccgcgaaattgggtcgcccggggcggtggcagccccgcgtagcagccgcggccagggcccgccccctccccggcgcccggctggctctcaccggcccgcgtggcgcgctacgtacccagcgcctccgccgtggcccaggcctccgcctctagcccaatctccgcagcgcttacaggccggctcagcgggcgaggcgggacctcgggagcgcgcgcctgcagaccggacgtccggccagcaggcggggccgggagaggttggacgggcggggccgggagaggttgggtgggcgggcggggccgggagaggttgggcgggcgggcgggcggggccgggagaggttgggcggg

SEQ ID NO: 64947 - DNA, 2194 bp, Homo sapiens
gttgcagtgagccgagatcgcaccactgcactccagcctgggagtcagagagagactccgtctcaaaacaaaacaaaacaaaacaaaggttgaataataataataggacctatattgtagacttgttgagaggattaaatgagataatgtacgaaatgccttactacagagtctggcacttattaaagaaagagttgatgtgggctgggtgccgtggctcacgtctgtaatcccagcactttgcggggttggggtaggaagatccttagaggccaggagttcgagaccagcctgggcaacaaggcgagaccctcgtctctacaaaaaatatataaattatccgggtgtggtggctcatgcctatagtcctaggtacttgggaggctgaggtgggaggataccttgattgcagtgagctgtgatcttgagccattgcgctccagcctgggcgacagaaggcggccgtatttaaaaaagaaaaaagaaagaaagaaagaaaagaaaagaaaaaaagggtcgttgtggaaaattcttgtggggaattaaagggaccacgtgtgcgcgaaagagcttggcgaagataagtacctggaggccaagatgaggcggcgagccctgcctccctagcagtgtggtctcctggcttagggtcagtgcttcgcacaaaaaaatccactgcctctcatgagaccttgaactgccaatgaccgcaggttgcccagactcccgagtgaggaaggcggccaggagtcaactaggcttcttgcggaaaagcccactctaagaaggcctggggcattccggctccaggcaggtagcacccgcgggcctcaggccctttcacttacccgggaaacgtaacggtccttaacggcagccaataacggctcccagcggcccaggcactggcaagggcaggctgaaatcaaacctcggattttggaacctccacgcctgaaaccctaaaccagcatcgaactacaactcccatcatgccaggcggccgcccggttcccaagggtcggtcccaccaaccttgcgccccttctttcctcaaagcgtggccgaatgcctaggcttccgggtatcagtggccccgcctcttaatccgaccggagccgtccctcgtgattcctgggtattgtagtcagtttcctgggaaagagtcgctcctagtggcagctcgcttcgccagaaaaactacaaaacccagaatgcagcgcaaattccccttgtccaataggaaccccccatgtagtggggcgcggagccctgctctcgcaactcaagatggcggacgagagtgagacagcagtgaagccgccggcacctccgctgccgcagatgatggaagggaacgggaacggccatgagcactgcagcgattgcgagaatgaggaggacaacagctacaaccgggggtaacgaaatcctcggagtccaattcccgtccagcctcccacaacctgggtctctggggtgcggggaagtcaccgggagcttagtctagccccaccctcatgttcttattggctaagtcactaggattctgcctggcgattggttattgcctttgtcatttaccaagggtgggtgctctggatattaagggccggagacgttcagtacttttattatataaaagttctatgcagtgttccactcgtgtgcttcaggccattcctgggaaaagagcatgttggacgatggttttcgatggtacaacacaggacagtctagtaacagtacagttcaaagggaacgttacttatagacgtgttgtttgaacaacgtgactagcaataaacgaatcataaaacatttcgcagcagttcaccctcagtgaggaaactcatcagactatacaaactgtatgtataattatattgtaaaatatcactaccagagaatcccaaaatataaactcaccttataaacctatgtaattaacggtatggtaatgctttgatttacatagtttccattgctccaaataatccataagtatcctgaacgatatattaatataattaagtcttcgaacatctttgccttgttacctttgcagagcagccccaggcttcaagaaatgagcgatgttgtttcttggagagtatttggaatcctcgggctccatactgcctatcctgtactttagggtcttgccattagttactatttgttcctagggatg

SEQ ID NO: 64948 - DNA, 444 bp, Homo sapiens
cctgggcaacagagcaagaccccatctcgccagtcatgagtttcctaactagggaagaaaaatatgacctctctcccaagcaaacctgttgggaagcctgattaccaacagagcaggctgcttccctgttgtgtgtccctgcactttccagatcctgacctgcagcacgtggataatgactcatttatttactatttccccagaagatggtatgtctcatgaggacagggacttggtcctttttcctgctgtacactaggggctggcatggtcactgagtcactggtgcacggttggtgctcagtaatgtgtctgatggaagagggtgagatgatcagtgccagcggtggtgtcgtgtgctgcagcctgatgcagccctttccaccacacttgccccacagattatcattctgggaaggtctagagcttcctgttacatgttag

SEQ ID NO: 64949 - DNA, 1638 bp, Homo sapiens
aaaaaagaaaagaaaagaaaaaaaaaatatttgggatcaggagtctgaaagtcagtaaaagcatgaattgagtgcctagtctatacagagccctttgctaggaacactgttactgggttggtcccttttgaagactccattttccaaaatgcactaaacattgcattcttcccagtgtaaacatgagtgagcccattgtagaaccgaaatcatcccaagggccagaattcagtggtgaatctctcagcatatatgagtccgattgagctctggataggaatgagggctgtgtctttggagcactccccacatgctcccacagaggaggggcctatcctgctcagggaggggatgttgtgtcagggtgacttcccggcagcactatgtagacttggtgattcagcccaaaggcacttgcaggactctaaacactgagggcctgagttggcagtagcagttaactggctcacgctgctgaaagccaaggctggcagggccacgattgagcctggcgcctagaagccatcatctggttcagaaatgggcccagtacattgttgttgctgttgacacaaaagcagccttgttgtgactccttacaaacccatccagactgatgggcctgggccagggccctgacagcactctttacaccaaccaggaggcaggaagccaaattactaaagataaatgtttgtcattcagtgacccaagggagatttaaatggatttccaaaacacgaaccaccttggatcccagtgattgtcctgaggttttgccatgaattggccctcagttaggggctaagggtagctggaaagacggtttgcagttgccaagcacagaatgttcttcagatagagggctcctagggacaggaggaatttgctctggttgagttttgaactgagccctttactgccccgagggggcaaagggtgaggctcacagctgtgctcttctttcaggcgaagtggtgaacacccatggccccgtggagcctgacaaggacaatatccgccaggagccctacaccctgccccagggcttcacctgggatgctttggacctgggcgatcgtggtgtggtgagtgggccctcagaaggttacacctgcgggtaggagccactttcacagtaagccctgcagtctcacctagactacgtttactcgagccctagagagctgagccaaggaggtctgaacagactcccgtctgtaacttcctggggcatggccaagactccacataaatagctcttagcttttctggcaggttggaagttaacctctgtaggtccccgatgtggatacctgtttttcatttattcttttttgttcattcatttcctcattttctttctagtctgtctcctgactggagcagctggggctgctaaatgaggccctgtcctcccctttccaccccggccacccagagccccttgttttgacctgagggatttatttcccttataaagaatgatgaaaatgtcgccgggcgtggtggctcacacctgtaatcccaccgttttgggaggctgaggcaggcggatcatgaggtcaggagtttgagaccagtctgaccaacataataaaaccccatttctactaaaaatacaaaaaattagccagg

SEQ ID NO: 64950 - DNA, 1033 bp, Homo sapiens
gggagactgaggtgggaggatcacttgaggtcaggaatttgaggttgcagtgagccatgatcatgccactgcactccagcctgggtgacagaatgagaccctgtctcataaacaactaacaacaacagcaacaacaaaaagtattcactgggagccatcatggaaaactaggctctggcagcaggcaggcatgtggccttgggcggtgatttcacccctccgccttgagcttcccgtctgtaatgtgacatgaggacagcacctcccgcacagggatgcctgaggattaagcaggatcaggtctgatgcaagctcagcacagtgcctcacgcatggcgggtgctcactgggctctagcgctcctctctcttcaatgattccctgcaagtccgcagcccagcccaggagcgggggactggaggggggacaaaggactcccactcactgtgggggtgttttcttcctccttccccgctcatctgggtctccctagtgtggccctaaaggattttccttcctcaggcccctctaagccactccctgccctagtcccttgacctgatttgatataaaatctattctctgttaggctaaggggtgtggtgatggcaggggcagagcgaggcgggggaggctacctgggtgacaggcctaggccttggcctctgatggcccaaggggctgggccccaagactgggtttccttctccaccctgtccctggactccctatggcctggggaagggacattcccaacagactcggactcaacattcctctctctgcagtcactcagcaggacagggcagtggtgaggaatgagggtgacctagatgacattctgatatctatgtagttcccgagagtgtcaccttgatgaggtgcccagagctcccgtgcagccttactcagctgatgagtaccgaggcccgggctcagctgtaattatttgtctgcatgtgactctgcccactaaactgtgcactccctgagggcaaagctctgtgctactcatctctgtagccccagcccc

SEQ ID NO: 64951 - DNA, 1825 bp, Homo sapiens
ccccaaatctgaggtgagagccttggctgtcggacgtaggctgttagaccagtcctgccagagcagtgtggctgtggccgcctctgtggggccgcggcttggagggctgctgtggaggccagcctcttctgcggaggccgaccgcaaactcgcatccttcctaagggctgccaagaccccgagacaccctggcagaacctagatactgctggggagccggacgagggacaccccaagcctccctctcccgctccattctccttggagaccccaccagcgccccgtgcccgaattcgcgcttcagacgccccgcgagcgccccctggtgggaagcaaagaacaccctgggcgcccggctcgccccgggaccctcggatgaccccaggtgcgacccccagctggagggagctggccctccgcccctagccatagcctcccagccccgtgcagcctggggaatccacgaactgctccctggagcgccccagactgggcctctgggaacggtccgcgcccaccccaccgccccttgcccgtcactgacccatcttcttcagcgcccgcagcccgggcctcttggtgccgccatcggagggagtcggcggggacgggagagcgaccggcgccgcgacttgggctgcgacctgggcggccaccgggggctcctcgggcgggcggcggcaacgcctccagcggccgcacagcatggcttggcggggggccggggccgggcccggggtctgcacgcggggacagggcagcggggcgccgctctggcccggccccggctctgagcgaggcggcgagcgaagaaacttagcggcgcgggagggagtcggaggaggcagcaggaggtggggcggggcggggcgggaagggaagggggcggggccggggcggtgcgagggcggggccaggcggtggcctggaagcccggagcctcagcgctcgcccctgctcgtgagtccgtctccccttagtccgggcgagcctctgatcttggccgcaagggtgactagagcccccatgctgcggggctgggggtgggagccggcaccggggacgagggccatcctctggcacagacaccctctccttcccgggggccctgactcgaggctgacgcaggaccccctcctccttcccttccgcgtccccgtcgcgccgcaggcctcagcagggaaccagagccgggacaggacgcagggccgggagcgaaggcagaaccccgggagctgagccgctcggggcagcgcgaacccgaagggatgggcatgggggtggggaggttggcagtgacgtcataggattaacctccctgtgccaggccaggtgctgccccctcggagagccacagtctcggagctgacggacctggggagcgtgaggcggagccgagcctggagtccccagcaactggttctgggttcgaggcttggacaggccggcaccccagcccggcacccgcggtgtagttgtccgcgacgtcaacccgtgggtgggcatccgtgtgcaggttctggtggccgagtcgggtgtgcacttactatttatatgcaagcaccagagtgcgtgcgcgaagtgggggacgtccaggtggcagcgtttctgcggccggtggcctgggtccggcagagacatgggcgcacaccgccactttgcggcggccagcggcgtggcatcctacagagaggctagtgctcagggcctgatttgccacctacttgccctgctctaccccatcctcagatctcccaggcccagagattctgcacactggcttgggtccctacgccactctggggtcctgaattttctttttttt

SEQ ID NO: 64952 - DNA, 1472 bp, Homo sapiens
gccttggcctcccaaagttctgggattacaggcatgagccaccgtgcccgaccatcttccaaaactgagctgtgatgtccttcctctagaacacctgaccacaggacatgactttttttaatccccagtgcctaagtgtctagagagctgagtgggttgcctcggatcggccaggcctggatatcagcgaacagatgcggatttccaccagggggcgctaggacgccacgacctttcactatgtgcaccagggggcgctgccgcccgccttggccatcccgggctgggaagtccgacccttcgattaagccccgcctgattgggaaaggctctgagaaactatttgcatgatcttgaaagagctgtgctgaatggttgaggtaggtaagccgaatgtgaaacaggctctctcattggcctaaattccccccctcgatctgcgtcgccatcccggccctgctggaccccggggtcagtaggaagccgcggggtggtggcgagagaggacccaggtgtcctggcagtgggcgccgcggggcacacgctgggccaaggtgcaggcggccagggtgggagactgttcgccccgccctgagtactcctatcttgtttctccacctgttcgggagttggagatgtgcacctaaaggaggcgcatctggggacggacacatctggcactgaggccctcgccacctgcctcgccacctggcgaccctgaccccaccacactgccttgaggtaggaaaaggaggctcctcaaccacaacttctgacctcccagggtgtctgaggcctctaaagagcttagtttgcccctctgggaagtgaatccttggcttatggtgccggggggaccctggaggccccctcacacgaaggctgcttcttgcagagtcgctcaaaagtagggccccagggctcgcagcagcatgggcaccgagaaagaaagcccagagcccgactgccagaaacagttccaggctgcagtgagcgtcatccagaacctgcccaagaacggtgaggctgcggggactcgcatttggactcgcattcaggacgcctggggtctgactctgaagaaagaatggtcctgatcactgcagtttttgcagacaagcccctgcctgggctgtcctgggggttccctccgcttcctatcctagtccagatgccctgggtgggacccatcaccacctctgccctttccaagcagggttctcccgcccctccgccccttggagctgggagtgatgctttgccctggcttcccaactctctgcccaggttcttaccgcccctcctatgaagagatgctgcgattctacagttactacaagcaggccaccatggggccctgcctggtcccccggcccgggttctgggaccccattggacgatataagtggtgagctccctgctggctgggcagacaagcctcagctgtcaagcagccctctcacagccctctg

SEQ ID NO: 64953 - DNA, 1044 bp, Homo sapiens
tgcttgagcaggaggggtggaccaaactcaggctgggggagggctggaggggagaaggctggatgccacgctgtgccctccacagacactgagacttcctgtgctcccaaaggtggggaccggggtctaggattcctgttccagggccttgcttctggcgcccatctgtgcctcaggtgttgatatctctagtgcctcgtatctctagtgtctcctaaacaggtgcttctgcccagtgcacactcctgctctccctccacagcttccctctgggcagtaactctaccaacccctccacagagtcccattcacccagggacctggactccgaggttttctgtgattccctggagcagctggagcctgagctggtgagcccagtccccattccccccttttcccaccccactgtgctcccactcccaccctcagctctctgactcatctcagcaggtttggacagagcagcgggcagcatctggaggaaagcgtgatcccaggaacagccccgtgccccccacaaagaaaggtgagctcctacccaacctctcacccacttctgccctttcccgtggtcctggcaccccaggctttctcttggctgccttcctagggcagagttgaaagtccattgctgggcactgagcgagaagcctctgtccaggaagggctgccaaccagccagatacctgcctggatgggcaaagtccccgccctccctcctctccccaaagggcacccaggagtctgcaccctctgcaggtcctgagtaaggccagcgggatgggagtcctagcccagttctcccacctacagctgcacagcctcaggaagtcatccatattctctggactcccccgtttggaaatctcagaagacaatgagttctgccctcttcccttctagaactcctgttgtgtgtcaggtcctgtatggacattttgaaaagtttctccttttttcctctgagcaagcagccctgtgagagaaatgacatcttctcctaatttttagatgacaaaatgatgcccagagaagttaatg

SEQ ID NO: 64954 - DNA, 1600 bp, Homo sapiens
ggtacacgtccccggtgctgggttggccgtgactcgggggcggggcgatcgggtctcagcccctgccttccccagtctctgggtcacccgaattttcccacccctgcttctccccgaggaggttgagctcttgagcaagttgggacttgggccggggcctggaagaatgattggctgggaggccgcgggagggaggccaggaggcccggaccagttgggaggagtgagcaggccccgggggagggggatgagcgcagtttgctcgctttcctcccctgccggccccctccgcccccacacacactcgggacgtcttcattgaagattcacttacaaaggaatgtttcactaaataaaagaaaaccagaatcttctgctgtctggtcccctacggagggagcggggagcggggcccggcgcgagcgaggcacaagtccctttcctgctccccacccaatgcccccctgatggccctgaaagaagccagcggttggtgtttctgaatggggaatattttccctcctccccgggcaagcgaagggaaaacaggcctctgtgtggaggggagagggaggggaaccaagggtggcccgggctgggagcggggcgcccttgggaaggcggggccaatgcggggggccgagggcgcggcccagcccgccgccccgtcggggacgcggggtccgagcgagctgggggtggcggggaggagcggagcacggctgggcggggccgaggagctggtttggcccccgcccaaagcggaccgcggctgctccagctccgcgccccgggcgtagagatggggttccgagcccccggccccagaaatgtccgctgccccctcctcagctgcctcagttcccggtgccccaccttgacctccgggcctgggccttcccaggggattttctgggaggccaaggcccagcgagagcctcgtcctcgccccgccctgagtagggagcagggccctgcgcgcctggaagcccctgtcggggtgggccgagcgcccgcgtgcagtcgccgtcggggggtacgggccagaagccttggcctccctctgtccagcacaagccctgtcgtccgtgggccgtcttggctcaagcctcggtccggcctgtattcagtggcgaaactggccgctctgagggccgcctggtgccagcgcctccaagtccactggccagggtctctaccgcagtcccccgccgctgccaccacctgggccctaggaccttcctacccctgggtaaggaagaggcagttctgaaggcccctggctgagatccttaaactcctgagttccctgtcagcctctagtctcgaccaccgtcccaggcttcgccatcattggccccactggaagccacagtcactctttagtcgtcagtcctctcaaagccgggaaggcatccctgaggctagacggtgcgctctgcacctgcacggctcagcccagggtcacaagcacaggctgaatagcccctgtgataaggctggactgcagcaagcaggacagacaacagcagggccaccttggtgggggatgcaggcctggagctgaagccagctccaccacttgcacagtagctgtgga

SEQ ID NO: 64955 - DNA, 4932 bp, Homo sapiens
gcgtgcttgcggctccccttagaggcatctacattggccatgcccatcaccactggcccccacccccgatatctcacactgcccagagccaccgaagtcccagactagccctttcctggcacatgatgcttgggcttcctaaaatgcccctcttcgtgccactttgcctgaaagctcttcatccttcagagccagccaggaagtcacttgctcctgacacttgtccataattcccagctcccatgcactcggctcatcagctcccaccaggatttccctcacttgccatttaggctggctgtggtctgatggcctctccacagtccaggagcaacttgaaggcaagaatggcatcccacccctctttgtaccctcctgtttgccaagtgatataggggctgaataaggttgaagttgttgggaataaaaagaacgaaatccagagtattccccgattttaagaaaaaatgggttttgtgtttgtgacagaaagaaaaatggcacggggggggtcacaaagaccagcgctctagccagaactgccccatggttgtcatgtgaccttggacaagtcacttattttccagtgtcttagagatgccttatctgtaaaatggagacactcattcctatcgtgtctaacttgccaggctgtggtgaggtcacatggctctgtgcgtaaaaggtacacagtgcaaacgtgctggaatgtcagggatgctattaaggaagcaataagaagaaagggtcactgggtgtgtggcgaaggagaagtggaaagggcgccaagattttaggcctcagtgactggtatggagggttctctgggtcctctcagtccctgtttatggagggctgggggcttgggtctagagaatttctctctgagaaactacgcccccgggggaatcggcccccccagccctgcgccagaatcccctgcagcaagtttcggagcaaggcctcctccatgcttccctcccagtcttgcccagcgcccactgatgaggaagggcctctgcgggtgagacctgcttccctctcggatagccagggctgatgatttcaactcattaatcattccgaactcttcccaacaaacagcctcatggctgtcccggacctcctctgtcccggctcaggaaatgatctcggtcggaagtgaaaagaccaaatcggccccaggaggccattttcttcgacagaagctgaggcgtgggggcgtggccttcccccgcttccccctccactcccccgcccgcccccggccccggctttccgatctcggcccagggaagagccttggtcgcgaatcaccagtttgcatttgcccctggggcgggggcggctttctgagaccaggctggggctgggactccgccaccttcagctaagggtaccgaggtcagtccgggagtcgcgtcaccgggactcgaacccgcctcttcgtcttccgaggcctagtgcgagcctgcggcgctaaacgcagtcacactgtccctttaaggcggcactttttattcttcatttgtttacttcttcatgcgctcttcggtctttacaaaatgtgctcgcgatatccttccgcaagtgtcagtctcaggcactcaccacccgccttgaagccatttctataatcttaagactcgcgagttagcagccgtgggccgacgtctctctttataggatttaattcttttacattttagggactactttttaggaataaaccattcttgcgttagttaataaaggttcataaccttcggaacccctccgctgagaacaaaatacgataatagcctttataacgcaccttttcataaaaatattctgtgaggactctcataggccatcgaatcttctcgtattcctgaaacagaatggtacggtccagaacccgccccatcttctctgcgattggccgtccttcctcagcgagtcgtgtgatttttcaccaatggccgctcgcgtttctttagcgaggtctaagcgatggaaggtggcggccagggagacgccccctacgcgtcctgggattggctacgtcgcacggcgcgcgagggcggcgggcccgaaagataagaactacgactcccggcgccccgcaaagggaactccgttacgcatgcgcacgggcggggcgaaaaagcttctatataaaaggggcgcagaggactgggagacagcagttggaagttggcaggtggagaggcaggttgggagggaaagtcgggggaggacgcggaagaggagctgtgggaagggggaggagggagggaggaaaagaggaggaggcggaggagaactgagcagagcagagcatcgagccaaaggggagatgagtttgtctgtcctctgctgaggctacggccgggcctagggaactgggagcttgggtggaagcgacacccgtggaagtgggaggaggtggcgccgggactttaaccccttgtgggctctgcggcaggggatttaaccctttgtggatctggcccctcggaggcagcgtcatcggtagttttaaccccttcggggctgggtttcacgcactggacttaccctcatcaccttgctcaccaactcctttattggggtgctccgcttggaggtttgaggcccacctccgcccattacgtactgttcctgccgctgcacccccttggacccgctagctggccgcactgtgggcgcttaaccctttactgacttgagctccccagattgcagttggagtttgctgatagaaggactagctaaaggcgtcactgcaggaattacaaactgaagaggactctgttggactgttttttttttctttttcttttttttaagaaaaacccatttttttccttaaggacttactagccaaaatttcttaaacttcgaggactctactagccatggccgagccattcttgtcagaatatcaacaccagcctcaaactagcaactgtacaggtgctgctgctgtccaggaagagctgaaccctgagcgccccccaggcgcggaggagcgggtgcccgaggaggacagtaggtggcaatcgagagcgttcccccagttgggtggccgtccggggccggagggggaagggagcctggaatcccaaccacctcccttgcagacccaggcctgtccagaatctagctgcctgagagagggcgagaagggccagaatggggacgactcgtccgctggcggcgacttcccgccgccggcagaagtggaaccgacgcccgaggccgagctgctcgcccagccttgtcatgactccgaggccagtaagttgggggctcctgccgcagggggcgaagaggagtggggacagcagcagagacagctggggaagaaaaaacataggagacgcccgtccaagaagaagcggcattggaaaccgtactacaagctgacctgggaagagaagaaaaagttcgacgagaaacagagccttcgagcttcaaggatccgagccgagatgttcgccaagggccagccggtcgcgccctataacaccacgcagttcctcatggatgatcacgaccaggaggagccggatctcaaaaccggcctgtactccaagcgggccgccgccaaatccgacgacaccagcgatgacgacttcatggaagaagggggtgaggaggatgggggcagcgatgggatgggaggggacggcagcgagtttctgcagcgggacttctcggagacgtacgagcggtaccacacggagagcctgcagaacatgagcaagcaggagctcatcaaggagtacctggaactggagaagtgcctctcgcgcatggaggacgagaacaaccggctgcggctggagagcaagcggctgggtggcgacgacgcgcgtgtgcgggagctggagctggagctggaccggctgcgcgccgagaacctccagctgctgaccgagaacgaactgcaccggcagcaggagcgagcgccgctttccaagtttggagactagactgaaacttttttgggggagggggcaaaggggactttttacagtgatggaatgtaacattatatacatgtgtatataagacagtggacctttttatgacacataatcagaagagaaatccccctggctttggtttcgtaaatttagctatatgtagcttgcgtgctttctcctgttcttttaattatgtgaaactgaagagttgcttttcttgttttcctttttagaagtttttttccttaatgtgaaagtaatttgaccaagttataatgcatttttgtttttaacaaatcccctccttaaacggagctataaggtggccaaatctgagaacaattaaattcattttagttataataaatttaatatttgtaaatgtaacatagtttcagtgtgatttctagagctaattcaaaatagtattgatatattttatgtgactgcatttttggggaggggtaccgaaatcgttaaatttgtcagtttgcaaaaatatcaatctttaatgggagaattttcaatttgccaattttttccttgaatgggtttaagtatgctacaatatacagttcaggcaaaatttaagatgtaattatcttcaatacttaagtgtgcttgctttctagtgccttggttttctttcttgatgctggaaaaataaacaaaccggtattgagtgtttaggcgagtggaaagtggctacaatccaaaattttaaatttaactctgcctcggccattcaaaagtctaataacaaaaaatgtaaacctaatttggcagtttgttaggttagacaactgacagcctcatttcattcctacaagttggttttcagtaatctcttccttccccccagtaaggctggaagaggctcttggcaaacttcttagtgcaagcaatggttagattaatttgtgaggcagctctttaagacgttcagaggtaagaa

SEQ ID NO: 64956 - DNA, 2871 bp, Homo sapiens
aagcctctcctacttcagcacctacctaggcataattttaactgacattttagcaataaaacttttatttgaagatatccttgagccacaaatctctctggatttagatttcaagcagtaggaagtaagatggtttaacctgcaattcaataaaagaacttcacatcaaacttcaatctttaagaagctgctacagctataatgtaaggttaagagtttattctttcaaagcaggtctcctcatctcttaaacgctatacatatgaagtagataaaaactggtttcttttttggtagcatttaggatctacaaaagtgatccttcaattacttggaatttcaaaaaattgaggttacctagtaacaatgcaccagtagaacacaaaatactctgactttgtttagtctgtgggaaaagaaaaatctttaaactggaaagattttgtagtcttacaaagattacattggaattggaattactgtagttcgtttttccctctaggagggcagccatttctctaaaagttgtgtaaaagttaagactaggatttcaaaatgcaagcagatgttgatgaagcatacgaaatgggcaactccgtttctatttcggagccgcagcgactccgactttgtgccccaaccctgtaaagggcaaaacctcatcccttcggtgtaaactttcaagagaagtggggcagcacactttaggcgtttcaccaagaggctggcgacatgctaggtcaggttgtccggagaatcggggctgaatgggagagatcttgagggcaagagcctcagagaccttcaggcaccgagctcgtgaaggtttccaagtgcccctctctagctgctcccagggggaattagtggttgctacagtagtttaagagggtcgtggtttttcgcaacccgggcggcgagatggcgctttggtgtaagcgaggtaaggtgggtgcactgggatctccgctctcggagcctccagctgactgccacgccgacttgtggccagacctgcgacctccgccctcccccgcggcgccagcctctggaatctggcgtcgcccccacctctccagtcgaagtgggagtccctctgtgcggggcctcgccgccatacccaggccgaatgggggtggggagggaagctggcagagctcggcctcaggatccgcgcccctgtggaaagaccgcagagggaagccgtttcaccagcctctccccttctggggtctcgggaaacacgcggtaattaccgaagaaccccgcactctgtgagaggcgaggctgcggggctgccgggacggtttgaggaccgggctcggccgaggagactccaaccttcaccctccctggcccccggtcccacttcccgccgtctcccggcgccgccacttcaggtagcccactcggcccggcctctccccgcgcccggaccaccccccacggggtgctctcactgcgcagcgagtccctccgctgcctcctcccagcccaaaatggcggcgatggccgccgagcttctcgtcgccttcctcaaaggccaaggatccctccgcgcctgctgccccgcccaccttagccggatctattttctgccccgtaaagattaacgccatcaatgaactctttaattgagttcggagaaggcgggtccagttgtgcctcctcacagctaatcgttgccaaaaaagcgagaatattggcagaaggcttgaccaatcaaagaaggcagtgatgcgcgcgcggtctgcccccgcgcaagggtagatgggttttggagtctcgggtgtggctgttgacgttacaggcccttggatcgcttttcaggccagaagaactacaatccccagcaggcaccgcgcgtccaggctctctcttcccccccatcttagtggcctgagcggcttgaccagagctgctgcaactgcagcaagaggtagggctcaggcgttgggaattgcaccgacaggcagtcgcacagaaaggcacacagatgtagtggtgtgcatagcccttgacagcgaataggtcagttccacctttgcaaaacctctttccatgactgtctcccttcttccaagaaatccatccttatcctagttgggtttccctcccagctgcatgtagtgcaaagacctctttccccttttctcctgtttccctttctgagaggaaggagggaggcaggccaggaccttagaggaaaagtcctcagcactaggctggcccaggtcccagctgtgcttctggcctttggagcccagcttggggagaaggttgggggtgcagggctgcatcaagattggggccactggagacagtggggaaggactcgtgagcttgctccatgttctcccgtggcagcagcagccccgctgcactcccagcctccccaggcagtcctcctttgcccctttggtggttggggaaacaaaacttacacctggcttcctggctgccaacctgggcctcggtgacttccaggaggacagtacaggacatgagtcctggtgagggacccgaggagcaggacagagaagacggcccctgaatcccatttggccccttgctggctggaggtgtgaaaaccagcggtggaggcagccttcggggcctgcatttgagaataagggtatgaagggctggggtacaaaatggctgccactgcctgggcaaacaattctgggcagccagagtattcctgacgttccttcaggatttaggtttctgttgttgttcaaagcaggtgtcactagttccaggcgtctgctgaaagatttggaacagaagatgatggccactccgaaccagaccgcctgtaatgcagagtcaccagtggccctggaggaggccaaggtaagtccctgc

SEQ ID NO: 64957 - DNA, 3309 bp, Homo sapiens
ggcaggacagcagacctctggatggggacctcccaaggtctccgggatacctgaatcctgctctgtgggtgttggagcaatcagactgcacagaaggttttctaggtgggagggagttcagtcaggagcccccagtttcggccagaaactgacgctcaagataccagatcgctgtgaggagttgtgagctttccctggaggagagaacgggggttttcggagaagacccaggcccaggggttccttcagagtttgctcctgagctccctgtattctccccacagtttaaaggctggactagacgggttctgggtgccttgtgcctccttgttcttgacagcccccaaccctgacccctctctgcagggggttgggcctgaggttagtcatcatgtgtttgtgtttgtcccttacctcccaagggtaataagggaggcgctctcctgatggaaaataaagtcaagagacagagggggacagcacatggatcgccagcagagcagagcagcctggctctcctggtgcctgccatgtgtctgtgcgtcctgctcctctcagcctcatcatgtgggtgtgaattctctgaagtgtgtgaggccctcgcctgtctgcatcagagagagctgggtcagcctgggtaacgcagataccaccagccagcgtcaggctctgagacaagctcacccaccccctcgcactcagacccacccttccccagacaccctgtctcttccatcccctcctggtgcccttgcagactggtgttgggtgtcaggcagcaatgaacatggacaactaatggtggcggaggaaattagtcaactcaccagtgagccagtgctggctgtgccaccaggcaaggggaggggcagaggcctggctgcccagtctggcttctcttccaggccgtcatcttgacaggccacactgggcaagatgaggcttggcccaggagctgctggggatggaaatgttgatgaaatcttgtgtgttgccaggacaactttcatttctatcctgccacacccaggcctggccagagcctcctacaatgaaacacagaacagattctaggaacgcatgggtttcaagagaaagcaaaatctcatcctgggagacctgcccctggaaccctgggtcctcagacagctcagtcaggaagggcagcaggaatgatcatcgccactttgcagacgggaaaccggaggcttagcgaggaagtggctttttggattccaggagagcctctggaggcctgcctgcccctgtggggtgctgtggggtgctagcctgggacccagaggccccttggcatttgctggcagcctcccagctgcattcctcagcatggagcccgagggagagaggaggcctgggacaaaggtggacaaaggttgtttacccggaggtgcctctgtgtgtgtgtgtctaggaggtgagagaagattccagagggctgctggagtgtcgggggaggggtgtgggtgagggtgctgggtgctcattgtgggctggttatgccagggaggggcaggtgaagagtttggcctttcttggcccagaagctgaggagcctggaggcagggaagctgccagctgctcctccaacatcccccttacacgtaaaaggctgaagggcgcaaatagggcagcacctcggtgggttaattcccgcacccccacctcaccccgctggagggcgggtggggcaagaagagaacaaaggagaggatgctagccgggagtgtgggagggcctgaacccaaatgggaggggtccgtgaaaagggtccctgtctgcccctccccctgtctggctccctgattcctgggtaaggggtgtgcagggaggagatcgtcctggggccagagctggggcttagcactggagagaaccggctcagctgtgggtgggagccaggcctgggtccctcggtgccccgcccccttcgctgcttccagttgttcccacacctgctgcttggtcttgaagcctgggcctccactccgcctactgcaatggtggaagctccagtttacaagacacccccacccccacatcacacgccctagctggggaagttgggcttggacacagcctccctgggcctttccacagctgccctcacgccctgtgctttctgggaccctcttggtcaactgggccggggaagggaagcgcagagaacatatgtttcatgggagtgactgttgaagcctcccaccacccctgcccagcctgtcttaggatccctctttcttccccggcaggaactgcccgaccccaggtggaaactcctgtgcccagtggacagaccctgcctgcaatagggtcagagtatgagggagaggggtaggcagagattggtgggctggggcaggaagaagctgccagggagtggggggagggggtccaaagggaagtaacggtattggggggaaaggtggccaggtcccattgcccttgttgggaacaggcaagtgtggcactggccctttaagtgggggtgccagtcagtgccctcccccaaccaacccaattcatgggcacactgagcatgtgcaggggctgtgcatgtggggaggggaggagaggggaggggagaggggggcatacattccggagggagcttctcatccccctacttccggtagctgcccccactctccttcctgggtctgacaaaggagcccatggtgctcacccaatcccttcccccaccccaggccccagggggtgctgccctctgcaagtgctgaagctgccatgggtgctgggcaggccctctctgccctggggagtctcctggccgcctggaggtggcacacatgcagcccagtgccggcctcacttccctggtgtgggcggcggcgaatcttcctgctgcctacgtgttccatttcattccattggtgccagggtttttaaaagaaccatccacctgtgatgccactttgaaagtgaaacagctcaaaggatgcaggccctaccccctaaccaggaccttccagtcagagaggaagcaaacagcccagaggctgcaagggccttccttgaatcccgctccttctgcttctcccctgctggccaagggatcaaagtcagcttcctccagactaccttcacctgcagcctgggaccttccctcaaacctttccaccacctaaaccttacctgtttctgccaagtcttcccctctcccagccctcagcccctcctgttaccacccctacctctttagcacttgtccactcttagctactggtaccattctttttattttttatttatttatttttttttgagaca

SEQ ID NO: 64958 - DNA, 1060 bp, Homo sapiens
tgactaaggggctgtgagagcaactcctttctagacaaggaagaaataatgtcacagggcattgtctgcgctgctccccagcaccctgttaccccttctccagctctaccctgagctctggatccagcagaaggaactgaagtctaggacccacaacccccagaaaaaggcccaggcagggggatgggctggggaggtgtgtgtttgttttgaaagcctgtagaggaggaggaggagggggaggagagggagatggggtggaggagagtaggaggtggaggagaggaggaggaggaggaggagagggagatggggtggaggagaggggtaggattaatttgcagcttagattttagggccaaggattgaagcctcttcctgcactcctcccctcctccacttggcattatcccaaggagttgccttggggcttccgtgatggcgacgggaatgcggggaagttgagggcctgggagcccgaggccagatggaggcaaagaggagtgaggctgctcacagaccctggtgggctgggttctggaagaaaaccatgggctgaccagctccagggcctggctgagcctcagccaggttctgccagagctggctcaacagcggcacctgccggctggggccctctctgcggggaagggctcctccaccgccctgggagccccgcgggtgagtcgctcctggcctggctctgtggcctccccagaggtcagatcaggaaatgttgcgagccgaggaatgttctgaagcggagggcctctgcccttctggcctccacctgtgcccctaacactaccctgttcacccaggacactaaccgagggccagggctgggggaaaaagagtaggatgaaggccactcactttagggaggttcctggtttgggtagttattattattattattttttaatttggaaatactttaaagcttacagaagagcttcaagaatgatacaaagattcttcctcccttacctagatttatcagttgataacattttgccccatttgctttctttctctctttgtatatacagtagataaa

SEQ ID NO: 64959 - DNA, 801 bp, Homo sapiens
ctcagtggatgtccaggcagaattatgtcaggaatggatctgggcttagtgtttcttcctcagcagcccctagggcaaacagacctcccctcatactcctttcccaggccgtgagctctttttaggcaggttggggtctaattcttctctatccctcggcactgggcatgcagttggccctccatcaatatttatggaataatggccaggcgcagtggctcatgcctataatcccagcactttgggaggctgaggcgggaggattacttgaggtcaggagttcaagaccagcctggtcaacatggcaaaacccagtctctactaaaaatacaaaaattagctcggtgtggtggcgcatgcctgtaattccagctacttgggagactgaggtaggagaatcatttgaacctgggaggcggaggttgcagtgagccgagattgggtcattgcattccagcctgggtgacacaatgagactctgtctcgaaaaaaaaaaaaaagttatgcaataatgagcaaagaggttcagggcttgcctaaggcttggccttgctcttggctttcatcacagggacctacatgttggctggctgttgggagggagagctttggaaactggctgtccctggtacaggggaaacagtgaagaaagctgggtcccaatttctgggttattgtctcggctctgccattttctttttcttttttccccccagttattgtttcctgttttttctttttcttttttttttattttttgagacggactctcgctctgtcacccaggctggagtgcagtgg

SEQ ID NO: 64960 - DNA, 1670 bp, Homo sapiens
gctgccagatctgcggaaccagccctacatccgcgcagacacaggccgccgcagtgcccgtcggcgtcccccgggccccccactgcaggtcacctccgacctctcgctgtagccgctatttctgcaggtggattctgcaggggtgtggggccgtggacaggctgaggctcaaggaaggtggtcctcagctcggctggccgggcagcccctcctccgctgtggcccgcctcaaacgggctggtgcatcctcctcttggccacagagggcagcatcgcccgccccttcccccaaatgctgcttgcagcacccaccctaaagccccctccaaatagccatacttagcctcagcaggagcctggcctgtaacttataaagtgcacctcgcccccgcaagccccagccccgaggaccgtccatggaccttatttttatatgagattaataaagatgtttgcaaaagatccgcgtcggctccatgcctgccgcagccacccgcagcctgtttccgctcagcaaacgctttacttgcacaagctcttcatagcaggcctctgcaaaccagcgggcgccggggagaagggctgcttcttcactagagttggcggcgagggagcccgcttcgagggggcggaggctttcgtggctggcccagtatccctgcgggaggccggagggggcgagcgggcagctggggttagacacgccgggccagccccgcagcagttctccttccggctgccccgccccatttgcgccagtcctgcctcccacccgggcatctggccccttttcctttcgccctacccagtacttagtgacgccataagtgacctcgccttacatctccgcgcgtgccgcctccgtcaccgcctgccgggtccccatttcttccgggcctgcccccgctcctcgcctgcccctcccctccaccagccagtgtcgccccatctgtctgtcctccgggcacttgtcccgcccctcactgcgtgtccctcccccgcccgccggctctcacctaggccgagacacgccccgggctgggcgggatcttggggcggccgggctagtagggctggatcaggcggaagccggggcccggggctgggcttcgtgtcctgcgttccgggagcgccaacccctccaggttaggaatctgagagtacgggctgcgcgcacctggggcgggtgcctgggaggaggtggaggaggagacggtcctcagaacgggtcctgggggtcggaggcgagggcgggggttgtaagtggccgggagaggtccctcccgcgggtcccggcgccccccgccccgtcggggacgcacctacttcgtgcagtttgtgcagcgagcgcgccagctcctagttggagaggtcgctgatgcgcgccgcgtggcagaaggcgagccccgcgtgggagcgccccccaacccccgcagcctgggctgagccgcagagcccgctgcttcttgaagtagtagcttggagaagagaggcggggcggccgcctcagacactcccagccctctctgtctcacaggtgcggaagccaaagcagggccggaagccgctgctttgtctttgtcctggggcgacttggggcccaggaaacagactcagaattcagggctcccgtctctagggcaggaatatcaggggtccctgcggggggc

SEQ ID NO: 64961 - DNA, 438 bp, Homo sapiens
gctggaacagccctcatattatatacacctgctagttcttcctggccgtcagcacctgggatttggcctgtgcattgctaagagctggggctggctcctatggggaagtagtatttcaacttggatgcaaagcagaaaggaactgaacacaaggattcttaaattagattatgggcaatttagattgttgcctgagttgaagtggcctttggccagccatggggccctgatgccatgagtcacacttgccctggagagggccagggaactccaagctgatgatgcccttgttgtagcaaagccacatcataacctatgcaatcaagcttgaaaacgaaggaattttatgttgtctttctcatctgacctcaaatcccagagggggattccttttgctgagtttttgattaaaatgctcatgggtcctgttccttttcc

SEQ ID NO: 64962 - DNA, 1626 bp, Homo sapiens
cgcaggagagctggggtcacaggctggcagtgcactcccctgcaaaggccagacaagaggtaggagccacggggactccaaggcagaaggcctgggacctacggagagtcaaccagcctttcccttctcttccctgtgtacaggagcatcgacaatgagcacctgacatctattatcacatttacgcgtaacaaagaaacccctgataatcatccaggctggttgcggggcttaaacacacaggtggacctaagtgttcacacctcaattcccattctggaaagcatggaaggcatttggcgaatgaatgcattggggggcacggcagttggtggggggccttacctgtgagcaaggactttcccaggccatcaggttgaagacacacagcatggccaaagtcacagagggctgcgtggctcccatcgctggacaggagcacgttgtcagctgccaggccgccccggggaggaagaggaacaggtgagtcatgccgggtcccagcccaccctggctcggtttggcctgccctccagtgatgtaattttctggctgaccctacgtggcagctgctgcttctgattagtttcattaatcgtggaggaagggaggagggtatcaattcaggctagaggtaggcaggatctctgagggcaaagggacaggagcagggtttactcgggaacgctgccactctgctcgcctgcgccgaccccataccaggggtcaccagtgggtgggagcttgaccttcggttctctgtggccaccgtctaccagaaactacagtgcttggctaaggggttggagaacatcattccccttcctacaggcacagtcctgtcagcctgactcagggcctgctactggggatgaccaggctagcccagaactgagaggagatcagacaggatggtgtgagagaagagcctgctggggatcagggccgtggggcctgggccttacctttgacgtccccatgcagaatccttcgtgagtggaggtattccagaccctccagggcctggcccaggtagtacagggcccggtcctctgggagacagccctgctccttgaccagctggcccagggagccacctaggagaccaaaggccaggctatacatgggacttgcccgagcctccatgccagccaagggcaagagcacagggcaggcagtggaaagcagggtcacagggtcaagaggttaacaatggatagatcagtgaccaaggccaacttgggcaagactcaggggggaactcttggccctgaatttggagaaagagtgggacctggctccttaccttccagcagctccatgaagatgttgacccaaggcccttctctcacagctccatacaaagggacaattctgggtgaggtcaatcctgcacatgccatcagctcctctgcccgaaatacttccagccgcacctgcaagggcccagaggcagctgttaagacagggtgaggggaccagagctgggtccctggcatcctgtcagcaccctagtgctccacacacagaggctgctgctgtttccagtggtgatgcaggggcctggggggcctgctggaccctcagaggctaaattgtgtatcccgtgcccttggtatcaggagc

SEQ ID NO: 64963 - DNA, 985 bp, Homo sapiens
taggcttcttcttcttttttttaattttatttattattatactttaagttttagggtacatgtgcacaatgtgcaggtttgttacatatgtatacatgtgccatgttggtgtgctgcacccattaacttgtcatttagcattaggtatatctcctaatgctattcctcccccctccccgcttagtagacttgtcctccttcctagctgctgatggttctcaagtaagccttgagtagcatcgccagggggcgctggcagtaacagaaccagcttggaagcgatcttcacagacttgctgacttggcaaacagccctgacactgtggggtttttggacttttgcctatcagtggaaaatgtcgcccttctggttccctaatatctggtttggttaatcacctcccatgaactttgactctgccagtgtttccagctctaaaaagcctctgaacctgagttggaactaattcaacaacaggacttgttagcaaatgtcttcagcctaaccacccccaaactgagctgaggcaccccggggcactgcagataactcagaagggcgccaaatggatatctgacatttgagggaaacggccaccgcagtatctgcaggacaccgcgtgaactactcgctcgagacagttcagcttcaaagtacgatcacgcacgtgacattccctttgataatgtatctctatgaagctatgtttttgcaggtcactgtgattaaaagtacttcaaggagaaaatgtgggatatgaaggtggtggtgtcctatctgatttcaagggttgagatgtgcaacaaggcatacatcccgttaataatctggcggtttggaaatggaaggaccctttttctttcaacttatgtcacgcttttcaaatggctactaagttgttaggataaagacttattattcgacctcactgcttcataaacagaactgttgggtatttgttttggcctgggttgccctgaaaca

SEQ ID NO: 64964 - DNA, 776 bp, Homo sapiens
gtctgtcggtctgcagccgccaccgatgctccctctgggcccggatagtgtgatctgacaggaggaggcctcagctccaggcccagcatgccacactgtcctctctgctctccacttctaacatcagtgagatgaaggggtgggaggggtgattcctgtcttctgtctctactcaaaactctaggacaagaagtctatcttcttccctcttcttcctgaagagtggttgaaagccgaactctcaggtcagacagacctggtctgattcagggctcttgccacccggccagtgacttcctgtcttgccaagcttcatgtccccaacatgtctgtcttgcaggactgtggcacgcctggccaacagggggcacagctccgactctggcagatctgcccactcccactgaggctggcttcctcctagaagcaccccacaggtggaggctactgctttcctatcatctggcccaggtcaggggcggcctcctatgtggttcaggggttttacctcagtgtgaatttcatgacgctccaaccatcttccacgttgggacttgcccctcaggccctggctgtattgagacaccgaggccacgtgtgtcctctcacactgcctctcacatacacacatgccaggggcagcagccaggccaggacacgtgacaggctgctcccttccagttccagccgacctcaggtggctagtgatagccaagttctgttcacaagtcagacccacggccaccctgcgactgtcctggacagaaagcagaggg

SEQ ID NO: 64965 - DNA, 614 bp, Homo sapiens
tccaggttccaccccaagaagcctcccgggttgagggaaggcgttggagagagaggactcccggccctacccaggcctcgtgggagtttctgtctccaagggaagccaccattactagtcatcataaggtatcatgagtagaagaagaaaggaccagactaggtctcaccctgcagcagcctgccgccccaggactggcccagcaggctcaagagcacggtgctcattcctgggggtggggccacctctaggtggaagatggtgaaggccctacaggccccagtggggctttccaggagacctggcctttcctgtctggagcctctccagacactggggctgctcaaggtcacagcagaaggttgatggcctgcttgatgattctgcagagtcccgagtgctcgtctgttacctctcttcccctgctccagtcacgatgggcacagtctccccttgccacatccaccatctgtgcacttttacaaccccactttccatgattctcggcacagacctctggttgtgtctcatgagaatcttatctagcagtgacacagacctctctcctccatagggaacccctgggcccagctacccacctgcaggcccaccca

SEQ ID NO: 64966 - DNA, 2627 bp, Homo sapiens
attagctggggtagctggcctgtagtcccagctactctagaggctgcggtgggaggaatgcttgagcccaggaggttgaggctgcagtgagctgagattgcaccattgcattctccagcctgagtgacagaataagaccctgtctctaaaagaaaaaaaaagtctaaggggtgttctgacatccaattaggcaaaagcccttcaaggctggctatgcttcttgtaactgtactttcatcccacctcacacctccccaccccactctacctccaaaaaagaaactgacctaagcccagagccgatcccactgttctcagcctctttaccaggggaaatgagatcttaagaacagaccaaaaagtctccaaacctaacagcagtagggaatgctcacagggagctcgatgtgagcgtgacctcctcatttctatttgaagaagctgaggcctaattcagtggagacttgcccaaggtcacccaacccacgtgtgacaggacatggccaggatccagaccctaggttctttaggctatgatgcccactccccaagctcctgggttacaggcaaatgcaggagggcacactaaggtcctccctggtcaacaggctcctgagggaagaggtggggccctgcacacagtgcctccccagtgtatagcacaggggccacagaccacgcaactgacgctggctgaacgagggactcaaaggacaaagattgcttttccataacctttggagacaggatgatcccgaatgctgaggaggaagagagagtcctgcctgatgaatgagaaaaatgaggccaggtggtgcagttgctgctctgaggggcacgtggctattagagatctggctgtgtgggggctctgatagcctgtctccgcctggcatggcccaacggaggcttctggataggtcatcctgagctagaactcctccagagggggtgcagggcatcccgagtcccagagttgtcctttcatattggtgttaggtaggcagctgtccagcgcccctctgtgagcacaccaggctcccctcttcccagagaagtggaagctgaggctgaggcagccacgctcagagactcctttgcagttccccgatgactcatccaacagcctggcaggcagacagtaacaaggaggctgttgagaagctgacccagcagatggcagctgaacttgtgaaggacatggggaaaacaggctgaccctcacctctcaggggcacaaatcacggcctgggagctgtaaagctcctcctgtggctggcttttctgtgccacatcaccatgactcagaccctcaccgacagcctccaagttcaagaggctattcttgggacactttggcctgacagtggctctccccaaacaccacctcccacacagacacacatgcacacacacacatgcacacacagacacacacacatacggatgcacttgctccctccctcctttcctaattctatctggactctggtctacaaaaatcatggttctgtactaagtccaggactactggccagggggccttcccagccctggactttggtctctggctgtcaccccagctcatggccctaacactttgccccttctccctcctgcagcgtgtggggaggacgaagtgggagccagttatgtctctgcctttgaaggcaagtcaaactcctgattcattcctcagcctagacactctcctcagcttattcacgccccaaaggcattgggccctctactctctgcataagagttgaggacacgagcagtggcaacagccaaacccacatggctcacccataagcccaagaaatcagaagaggaaaggaaaggagcagaattcactccatattctttgaggcctgatgcacagacactgttggttctttcttctgtgatgcctcagtgacctcctggagaagcctgggggataggaatgatctggacagtaccagatcaacctctgggcatagctgtatgaggagttcttaatctaggttcaaggatggattcagggagaaaaatgtaatttgcatttttccagggaagacttggtccatagctttcaacagattctccaaggatctgccattccccagaaggttcctctagtctccctagaaaatcagggccgggctaaatgcctgattctggctctattcttccactccgaggaaaagctctccaatgcagcagtttccaatctgaccacagattagaataaccagataagttctttaaatgcattcctcctaggcctgctgaaccagtcactgggcattaggcccagaatctgtacttttgacaagttctctggatgattctgatgccaaagggccagagactgccacctgacccctgctctgtactcaaggcgacactgtccaaaatggtagccactagcaacatgtggctatttacatttaattaaaatgaggtaaaattttaaaatcatttccttgttacactagctaccatactcaacagtgcagacagagaacatgtccagcattgcagaaagttctattggacagtgctgttctgaggtgatgagagcggtgttttctctgacagtaaaatttctgttcctaggattctggggcaggaatggggtt

SEQ ID NO: 64967 - DNA, 2876 bp, Homo sapiens
tctgtgtccactggcagtgcctcagctctgcgtgatgaactgggacccacaattccttggcagctaaagctgaaattagttgtcctgtggtcatctttgagtgttacaacaatctgctatttgtatacacataactacatgctggttgttggtaatcatacaaatgaataataatgacagctattattatctgccatgtattaggtaatgcgtgcatttttttcttgaatcctcacaactctgtgagcaaggcactaatgttatccgtttacaaggaggaagaaactgggcctcagtaggccaagtaatttgcccaaggccacacagcagtgaagtggcagcggcaggatttgcacaagagacttttatgtcaaagcccatactcttaaccatgacactcttcctactcccaaatgatctaagctttaaaaattgggaccgagatgcagaagctgtcacaagtcaaaggttagtgagaaattcagggactggcctgggaggaagcaccttaattaggaagcatgaactacagccagcctatgttctggaaaaagcaactttaaaatgacaacagggaagaaagactccaagctggacttgtggtgggcctgtgttcctcagcccacccaggcctgacatagccaggcccattccaaggagaaattctatgacaaatgcaaatttgccattcactttacaaagcctggctgcaggcttcttgaacctatttaccattctttttataacaaagactcgagcatcatttgctatcttcataaatttcatcagtacttttgcccccaggccctgatacagggcattttataagctttaaaagagaagtattacaatggtattttcaattcaaccttcaaatcctttgcacaaggagagccaacagcaaatagaaaagacgccacagggggcatcatggatccacaaagacccaatatgcaggagaacatgtcgggcaaggtagtattgagataaaaacctgtcacacgtgtacttaattttatacaataagcaacaaggaatgtttaatgtatattgtataaaaaatttttcaggccgggagtggtggctcacacctgtaatcctagcacattgggaggcccaggcgggcggactgcctgaggttgtgagatcgagaccagcctggccaacatggcaaaacgctgcctccactagaaatacaaaaattagctgggtgtggtggtgggtgcctgtaatcccagctactcgggaggctgaggcacaagaatcgcttgaacccgggaggtggaggttgcagtgagccgagattgtgccactgcactccaacctaggcaacagagtgagactctgtctcaaaaaattaaaaaaaaaaattaattaattaattaattaaaaaaatttcaagtgtcatcgaaatcagcaacttagggtattttgtgtaactgaatattctgattaagtgggggctgccctgtatgccacttaacatgaccaatttccaaagattagatggccataattgcccttgacactaaaatcatgtgaaacacagccagtttctttgatgactcaaaacgtactttgtgatcttgccaagctttgagatcatcgttacaagcagcattttggttgtgaaaaacaactctccttatttaaccttttggggtggattctgagcaagaagttccctaggctacggtcaatctcgctgaaatacaaccacccaccgctcctttctgggtttagaaatctggttttcagaggtgggagtggcttcaagcagcgtctacctgtgttcagaaaagatgaagaaagacaggctcaggctccctgtataggagaattcaagttcattgtagtcactggtgactggttctgaaattgaggaactagtttgaggaacttcagaataaacaagaaacccaaagaactcagcttccacagaaggcttccaatgcatggaaggaggcacaggtccagctccgccctgtggcggggcaaccttgaccctggcctcatttcagatgctgccccacatgctctttgacaagctggaccaagtaaccagcttgaggacatgagtggcagaggggtccctttataatgaggggtcatattcttgtcctcccttgggaaggtaaaaaagggcttgggacatggggcatgatgaggaatattctcagaggatctcacacgattctttggtaaaagagggtaaatcatgaaacagcccacggctctctcgtcctccccgaggccagcagggcttagcgggaggagtttggattcaagtcttgtactttcactcaacagcaaatatttaatcagtggctaccatgtttcaggcaccgtgctggccagcaggaatatgaggatgaccaagagccttctctgttgaaacccttgaaaggccttcttggaatgctgaacccagttacctagaagcactgccttgatctacctgcctacaactctctagtggcaccaagcctatgggatgtgccagtgtggtcactgccctcccaattctcacttggaggggtgggaggtggtcagttatgtgtttattagctggctactcactgtctgattctactttgaactatattttcttttttgagaagaggacttgttctgtcacccaggctggaatgcagtggtacaaccatagcttactacagcctcgaactcctgagctcaagtgatcatcccacctcagcctctgaagtagctggactacaggtaagcaccaccatgcccagctaatcttttttttttttttttgacagagtcttgctctgtcgcccaggctggggtgcagtggtgcgatcatggctcattgcaacctctgcctcccaggttcaagtgattcttgtgcc

SEQ ID NO: 64968 - DNA, 3901 bp, Homo sapiens
ggagccaggcagatcagctaggataacacccagagtatgcatgcacctcctgcacagaagaaagatgcagaagagcttcgtgcactgtgggtttggacccctgtaatcaatcattgaaagttactaaatacccactctaggtgagatactgcttggctaggtaggaaagtgccctaaaggtgtgggcaacctttgagacttcctggtaattgtattttcttatcaaccttgacctccttttgattacatgaacctcatggtataagacagcgtccaacaaatagctttctgtttactttttcttagacccagggcagcagctgctgtggctccacccttcccaggcctggcagagcttgcagaaaggctgagagtgatagggttgtggtaggggaataaaaggagaagctagtttaaaaaaaaaaatcctgcttcaggattagttccttcgttccctggcagcagagtacagtgaagagtctgggttttatagttcaggctctgccattaactagctgtgtggccttgggcaacccacttggctttcttgggccaccattttctcttctgcattttctcactgcaaaaaatgtgaatgatcatgtccaggctataatcctaacagctctttctggacagtgaggttaaggttatttagccatgccagcaggaggtgactactggttggtccagactgatggggtatgggtacaggggctgggttggtagtctgccagagacagggaacgagattatttgcaagagctgcagcttcattaaagtcaagccctccttgtagttggtcctggacattgcttatagatgtccctgaccataatcggtcaagttcaacaccaactgcactagtccagaacagtgtctgaagaaaatctctgcgttaatggacacctgatagtggctttagcagaaagagcgtcaggagaagctgtagtaaccagaacctgggagggagggatggctcaggagtaccccctgctgcttctttcttggtacaaatcctggtcctagaagtgtagacaactgagatggtggcaggcttgggattcctaaagctttctgaaatccagggtttaatctagcctttacaatcgctggagctctgcagagactccaactcaggtggctgaaaaggaggcaggtggaaaagcgttcctaaaaggtttttcacaccaaaatagggcttgtctctctgctctctgccaagggatttcccagctccccagggccaaagctcccctcctgcttctttgctgactgtcactggaagcaggccattttccaccctcagggtggctggacttaggagtcagtgacactgctgatctgggctctgtgccccgtccacgatcccccctccgctgtcagcccactggccccagaagcctcctgtttacctcctgccccctgcctccatagccctggggctgggatgaggctgatttgtggcagagggctcctcacgaaggtctgctcaggactttctctgcaactgtgctggggaataaatcgcctgtcacctacacccctgcatgggtgactcaccttccagagaaagtgctctgctcacctaagcaaagctgcttggaaaatgactaaggcacctatcaaatgcactctgtggggccaaccagttatggagcaaggtccaggcacactctgcctctcacctccagcctgaagtcaagtgcagagctgccacgccaggcctgctggtttcattttcatctgaaccgagctccacatgaggcttgacatccggtgatctattttttctaaaaactagcttcactttagaaatgactcttcggccatcaagtcagcttccccaagagaaaacaaaatgttatttaaagggaacagtagcctggtgagagcctatatttttgttttgtattaaggtgaaaaaagactttaaaatataacatgaaactttttttttcccttgtgagattaaaacaaacgtttttctttcaagagatggggtctcgctatgttgcccatagctacttgacctcctgggctcaagtgatcctcccgcctcagcctctcaagtagctgggactaaagaaacacacgtcaccattccaggcttcttgtgagatttaaaggggaatctgcaagtccttgactgcagatcgtgggcccccagacagagtctcagagagaagctgacaaagacatctttacgagggggaaagggtggtgagctggggatgccatgtggtagtgggaacctcatcccacagaaccaaatgttccctcctgttcccccaaagaacaagtccttgctgatctacatgccatacagtattttccctttcctcacctccaggattaatgcaggaacctacttgatcacgtgtgggacacaggaagcccctagacaggcctagctgtgtctccagctcagagttaggattgtcaactgggcagagcctggacctttgtagcctcatttggagtatggtgagggcagtatatagtgtaagacagggagaacccgagagctgaagcttttagactgaaggactgtccccctaaaggtcctactgagaaaatgactctggcctgtcaggcagtctgacccttcttgacatcatcttacagaaaacaggtttagtcacaatgcagtaattggcaactactactgctactattactactactactactactactattactaccaccaccaaacaccaccaacaagaacaacaacaacaacaacaacagttacagcctctatgttctgtgctgggcactgggctcagcactttacatatctcctctcattttctactcaaaacagccccatgaagtatttctgatcccattcacagatgaggcacctgatgattagagaagtgaagtgatttgcttgcgggcacacaggcaggccgtggcagacctcgacctgacccaggtctctctgacctgacagcctcagccaccacatgtgacacggagacaccaaggacttgttctgttgctctggacaaatcacgggctctctgcctttgtttctacatctggaaaatgggcacaagcacacctgtccaggcagcaggctattcatcttttggccttttattaattaaaaatcaatatcaattaataattgattggtacaataaataaataaagctgctaccctggtttcgttatgttcaaaattgacatgtttgggggaagaaaatccttatcgtttcatgagcaaggtagtagaaaaagcagtgacctagatatcaagaaaagggggtttagattctgagcaatcctgtctgtttctccttatgaggcttcacttttctgatctttgtccctgcccttcttcacatgagtatggtgtgaaaatacaaagactggccataaaattattcttgatgccacataatttcaagggatttctatcagggagctgagggattaagacatgtagaaaagcaagaagggaagaggctcctttaaactagaatacaaagagcacaccggccactgaagaaaaatgactttttctgcattgtcattcaggcagtcataagcccagaacaaaaaaatctcatacttcaatgtcctgctcagctcaacagaaatgctcccctacaatttgccctacgtctggccttccctttttgggctactactttcagcattttagccagcatcaccgagtaaatgcaaaaccttcacacatgcatcactttgaatgcccacccagctcttgcagatgctcagccccattctgttcccttactagggaatcctggtgtgtggagaccagaggggctgacatccttagagctccctaaatccactgacatggaattgtccccggcccaccaatttcacactggtgccatcaatagtgcccataatgctc

SEQ ID NO: 64969 - DNA, 1850 bp, Homo sapiens
tctaggattctgggaaagacccatccttagtcccagctatgaggcatcaggcaagatatataccacccccactccctcatacacacctgcctcaggtgcctcgcccataaaacaagacactacaatctgtcttaccacacagccatctgaaggaaaacggagctcacaggtatgaagacactaagcaaaaaacacatcactaatgttaagatactgtctccttctaatctttcagaaagaccatgtttctagtcaaggggtttccaacatttttcttggaataaactccagactcctattttatatcatgacctcactctaatcatttaatttcatgtgcttttaaagtccttaattaagtcattggtgttcattgtctccagcgatcaaaagtagttttaccatttactttgctgatgtatgtaccttttcaccacttatcctctccctcattcatacctccagtccaccctttagggccgagagcaactttttaacctcgactaggaaggaaacactttttctgaagctacccagcactaaggaggctcccgggcaggtgggaaacgtacgtacaagtggcccctctctgcctggtgcccagtggctgcaagatgccagggccacgatgggtttccaagatgggaatgttatatttgaaccgacagataaagtcccgagttggagagcccagaagaattacagaggaggactggggtccgagggcggagggaggatgctgcgggcggccagcactgccccgctgcatgctgaggacaggcttagctcctgctccccgccttgaggtgtgacctgagaacttcccatgaaaggccgggagggtttcacgccagggcagatgccagggcgcactcctgcaggagacacgtccgccccgcggcaggcgagctccatcctgggggcactggggcgcagagcaggcgggcgggcctggcggcggcgcggggcactagtgaaggggaagcaggcggcccctgcgcgcgctcggagccagcgtgtggccagcaggagtgcgcggcctggaggcccggggcgagcgcggcaccggcagcgcgtgcgagggcgcgcccgcggaccgctgcgagtgggttggacggggtacgtcggactgcgctggcctggccgccgaccccactgctccggggcgaggggccaggccgcagcccagcccggggctgagaggcgatccatcccagccgctccctggtcgcctcgcaccgggccccagggtcccgccccgtcacctaccggccaagcgccgatctccccaaccaagcgagtgttgcgctccgctcgcccgcgatctcccgccgccggccgccgaccgctgagctcccggcccgtggtcgccccgccccggtcccgggctccgccccctcgccttctcggccgcccccggggccacgcctcccccggaggctgtaactttgcctcgcttcgcgcctcctttctttggccgcaccgcgacccgtggccccgcccactcccctacgccaaccaatgagacggtcgtcccggcaagcccgtcttcccgctccctagcaacgattggttaacgaggcctggtttccagaaatgggcactatttccggacgatgtttgtagaagggagatcgctgggcgggcggactgacagaaggcggaggcgactagggtgttggtggaaccacacatgcgccctcggcttctggcagtcttaccagctgcgttctcgaggttacgggaaggaagggcgagtgtgcgcatgcgtgggcactccctgccactgacttcggttaccttggagacagcgaggcgctctccctcgtgggtcgcgcgcgttccgcttc

SEQ ID NO: 64970 - DNA, 2268 bp, Homo sapiens
actgtttttttttaaagaggaacaggtgtgtatatatagactattatgcagatttatatttatatgtttatacttacacatgcctatatggatttgcacagacgctctggaaggatacacgaaaactggtgagactaggtgttttgggtgaaggaagtggatggcttgcaggccaggactgggagagtgacttttgtacctttaaattttttctttttaattttggtaaaacacacataacaaagtttaccatcttagctattttttaagtgtacagttgagtggtgctaagtacattcgccttttggtacaaccatcaccaccatccatttccagagctcttttcatcttgcgaaactgaaactctgtacccgtaaaagaactccacttcccctctccctaggttcctggcacccccgtttctctgtgaagaagcctgctccagacacctcatatagtggaatcacacagtattcgtatttctgtgacaagctgatttcacggagcacaatgtcctcaaggttcacccatgttgtagcatgtgacagaagcgccttcccttttaaggctgaataatatatgcgtgggccacattttgtttatccattcatctctccatagatatttgggttgcttccaccttttggccaatgtgaataatgctgctatgaacatgggtgtacaaatatctcttccagatctttatatctttattttattttatttgtcgagacggggggtctccctctgtcgcccagactgccctccaactcctggtctcaggcaatcctcctgcctcagcctcccagcgtgccggggttacaggcgtgtgaggcaccgctcccggccgctttacatttttaaagcatatgaaggtactacctatttgaaaataaatttaaacgtaaaaggaagaaatacaaataaatacaaatggaaggtgtacagtttcttcccatatcccctaccaaggtcccagcgggtgggtcccccgcagggcagcagccggctcgcccgcgcagggggtccctgctgagtcacgcgcagcggctcagcccggaggtgccctcgcctgcccgccgcccacccgctccccgccgattggcgaggccgcattcctgcgcgctgcccgcggccgtccgggtgactcacggtgcaggcagctcaggaacgcccgctcgcgggatgaggctgcggctcgcccggccacgtcctgaggcctgcagccgctggttttcctatttggaaactccttagacgtctccgcttccaacaagctggtctcctccctggcccccagcaggcagggaagcctgcggaggaagcgccctctctctctgtgcggggattctcaggcctgatctcctaaggaaccacgttctcctctcctcaattccagattccccaaatgcctgaaaaccgagcttacaggatggcgaaatctgacctgaaccaacctgagattaagttgcagtttcacttatctggctgcacgtgaatacttacatgtttgctgatggaaaaaaaaagaaaaagaaaaaaaaagtacatgtttgattacaagaatgcggtcccaggtaccctgagggtgccattctatacacgcaccaaattgtttctaaaatctaaagaattctgaattccaaagcacatctggccccaaggttttaagtaagaaactgtgggtctgtgttatacccattttacagagcagcccgggctcagagaggtcaagtcacagccggaaacaagccagtgggtctaagcccgagttcctgtcttcctcacggggctgcacacaaggctctgcctaccctgtctgtcccactccctctcctgtccttcctctgggaagctctccttgtccactacagccaaagacatcatccttcttggcaaacgacctttcccctcctgggtcacagagccaatgcctaccacttacaggcagttgttgggagacaagaaatctcaagtgactaagcccagactcagggctccagctccccaggccctagccttggtttggccacttttcagctgtgtgaccttgggtaggttacctagcccttctgtgcctcagttcccgcatccataaaggggcataataatgatacccccagccaggcgtggtggctcacgcttgtaatcccaacattttgggaggccaaggcgggaggatcacttgaggtcaggagtttgagaccagcctggccaacatggtgaaactccgtctctactaaaaatacaaaaattagccgggtatgg

SEQ ID NO: 64971 - DNA, 1107 bp, Homo sapiens
ggagggagatccaagaagctgctgtctcctaagtcaggtcctaggcaggcagaggggctcctgggacagcctggggctgcaggtgagtcaccgggagggaactgggtcaggtgtaaagaaaccagcagggccaccccagggtggctgccccacctgggggttgggggtggggggtgccggaggagggagtacgagcaaggggctagctagagtcccttcaacttggcctcagcttcctgctgttaccaacaccccttgccaaagtccccctagctggccccgaagggggacaggagggtctgtcccaaggccagttcctttctctcagtcacagtggcctcgggctgcccttggagtttgtcctaggaagtgggtgctgggcctggatccagaggggaggggcccccagatgggttttaggattcgggaaagggaggggagagattggggaaactgctgtggccaccccctagtcccccaggggcgaggactcactcagttcccagtggaggagaaggaatgagggccccgggctccttccagtcggggctgcctgctcatgtgcggcgcctccggggctgcttgtataagaaggtgcagcagcccggctggaacttccctcccagcggccaatgccccagcagcaggggcgggctccaggccagctccacctgcctgggccttcccacctctgggcggggatggtgaccgcaccctgaaatcccagagtcaggaccaagggaagagtctcagaggcccctttattgcactggctttggcctggcttcccagagctccctgagtggcctctttgtgggagaggaggagtcatccctgcttacctcccccgtctccctctatcccctctcagaagggtttgcttctgccctctcctgggcagcaaaagaacaggagatgtccctcctgggacatcaactcttccacaacagggctgggcacgcaggacgctcagaagaaggagcatgtgcctgccttcagcttgtactgttcttgttgaggggaacagggtggccaaccctaaaggccaccaggctgaaactgaacctgctggccagggtggggcttggggtcagggggcctggaact

SEQ ID NO: 64972 - DNA, 548 bp, Homo sapiens
ctctcactcttgcttccagtcccattttctgccctactttccaaatgtgatagttgcttttagtagaaatccacaagcatttgccttcagggcctccaagagctccccttccagtctcccactggctccccctccacctgcagcaacacaggagccaaacctgggatttaccactgctgccccatctgcatcaggggccagtcttgggacctgcaggaagggtggggaaagtatgttgggcctgttgacataagtgagtcactgtgagtgggagcagatgacagggagagtatgactcagtgaagggaatacaatgtgggtgaacacaaggggtttgcaaatttttacctgcccaagggaatgtggaaactcaggggacttggagcaggcccagctggtgcttactgatgccatgttggcccaatggtgctgctgttttcaggttctctctgggtaaccaatacgtatgtggtagtcttcctgaacttgtctcttctgcattctttggtgactccttgtatcttgacccctttagtccttctttgcca

SEQ ID NO: 64973 - DNA, 1027 bp, Homo sapiens
tggtcagtttcaggctgaggtgcgtcttccaggggacaatctctagctggcccttaaacattcagacttcaagctctatttacagcataaaggtgtttcaaaagacgtgatacaaataactgcaaatgctctgcgatgtgttaagcactgtttgaaattcgtctaatttaagatttttttttctgacgtaacggttagattcacgtttctttttttttaagtacagttctactgtattgtaactgagttagcttgctttaagccgatttgttaaggaaaggattcaccttggtcagtaacaaaaaaggtgggaaaaaagcaaggagaaaggaagcagcctgggggaaagagaccttagccaggggggcggtttcgggactacgaagggtcggggcggacggactcgagggccggccacgtggaaggccgctcaggacttctgtaggagaggacaccgccccaggctgactgaaagtaaagggcagcggacccagcggcggagccactggccttgccccgaccccgcatggcccgaaggaggacacccacccccgcaacgacacaaagactccaactacaggaggtggagaaagcgcgtgcgccacggaacgcgcgtgcgcgctgcggtcagcgccgcggcctgaggcgtagcgggagggggaccgcgaaagggcagcgccgagaggaacgagccgggagacgccggacggccgagcggcagggcgctcgcgcgcgcccactagtggccggaggagaaggctcccgcggaggccgcgctgcccgccccctcccctggggaggctcgcgttcccgctgctcgcgcctgcgccgcccgccggcctcaggaacgcgccctcttcgccggcgcgcgccctcgcagtcaccgccacccaccagctccggcaccaacagcagcgccgctgccaccgcccaccttctgccgccgccaccacagccaccttctcctcctccgctgtcctctcccgtcctcgcctctgtcgactatcaggtaagcgccgcggctccg

SEQ ID NO: 64974 - DNA, 647 bp, Homo sapiens
caagttaaagattggtgagtctaggtgaagggaatatggtatttattgtattatttgtgcaacttttcttaagtttgaaaattttcaaaacaaaaaattggaggaagaaggcatgccagtctaccccaagccctccattggaatgctgaaaatctaaacaatgtgatttggcaatttcatttcttttctgttgtgggccagtagtccttagatgttggggaagggggtagtcgctgaggtgtggttgacttaggatggaagaagcagaagtcaagactcccagggtcaaagtggtttgctctgctgacccaagtgtgggaggcccagagtcagcgtttcaggtgtgctaattcagcatggttctattcacggccaaagtccaccctgggcacctctctggcagcaatcttgggtgactctactaaggccaggcctccatgaccctatgtctggatcccatatctccacctctcccactgtctcaggaacggtgcttagctttttcttttccctctcctgtcttctttgccagcatgtagaaagtttaaataattcccctctttacaacaaaacaaaacatacccccttcagtcaaccaccctagctctcttctccttttcccagccagatttttttaaaagcatcct

SEQ ID NO: 64975 - DNA, 1113 bp, Homo sapiens
tgtcaaaatgagaacatattattgcctttcatctgattgtaaacataatacatgtttataaaacagtataatgagacaaaaatgtagacactaataagggaaaatctccctaattgtatttctcttcacagagaaagcccctgttgggcatatatactctagtttgtttatttgtttgactacacatatatgtattcttttcttatgtataaaaattctgaacatgcacatttctgcaactactgttttcacttgatgatgcatggacctctctagagtgtacgtttcttcttccttacaaagcagttggcttcgcccagggtgcaccaggacacggttttggctctgtccccagggtgtcacgggaccaggggatgatctcacagggtctgccatctgccctgcctggccggaggctgcatcgagagggccaaggggcaccacgtgtcgtgggtactgtcaaacaagagccttcagagccttccacagtctttcttttgcttcccagcattgcttccccgctggtggactctgaatctagaactagctccaggcgcctctccaaattcagacgggagctggggcactattataatgcaaatctaggcaaagccctcccaataccaggatccagaatggggtggggccctttgccctgaaaagctgtttagtttgaaaatacaaacaggagacagaaaagtttggctaaattaatggataaagttttaacgatggtaaccatagtagggttcatcgacagccagcgatggttctgaacacttgacatgtattaactcacctaatccccacattttacagacaatgcaaaggaggctctgggaggttgagtgacttgccccaaagtcgcacagctcctaagtgaaggattcggagtggactccaggcagcctggtctgactccctgcactgcgctgtgcttatctctggccccaatgccgccatgcagaagtgtctgggggcactttgtctctgtcagacagaattcggagatgtgtatgcttgccctggtatggcacttctctttttttgagacagaatctcactctgtcaccctggctggagtgcagtggcatgatctcagctcactgcaac

SEQ ID NO: 64976 - DNA, 5380 bp, Homo sapiens
caatactaaaataccttctcaaacaaccacaacacccctatgtttacagagtacacaaatcaggtcataacgaacagaacaaacctaaaacttcttattcactttaaaatgcaattaaaacctgtggtcaactcaatcctctacagaagacgcagagacactggttacaatgtagcattactagagatggaagagtagccttagtgacagtgaagaaaaaagtttagtatagttacttcactttcttctcaccttgatatgagttcacaagtgaactaaggcctactcattttctaacttccagaattttcctcaacaggaaacactcacgtaacaaagagtgctctgcaggtttaaccagagaaataacatgtgtaggcaggaagaaagaaaatcagacaaaaatttaacatctcacgttggtaaagcaccaaagtcaaatacgaatgttctgaacgtggctttcagaaaagatgcaagaaaacttctaaaatacttcacttcagtggactcatatagatggaaagaccgaaaatcccaccctaccataaaggctctaataattcttaactgatcattcttttaactggtcacaatcacagacactggtatatactcaaatgaggtggccatcagtgacaaccatcttcaccataatatagacattaagaacctttgtaacatttaatgtttccctccaagtagttcaaaaaataaaaagtcaatcacctcaaattatgaggtactaacaaatacaccaaatatgctaaaggtcgaaggaacggcacactttgttgcataaacctagtggaaatccaattcagaatttcatgactgaaggtagttattccacatttataatacattttttaaattcccaagggatgagcatttttaccttgccttatttttagaactacacatcacactgcacatatcacatgacatgatgtaactgttagcaaagaaaatggtccaaaccattgacaatgtacatggtaaatcaggatcaatgcatactcaagaaccacatttcgtatttactttaaaaaaaaagtttcttaattcaaaatgttttttcaaattgaaaaaatgtctagtaacctatgtagaaaaaaccagaaatgtacttcgtattttataaaataggagtttacccaattatgggaaaaactgatataaagaaacagataaaggaataacatacttctaaaactacaggattaaaagtaaaaattttctagatcaacaccgaaatgctaataaatacacttagcattaggcacaaaacaattactactcaaaagtattcactgttgataggttaaaaaaatagttttaactgacaacgcctgtagacaattgaaattttctaaattggtcagacagcatgctagaaaaggaaccaagtagagcctataggaaaggggaaagggaaaacacacccacttaagcctttgtaaatagtggtcctttaactgacccaaaaagcagagaaaacagaaattacagaccatcctgacaaatggaaaacatattctaacgtactagtttccatacttgaaaggactttcaaaatgaagttcagtagcaatctataactatatcatgattatgcaaggcaaagattatgtaattttatcgtttattttaaaatgttctccgactctaaaactaaaacaagtaaaacgttttgatctctccaaagcgaaaaggaaaggttcctctgagctgcaatttaaaaatataaacacacaccccaaaacaaacaaaaaaacacaatgattgctagccacgtgacaaaggagatggcaacaccaggattgtgaatggaggggagggaggcgaggctggaggaagagagatttctcggaactttggggaccgcggcagtcggtctgccgaccctaggagcactaaactccagcccctacgagttgtgcttctaacaccctcaagtacagttttattaataagtcacagaaaatgctccagtgacctccaggataaaggggggtgggggggaccgaggaaaaggaaagagagcaatttaaagtggcgccatcatgtcaccccttctcccctaaagcaatcagtaagcaatagttaagtagcacgtttctctataaatccacattgggattccaacattggaaaacgaggatttttaagtaagacacgggagtagcgctgtttatcgtatggaaaacaaactatttgctaagaatcaaaagaccgtcagccggaaaacaggcccccaaaaaggcagttaagattccaactcacttaaaagcaaataaatccctcttcctctttagtttaaaaaaaaaaaaagtccgcctgagggagactacatctgaaaacgtaagtgacctgaatttacaggcaacaaaaataataaatgaaacaatcagagttgtgatacaaaccgtgcaacgcgccaagatgtgtgtttcgagcagagaaaggccttttgcagtcaagagaagttcaaggcgagagccagagtttgtttggggggttcttttacgggaataaatcatgttcttcaggccgcctttttaaatagaacgccaaaggaaaagctggcgaacgaggcggcagctcctggggaagggcccccgcacacccccgcccttggggcgactcccagcccggacccgcagcagggaagcccggagaggccatttaaagttccgggggatttttctaccctgccctgcctttctagttacaactaacaaagagagagagaaatgggagccacagggagagcgaggagaaggagaaagggcagcaggaggaggaggagaggagcagcagcagcacctaccacgtgatggaggagcgtagcccgggcggattcagccccacaaaatgggcgcagtttgcaaacagccccccggcctgggcgccgagggccagcggcgggcgggggcgcgcgacggcggctccggcccgggcccgccgctctcctccccccgacgcccggagccgccctgactttccgggcgggggggcgaggcagagggggaggggaaggcggcggcggggagcggctgctttttcttctctttcgggccctttcccggccttgctccgcaccgacggggcccgagcacggctggagaccgcagcccggccgggagggcgggcgggcgggggcagagagtgaaaccgcccccccgccccgcacaaacaagcaccgccgtctgcagcccgaacccgcacccaggccgccacccccggccgcctctttccagccggggagcgcgcttcagccgccccccgcgccgccgcggcgagacgagtcggcttcgctacggtgctcggttctcccgccggctcggcgagcggtggcggcggtggcggcggcactgggaaaatggcggccgagctccttttccctccccccctttaatctgaagcggagggagaatggagcgagcgagcaagcgggcgagcgccggggacacggggaggagggacagcagcgcctccgccggctgcggctgcggcggcgaagggccgctccaccccggcgcgccgccagggggcgcccgccgcgccgcccccgcgggccgccaggaggcgcggccgccgccgcctcagtcatggctcctcgccgtggccgatgtttttgtacctccatctgcggaggccgcggcgcccggccccagctgccccggacgtgcggcgacggcacgcagcactgcggcagggggaagccagccctcgctgcggccgaggtgagtctaacctgaggcactgacgccgtcacatgccctccgtgctggggccggcggtgcggctcgccagttgaggggcagggcgggccggcgccgcggagcgagaggacgtgagcgaggaactgtttgcactgtgtagtaaagagggtaaggccgtcggcaccacactattccaaggctaaccctgcagaaagctccctgaccagtgaagcggcttccgccgcccgccctttgtccctagcagccagcctccgtatactgcagcacggctgggcactagccccagcaccgcgctccgcagccaccagagttgggcggggtggggagggtgcacgtagtcactgcgcaggccccagccagggcccgcgccgggccagcccgggaagggacagccgggagccagaggggaagtgatggccccgccggcgccgggcccgctgggaactgtagttttcgtgaagaaacacgcgtcttgttttgggtgtcatggcttggcagatccgccaaaacaggcaaatggcattacacaatgagtatttatgcttcctgccgccaccaaaaggaagttcactgccatgctaaaagtttaacaaagaactccataaagaaacacaagtctcacaacaaaaagccaacttcccacctcgttaccagagttggtttaaagtggtggcaccttatcatttctcatgaccagtttatcagtacagaactttatattgtccccaaaataggacctttaaaataatggaacctttcctagacttaaagaattcataaacataatgtaatacaaagtgtcacacaaagtgtaattctaccaccctttaaagttgccaaaagatgagtggagtatcttgagatttaaaagactaatctaggattcatcaaaactggcttaaatgactgaagaaaaaatcgttcaaatcattaaatcatcaaattcggcagataagaagggtatgtatgctctactaccaaaaaggaagacgcaaaatgcttcacacttttttgtggcttaccagaaccaatatccggcattatacgtcacttctgcttatcaaaaaacaccctcacagtcgttacagaacggttttagtcttcccacaaagttacactaactcacctgcccctgcaacatctgcacctaggtttctgcgaatttccatttgtactcctaaaatcacactctcaagcatagtcatagttctcaaataccaaaggcaggcagtttggagtcatagggtcaaattacacaaagaataaactaatatttgtatacacatccaaaagaggtctttagtcttggatttttaatttacaaccctggggaaaaactttgacttttttattgtacacacatacacacataaatagtaattccacaaaatacagtagaagggtattggaccaacagatggcgaactagagccccaatctgaggctcctgaaatctaaattagcagaatgaaaaataccaaataaggcaaagccctttgcagcgtatacttaaatattaaattcagacacaccataacaaaataatcttactgctgctccaaatttttaagactgaactgtcagatttaattaggcaaccaaataagcaagattatatgaaatatattttt

SEQ ID NO: 64977 - DNA, 821 bp, Homo sapiens
gatagtacattatgtacatgcaaacatcccaaaatctgaaaaatctgaaatccaaaaaacttctggtcccaagcatttcggataagggatattcaatgtatacagagcaaaaggcagaattctcactgtttcaagatagaaaaggagtcctcagagagatatgtcctgcttgtaacaaacagctccaaacagccctagaccctgaaaagtactttaaggaaagataaagaggtactggtttagaccatttatagataaatatgcatggctaaaacccctgaatgtaatccttccaggcagaagataaaacctgaaatctaacgtataaattgtcatgggtacaatattataaaagagaccataagttaccgagaacatgactggaattcaggaaatgctaaaggtcctgtcttatctctgtaactcatttacaaagaaatcatgtatgattttctcaactgcaatcttttttgtttctgaattagactgacaaaaattatagaatataatattcaatattttccaccatattccaaattctcactatcacatttaaacacaattttatctaatgaaatgtgtcccaaatgaaccaactttaaccagcatcagaaaaaataaaataaaatagttaaatgaaactgtatcttctttggtataagaagtccttcaggccagacgtggtggctcacatctctaatactagcactttgggaggccgaggccagtggtttgctagaactcaggagttcgagaccagcctgggcaacatggtgaaaacccgtctctactaaaatacaaaaaattagccaggcgtggtg

SEQ ID NO: 64978 - DNA, 1449 bp, Homo sapiens
gagaaggggttagaggagagaaagcaagcaaaagcccaggctcacttttagagcctgggaaccctgtctgcaaaaatgacagctagagctttctggctcctctgtttaatcgtcggatcatcccccgaagctccggtggagagaaaaagtaagatcggtgtagtgcggagccctgggagcggagcggggatctggggagggggcgcccaggcctcagccgccggccgacaaccgggccaccttccgtgaggccgcacacgctcccacaggcccgcgcctggcgcaagccgagaaccgcgcgtcgccgcgccgcgggcccgcgacggaggaagccccgagacgcgcgcgctcacgggccctacgcttccccgccgcccggccgcgcgcgcgcgccgccgagggccccgccggccctgcccaccccaaccggccgcgcgccgttgtgccggcccccggctcgccgcccgcgccgccgccgcgcctcagcttcagattcggcctcagtcagccgcgcagggacgcggagcccggcgccgagctctgcgcttgcgcttgccgggcgggcatggacgggcgagaggcgttctgcaagcgcgaaatcggtgagcccggccgccgcgccgccgccccgcgagcctttccgagtcccggagaatcctgcacgcgagatcccagggcgcccgacccatgcgggccgtttcgctgttgctaaaaaccaacgcccagggactgggagaggaactggggttcccaaactgttttttggaagcagcgatgaacgggatagtgcatgacgtggacgtgctgggcgcgggcatctggctggtgaccctgctggtggatcgggacgggctgtacaagatgaaccgcctgtacctcactcacccccgacgtcttcttcttccgagtccacatgttagtcctggactcctccagctgcaataaaccgtgtccagagtttaaacctggtattgaaactgagctgaatgacgctgcatatgtactttataccaccgtttgtaacgtgggtgccacagcccgggctgtgggtcgtccagtctttttttgggacggatgggggacagtattgtaacatgattaggatttagacgacaggtattatttccgccactgtgatttaagcaccgtcagccccacccccacgggtgagaacggcagctgttggcacaaagcgggctgtcaataaatagatgttgacaaatggagtgagcgaccaccaaacaccattgccagaagggactgtacagaactgagtttagaaaagctgcttttttgggggagtgtgtggagggttggtagcggggaatacccactcccacatcttttttttttttttttttttttttttagacagagtctcgctctgttgcccaggctggagtgcaatggcgccatctcagctcactgcaacctccgtcccccaggttc

SEQ ID NO: 64979 - DNA, 886 bp, Homo sapiens
tttgtcataagatgtttttgagatcaaaacctcaaaagaggaggttattttatcctttctaaatttgtacatcttcactgggacactttttttcaatgtcacacagaaaaattgcataattgtggttaaagtcagaaatatgtttttactttaaggctgtcttttcatatcctaaaaattgcagcctcccctttaaaagtttcagcaacaagtcacaaaatcatggagtagattgaagtgtgtacaataatcaaatcctgatcaacagacttgttgaaacagtgagtcagctataaacaaacaccccagcccaaacacagaaggtgaaagcaggatttcattttccttgcctgacaacttggtccatagcctctttaaagaagtgactgggggcagccgggcgcagtagctcacacttgtaatcccagagctttgggaggctgaggcgggcaatcacctgaggtcaggagttcgacgccagcctgaccaacgtggtgaaacaccgtctctactaaaaatacacaattagccgggcatggtggcacatgcctgtaatctcagctacttgggaggatgaggcaggagaattgcttgaacctgggaggcagaggttgcagtgagccaagatcacaccactgcactccagcctgggcaacgagcaaaactcttgtctcgaaaaataaaataagtgactggggaagggtgtgtatgagagttcaagaaagcaggtaagttgcagaatttattgcaaaatgatgtagagtttctcatcagctggcaagccgtactgagactgggtcctggagacgagcccacaagggtgtgtgctggacgggcaccatggcataaagatgcgggagatagcgcctgtgattggcaagcatcc

SEQ ID NO: 64980 - DNA, 2987 bp, Homo sapiens
ctgcacaggcctgagccctcccacgcctgagtgagatccaggtctgtaaggagggaggcctgggaatctacagcctaaacctgcccaggcccaccccttccgcacgtggatgcatagggacggcccctctccttttctcggtctcagtcgccctttttgtaaaatggacacggcttccctccgctcctagagcccctcaccaggagggcagtggcccgtgcctcagtctccccatccccattctcctgccctcacgcccaggcacggccaactccctcccagaagggtagggacaccgggcagttcccctggttctgtcccagggtccagcgcagggaaaggagagactctcaagggtgtgctccagcctcctcacaacggtcatcgtctctgcatgtgcttcattcacatggaaagttttactcattttatagatgtggacattgacgattagggaggccaaggcctgcaagacctgcagcccaaccatctctctcctcatggcaggacccgggagccggaggtgactcgccacctgacacaggctgtgaaacgccgggccggcctagtcggcaaaattggtcataaatgtgaccaaatttatttagaagccaggcgcccgcctcccctcctgggctgtgggccgagtgctgcaagaaggaagcccgggacccctcttggctcccgcggccgctctccgcggcccccacgccctcctgcgccacctacagaggggcccgtcccacttccaacgacgggagggcgaagagtgcagagctggtcccgcccgcgccccgcgcctgcgctgccagggccgaccgaggacggcggcaagggggcccgacgtcccgcgtccagttgtgctcccggcctcggggtcccagccgcgccgctcactcgccccaatcctagacgccccagccctgggggcgcctcggggaagaggggccgagggcgggttcacagggcgggcgcccctcgtttccggccggcctgcggcctctcgcggcggcagcggcgcccgggccccgggccgcgctgggttcccagccccgggaacgcgggggcggcgggggcggggcggggattagcctgggagcggcgctgacagccccgctgtgccttccccgtccggcggggcccgctgggccgctcaatccgcctttgttcgcgcggtgtcacaccgcattacccgcataatgcggccgccgggcccgggccgccgggccggccgccaccgcgtagcaacgggcggctcccgcggccgggccgcgcccccggccccggcgccgggccgcgaaatccccattgaagcggcgccccccgcccccgcgccgcgccgcgccgcgccgcgccgaatggccagagggcgtgtgaatggcgcggcggccgcgcggtgggggggcggtgctcgggcgcttttcaggccgcccaggcccctccggcgcccgcccccgcccctgcccccgcccccgcctggggaagcgcctcgggcccgccgcgccgccgccgcgcctcgccccttccggccgccgaccccgccgcccccagactcgcggaagacgcgcgccccgggctgcccgacccgctgcgccccgggtctcaaagcgcggggcagagattaacccttggccgcccacgcggcggtggtgtggggactcgccgggggcggggtgcaaacgtggggccggagctgggcgcgaacctgggttcaaggtccgggctctgggcaccgaccggggcgcgtatgcgctcgcggcgtcttccgggatgctctcctcgccgccgccagcaaattcccaaactctcgggcacacatcgcccctccccccgcaacccaaacctgtcctcgggccatctagggaccggggcgtgtgccagaacctacggtggtgacttaaaacgttcaacgcggagtgaatgggtagcgctcccagagccgctttcccctggctcttggccggagacgggaagagcgatcagaggtgactcgcttttggggagcgcgtctagacgcagggttgtttgattcagcgctacctggcccgaggaggggcaccggaaagcgctgagaccaacacaccgacaagaacgagtttgaaatgcaaaccgccgccacttggccccaattaagaggccaaatcttttatgtcaacaaggaataattagttttggcaatagaagcgtaaacagaatcatcatccattgatttgctaattaccctcctgtcccatgacaatagccagcactttgcctgtaggtgggacagaccctgagcacctgaggcaccggtaaaggggaactgcactctaaaatgggggttgtcagcttcccccccaaccccacccagcaccccaccccttcacctgaacgtcagatcccttttctttctggctgtataggcagctctcattcattccctagcttctaataggagggagggccaggctcagcggtttgggtggcagagcaactctggctgtggccagcccggccaggatcgttaaattcctggacactgccgttccacaaagagctgcccatcttccacccagtccatgagcccccaagtccccttcttgggaggagttgtcccacttagcctccctcccagggcctgcaggttcaaagtcaaatcatgtggttccctgtccacttgaggcacagccagttagactcccaggctgcaagacggccggaaagttacccagaggccagtgcaccctctagccccaccatgattcctgggcatatccagctgacagggcatgaggatgaacagaaacctagaggggctcttgggggcaacgcaatgctaccacagcaccaggcagcttcctcacctactgaggactttctagatgggagggacctaggggtggcaatgctctcacccccaccccaaagcggtatttgcatagcacttaacacagcattggggaaatgtcacaaatgtccacagcaggagcctgaggcgcccactgtgc

SEQ ID NO: 64981 - DNA, 1236 bp, Homo sapiens
aggtgggttagggatgagttgttaagggttgggagaatacatctcctaatgcaatgaggaacagatccagctgggttggagggaagggaggagggcctgcgccccctcagcccccttcactccccacctctgcacccctgcctagcttcttaaccaggaagttgagctaccttcactaaagaagagtggagacaggagacccggcccttctctctgggacaggactctcctggtggggctcctcagaggtgagatcctgcctctgggcccctgggagaccctggaccttaaagttattgtgcccacacattctggatggggcctgcgaggatggtcagggtcatagtgccacctgctggggctcccaggaacagcagctggagagacgctgacgtgtgtgtgtgtgtgtgtgtgtgtgtgtgtgtgtgtgtgtctcggttgtggtggtggcggggcaattaataacacctcaccacagatcttaaaattcgcctgatattgaacccttaccccctttccaaggaagcagccaaaagagtgcggaggaagtgatattggaattcaactggggctcccagggaaatccagggctgcagggacataattgcattccttggaactgctgttttttgaacttcattcatgaagcctggtttctagggatgctttctcttttcatggacccagaaggaaagtggagatggttcttcatgcttctatgtgaaatggggtttcaagggcaaaaaacaagtaagcactttgaatatctttgtgtttttttacactgataagaggaagaaaagtatgtcacattgtaaatgtcgatgattagaaacagtccaaggtgatcattgtaatgtcaatttctgaagcagttgggagaaataagtaggataatgaaatgaatcagcacagtgcctctcacttgctaaatatgccgcatgttgggaaattcattgataaaatgaaacccactgtggagaaagtgactggccttcctggcaagccaggctggaggtgagcagggttggccagggtcatggggtgatgtcttggttggaagccaccaggtgacctgtgtcctgttgacacacaagtatgctgcttagtaactccctggaattatttttaaaaagctagatgtgtgaataaagaatttgggggattacaattttggtttgtaaatgaaccctttgctttaggaagaactcagcataggacccttgcaagtatttc

SEQ ID NO: 64982 - DNA, 593 bp, Homo sapiens
ttttccaccgactccagatgcgtccctcctcctacccctccaccttctctacctcggagaagccattgcgcttgcctccgccccatcccggagaggcagaatctcctccgtccccgcctcgtaccctcctccccgcctctccaggcccggggggcttcacgttcagccaccgcgaccccgggcgggcgcggcgccaggtgagcgctcacctggggccggagggcggggcaatgggggaggggcgggggcggtccaggggcggctgccccacccgcgacggggcggggcgagggcggtggggccaatggggcggggggctcgccgcccggggctggggagcctcccaatctcctcctttcccagcgccgcctgccccgccccacccgggtttaaagtcccgcgggcgggtggtggcggagctgcgagcttgagcggcgcgaggagatgctagagggcgcagcgccgccagcaccatgcgccccccgcccgcgctggccctggccgggctctgcctgctggcgctgcccgccgccgccgcctcctacttcgggtcagtgcccgccgcgccccccgcccgctccccggcctgcctg

SEQ ID NO: 64983 - DNA, 1666 bp, Homo sapiens
ataataaaaaataataaaataaagaaaaaaaatctataactacatttcttgtaattttgtcttttgagagtatacatatcttatttcctttcccagaccagaacctctttgagggcaggaggaacccggttttccctactttacacatgacacataataaccactcattcaatgtaggtttactggatggataaataggaatggggggtagataggcgggagagtgagtagacaaatgcgaaacaggaaaagcttgcgccaggaaaaacagtgaagagcgaaatctccagacccccgattaaatggtttaaagtgaagccaagcaagaacctccagtcctctctgcggcagagaacagcagatgatagcggctcgccttcaactttgctctgaggacctctcgttagtatcccgcgattgtccttcctaacgcctgactgaatcctgaggctagccttcagcgaacatgtacaccgccttgcccttcacgtgaagccgagcctgtgactacacttatccttccgtcgccggcctcatttctccttccccttctccgatctcgcaaccactgctagtaaggcgcgcgtgcgggcagccctggccggcaggggagggagggtcctgcgaccggaagccggaaaccggaaggggggctgtgaggacgtgttccgaggaagccagagccggagccgtggcctgcggggccggcgacatggatcccctgttccagcaaacgcacaagtgagggccggtcggggagcgggcaggggctagacgaggcgaggccaggtgagcctggcttctggggctgaggcctcggacgtcagccagggtagaggccgagtttttccgccagggcactgctggggatgcctccgaagtgcttaatccttggcgggactcccaggtcagccacagacagtgggttcaggctggggcctggagacgtggggcagatgactcctggggtctgcaagttcgtgactacctgctgggtagactgggtgacgggaaactggcacctgcaggttataaaactttgtccagcacttgtcaactcggtgctcctggttggtagacctcgagaggagacacggagtaggagacacggcccctggccgtaggagtgtactgtttaattggagagtcagggcacgtacgggaaagtatttgtattcttattcgatttatactaaagaccacatttttatggtacaaagaaattgctgtccacgtagcattcactattattacttgttaatcgtatctggttacaggttatcgctaagaaaatcaaattgtaatttagtttctcataacttaaattccttggtagtgtcctttattcgcatcgtcctgcactttcggaattgctgagatacgtagttgagtattaatggggccatacttaccctatttttgggggcggggggcagaattatgatttttaccctgttttggagggacggaattttatgatttttattttttattgtaaaatatacacaacataagatttactgttttaacaatttttaagtgtacaattcagtgacattgagtacattcacaacttacatcactacgatccatttccagaactttttcatcatcccagtgtgcctgttaatcagtagcacttcatttcttccttccagaacaccta

SEQ ID NO: 64984 - DNA, 1103 bp, Homo sapiens
atagaggcctggaaaggaaaaggatcttgtcccaggtcacagagctggtaatagcacagccaggatttaaatccttagttaccctacaactaagctcaaagtctttccagcacttggcatatgtgtatgtgttgggggtggggttgggggtgggagtgcttcgttgttggggaaagactcccccgagccgggcttagaggggctcaggagcctaagggtgagtctgtcaactggctgcctccccctgctctagagaaaaggaagccagtgcctctgggccaagccaccacccacatgggactatttttaccctccacctcagggacaagtctgcatttcccagctctggaagggccatctgggcagtccggctgccccaggaagagctgccacccggagctttatgccctgctgtctctgcagctgtttctagatgaacctttagccctctggcatgcctgagccatccagagtcagtaagaagtccccctcctccagatctcaaggttaataaaagctcctaattagtatcacttgctggatggacccgccagaaggaaaatgcttaaatctgcagagattttaaattgttcacgtttgtcaataagtgttctttgtatgagccattttaatgaagagataagaatgattttatttgcatattcaactgtaaaccacccagacaccttcagaaacaagtaaatagatgaccactatatgagagtgtacttcagggaggcccaagagcctttggacatcatttattttctgaagtggttttaaacaacccccctaggacccggtttacactcttcatttgtttggcacgcttttcctggaatgggcaaaggtagcctgctgcctgtttgcccagttcctgtccaaatgatctcacgtttcaaattggcagagggaaagttaatgacattttactgcatctggtacggaattgaaataaacatggattgccctgttcagcctttgacccctaagagacttcgaggttggcccctgctcagtttacctacagaggttgaaggcagagggaagtacccaggcagttcaggccaaccatgcctgtaatcccagcactttgggaggct

SEQ ID NO: 64985 - DNA, 1212 bp, Homo sapiens
ataactaaacaggcattaaaagtaataatttgaggtgagttagatttagttacattaataagatgggaagtagttgaaggagagaaaagatagataaagtttttttagttttaatttggtagggcttgaccctggagcaatggcctatgacttttatggtgatgacattttctcgacttgggtacgacgtgttaatttatttttttgctgtgcgaatggcagtcttggtggtcagcagcttaaggtaggtttcttcctaggctggcttgcatttttcttttttttacatctttcgataaggacgtggttttcaagctggtgctggtgtactggaaatgttaggggtggtacctgtgctaaaaggcttttagttttgagggaagggaaagtggaaaataagtatataatttttgagaaactgattttttgttttaaatgtggggacattagcagtagaatgtaagtaaggcaaactataggtattttttggtctataagtccttagtgccttcttaagtttttttttttttaactttttcttatgttgcttttgaaggaaactttggggttttttcttagaactttgtacatcttggggcttgaggccccatagtgacacctccaactccttccccgctgagcgctgcctaggggacgcggcggcctggctccccttaaggtcttggcctccctgtggcctttattgctcccttgcgttgtggccttagggatgagtggccctgtgacttacctggcagccctcggaccttgctcctgcccaagcccctgccgttgggccccggtgttgggttcggttgtgctgtctaacggctgcctggccccctcccccctcccctgtacaggaagtgtctgttggcggctaggtcccccaccagatggctcatgctgtggccactctaggagcagctggaggtggaaactcgttggtattaaccctgtgctggagggcccttaatgggttttttgatgcaattggaacaagatttatttattttttatacggggcttagataacatttctctttggtttagcaatatttattttcatttggaaaatttttagcacctatttttattagtttttagaataaagaaagtcaaacatcattttatgtttgataatgtttcctgtatgattttataagagataagttaaattttacctttatattagtgtactattaatgttaa

SEQ ID NO: 64986 - DNA, 963 bp, Homo sapiens
aagatcagcccgggcaacatggcaagaccccgtctctactaaaaatacacaaaaatagccaggtgtggtagtgcgcacctgtagtcccagctactcgagaagctgaggtgggaggattgcttgagcccggggatgagggggctggaggttgcagtgatccaagtgccaccgcactccagcctggatgacagaggaagaccccgtctcaaaaaaaaaaagaaaaagaaaaaaaaaggagatatgtagtactcctaacattcagtacctcagaatgggatcttagagacaggatcttcaggccaggtggcttcccttcctctctgcgtcggtccgtcccacctcggctcggcctggcgaccctaactccgctccgcgcccccggccgcggccccggcccgcctcctgggcagccaggccccccggccactcggccggcagcccgcggcccaggtctgcaagtgggagctgggctggggtccccatgctccacacacgcgtctcctctcccccagccctgccgcttccagggccctcggtgacgcccgctccccgggcccctcggccccccgcctctcagccgggcgctccctcggggccgcctcctctgcctcaccatcatccttgcccactcgtgctcccacccccaggggcaccagagccaacggctgctcccccagcctcggaccttcctgcgcggctcaaccaagcctagaagtgggggcggggaatcttccgccctcctctggcgctcattggcccttcaggggcacatcgtgagcgccattggctgactgatggtgtccgtcagagcgatggggcgggacagaaaggggagagggaagctggtgccttggcatttctgtgtctgtgtatctgtctgtctctgtctctatctcggcccttggaaacgagaggcttttggccgagaggactagaagggggcctgaggtgggaggaatagga

SEQ ID NO: 64987 - DNA, 1994 bp, Homo sapiens
gttcctttaatgcaacacagcactgtgcgtcaaagcataccctggtgtaaaggcagtgaaatggacagaaacaccattatttgtgtttcatttcctgaatgccttataaacatgcacaacaaaatgctcctgatccccatcagagaggatgaaaacaacccaaatgtgccctttccacctcctcccctggtattggtgcttgcgcctcagcactgaggcttggagttgtcttctcaaaccatcattgtccggtgggaaattcaccgagaaaggaaacgtgggataggaagtctgttaccaaaatagaaattagtattaaaaagaccgatcctacgctccctccaccctctcatacaagacaaaataaaaaaaacctccgtaaacttgccctaccgtcacgaagatcacacaagctccgatcaaatgtgcttctcgatcatcttttaggcaagagagcgcttggggtgcattttcggcccctcatctcccacccccagtcaagccaggcccctggactgacaggaaaggctggccggacgttggctcggacgggaaaggcggttattttcgccgaagccgctcacgctaagggtgaagtaatgtagggccagaggtaacacggcttaggctgtgggcaaggcctccgaactgactaaagataggcaggacacggcagcaggggaggcgggagaagcagccgggcctaggccgcaccaggccgcggagtggccctacgctgctgcttcccgaccgaggctgccagccaagccccagagaagaaggttatcattacctggacgggttcctgcagcaccgtcatcctcgaggctcaggcccactttctgcagtgcctcaggccccccctgtagcggctccggcccggccagcccctgctcatttaaactcaccagcgaccgttaccgggggatgggggaggccgagcgattgccgagtgcttccgagcgggacacgggaatacccgaagtggagaaagccgagcgggaaccagacggaaaagcccgaagggagtcggaaatacccgaggttggtcgacgagagagaaaaccgttgccggaaattgtcgaagattaccggaagctaccgagtctgacccaaagcgtaggtttctcttctcagccacgccttcagccacgcacaccacgcccaatcggccgtcccagggttgggctacgccaaatctgcaaccagcaggctgggcgtggcgtgacagcgcgggcgggtagcgttacgtggcggggctgcagtgtggattagcccctcagcccttttggattaattggtgtgctgtagattatgaagcaaagggtgaaacagcagagtttggggctgtctttaatgaatcaacaagtatttgtctattgagtttagatcattcgtccattccagaagtatctactcacggctctgggggaaagctaaagaaatttggaaagattgccactccccaaagacataggatagcttctgtcttcaaggagattaaggtctatttaagggaaaagcagtgtaacagagaacgctatattatatggtgcctattataagtaatataaaaattcagagagggcaattgtgataagataaggaaagttctatggaaggaaaaaaaagtttaaaatggagtttgaaggatgggtaaaattagaggaaaaagaagtataggaaagtgaagggaggaaaaatgggatcagtctgctaagaaggcattaattggaaatagttacttaggtgaagagatcatggaaaagctcaataggccattagaaatttttatttttgataggtgaggcattccgctgtggtgggaagagtagggggtcggaaattcagaggcctggttttgaattttatctttagcactaactagtcataggtccttggcaaattacctctctgaacttatgttcgcttagtttgaaaaaaaaggattaagagaattcgatgtattataaatgtggccgtgtctagcatgc

SEQ ID NO: 64988 - DNA, 1643 bp, Homo sapiens
aagtgaaatcagacagtgtttgtcttttgtgaccggcttatttcacttagcacaatgtcctcgtgttccttttttaaggcggaatcatgtcccattgtataggtcaaccacggtttggtttggtcctcgcttttttaggtgcctcttcctctgagtgcaaagctcctggtacctggttcagtcctgcctgttctggacatctcattgactccagacccaggattccagctcagtgccctggaaagagtcagggtcagaggtcaggaacctcaggctgagagaggaggagagtggggagaggcacgtggaaaagagacgcctgaaaaccagcaattgggaagaaggagcaagatgatgtgaggaagttaaacacacatgtatatgagtagaaatatttatatgggagcacaggggtccagtcatcccagaaagggagtccttacatccctgaggactccccaaggtgaaataaatccttcccatggcctttctgttgcctaactatcaatcatccagccacagaactctgtgaaacatctaagaattcagccaaggctgcctgcctgtcatgggaagctgagaaccatgagcccaagtttgcttttcttagaatttacagtctggctggggagacaaggccaaggtctatatacatgccctttgtttcccagattttctttgaggaagggtttcagctttgtgagtgactggttgaaacacaaaaccagggatctttatacggttgagcaggggttcattgaatccagtggttctcaaactttggtttagacccatagccttttgttcgaactaaattttatggggaagtcagtgcatgaaactgaagagaacagagtttctctggctgaggaggagagggctgggttcaggcttcttggagcctctaactaggctccttggagcagagccagttcaccgattagtcagacttcctaagagtcaaaatcaggaaaacagatccttaaatgggaagtgacttaatcaaggtcacagctaatgttgacaaggtcccctgaattctacattgtttcaattttcaacacaccattttcaacctgcctttgaaatgttttccaagcttggctcttaggactcttttccttgtccctacctcgcagactgctctttttggcctcactttctgctccttttctttaaatcacacccccagtttgaaatgccaacattctccttagcactggggcctcgtcaggttttcctccttcccttcttttttttttttttttttttggttttttaacatttattttaggttcaggggcacatgtgcaggtttgttacataggtaaattgcatgtctcaggggtttggtgtacagattatttcaccacccaggtaatatacatagtacctgataggtagttttttgatcctcaccctcctccctctcttctttctttcttcagcaagtatttattgctcactgtattcacttgtgaggaactggagttaaggttcccagtgatttgaaaactgaaagtgttttccttgcccaaagtagcttactgtccacttaagcaagcacataagtatccagggataaatagagaatgatccccaaatagcatagggataactccatctatgtaacatacagtgta

SEQ ID NO: 64989 - DNA, 2912 bp, Homo sapiens
ggagttcgagaccagcctggcaaacatggtgagattagccaggcgcggtggcagatgcctgtaatcccagctacctgggaggctgaggcaggagaattgcttaaacctgggaggcggaggttgcagtgagctgagatcgcgccactgcactccagcctgtgtgacagagcaagactccgtctagggggtggggctggtcgtggggggtggggggtggtgagaaaaagacaaaagaaaaaagatggtagcatggcatatttatattcctgaaacactgttttaatcaaatttcttccctaattaggacttaaaagagctcctatcccctactgggtcatttccaaacctttctatttaacttctaaggccttcctttatttgccccaaatctgctagaggcatcactggctgaagccagctgatctttctttctgttagctccccagtgctgcttccctctccccttctctcctcaccccaggacctcttgattcatcttgtttctctctcctgatacgtgccccattctgttcatccaccttattcccacccttcaatacgcaagtcaggctcacctcttccctagagattttcccatctgtattaattagtgatggtcacaatttagtctccctaacacagtcgccagactggaactgtagagctacaggagaccctgcagacttctagtagactgtaatcacctgagggccacggttagcagagtgtcatcacgcgtttggcatcctaaacaaactccgttgaccagggcttttagggaaaacggtgttggagatggctggtggcgcaatacctaccttccaccactagatgacaaacttgcaacagcgtgcttccaacaggacgcccacgtttgacacgttcctgagacgctggagaaaaccgattgccagcccgggctgaaaggaaacttgagaaatcacttagtccgtctctttgccttcagacaaatggagtttttgtttacttttaaagactcacagcaattcgttcgcttgcttcagtacccccacaaaggttttgcaatgaggggtcatagagaggacacttgtggacatgtggggacctggtcaagtcacatccccactcaacctcagtccacaggttgcaaaatgagggaatcgattagatcatggttcatgtcccttccagctctctgatactaatcatttagcattcagcaactccctctcactacagtcagccttagtccatttgtttcgttttgatccttattgtatatgtgtgtttagaacctccagcggtgggaagcattcattcaaaataaattattgagtgcacagcagtaggtacttcaggatataaaaacaaagtcatctgtggtctctccctctatgagtttatactctacttgagggaaaaaatatataagtggagctgaactatattaaaagacaaaataatcgaaatgacactaggcagtatatgtctaaggagcaagggagaggtgtgggaccaggacactaggagctcagaggaggaggggtggtcagggagggctttaaggaggagaggtggcaagctctgatggaatatcaatagacaagaactcagggagcggggctccagtaaggaggcacagggtgccttcatctttgccgacataaccacagttcctgccttttagaatttgggcaaaaagaagtaaagaagaataaaagaagagtgagaaaaagaactggagaatgggatgtgaggcaaggaaaagggaaaaaagacaaggtggagcggggagcacccattcactgtggagggacatgtacccgttcagaggtagagaagcaaagtgaaacaatctaaagataggtcaggggcggtggctcatgcctaatcccagcacttttggaggctgaacagggctgatcccttgagcccaggaggtcaagaccagcctgggcaatgtggcgaaaccccgtctctacaaaaaatagaaaaattagtcaggcatgtctgtagtcccaactacacgggagactgaggcgggaagatcacctgttcccccctgggaaggttgaggctgcagtgagccgtgattgcgccacactgtgctccagcctgggcaatgaagtgaaaccctgtctacaaaaaaaaaaaaaaaattctgaaggtgagctgagagccgctgatggacataaagtagtggcatagagctgtgagaacaaagccaagaaggcataagtctaaaatgaaatgaaaatgtttatatgttaaaaccaacaaatatatgcttttacttacgttcagagcaagaagagcaggaagggcactgccctttgtgccagcagtgtgacattagtagaactcaacttctattttgacctcagttccatcttttctgtcaaggagattaatcttctgactctaaaacatgaaaatacgtagcttagagggaactgagacccaagataaaacaggtttcagagcaaatggccacataatacggattcaagagtatttgcctagaacaatcacctgctggaaagtacttggctgagaaatggggaaacagcaacttctataatggggaattgtcctacattttttctgggtcactttgggggcaaatccaggatcagtggatgaaaacctcagagatgtatatgtcagatccctgctaggaaaaatttaatgtcgattagaggttttctcaaatggaatggtctaccttgcgaagtattgagtcccatgtcgtggtaggtattcaagtgaacactagcaaatatttcatggggcttttatggaagagtttgaactaaagatctcttccaaccctgaaacctatgattctgtggttgtacaagattaggggagaaaagaatgagtgctttcccagctcaccttcagattttttttttttttttgagacaggg

SEQ ID NO: 64990 - DNA, 1054 bp, Homo sapiens
cacacacacacatgcaaacgaggtgtagctaggaagccagtagagaaaaaaaaattatcccaaaagaaagcagaaaaagagaaacagagaaaccagccaaaaagatagaacgaataacaagatagtaaatgtaaacacaaccatcaattactatactaaatgtgaatggactagctcctttgccttccctggggctgggagtgcaggatggactcacttgcacaattatgtcatgtttgctagggcttgggctagggttgtggacttagcatacttgctgaggccagtgcccaccccaagtggttgctgacagcagggataggctaaggagacacctaagtggctggagattggttttatatatatgggaatggagcagataactaaatacttaggcagagatgtaaccaggccatgtgacctgaactttgctccagggcattgacactgctgttaaaatgcttctggcctagaggccctctgcagccaggggaggtagatggagcttcagcctgaaaacccaggtcagagggcccaagtaccctttgcagagctggcttttccccttgcaaattgctagtgacgcttcagctgatgtgtgttactattaaggtcctagtgtttgggagggtggggcaggaggtggaggattgtcagaaaaaaattacatggaaaaagatggcatctgagatgttttgaaagataagtggaattttccaagtggaaaaaggaaggaaaatcagtcagataggaaggcatggagcattggggaatgacaagtatcttcttggactagggtgggagatgggctggagagatgggtcagggccagttgtctggcatcttgtgtgtctcagaagagggtgggcacgctgcgtagggaagcccagggccactctgaaagccctaaaggggaactgatgcctctggccttgtttttatcaccatcaggactacccattgaggcaggctgcactaccagctacttcctggtgccctcttgctcatagccatagtattttgcctctctgagcttccagaggttttaagtctg

SEQ ID NO: 64991 - DNA, 1782 bp, Homo sapiens
caagtgtttgtagggcgaggctcttcatggacctatcactgcttacgcaagcttgggatgtggtcttgccctcaacaggtaggtagtctaccggaaaaccaaactaaggcaagaaaaaaattagtgaataataaaggactgaaccggttcagagaaggcattcagcagatgtttgccagtcaaatgaattaaagtgtgaatgaatgaaactcgaggtagtgggtgaatgtgtcccaagaatccagcgaaacagggtctcccaggaggcgggactggaagggtccggagaggggccacaggctcctggcctttctaagcacaccaagtgcccagtcgcggacccccgggaccaggatgcgctgacgacccggctggcaggcgggtcctcgtgggcgaggcgagggaggcggcgagagaggagcaatagtttcccaccgctccctctcaggcgcagggtctagagaagcgcgaggggatctagagaagccggaggggaggaagcgcgagtccgcggcccgccccgttgcgtcccacccaccgcgtcccctcccctcccctcccgctgcgggaaaagcggccgcgggcggcggcgcccactgtggggcgggcggagcgccgcgggaggcggacgagatgcgagcgcggccgcggccccggccgctctgggcgactgtgctggcgctgggggcgctggcgggcgttggcgtaggaggtgagtgaggctccggctcggcagcgtcgcagctgccccaggatctgcgccccggtcaagttgcggacttggagccggcaaacgcggagggctggtcccgcgcgtctgcgctgggaatgcgcgtgtcctggctggcgcggtcggagccgggagctggggaccttcctggcccggcggtggcggggctgagaggtgcctggtgcctgggagcgggtcctccgagacgccgaagccatcagccaggctgagcgccttcccggccgccgcggcgcgcacggtgcggtgggcgcatctctgagccccgcgctcacccggggctgcgcgcgtcgcgggtggtcctggtcgggccaaggacgactggcccaggagccaaggcgaggtggggcttccgggggttgttcccgcgccttggcagagggatgccgctgtagcttcctgggtgagagcgtgcgcgcgcgcgggtttgccagtttccccacatttccaatttctcctgttacgctttctccagaaggttttttcttttccttttttctttctttctttcttttttttaccttcaacttggcttcctgcggggttgttttggagcaggatgagggctttgcctcctccagtgtccccaggtggcagcggtgcctctgctcccagggcagaccctgcacccgaaaaatctctagtgtattcggggagccatgaaaaggctcccttgggccggtgggatccttggctttgtctctggctgctgcgcacaccgtcagccgtcagggcaattggcattcggcctctttggtactggggacacaggtggagggatggagcgggcacagcccggggttgctgcccgtggtcctctctgagtccttggtgattttgcctgggctggagagaaaccctggctcctggtctgctggggccgcctctgcctcagaggatgacacaagagtgcatgtaagtatttttaataaaaactgtagtactcgtaaaacaatctacaccctgcagaagggatttgttattttattttattatttatttatttatttatttatttttgagacggagtcttg

SEQ ID NO: 64992 - DNA, 3053 bp, Homo sapiens
aggggctttgtttagtttatcagtgtgtctccagtgcctaggagagtgcctggcacaggtagatgctcaatgaatatttgtcgagtaaatgaatgaatgaatcaatgaatgctgacaccattgatatatataggtagaaaaatgtacagctaaagtaaccatttttcaaaccttatccatacgtggattaaatgcaacaaaaatttcatttcatgctggctttttttcaatcatgcaaagtatttcacggcagtgttcttcaaaatcatgccatatacatgatggagatgcaaatccattttgtattagtttcttagggctgttgtaacaaagcaccacaaactgggtggcataaaacaacagaaatttattcttgttggaagctagaaatctgaaattaaggtgtcagcaggcccatggtccctctgagactctgggtagaatccttcctccttcctatcttctggtgttggctggcaatccttggtgttccttagtttctggctgtatcactccaatctctgcctcatgtggcattctctctatatgtctctctcttcgtgtggtgttttcctcttctcataaggacatcagtcatgttggattagggcctaccctaacgacatcaattgatcacatctgcaaagacctgatttctctgtaaggtcatggtcatgggcactggggtaaggacttcaacatatcttttttggggacataagtcaacttataacacattttaatattggtggaggcaagttatacacaaatgttttccaatgttaaataccgtacttaactggctctgatatacttaaaaacagttttaaatctctaaaatcaggacatatactatattcatagtgttagatttgatgaaatatggtgcctgggttctctactgctttgggtgatgcttactggagctttttgctcagagcacagaggtatgtgttaccctaaactccacctccctgtctccttctccttccttgggttacttagctgatgctacatttaaggaaggaccaaaattaaaataaactttcttagcaacttgctctagataaaccacttgtgcctatgtaggacagtaagcatgagatttttttttttcatgagtcacatggccaggtgactacaatgaggcatcatgtgagtcacccactgtccccatggacctaattgggaagtgagcagtcaaaggtcagtggcagggctggggacccagattagaactcctttctggcagagtgatagatgtccatagtgttagtggaacatcctcccttctcgataaacacctcttactgtgacttagccctctcctgtagtcccctgtcctcattagggtggcctgttcctacagtccagcatcctgtctcactggacaacatgtcctcaaaatagcccccattgacgcattatgacttccactggatccaattccctcccttgtttcctttgttcttccatttttcccaccctttgtctctcttctgcttctgtgattcaagctgatgtgccaaaccacagccttctacttctactttccaggcaaacttcttggctggtcttgattggattaaaattgttattttcaaaaaacttttttgaggcagggtctcactttgttgcccaggctggagtgcagtggcacaatcacagctcactgcagcctcaacctcccaggtccagctgattttcctgcctcagcctcctgagtagctgggactgctggtgcatgctaccatgcccagctaatttttaaaaaaattttcatagagatgggggtctcactatgttgcccagactagtcgccaactactgggctcaagcaatcctcctgccttggcctccgagaatgctgggattacaggcatgagcctggattttcgaagactaatattcctaaccccatttagaagccagatctgacaagtaaacatttcaccctggtgtgatactttctggctccacgctcccacgactccttctgctcagggcatacttaacgtcatgtctagtgtcccctagaatgatgtcatcaaggaaaaaaaagtattcacctgccctaaacaatttgagactcaggataaaaacaacaataaaaccaatataaattacagcagcagcagcagcagcatttattgagtactttctgtgttccagctgttgtgctcagagttttacagggtttggtttatttcatccttacaaccaccctgtgaagactggggtcaatccaccttgtccctggttctggctaacctgtcagaggaaaggggtggtaggaggtaggagttgtttgttctgtaagtgacattatggtgaagattcccactttagcaggaatgagtctgggccccagagaatgagcaggaacataggctttatgaatgactggaaacagaggcccaaactccttccacacgttcaggagggaggggtgggctcagaacaacaactcattgaatcagcatgggctcagtgcagagacttctgatgagtcagtcacttttaaccactgcattccagggaatctgcctgggtagcaggacttggttgggggtatcatggggggttcattggttctcataaaatcaacctgtgattcattaaaaagagtggataaagggacttggtaaccatgactctgcaggcatgatttcctaaagaacaaatcccagcacctcattttatcctctggggtcagggaccattagttcactgggagggacctgctgttatttattttgtatcttgcaaaactttctattgtggctacaagtcaaggactcatagggaaatgctaatttgagaatgaatgggtggttaaatgaatagactgggaaaagtcctaaaaagtaatctgacagtgtctgtattagttcattttcatgctgcttataaaaacatatccaagatttggtagtttataaaggaaagaggtttaattgactcacagttcaacatggcttgggaggcctcaggaaacttacaatcatggtggaaggggaagcaaacacgtccttcttcacatggtggcagga

SEQ ID NO: 64993 - DNA, 1225 bp, Homo sapiens
tttcaggacacatggttaacagattgttttcccctaaagacctcctggcaccctacctgccctgcccatactaatgtgcagaattaaagagattttactttgataattgagggtcagccctacccaaatcttccagagaatccataattgtttttcccagaactggggcccttcactcttgggaacttgaacactggaacctcacagcctctctccaggcactcatttaattatagacaggttgtaatttggcgggttgggagatagccagcttgagttatggtggtggttgtttttgtggtgtgtgtggtgagcattgggtatatgtttggcgaagaaggtgggagacagtgtggaaagtgggtgtgacttcctctccaggctcattagcaccctcatatataaacacctggtttcataacacttgaggttactggaataagatcacctattagatacctgacatttgtgggaagcagagctctgcagagtatactcagcctgacccccagaggggtgacatgcctctgttttagttgttgactggggttgaacaggaaggcagctttcaatagggttatgattttagatgactaagtattttgggaaagaacccaaaatattgtcttggctggcaggtcctggtctctaagaatgcaaaaaatgtcattaggttcacagccctcaggaatgtaaatatctgaaccaggataacagacacaaatacttacagtggctaaggaagcaaataagttagtgaaaacagctgggtgtaagaagatccgttacaacggtagctgatatttactgagcacttactctgtgccaggcattgttctgagtttttaagatatatttaatttaatcattcctcataacaagtttcttttaaagtcagtgctattactatcttcattttaaagatggagaaacaggaaacagacattcagaaaggttaagtaattttccaaagatcatgtataaaagttaagtgataagtcaggattcaaacccagggagtctggctgtaacatccacaggagcgcagacacaccaacaagtcacactgccttcctctaggagagagaagggagagtggtggggattctggtaaactagaaaacatgagttccaactaaaaggagcagctcctcctcagctctagctaactgctgctctgcaggaatataagaatctctctctttctgtatttctctctttcttt

SEQ ID NO: 64994 - DNA, 3464 bp, Homo sapiens
aaaatgctggaattacaggtgtgagccaccaggcccggccctctttagacttaatattttttaaatgagtaggttattactgttctaagagtttgcggttttttttttttaattgggtattatttaggaacttgtgcaacctcaaaagaacagactgccagtgtagcctagattttgtttgtaggaagcataaatggataaaataatagcttaatggcaaattatttacaggaccatttaaatgcctaaattttatttaaggcagtgggtgtcaaagtgtggtcccaagaccagcaacatcaatatcagctggaaacttgttagaaatgaaaattgacaggccccaccccacagctgctgaatcagaaaatctgggagtggggacccatgatctgttttaagaagcctccctggtgattctaattcatgctcaagtttaagaacaactgatttaaggaatcacatatttagccttcttgcctagaaagaactttatagtaaggcagcttagttactatatacagttaatagcaaaccttgcctgacatactcagaagatgaaatatccacccacacaaaatgaaaatctactttgacctattttccaggttaaatgatcttgggtatcttgctttcactcatgaccacaaattcccatgaaaaactggaagaatagaatcctggggaaaaactaacaggatactttttatgtgtactaagacacaagcaaggaaatattcttacagaatttattcacaggagataggatcaaaatcttaattattaacattatcatcctataggatgctagaataatacttagaattttttactttacagccaaaaggctgtttaaaatttattgaacaccaacagtgtgggactgaagtaccttacagaacactgataacataatctttgtctttaagtcctttttttttttttcagacgggatctcattttgttgccagaatgcagtggcatcatcatggccactgcagccttgacctcccaagctcaagggattctcctgccttggccttccaaagcgttgggactacagacacatgccaccatactcggctaattaaatacatatttttttgtagagatgaggtctcactatattgccccggctggtctcaaactcctgggctcaagcaatccttccacctttacctcctaaagtactggaattacaagtgtgagctacggtgcctggcctgagtcttaaattcctaacataatgtacattttttgagcataatacaatacatgacatcattaagagattacgtgaacatagactgagaccttttatggtgaaatcttgtgagattcactatgttttatttacgtcttggtaactgctgactaaatgtctggatgaaaatagaggatcttatgtaaaatgagatgaaaagctatatgtcaagccacatttgtaatcctttaacgcttggcttcggtagtccaaactctacagtaacagagccatctaatggccactgggaccaattacaagcagattgcctgggaattactcagttttcacagtataatggaaccataacgtatgctctgcaaataagccatttaaaaatcatttctaattggttttataatacaatatatttatggaagtatatattcctaatttgttttagtttggttaaaacatgcaaggaggcagtcttagaagcttgtgattagggttaagtatatcattacataaaaatttaaaaatccacttaatgtggctacctaagaatggtttgtatgtgaaaagaaaatgaagaggtcaggaacatgactgccttccttgaggctgctaatgttataatgaagcccctccaactccttgcataaaggaaacactttcatcagctgtatattttctgacacatcaaagattgctcacagaaagcaccatttagaaaatttaggagcctttaaacaaaatgtccattttaaattattctttagcagtgtccccaataagaacttgtaaggaaaacgtttcacaattgatttcattttagtatagtaattggattttccagtgactcatacagaattggcttgattctttggagagatcacagtgatgatgtgtaaatatcgctttggtggccaatggaaatacttcgttaagaaattggaaaaaaatgttgatgggtgtgtgctggactttgcctttcctgacccttacactcaccattgtgacagagattgctgattgtgcccagtatgttttctccttctcacataatattagaacttctgctgtttagttgggcacatggttgcccagaataaatattcttttattactaataagcaaatttagtaaagttgctagatacaaagagcatgcaaaaatcttgtagctacatgtgccatgtccatctcatagacaatgagatgtaaatgaaagaggtgtatgcaacttccagtaaatgctgtttaagggaaggaacatacttttctccatttccttcatcttgcaggcgggaatgcagagttaatacctagaagttaagtagccctcatagctcaatatgtgaccttggggattgtattattttatttatttttaaaatttttttaaggaggtaaggtcttgctttgttgcccaggttggactcgaactcctgggttcaagcaatcctcccacctcaacctccccacgtagctgggactacaggtgcatgccaccacacccagtggggattgtattagttatctgttgctgcataagaaattactccacaatttagtagcttaaaacaacaaacattatcttgctgtttctgtggtcaggaatttaggaatggcttagctgggtggttctggctcagagactctcatgaggttggagtcaaactgttggccagggctgtagtcggttgaaggctaaaaagggctggagaatccttttctaagatggcttactcacatggctgttggcaggaggcatcaattccatgctggctattggcaatagaccttagttcctcaccacttggatatctctataggactgcttgagtgtctgcatgacatgtcagctagtttctcccagcgggagtaatccaagagagaacagggaggaagctacaatttttttatgacttagttttgtaagtgttacaccataatttctgccatacactattcattagaagtagcccactaaatccagctaacattcaagaggagggaaatagatgccacctcttgaagggaggagcattgtgtacagaatcattgccccccaaagacagccacatccccatctccagaacctgtgaatatgttaccttacgtggaacaaacaactttgttgacataattaatgatctttagatgaggcaatcatcctggattatctggggaggctcaatgtaatcacaagtgtccttataagagggggtcagggctgggcttagtggctcatgcct

SEQ ID NO: 64995 - DNA, 1991 bp, Homo sapiens
acatactaagtgaaaaaagccaggcacagaaagacacataccacatgatctcacttatatgtggaatcttaaaaagtcaaactcatagaagtagacagtagaatagttgttagaggctggaaagggacggggcgggtaggagatgcaggatggggagatgctgttcaaagggtacaaggttcagtcagacaaaagcagcaagtttctgagatctattgcatagtgtggtgactatagctaataataatatatcgtatatctcaaaactgctaagagtaaatttcaaatgtctcaccataaaaaacgttaaacaaggtgatggatatgttaagcttgacttagtcgttccatattgtatacatatattaaaatataacattgtaccccattaaatatttacaattatgatttgtacatatatttaataataataaaaatctaaataaaatattaaagaatgcctacaaagcaaggtttaagatgtaaatgaacacagtagtatcacggaagggattaaatattgtaacatttattgagcactacgtatatatttttgaattcccacaaccctggaagaatgagaaaatcgagactcagggagcgttaagtattttgcccaactgcatacgataaatacataggaaaaacaaacacacagaagaaaaccaaaccaaccaaagtatctctttcaaaaggaaacgacagtctccttaaaggcaacccgagacaaatttcagcaaagccgtgggacacatggccttcgagctgctgtccattattgagtagcagaagccaagaaggatggaatgttttggaagaaaggggtcgggggtcggggtgttcaaaggacggaccgaaggtaagattgaagtggggtcagaccatggcgggacagcgcaccggagaatgaacagcgattagggaagagtggcgagcgggtggcaaggacggagggcggaatcccggccggggctgcgggaggaaagcgcacggacaggagccccaccgctcgaatgcagcgcccggcggctggcctcgtgaggtcacaggcccttacgaggtggggcaggcaggcgcggccgcagtgccttccagtcagcgcggaggcggtattgagttcagccgctccccacagccccggagcccctgggcggtggcggtggccgcggcagcaccggctcgacagccgatagggtcctgggcccgctccgctcggggtggtcggtgggcggagcgtcgggctcggtcaggtgaccgcgggggcggggccgcgcggcgcgggatcctgggaaggctgcagagctagagcagcgccgcccgaggggcggcaggggctgaccacagagagcgcgggggcctccagccgagaggaagggagggcagctcgggccggtagtgggacccttgggggacagaggtggggaggggaggcgagacccgctgaggagttgggaggggagccttcgaggtggagggtggagaatgcagtagggtgcgagggaggaaggagaacagtggtggggctgggtgaaggaaggttccagaaaggaacagtgaggggactgagtgggacaaaggggcagattgaagggtgactgagactgatcaggtggttcctcagaaatggtggttgttgtagaaggctggcggtcccgggggtggtgtcacttccctgctccttcagcgggaggcggagacctctattagcacactcatttccatcttgcgggtcgttcactcgctagcttacaggtcctctttcttcctgtagaagtcgttggcttcgtaagagcagggtctatgggaagcctcctcagcgtgggttcttggaagaggtggaggttcgttcactcgacgtttgttacacaaatatgaaaacagggtgacgaaagtttgaacgttcatgaatggcagtagctgcaatggagttgtgtatgcagttggtattaatgacgttttcagtccctctggcgagagaaaagcgagcgagt

SEQ ID NO: 64996 - DNA, 846 bp, Homo sapiens
aaatggaaagccttcgaatggtttataaacaaggcagtgccttgatctgatttgtgttataaaaatttcagtctggctgcaatgtggataatagtttggaatggggaagagaagatgttgggaagctaactctcctagcaagaatgatagaatagcttacagtagggtagtggcagtagtggaggagatggaataatggagattcaggggcttgaatttgttaaccatttagttcaacaatatttattgattggcttctctgttgtgagcatatctgggagaggaagaaaaacaagccaggataatccccaggtttctggtgtataaatgttggtactactctgcgatggaatggaaaaagacttgaggccctgagaactgaaccatgattaggagccttggaacagtagcaattgtcatctgtgtaaataaggttattgatttctaaaaggtctatgtttaatcagatggattagtcattctgtctttcacacctgtggtgactaattcaaaggaaaagccctatcattttgccagctggtgtttaagagttgctttgttttctgtgaaaccaggtgtactgcattagaaaagtttattcaacttttaatcattaagcattgtgataaattgtaaacttagaaattgtttggtttactgtattaaaaatgttggattcctgtaattccagcattttgggaggctgaggtgggaggattgcttgagttcaagagttcaagaccagtctgggcaacatggtaggaccccatctctacaaaaaggaaaaaacaatttggcctgggagtgcacgcttgtggtcccagctacccaggaagttaaggtggg

SEQ ID NO: 64997 - DNA, 2802 bp, Homo sapiens
cggcccacgttttctttatatgcattttgctaagaaaaggcattcatgagtttcttccggggttgagaactgaaacaggttaagaaccacaatcctttattcctgtacacacattctttctggttcgaggttgggcctttacagggtacttttggagggtgaaacatttccatcctgtcaagtacctggtagctatggatggggggtctaagaggaggaatcccttagctcacccctaagcaagtcagatttatcacagcacaggtctcaagccccatataagcaggcttaggggactccttggagaggaagctgcttgtagggacaagggccgtcaggagagcttgagcttatcaagccactaaccagctgtgtgaccttggacaagttccagaccctctctgggctcctgaacccattccttaccaagccattaaccagctgtgtgaccttggacaagttccataccctctctgggcttcagtttccacatctacacattggcagtggagccacatggccttacggatccctcccagccgaaagcagggtaccaagccgacctagccattaaagcagcttcctgtgggcgcggcgcaggacttcaacagtcccccctcccccgctcaggcccgcgaaaacctcgcgcaacacgcccctcggagcgacggcgcttacccaaccgcagccccagcgctcgaacccagctccgcctcttcccgggggcgtcccatcgtgccccgcgccgggctcctagggttgccgggcacctcccgccttcccgcgccccgaccccgaactcctctccttagttctcccgggcaccctatcctatcaacgcctactatcccagccaatcgcgcaggatccgagtcgtgcctccggtccaccctcctcccagcgctcagccggtctgagctcaaggcctttaccaagcccacccaatcaacggcgggctctctcctaccccatcccaatctccctcccctcggccaatccgcgcgctccattccgctgcccgcccagccaacccgggccttgaaaccagcaggcgaatgggcgcgagacggcccttcgacgctgagcgcctggccagttagggattccgcgtggccaggacaacggccaatcgtcgtggagcgcggcgcctccgcggagaggtccggtccgaatatccctccgccttcctccctccctcgctccctccctgcgcgccgcctctcactcacagcctcccttccttctttctccctccgcctcccgagcaccagcgcgctctgagctgcccccagggtccctcccccgccgccagcagcccatttggagggaggaagtaagggaagaggagaggaaggggagccggaccgactacccagacagagccggtgaatgggtttgtggtgacccccgccccccaccccaccctcccttcccacccgacccccaacccccatccccagttcgagccgccgcccgaaaggccgggccgtcgtcttaggaggagtcgccgccgccgccacctccgccatggagctgatcaccattctcgagaagaccgtgtctcccggtaggacgcaggagccgggggtagggctgaggtgattggggtgggggaggggaggcccggcccctctgaccccgctccgtctcccactttcctccccctagatcggctggagctggaagcggcgcagaagttcctggagcgtgcggccgtggagaacctggtgcgtgctaccccgccgcgcccatcccgccgcgtccccatcccctgcgtgcggggccttcccgccctcccggaggcccaggcctcgggaacctaccccgccccatcccgtccccctcccccctccccctccccccccaacccggtccaacctaaccccgccatcgggaagccggtgggtgtgtcccgccccgggcctcgcgactggccaatggcttggcgcgccgagctgcctgccgcccaatcgttgcgcggcctgagggcggcggtgcagcgggagggagaaagagggagggaagggaagttaggttgcgcggcgctgcgtgttcagcaggggtgggggcgggggagtcgggcctaggggccatgtggaagctccgggcccggccgcccgccctgtctgaccccggccggcttctccttcctatcccgtggcccctgtggctctccccacctatttcctagagctctgccctttcctagctaccttggtctgtactcatggccaggcctggcacccgactgcctcttaacccatttccactgatatttttccctctttgctcggttattcctctcttggggttttttctttttctttctttcttttttttttttcttctgacctggatgaatagagacctaatcactagggatctgcacccagaaaacagactgaggctcatctttgagatggggcctgtttgctgatgaaatcacaggggaaagttcctcgtttttcatattttaaaatttaaggggtccggagaaaatgaagctaagtccgctagagactggtcctttgtataaaaatgtgggatggattggttgaaacagcctagatgccagttaagtttctctttggtgtccatctcctgttgggggatggggtcagagggaaggattggatgatgcttgacatctttgagaaaggtaataggaattaagtctgagtaacactaaccatatgtgttcctttgtgttatataggcaaaatgtcaacatcaacaaagtgacaaggcttattttatacagactgcctttgaatgatttttttgttgtttttcatatgtgcc

SEQ ID NO: 64998 - DNA, 1449 bp, Homo sapiens
agcaatgccccttttaccaagagcaacgaagagcaggtctaatgatttccttctcaaaagcgcaaagaccaaaaaaaaaaaaaaaaagccagataaatagccccacttcctccccaaatatacagcccataactaaacaaccaaaacaaccaaagcatcagccgggcccctgcactgaccgcagacgcccccaacacacgccaccacgccacactgcgccgggaggcgtcggggagggggcgccagcgcgggccgctggcgccgcagggagccggtgggctccgggcgcgctgccaggaagggccgcaccgtaggggccgccgcctctcgccacgtggtggtggcagcggcggggtccggggcgccttcccagctggagaaacccggagcagccggggaggaggaggcggaggaggcggcggcggcggaggaggagcggggcggacgggagggagggggttggggggaggggtggggggtggggagagacccggcggcggcgacagggcgaggagcagagcgcggtaccaggggggtgggggcactggtgcccgtttggggagggagcaggcggagggggtaagctgcgattacaagcaggaaccggcagcagctgtgagtccccggctggggctagggctgggggaggggagcggcgcccgggctgggccccaggggtcgcggggtgggcaggaggaggcggcaggagggcggctggcagccgcacgggatggctgggagggaaggggtccggtgtcggccgccctcatcccctcgcgtccccctccgccgccgttcctcaggccgcgccactcccggagccccttccccggccccgagagggtgtccgggggcccagggctcggccggttgtgggggagggggctgcgtggtctcggcccccgagaggggaggggcgacaatttctgtcggccgagcgaaaggggtttaaagggcggctcttaaaggggccgcaggaggggcccgggccgacagaggcactcaccccttccccagccgccttccattgcgctcacccgggcgctgggcccagagaggaatgcggaggaaggaggcatttgtggtgcggcctcggggacagagccccgccagcggggtgggcgcagaggggcgggcgggggtctgggggggtgtggtaagcgctggcgcgcggagctggggggaggggatggcgtgggaaggagagggttaaaggtggggccggccctacaaacgcgcgcacacactccttactcagacccagtcactcgcgtttccctggcacttagatgggcctgtgggtggcggaggggggggggtggattgaattggagcctgcgccggagccctttgcaccccaagctcctgcagcccgacctgggggccccgctgtctgaactcacagctccctgccgagccccctctccggggtgcacataacgctccagc

SEQ ID NO: 64999 - DNA, 939 bp, Homo sapiens
ccagccgaaactggattttaatctctcttccgccaattactagctgtgaccttggccacccaactggtctgaacttcagttgctgcgtctgtaaagaggagatgcgaatgtctttctcacagggtgctttagatttaaatgatttaaaagatttaaatgagctaacacatataaaaatagttatcacagtgcctggcctatattaagtgctcaaatccattcactaaacaaatatctaccgcacgcttactaacatccagcaccatgccacctgctggctatgctgaatgaacatggttctgcccttgcggagtttaatagaggaaacaagcaactaaacaaatgcaaaattacagattgcgacggggctaaggagtcaagggaagacctgaggtgacatttagactgacacattaagatggagacataatgcaaaggtctgggcgaggagtggtccaggcaaaagaaacgctggagacagacaacatctggacgttgttgctgtgattaccagtcgagtcacaaggaactggacggggtaaggaggccagcgatctagctggggtcagagattatgggaagaatcagtagtagaggagggcagatgaggactagagagcggccgcaagacacgccgtgaggacctgggccactccttacccgcctggggcaggagaccccctcgcagcatccccgccacggccgcagccatctccaccggaagaatggacggaagccgagtggagacggaaagagctaaggattgtggggtagcgaaccccggggccggaagcagtgggcgtacccgccggctgtagccgtaagacgcatgcgctaggccgggccaacggagcccgcctttacctccccactcggcgtccagtctcttagcaacgactccggcttcctaggaactgctcctttctcaaccattcctgc

SEQ ID NO: 65000 - DNA, 2071 bp, Homo sapiens
gtgcgtcttcgacacctgttccacttcaatgtaggtgcactggaggtgagggaggagaaaggaagcgtccactcatagaggggcggcccctcgagtgtggcactctgccaattaccttatagatccctttgaggaaggtctcattcccattttacagaagaggaaactgaggtagactgaggctacataatgagctcaggtccaggttggtagacctaaagctcatgctcttccactacttctggcagcctcccaggtgtggggagcagggaagaaggtcttaaaagaatgcagagatctgccacacctcccagcaccccataaagtctaacccacctggagccggctcccaggagtgtgagtgcctgcggggacaaacaccacctcctgcacctcgtcccggggtcggtccgagttcttggcaaagatcacagccgggatggctgaggccgggggcacggagacaaagcagtcgcaggaacatggggagtcagggctcgacgacgccatctggggagaggcgggcctctccataaccctggccacggctcagccccgaggagcagcctacccccacacgtgtaaaagacgcgcaaggaagacaccgccgtggctcctggacgctcggcgcacacaccatggacgggtgtgcgggaacggaggtgcccaccctctccccaggctccaggcttgggagtccgcaggcgggcactccgggggtcccgcccccactgggagtcccggcccttcggagcagtcgtgggaccgtccccctcgctaccccaccaagagtcctgcggccctgcgcatgcccagatacccgaccctcttctgtccaacccttctctcacccccagtactgtattcccctcaccctctcttcctccaagaccccagctcggtcccgggtgccacctcctccgcttctggccagggccgccccattgggcggagactctcaggtgacctggaaggccttcggcctcggggtcggagccggaacggagcctgcagctccgccgttttccaccagggcgcgcgcctgcaccacttcccggagcagagcggccttgcgagtcccacctggctccctgtcctacccaggcgcccatttgaggcctgacaaaggctgctaaccccacggagtcactgcggggagctggagctgggggtggaaaggatcccgcgtgaaaagggagactttgtcagagaaaggggactgctgggacatctggagattaaggaagaacctcagatacttgagtcctggtttgaatcccagaggcgcaatcccaggctggaggcgcctaggggaataagatacagaatacgagagtggtggaggctgggtgcggggggctcgcacctgtaatcccagcactctgggaggcggtggtgggaggatcacttgaacccaggagttcaacaccagcctgggtaacacagcaagacctcgcctctacagaaaatattttaaaattagctgggcgtggtggtgcgtgcctctagtcccagctgctctgaaggctgaggtgggaggatctcttgagccagagagattgaggctgcagtgagccaagatcacaccgcggtactccagccgcggtgacagagcaagaccctgtctcttaaaataaataaataagggaaagtgtgcacaaaacccatctgatcccagaggacctatctgtctgatagtgctcaaacccataggaagatcgctttaaagggaaatttagaactttctagttcaaagatttggtgcctttacctgtagtgaaactgaaaccacaaagaagtcttggccaaaggtgacacacagtcatgtggaggtacactctgatcccaaatgttttgattttcagttcatttttctctacaaaccatctctccatagccatcattaagacaaatgcatcttacacccttttgctctgtggagccctccagaatggagagaggggagatgctgcaggttatctgcttctaggggttgcactgaatctatagatggctttgagtagtatgcacattttagcaatagtaattcttccaatccgtgagcatgaaa

SEQ ID NO: 65001 - DNA, 1193 bp, Homo sapiens
aaaaaaaaaaaaaaaaattgggtgtggtggcacacgcctgtagtccaagctacttgggaggctgaggcacgagaatcgtttgaacctgggaagtgaaggttgcagtgaactgagatcgcaacactgcactccagcctgggccacagagcgagactttgtctcaaaaaaaaaaaaaaaaaaaaaaggtaaagcacccagagttagatccatttctcaaaggctgtgaaaggagttaagtcattcattaagaagtgattccaagccatgtgcggatgagaaagagacagcagtgaagctaggggattctcctgctgaatccttcctattctgtggtgttcagaaaaccaagattcgtagaggggaaaaagtggcattgatctatgaacctgggacaactagaacccagcatgtgggacttcctgttgtgtaggtgcagaggagactcagcctcctgtagtgcctggagcattggacttcagacctctgctcagtgcctgtgggcgcagcctagaaccctggcagagagggcacccttgcctcttccatctctgagtccccaaagttctggccctttgcattatccttgattgagcctgtgagcttcaaggacaggagataatataaagataaacaggaagtgccaaattagagacacgaagtttgttgttttagagggcgcccagcgccaagcagcggtgccaggttggcagtcctggagcctggtgtctgcctgctctctgcacagccagctgccccttggaccacagcaggagggccctctgggcaggaaaggaggatgggatggagcatggcagggaatgggttaagcaagtcattcttttttacccaccagctgaacatttgcagtgtcacctctgattcattctgggcatttagtcactcattccacagatatttttaagctccttccctgttccaggcatgtgcttggtacagcctcttcccccaaagctaacatcctcactagaatgtaagcttcatggaggcagggggtttcgttcattgcactactcccagtgcttggaatggtgcctgggactctataagtgctttgtaagtttgttgaataagttaatggaaggacgaatagatgaaggaaggaagggaagaaagaaggaagggagggaggaagggggcccttaagtgggcataggagggtcccatgatttttc

SEQ ID NO: 65002 - DNA, 2473 bp, Homo sapiens
gataggataagcatagaaactatcagtgcgtcacaagtagtaagcattgttttcggaaactttatgacactctcatacaaatagcagtgtactggtctgtatgcaaaatgtatttctcttgatggactatgtttttttttgtttgttttttttttttttttttttaagccatcgcgctaaggtgtaggtgtgattaacctcgttttactgatgaggacatgaagctcagggagtttcggtaccctgcctaagttagtgggatgtgtaggtttcaaacccagactggtctgaagccagaatggattccctcactaagctaggcagccttcccaagttctcggaagagacttgggagcaaagataaacctacccgcctagtgcctaccaagtgctttacctcatctcaagaaggtaagggtaagtggggcagaggccaagcagtacttctcaaactcaagcgtgcaattctgtccacgcgaggcccttgctaaaatgcagattctaggcacgccccgtgaagtaccgagtcggattaggagaggcggccaggggagcctgcctttagaaagagcttcggatgattcagatgcacacgtttgggaccgtgggctatgggggtcgccgcaataaccatgtgaggattaacgggggcttaaccgattgtgaaaatccccttagaagtgtcgcgtaaacaaccccaactcccactatggtgccggaccccagtgcctcactgtacaaagtcgcccctccccaggcgacaacgagagagggactaaataaaaggttgatggctttccactcaccaggcatggggttgagtggcagccggctactgccgaagagcaggtaaaagctcctgccacacctgggcgagactggacttagggcgcaatgtatatgctatttctggggcatttgtgggcctcaccctaaggacttctgattggcttcagggcagatctatcattcatcctctgggttagaggtgggtggaaggtcaacctcgaccaatacaaaagcactcttcggctaagcccctccccttccagcttcctgttgctgtacatcaaccacccagcgggcgggactttgcctccctccaattggctgatgcacatgtcactcattattcaattggctttcggttggtgcgctctaccgtccatcagtgacattgcacagacctattggtcaaatcaacgtcgctctagacgcctctggttgattggttaatagtgctgtcggtccccaatgttccaagcgcttattggtgaaggctgccgtcgctcgggcggtggcgggctccgggattggcggttgcttggcgggcggtgtcaggctctcggtggcggcggaggcggcggaggccagggaggaagatgtcgtaatgagcggtgggtcccggccgctgccggcggggtcttcccggcccccaagggtcaggaagacgggcagaggccgcggggagagggagccgaggccgggggttcccccctggggctgggtctggcgtcggggcccggcttcaggaggggcgggggagggaggattcccgcccggaggaggagcggggctggccagccgggcggaggcacccggaagggggcgttcgactccccgccccctcggagcccgccgggcgggagggcggcgcttccgggggccggcgagaggagcgggcaccggggtggcctggcacccctcggacgggtgccgacccacttcaacgccgctctcccgcctgggcgaactatgcctgggtcggctctgaggaggcagccaacagcccttgtgttcgccccgtgtctgagaggccttcctgcactcttaactgtagatgcccaccagcgattcagggctccccggagaacagagaggggcgagggaacgcttgagacccggacgctgccaaccagatgggcactgctcggcatcgacgacagcccggttactgatatatccccagtcgggcgatggtgtcaggacacgagagcactccctgggcagatgacctctcaccggggagtgggcaaaaaccttcctttaatgtttttacttggatccttgatcttccagctagatatctgcaagctcttagcagaattgtgagaagtttgagaacttcttgccagagctcccagcctgttacttgacgccccgtaggggagactactgcagtcccaaagctcaggcgcaaacaatcttaaggaattacagaagaaataaaacaaaatagatactcgctctcttcctgtacccacctccatccccattgctgacttacggttttcagcctcttatccatgcttcttatgtttccttgccagcggctttctaattttagttcagaaggaactatgttttctcctctgggcaactgagaaacctgtcctcactgcattccttggttttgattgcaatatcctgtcatgtttgtttcttaattaacttcatccaaggggactcagtc

SEQ ID NO: 65003 - DNA, 2163 bp, Homo sapiens
tactaaaaatacaaaacttagccgggcgtggtggcgggcgcctgtaatcccagctacccgggaggctgaggcagagaattgcttgaacccgggaggtggaggttgcagtgagccgagatcgcgccactgcactccaacctgagcgacagagctagtctccgtctcaaacaaaacaaaacaaaaccaaaactagaagaggaaaaccactctggtctgggataccttggtcccaaatttccttcttcccccttcccattcagccatcttccttctcacctcaccgtctcttcctcaccccactgcacctccccactcggggcatggtccacaagtcatttcaacctctcccactctcatgccctaatttctccccacaaccagattacccttttctctatgtgtccccatcaccttgcctcagagtctggcccctaattccattttccatttttcttttcccattccactagtctcccttcccagggggtacttcctgccctaagctcacctacaggcacctactatgggccagccacttaatactgactactcccctcaagcccccgggacacatcctccgccccgcctgagctgcaagagatcctcctatacctttaaccaacctccacgtgcgtgttaaccgcggtgacagcatttccttgtctctctgctcccgcccccaaaggcgctacccattggccgctgggttcctctgttctcgctctaattggcctcgttaccgaaaagctccaaccaatgacctctccgtgtctgtctccctcctccgatcctggaaactcattggctccgaggacttaggacctgttagcttggttgggcgactggcaaatccttccttccccggggtagaagtccagggtgagaaattggttccgaactcaaaggaacccagtgccgggccacagccgggtcacgtggccggcggccccccatgacgtgctggctgcggggcgtcacggcgacgttcgggcgacctgccgagtggccaggctacctcagtcacctgtgtggtcgcagtgctgccatggacctgggacccatgcgcaagagttaccgcggggaccgagaggtgccgccgctagggccaggcctcctgcaggggcgggggaaaaggggtccccggagtcatctacagcggggaggggagtagtaggagcccctcggggcttctggggccacccggtggggcaaggaggtttgaggatcaccccccgtgggaaaagggggcttcaaagacatcccaccaggggaggagttccggggaaacgcaaatgaagatgggttcaaaaggcagcctttcgtaatgggtaagagctcgaactttggagcctgcctgggttggaatgtttaatgtatctgggcctcagtttcctcatctgggaagtgatagtatctgcctcacggggatgttatggtctaagatgtttgtaaagtgcttagaaccctgctactcgacaggtagcaaggtcaaataacttgctcagtcccacagctagtgatgaatgaatcggggtttcatgtgatggatgtcaggactgtgctgggcctccctcaagggcgggggaagaggggtcctcggagtcatctactggggggaggggagtaggaggaaacagcccctcagggcttctggggccaccccctggggcaaggagatttgggggtcacccaaacctccttgtgccaggtgggcatggtcatgggcccctctttaggtgggtacagtgacaaacagcttacaaactgtttgacaaaaaagtaagtggaatatgggggaaggggactagctcggggaggaggggaggagaaagctcttagcttactgccttcagtactttctgctgaccactgggaagttcttttccttttcgctcctcaggaggggaaccaagagaaccttttaggaattggggtccagggccctggttgccaaatctggttgcatgtgggcatttctagaaacgcttgtttaaaatgcagtttttccagcctgggcaacatagtgagaccctgtctctacaaaaaattaaaattagtcgagcatgttggagcgtgcctgtaattccagctacttgggaggatgaggttggaggattgcttgagctcaggaagttgagactgcagtaagccgagatcacacca

SEQ ID NO: 65004 - DNA, 2265 bp, Homo sapiens
atcccccgcacgtctcctgttgtcagacccagagtgggcacttcgcgtgcattcaatgaatgaatccaaaatgagtaaacctccctgagtccatgccagccaagcatgcatttctcaagactcacaaatctgtgggtgagagaaatcacccagtctcactttggagtccgactggcttaaacttagctccaccacttcctgcaggaacttgggcacgtgacttagcctgtctctgtgtctgtgacaataggcctacttttgagggtttaaatgagctcttacggtgggtgcatctgctgtgggcctgcgcactacagctctcctgccttttccctgcatgccggaggcctcctctccctgtcctgatggctggctgtggattctcttttacttctaggactctaatccctttgcttcccttgtcttctactgggagccacttaaccgtcaggtgagtgaattttcccaggacagcctgggatgggctgggttggcagggcctgagtttatggctacgtctagcgaaggtccccagactgggcaaacatcccagctgggcactctgcctctaaaatagccctcagttagttggagccaagagtggtggggcagccgatcgaacagagaggaacggggcctgtgctggtagggagggcaggtggcatttaatgccattcacccagagccatccctgagcaggtgcgtgtggaaggccctgtgaagaaactgcctgaggaggaggctgagtgctacttccactcccgccccaagagcagccagattggggctgtggtcagccaccagagttctgtgatccctgatcgggaggtgagtggagctccgctgtagtcctccaggtggtggaggctttggcttatccccagaagctgtccccaggagatgccaggagatgtccccaggagatgtcctctctctccagcccagtgaaaacagtgaaaaggacagtgagaagggaaagtgggggtagggagaggggaaataggcctcctctgtccatctggccatcctgttgactgctcctggaggacagaggccagtctgctctgctcacccatgtccccagcacatatccccaggaagtccttgttaatgaatcattgactgggcctggcccttcttctaactcttccccctggacagtatctgagaaagaaaaatgaggaactggaacagctctaccaggatcaagaggtgcccaagccaaaatcctggtgagtgacatctggtagtcctctagaaagggacaccaggcccctgtgtttacttgaagccacctgcctggggaatcacagatctcctcctccctggccacccttgtcagatgcatcccagcaacttccttcaagaggccctgggatgaggggtgagggtgggagagtgacctggctagaaaactccacagagcactgaaacctctgcttctccttataggggtggctatgtcctgtaccctcaggtgatggagttctggcaaggtcaaaccaaccgcctgcatgaccggatagtctttcggcggggcctacccacaggagattcccctttggggcccatgacccaccgcggggaggaagactggctctatgagagacttgcaccttaactctgggacctgctggcccagagtggagctagggctaggtgtcaagagagggtgtgggattgggacccaggcccttctttctaaactcaacccatttccctccctaccccttatcttcaggactcttcagagctaatcctctaagttctctgtactcagttggttctcagttagctggtcaagtggagtgtaatggtggcgtagagaatcacaaatggaaaataattccataattatttttttgaccttgcctatgattgattaggatagctccctctaggggtagcagccggtgtgactccctttctggtgacagacagggccccagcagccctgtctgttaccatgtgagtcatactggccaaagcttagtcctagcatatgcacctgagccaacctggccaatcagattgttttgtcaataatttgaaatttgaactggagagatccagaaccttgggagtcattaaagccaagtcattcatagcagccaggaaacaataggaaccaaaagcctctgcctgctgctattgcaattcccaggatctctccttccctggatccctccctcccaggtctgggctgtgcagttcctccccctgccttaaaacaccccactatctctgtaaagtctctctctctct

SEQ ID NO: 65005 - DNA, 2249 bp, Homo sapiens
ttcccagtccgtcaggaattttgtagaagggcttcatgtgctggtaccaataggacaggaagattttaatcagctttactatctatgtttttttatggaaactgtgtgtatgtatacatacattttccaaaaagaaaaattaaatgattatagagattatgtttttcagactactcacgtatctgcttttcttactccccacctctgctgataattcctagttcattggtttttcccccacactggaattacctggggagcttaaaaaaccctgatgcctgggtcccaccctcagagatgattgaaccagcctggccagcatggcaaaaccctgtctctactatgatatgaatgcagcctgggcactgggaaatttaaaaactccccagataattctgtgcagccaaggttgagacctcctagtctagagctttgctatacacagggtggtccacaagccaggagcatcagcatcacttggcagcgccttagagattcagaccccagacccactgaatctgaccctgcattttcactagaccccaggtgatcagctgcactagactcaacctctaaaccaagacctcccaccctcacagtctatgatcctttagtgaccctcagctgagtcctgtgctgaactgtgtttgttctccttgagcacatgcccgctaaccagggacagactggatgagcaagcaacctgctggctatggagaagagccaggctgggtaaatgtttgctgtgactaagccaggatcaaagaactgcctgttgcttgcactggctggcactgagcttgccactctgtgaactgtgcttccttcccctgcatggacctgtgcctcagtcactattatccgcaggccttctccaagggcagccctctccttgtttatccctcttaagcctgcgtgcaggaaggcacattaaccctgtggccccctgcaggcaggagggtgttgggtgcccttacctaccttgccctttttcttgtaccgtaggctgtgccgtttatgagtaagtgatgtgtgtctgtgtgtgtgtctagaagtgctgcactcaccttgtgttattggaggttgtgtaaccccctagctttgagcctggtctcagatgttccttttccgttctctgtccagccgttaccgcccccagtctgtaataaaagcctatcagccgtgcactttattgatgttcaacccggcctggtctccctcaacccccaaggaggggacttggggaatttaagcaactttcctgtcccctcacttctctgcaccttgtaggcagtacgtccagtagggggagcccgccgcccaaggtcggccccttccgggcagtgaaagcaacttctagccggcctcccccttcatcggcttgggccgcgtcccagtgaaactgtggtcgataacccgtagcctctcccggttgccgcacatatttgcgctctcggttcctcctcttcccctgttctcatgaaaacttgcagctgcctcgctctgcttccctgggcatccagatctccctttggcttctagtacctaccccacatccatctggccacccagcttagaaacatatgtggactttacctagaagatggagccggggtcagtatgcaaggggcagaggggctgtggatactctcacccagaggggtaatggtgatactggaggagttggcagtacagtgccagtattatctagaaccttaggttggtggcccaggggccatccttatcccccacctcagggaaaccgagaatgggcggatgtgggagatacctgtagtctagggtcttaggggacactcagcttcaaagctggttggctttatccatctgcttccagagtttgtccagccccctcgagtgatgctcacctcccaggatcctaagacccagacgttgctccctcccctcccaacttccccttctgcagaaggtgtctgtgcttttctttgttctgagcttcagtttcctgtccctgtagcagatgagaatcaagagtggaaggtggctgtgtgggacagtggtcacatgtacaagctggctctggcttcagtcccagctgtaccaatgccagcgcctggcccccagggtgagtgatttaacctctaagcctcagccaacttgtctgaaaaatggggataatgacagcacctgtctcaggtgatgataggattaaatgaacaaccttagggaggacttgttctaggggctgcctgccttaagcaccctataaa

SEQ ID NO: 65006 - DNA, 578 bp, Homo sapiens
aacagtcatctcaataaatgcaagacatgagcataaaagaggttctctgcctttccagcgttgttattacagagagaaacctacaattattttgttaaacaaaattcaaggctccaggactcatctctggagctgatatgtcttaaatactattatagtaggaaagggagaggagaaaattccccacccactcccccgatttggcccgtgtagcttccctttgagggtgtgtgacttgccatctgcaaaagtcatggccaaaacaggaactaacaggccaaactaccatcaatctagtcttctacagcaccctaacagagtgccagggtcctctgtcccctccgcacctgagggcaaagttccaggaagtttactgccggtgttaggaggtgagctcaagttcagtgtctctgcctctggctccacagaaaccagcccctatcacgtggcttctggaaaatgtgccctcctcaggattggtccagggagtagtcacaggtagagaaagtaaagggagcagcaattgaaactcgcccttgaccctgtgtccagtaaggaggtgaagtctgtctggctca

SEQ ID NO: 65007 - DNA, 3264 bp, Homo sapiens
gtgcccattctgctggaggaaagaagaggccctgaggcccccttcccttatacacttggggcccgcagggtcgcccacgagggcaagggggtggaggaatgcagaaagatgcagaggggccctggggatggcaggacactggaaggcaggccctggctgctctcccgcacggaaccgccggccgcccttcccgaaaaccagtcctccgcgctcccctccgcgcccgccggctccggcctgtggcagcgctaatgaggcagtctggaggaagccggtgccagcgggcaggactctgggcggcaggccaggcttgtcatcctggcggctctgccgagctgcgggcgccacgtgggagctgggggcacagcagccggcggccctccacccccagcggggtctccgcctcagcccccggaaagctgggcctgcaaactcagggtcctctggaaggggcagcgcccttccttgccggccctcccgggtcctctggcagtgctgcgcagcccgctctgcgctgtcctctccgccgcggcgtgggtccgtcggctgcttcgcagccgcgccgctccccacaatccctcagccatcgcgggcgaggacacctttccggtcgcctctcggcattgccatgccccctcagccccttccttttaacctagtacggttactgtgtgggccaggggttcggatgggcctagggcagggatgcgcgagaaagccacttgtccccagcagttccccatccggagccccgccctgcgaaaactacaccaaacacgtcaacctgaggctcagtgttcccttccgtaaaatggggagagcatcgcgtaattcacaggattcggtgagccagtttgtgtgaagggcccagcctcctgcctgtccctttacattcccgtccctgctacattggaatagcagggccgaggcgggcgcgaccgcgttgctaagaagcgcatttgcccgtccctccttgcggtcgcttaagggtggtggaggaagccaagccctgggtgtggccgcatatttgccaaaatatttctggaaaatgtctcctttcttgtcgccatactagcccctgaactccacggaatttaaccgaatactctttttttttctccccttccaagagttgccattttgcattatttactgggacgggttacgtactcagcgcttacaatgtaaatgtttacataactatatcattttctctaattgcagaagtagtcaagcccgttataaatgtccaatcttaaacagttttataatgtaggacttgaaagccgcagggacaacttctattaaggtccacggctcgccactttccctccttcgctgaaattcctgtgcccacgctggcgcagcactagcagggtgggtcacgcgtgcaggttgctagggcaacgtcctgtcgccggcgtcggaaaccaaccagtaactctcaggagccggagtcgggtccgccctgggggcggagttagtcagcaggtcggtccggcgggagcgcgtttcctgccggtccctgcaggtggcaccataggatcgcggatgctttcctggggcggggctttcctggggcggggcttcccgcagtgctcagcgcactccaggggcggggccggggtggagccggggtggaacgtgagccaccagctgcagtccgcaaaggatcgagggaaacgagctgtcccgggacgcaacgctagacaagctcagggacgcatttacagggacgcagaaagtgtacgcgtcagagagtggaaaggagaaaacaggttctgggacggcgacagagaagggaagtcgtgtcgcccagaaaggctatacaatctccacccttcccgtttgtccctgcgacaccctttcaccctcctgtccctccggacctgcaattcttcacaccctctgcagcgcacagggtgctcaggacacatgtgcacggtgggggctggcgatgcttcctcgcccccaccacccgcaagcttgcagagagctgtagtgcccaggatgtatgccaggataggaattccacggttccaggcatgccaagaaaaatagccatgctgtttctcggtttgttcagaggaagccttacctctcttcccttctggagtttgggaatggaaaaaatgactcaaggaatccccagcggagctaccatgtatgtactgcattgcaaaataggggtaccatattttgctctcccctacctggcagtatgcgccacacatggggctccgtggtatcagcgtcgcaccccctcatggtgttaaatagtcccctttcccttgtcccacatctctgcccaatcacacaaccacagggacacgccccaccctggtactggatatccccacgatgagccacagaaagtgcaggagcccttatatgaacacacacacacacacacacttcctaggccaagagagaaggagacccttggcagaagacaaaagcaggtttattagggccctggggccaggaatgcctaagatatgagttaaggccagggccgtgagaaaaggtgactctcctgaggccaaacctttgcatctcagaagccctggctggagaccttaggagtcagttctgggagggacctggggatacagaggggtctctcctgaccctgggatctttgggcttttgccaggattggggaaatgatctggggggcagggagccttgaatccacagccttcatttcaataacgaccatttaatttgttccttggcagactgaagaacctggggtggggtgggggaggttgagagagaattgagaatgtcaaatgcctccatacacagtcatggggaggtccacagcccaccttgccgaagcgcccctgcaaccaccggtcactaggtggcagcagcttgtctccacttggcttaaacgcggccaaccctccaagtcagaaagcgcagaccaaaccggctgcagccagctcccacctcaggcccaagcctgcccagacctctggctcctgcatctgcagcgtgggtgtggcagcagcctgtctccccgctgtcatgccatgagagttcccgcccacagtgccacgtccaggcggagacggggcccaggcctgacactccctgtgctcagacgcctcagcaaacccctagctctggccatggctggcaatgtgtcctcaacaccccaccgcaacccactgctgatgtggcatagctggcaaagggtggccagccagaccctgcggtgggatgcctggtggaaagtctcagcccagtgcttac

SEQ ID NO: 65008 - DNA, 1385 bp, Homo sapiens
cctctggaggggtctaagctgagctgccctgagtcacagagatcacagtggagtttctcctgagacaggagtgtcagctgagtgggaactgtgtccctcatgggtggggtcagaggttaccttggccagcagccggcgcccgtcattatctaggatgaaaacagccttgatggtgtagagggaaggttcctgcaactgacaccggagaggagagttccgtttggcccctgactcgaggtggacaccctgtgtctatgggatctgctggccctaggatacatcctcaggccccagcaaccccagtcctcaaggtccacagctggttctgcccagccctgtgccacatgggccaacccaggtgcccactccactcccaggcagatgttccactgcaggccccgagtgggcgctgtgcccgttgggtgcagaaggtccttccgggcccaagttctgtcatgcactgactgctccagagcccgagtcggagtgtatcacagaacctgggccgggggggacagcgggccgagcctccttcttccagctgatccctggccgggctggacctgcgctatcagcgcgcccccaggccctggcccgggtagactccagaagcatgcccatcacccaccggtgatgggagccgagtctgggacggacaggccactccttaccctccccgcggaatcgcaactcacccgccacccccactccaaacggacccagaacttcagccccgcgccgacggactcaggacaggcctcctctccggtcggcgctgggacgaacttttcctcccgggtcctggggccagtcaggggtgacacaaagttcccagccgccgggcgcgcgagttctgagttggctgctccccctaaccctgctctgtccctgcccagctcccgccgcccgggatccccgcgcccgcccgctccgtacccgcagccccgagggctccccggctcgagcaggcggcgccggcccccggcctgccgccgcggccccctcccccgggtgcggacgtggccagcctcgggccgctgcattccgctcgccgcctcgcactgacagcgccgcccgccgcctgcccgccgccgccgccccgcctccgcgccgccccgcggccccctctcgcgcgtggcctccctttcctcggggccccgtcctcttgctcgttctcccccatctcccctcccgccctcaccccacctctccttcccccacttctcctctccctctctcctccttggctccttcccgagtcccttacatccccgaactctgcatcctcagggtgccccaagaccagccctcgtcctgcttcctgcctgctctccggcctgtggctttggtgtgcgccagtgtctataggctgtcctggggccagc

SEQ ID NO: 65009 - DNA, 3464 bp, Homo sapiens
gataaatggaaagatcgcttgagtccaggagttccagtccagcctagaataggtaaaacatgctctctgaattagtctttgaaactggtaaactagctcagaagtttttttaagaattccatgagtggtttgctggtgtacgtttattatatgcagtgaaagtacttaatctgcaaaccaccccaaattaagcccctaactcgcaagcacaaaatggactcgattatttactgagttatcagttggccttgtccttagttgtacagggactaatgactcacctataaataatgggctcttctaagaagacacagttgagttgacacctctttgtcctatagctgggaggaacgcattgcaaacgccaacccaatgattccctaaatggggtcttcgcatcagctgcgttaaaatcaccccagcaggcaggttatccggccgccactccagggtcattaaatcagactctccagtgggacctcggaattcgtagcttagcaagctccccaagtgatgctgggagtaaactaacgtttgagagtcacaaacatgttttggcaatataaccagatgggactggagaaattaaaaaatgagaaacatccctaaaaaagcaagactaagctgcgtgggaggccaaacgaggggggtcctttgggctgtttctaccatgacaaaaatcgccattaccccacacctctcacaccgccaacgttccgccaacgttccgccaacgtcccaccaccctcatgatatccgtccgcggtactgctccagcgaaggtacccttgcctgggccatgaggcgcaaccgtccctcacagctggggtggcttctccaggttcgcaccgaggggaagttggggtaccggtttccgccgccagcacccaagatggcggcacgagcgtcgcaaccacaagaaccacatgcttcgtgtcccgcctcagcattctcgggtctcactagacttttgcaagtcactgtgggaaccctcaaggcgagggtgttccgcactctggcggcgatacaccttcctattccctgacctaggccttcattcccccgccacagaaagcgctggaagcgcccaacctggatacttcacccaacgcccaagcccactaacatcgcccgccgcgaaggcgcggccgaggggcccagaatgccagacactagggccttcgccctcctcattggtgggtccataccgcggggcgggcctaggtactcattgggccgggaattatgtcagtcttgggaaatcaggtccggggatgaggaggtacactcagccattgggccctctctgctgccaatcagagggacatccgtcgacggccccggcctcggctcgttgattggagaaactgttcctagggtgtttgcggcgggcgggtttccgagtgcggtagcaggagggggcggggaggtaagcggaggctccgagctctaggccggccggcggtggcggcggcgaggccgggactcgggcttagggcctgctgtggaggcagcggcggacgccgagctaagcagtgggtatcgggcacattcctttcccagaagggagggttgcagcgccgcggggccgaggcttatggggcgacgggatggtgctgaggtgcaggaggcgggggccgagcggggttcccgccagagcccggccctgggcctgacagggaggggccccgcgcggggccgagaggaaagctggctccggggtgggatggactgggcagggttgagggcacgagaaggcgtggtgtgaggcctggacttgggagtggggtggggccatcgggacggagggcggggtggggtttgctgtaagggtgggtcaaggccagggaagtagcacttgttcgctggccgcccctggaggctagaagctccggcgccgagagtgggcatggcgacttggtctcagccggactcgggtatccgggcagggtgggaccagcctcaggctatgggccctgcacctacttgatttttaagggactttgtccggttcctcgaacttaattggctcctgggaggttttagtaataaattgcgtgagaacgggagggtagcgtaagcaggaattctgggtcgcaattgtgtttactctgaccagagagagggagtgtgagtgtgtgtgtgtgcgcacgttcgtgtgtgtacgtatagctcgctctccccctgtagaatgaagttggtagatgggtcacaacgcaggagaggagaggcggtatgtcttggtttgtgacattaatggaagctcaaaagtggagaccagaaacagatttacttcctctgcactgggcagtctggctagagaacgtggccatatccttctgctttggctcagaaggtcatatgaatgaaaataaaacctgcctatgcaaattctggacggaatagtcctgcgtagtagggcccccaccatccctctcctttttttctttccttttcttttctttcttttttttctttttttgagacggagttttgctcttgttgcccaggctggagtgcagtggcgcgatatcggcccaccacaacctccgtttcctgggttcaagcgattctcctgtctcagcctcccgagtagctgggattacaggcatgcgccaccacgcccggctaatttttgtatttttagttgagatggggtttctccatgttgttcaggctggtctcaaactcccgacctcgggtgatccgccctcctcggcctcccgaagtgctgggattacaggcgtcggcccttttccttttttttcttttgtaagttgtgaggataggaaagggaaatcagatttcaaagttcagaaaacaaaaggcattcttcttctgggtgaagtggtggcctgaacattgtccttttgtccttccacactctcactgtttaataatcttgcctttttgaactgagaaaagacaactgttatgggtggttttctcccgaggggtgaaaatccagctttacttttaagacaggaaatgggcttctcatgtgaaaatagaagctgggtaatgcgcctgtagtgggggaggagggctggtaaataaaacaaaggtgtaagatattttggatgacctggttattgtctgcttattcaaaccaagctacattttaggatattgcacatttaatattcagtaactgagatcattcgtgatcagtagctttctttgatagttcttctatgatcggttgctatattttgggttttttttctgagagtgtaagtagtcctttcttcctgtaaaagtggcctttaggccaggcacagtggctcacgcctgtgatcccagcactttggggggccgaggcgggcagatcacctgaggtcaggagcttgagaccagcctggccaacatagtgaaaccccatctctactaaaaatacaaaaattagcagggcgtggtggcaggcgcctgtaatcccagatacttgggaggctgaggcaggagaa

SEQ ID NO: 65010 - DNA, 1928 bp, Homo sapiens
gccactgcactctagcctgggcgacagagtgagactctgtctcaaaaaaaaaaaaagtgaaagtgtcctttgaatgtgttttctaccttctactgtgaaggttttcctaccctgatcatgatgtgaaaagtatggaatcttatcctgttgcttttgtgattcccatttcaggtttctctggaaacccccctggtaagtgtggaggaggcgggacactctgacccaagacgaaaggcctgtagctccagccaaagaaaataaaccttaggagggagaaggaaaaaaaaaatccatcagctgttcctgagaacagcctgcattggaatctacagagaggacaactaatgtgagtgaggaagtgactgtatgtggactgtggagaaagtaagtcacgtgggcccttgaggacctggactgggttaggaacagttgtactttcagaggtgaggtgtcgagaagggaaagtgaatgtggtctggagtgtgtccttggccttggctccacagggtgtgctttcctctggggccgtcagggagctcatcccttgtgttctgccagggtggggtacggggtttgacactgaggagggtaacctgctggctggagcggcagagcagtggccttgatttgtcttttggaagattttaaaaaccaaaaagcataaacattctggtccttcagcaatgctttctctgaagaaatacttaacggaaggacttctccagttcaccattctgctgagtttgattggggtacgggtggacgtggatacttacctgacctcacagcttcccccactccgggagatcatcctggggcccagttctgcctatactcagacccagttccacaacctgaggaataccttggatggctatggtatccaccccaagagcatagacctggacaattacttcactgcccggcggctcctcagtcaggtgagggccctggacaggttccaggtgccaaccactgaggtaaatgcctggctggttcaccgagacccagaggggtctgtctctggcagtcagcccaactcaggcctcgccctcgagagttccagtggcctccaagatgtgacaggcccagacaacggggtgcgagaaagcgaaacggagcagggattcggtgaagatttggaggatttgggggctgtagcccccccagtcagtggagacttaaccaaagaggttagtggacctgtggtgggtgtgtggggcctggggcttgggggtgggctggtcccaaaggattgtggtcagaacactgagccctgtaaagagccagacaggtttcagcagggcctcaggcactgttcttgggtagggatgggctgaactttctgactttaggattgggggctgggagcatttccctgtgttgaaccattgacctacctctaaatgtactgtcagggcagtgggaggttcctacacatgccagggtgtttactgcttggatttcagcgtgactgctggaggcctggggtgggggaggagtcatgttgtgatgggctttgatgcagtgtacatctgttgctaagacacaaatactttttggactcttgttttgtacctccccccacatcagaacacagacataccctgaagttctcctttgtggcgaggcctgttgttgtattgtcctgataattcagacctcctgggcctgagccaaagggtagatttggatagttattcttggccaggagagggccaaggcttccaatctttgcaaaaggcccactgcagggagtagggaagagaagtctgggagctagaaagagaaactgcattctgctgcccaagtcaacttgctttgagctgtcagaagagatccttagctcttgtcacatggctgacatactgttctgggcagaaagcgatgcagttctttgcctttcaagatgtgaatggctgctgctg

SEQ ID NO: 65011 - DNA, 1676 bp, Homo sapiens
tgactgtcaaagagtatggcttgttctaggccagtggtcctcaactgggggtgattttgtccccgagggtgcaggtggcaatatcgtgaaacagttttggttgtcacatcttggggcggggttgctactggcacctagtgggtaggggccaaggatgctggttaacatcttgaatggcacagaacaccttcaaacaacagatttgtctgaccccaagtgtcagtagtgcagggattgagacactcggctctgtgctcaaatggctcatactggacctgctttgagagagactaggattatctgagcgcaggagccaggaacatttcttacctttcagggcctgttaatttagcttcttacagggccacttggaacttcacctctcttctgcttcccctttccttcaagtgggctctaatcttggcacagtgttctgaagtgtgcttcccagtctctgctctatgctcctcccccagggtagctcccccaggggtgggtgtaactgggtttgctcctggaaaccctgcagggtagctgcatatctgttcctgctgggatgggatgggatattttggatattattgggtgggttggggccgaatgggatgggactttgaccctgctttcctctgtttcttggccctcgtgaaggttgtgcttttcctcatctcaggcctttataactccctttgggaggtggggtgggtcagcattaggggcccaggctgggtatgggggaagggaggattattatgtgtctagaacaacatttcctcagcaactcagggataaaaatacccaggtccagagcatgtgacaggcactgctggaaccggtattatccctggggtggcagtactcccccgctgccaggcctgctctatggacagccatagcctaggctgttgtcagggataggattccccttgagattggcattctgcccagagcaggggggtggcctgtttacagctctttccaggctaggagctgactgtgaccagagagaacatactgtctctctgacctgaccttaggctccaggggagcagcagtggggagggagctaaatttcccctcgagaaaccaatccagggagtctgaattgtgatactgagtctgtgaggggcttctttcctgcttggatgagatatgggccaggaatcaggcagagaatgctcttgaataaagccggggtgaaaggggaggggggacatttgtggccaggagaatgcagagcacctgtctccctaagtatggggcttcagggttgtgtctcccctcctcttgcttggggctaggcttggccagcactgtgacattgctgcacgtgggcaaaatggccttccccttttctctagtctggcctattttggggtgacaaaacttacggcttatggtgggcctgggtgccctgggttcctgcccagcctggctcgtgatccctggccttgagaactggccactgccttcctgaggaatgggataactctttccacttccagcaaataatttagattcccagagaatctgcgggagaagtgtctgcccagtcctgagtgggctggatgagcaagatgcgacaggagggaggagagtggcaccccttcccccagggctctcactgcgccaccccagctgactgactgggctgggtggggctgcccgcccctggg

SEQ ID NO: 65012 - DNA, 861 bp, Homo sapiens
gactctgtctcaaaagaaaaaacaaaaaacaaagaaatattctctgaatactttctcaagctgacctaagatttgttgtgcctacttataacagtttgaatttgtggcctcaacaatcaaaaaagttgatccttaaactactgatctagtaatatgccaattggcttttgaaaataacaaaattgtgactacctagcttcaactcagttttcactgcatgcctatcagtattactgttttctctgggggagaatgatacagtttttacaacagctcaggaatgccacaaatgacaagtcagtcagttccaaaggttaagaccaaagctgactagcagtccatttgggatacaaaccaaggctgtagtttcatttcagtgcatctgatggtgcagaacagaaccagaacacctccacttaaactcccttaattagctaccgactgctgtgctactgtcaaccaccaccagggcacacactcagacctctgtgcgggaaggcctgtctgtgacccagaccttcagtaaggctccccagctccacttatgtctcctgagaactttcctgaggaggctttctgaaaaaattatctacacatcagtttattttaaacaaatgctttgcacgagtgagtagtactcaactgttacactgatttgttctcagtggaaatcctatgtctgttacaaaaatgacaagttggccggatgtggtggctcattcctgtaatcccgcactttggaaggccgaggcgggcggatcatgcggtcagaagatcaagaccatcttggccaacatggtgaaaccctgtctccactaaaatacaaaaaattagccgggtgtggtggtgcacgcctgtagt

SEQ ID NO: 65013 - DNA, 1205 bp, Homo sapiens
ttttcttacataccttatagaaatattctcgggatctccgccctacttatcctaacagctcctccccttccagagtcaggcccagcaaacgcctgcccctccccctccgtgtcccctttcccaatttattccacacatctcctcctccaatcagcacaccttgtgcggccctgggccctcttccaattcactcgacgttactcctccgtagtcctgcaaagccaggttcctctggcagtcccagccggacccggcgtcttccgaatacagttacaaacctcgggttgtgcggtcgtatgcgcctcctcacgcctatccaagcctcaagcctgtccccttccgccctatcccgcagccgcccagccaagcaacattgttccagaccacccgggccccgaagagcggcccccaagtgctcggcccacccccaagcactcagtctctggctcaggattcgcgccccgccctctccatccttcacgcagctggcaccgacgcctcagcgacaggcgaagagctcagcgcgggaagcggagaagcaggacgctggacccgggcgcgctccccgctcctaacctccgcctcgaaagcgcgttccctcacgcagggctcccgccgccgccgccgccgcgccccctcccccagctctcccgcctccagcgggctcctcacctcagagcagcgcccaagagcccgagaggaatcggtgctgcgctgctggcgcgtcgcgtcgggtcgcctgggggagtggcgcccaggaaggcagcaagccgggtggccgcagtggcgtccctcactgaagcggcgtaccgcaggccccggccaacggccctcccctcagccgaacaaaagagcctcgcagtctgcgctgcccgccgctcgcaccgcgcaggcgcaacgacccgccgcacggcaccatgggcctcgggggtctgtccaagactacaaggcccgaagcgccgcgcgccgcgcacgcacagtaggcgagggtggtagggacttatagtttttaaactgtaacggtggagagattgcagcgtagagcgttgtaacctagaatattagaacatatgggccaggggcagtcgctcacgcctgtcatcccagcactttgggaggccgaggcgggtggatcacctgaggtcaggggttcgagaccagtcttaccaacaaggtgaaaccctgtctctactaaaaatgcaaaa

SEQ ID NO: 65014 - DNA, 1717 bp, Homo sapiens
gatcagggctcactgcagcctcgaacccctgggttcaagccatcctcctgtctcagcctcccgagtagctgggactacaggcgcgtgtcaccatgcccggctaatttttaaaatattttgcagaggcgagggtctccctaagttggtagggcgtgtctcaagcctggcctcaagcgatcctcccgcctcggcctccctaatagtattgggattacaggcgtgagccaccgcgctaggcttgctgaaattatctttaaataagttgttaaaagaccaccaacacattgaacggctttctcttgctccctagctgcatgatattgcttcgagtttgtttcggtgtgagcaatctgagtcgccggaccctctcgagtctgactttcactctgacaatcggtccgtggctttacgaatctgaatcggagtccccttgatagctccgctggggaacagcaaactacgaggttcaaatggtggctctcgggacttagtgaggatccagggatgtgggcttcctaaagccccgaacctcccacactgcagactatccctcgcatagcgagaacaagagtaacaacccccttacacccctctgctcccgggacccactggctgcccgtcgctgacgccccctggccgctgattggcttcccctgacagtgggcggaacgcggccccggattggatatccattcgccgtccctcacccggcacctgcgtgcactctccggcgtcccaagtgagtggaggggggatcccgactccagtccggggccttggccagcggagccgcgctattcggaagcgggaatcccactcagagcccgggcctgtaggggcggggcgtcccgggcacccgggattggggcgtctcccgtcgtgcaccggggcaccggcgactcacccggaaggagaagccgtgatctggctatatggtggggcgcgggcggtgtcgctgtggggagctggtgctgttctcaggtgagagggcgtgggcggggcctggggagtgggtgctgctctcctgtgagggggcgtgggcttgagcgtcagtagtggcactcgggatggtggcatcgctttacatcctagggagggactctcttaccacccgggattaaggcaagggcttgctcgggatccaagaaaggaaacccggcttttcagtttaccttcaaagtgtatctttcacttcctaccccccaagcttaatcggaaagaaagaaggaccatgtggacctttcggtcctagtttgttgagaatggagaaagagtggccgtagtaaaagactctggggacatttacttaaatggctaagactgggggcaatggcgagtattttacgtggacacgggagacttggcggtagattgtggtcgcctttgttacttaccttccaagtgaaaggcgtacgattagagatggacaaaaagatggagcataactgcttggttgagatcacacagagcttggtcagaactgggagcttcctctgtttagtacctgtgatatttataattggagcgagagctttttgaattgctttctgccatctggcactaaaggctcaagattgagtaagaagggacggtagtctcagtagttccatctacttttatcacctgatttgtttcttaacctgtctcttgaagttgtttaaatgggagagaaaataaatggtgagactaaagccttgcattgttactatattagaaa

SEQ ID NO: 65015 - DNA, 823 bp, Homo sapiens
ctagaaatatttttggtggtcagagctcaggggtagggtagggggaggccactggcatttagtgggtagaggccaggggtgtggccggacatcctacaatgctcccaacaacatggaattatctggcctaaaatatgaataatgctgaggttgagaagccctgcactaacagagtgaagtaatctgctccaagttctggtaccctaaatgtggagatgttgaagaaatgaacttcaatctccagatgctgcgtgcttctctggaggtggaacagttcatgacacgtccagagggctggtggtgtgcatatgccaccttggtgactcacagcacagcaatgcgggcatgtctgatggtgtggaaaagggaaatgtctgtagcctgcttcctgttccatgatgggatgtggaggataaaaggtgaccagctgctcaccatcaggctgcaagtgtctacagtggaaccagatgtcctctttgaggaccagcactagaagcctcttggaacacttctgttacgggaggcagggaagtggcatactattgcccggtgccacaaaaatgcttccttcagtggcgctttgccagttggaggggtggtggactgtgatgggaacccacgagggaactgaatgcacacagccgccgacagctggccagccccacaggcagcttgatgccaaagacaccaggcccctcagaatgcctgggcatcaggaaaagaaagcccagttggcagggtctgcctagaaactaggcctgcaggggagaggacttcattagaagggacattgccaagcctcataccaggaaagccaggtcat

SEQ ID NO: 65016 - DNA, 1173 bp, Homo sapiens
gttaacatgaaatggggtggtggggacagcttctgcttctcttgcataccatcataaataagaaaagatactttgccataggatcccctcacccacccctttgattaggtcagaggtgcataatagctctttgacaggcattgatcagtttcatcacactgtttgggcagcctgtgccccaggcctatattctccccacttactacccctaaattacctcccagataaccccccacccatcccccactcagccaaccagagggtatggtgcctgaggaagtcctaaatggacactagatgtcaccaaacacctcctttccctcagagccctgaaattaaaaaaaaaaaaaaaaagaaaaaaaaatccttcatttaaggcaattgaaggaattaacttatctgtttttatgagggttgttgtcacattcaactaagcacacttaaaagaggaagtattgctgcattaagataatttttacaacatacaaatctcttttggaaagaacggggtcaagggaggggaaaggtctccattcttttaagtagcccattgaggaagtaggtggagaaaaccgggttaaaactcccattataattgacatagtgttgtgttaacatagtccaggtgtgctggcgcaggcctgccgcattcagatgactagactggctgtggagccaggatctcatctgagtttaagtagctgcagtccagggtgacaaagtccattcttctccacataagacccatgaccatctgacagcatcacgtgttccacgctaaacttgactttgtctgtatggctccctgtttccacatcaattccatcagcaaggaagatgacccagaccctggtgtgtctgggccatgagaataccttcccaccccagctaagccaccgtgtaagtataaatcttatgcgtacccaacttgttgctccaaggctgctttccatggaaataaggcactggacaattccttggaagagcctcagaccaatttatgaggcacacaacccaagcccaagagatgtacactggctcagtttaccttaaatggaagatctcacccagtggcctcttctccttcctagtcaattgaaaaagagcttctctttccctctttaatttgtccttatcttctgaacagctcatgttaccaccataaataactta

SEQ ID NO: 65017 - DNA, 3145 bp, Homo sapiens
tatttcaaaaatgtgtttgtagagattgattggctgcatagagagaggactttttaataagtgctagggacagagcctattattttagcccacctatagaatatgtatggtctttctttaccaacatgatgctactgatcccccaaactgtagcccatgagttctgaatcttcttcacatcagtgattgatctgtaataatccatcctttttttaaaaaaccagtttgtttacggtcaacactactatttgtaagatggttagctggaactaggggttaacttatgactgaggaagagaataaagttagctggcctgtgtgggattgaattcactctcttggccttatcagcaattgctcaaaccaattgagttaacgagctctgactcctcccccatacataattatgttacagtcttgtttatctataaatgaaataagaaggcagcttacctagccagaatgttttcaatagtattacatggtaataaattatgtacatagtgatgacctttaagcacaagtccctgagaaagattaaattttgattggcatggttttggtataataccaattttattgcattttttattttattatttttattatttatttatttatttatttttgagatggagtcttgctccatcgccaggctggagtgcagtggcgtgatcttagctcactgcaagctccgcctcccgggttcaagcaattctcatgcctcagcctcccaagtagctgggactacaggcatgtgctaccacacctggttaattttctgtagtttagtagagactgggtttcagcatgttgcccaggctggtcttgaactcctgagctgaggcagttcaccagcctcggcctcccaaagtgctaggattgcaggcgtgagccaccacgcccggcctagccttgtatttttaaatgtgaaaatggttcctgaatctggattttcatttaaaacttttcctaacaattatgaataaatgggaatttatattgtgagggagccatgggaagtgtatgacatggaataattctgtttatggtgactaaatcaagaatgaaaaaattgactttctatttaagccccacactttctgtccttaccttgctcagaatacggatgaggtcaccccgttggaaggacagttcatctggctggtcaccatggcaatcccataggccctggtagtaactggcatagtctactgatcaaagagaggagaaatcaaagttaaaaggactctattttttccgaggtacccatgtttttgctgcaaatggaaaccagggttctgatattgcccctaggaaacctcagattaaggggagttgagatgagatacagccaaacactcagcatgagcaaaggactatgggagaaggagatcattaactaacattaaatatttacagatcactcctagtaggatgccgttcaacaatatgataaatatatttatttattaataaaagaaaatcaggcaggtaatttttcacttggtttgtaagtaagcagtgcagaggtttcccgccagactttcctgatccagggcaactaactatctagtttttctcttcattatgcatttgaaggatcagagtaaatctgtgacttctgcctatttacaagaaaggcttagtcagccagcaggcttctggatcacagctcacttttcggccttctttgtccataggaactttgtcctgggaacttcccacctaggtactatatgaggtaatcaccaataaatactgaaacgaatagcccagtctttaagtggaaccaagggggtgtctcatccattacaactaaattctgggtgggctggcccttttccagcatctcatttgtagaccttgaacatgtctgccaagatttatctgcaagccccaggggaacagaaaccaaagtgatctgcattaaaaatgaaagcaactgaagacgacaaaccaagctttagaagcagctggagagatttactgagcttctcagcagaactagatggcaatgatgccacaggacagccatcgattcttaacaatgaagaatttgtattgatcttctacccggaaaggttaaacactagagtacaaagtgggagaggatctggggatttgaatggcaggagagctaatgcccactagaccaggcatgctcctttttccttggggtgctctgtatcagagctgtgaacaaagcacctacaaaagatgaaattcaatagatgggagtcaggagtcctgggttctaattaaaattcacatgattttgggggactctgttctatagatttccacctttccctttattcattttaccctcccatgagcagtgatagtattggtggctgaggatagggcaagtgggcagtaggggcacagacaccctccctatatttgctttttttctacttattcctgacttacgagcaatttaaataataaaggcacggagggacaaaatccctatatgtctctggaagagaattttggtaggaatcttaaagggtacaaaaacagaggagggagagaactatttagttaaaactcagatattgcaaacaaaagtaaaaatgtcaaccatatagaaattcaggcatgttttcttcacacataaaattgtctgtgtgtgcagtagacaacagagggcagcaaacaagataactactgtgaaaacattctgccacagagttgataatatgtttggaagaaaaatactttgggagaaatatgttagttattgaatagacaaagcattcatttttggaaatattaagtacatgaaataatagagaaatatcaatccctgaaaagtgaaagtagttttcccagaggatatattatgaattttccattttaatggagttgattaattaccccaagattttgactaaactcaggaatgaaagaatattaacatcaatatttttcatggatttatatatggtagagaaaaccatttttgtaaaaatagattctaaaaccataacaatatttctaagtggtaaggagactaacaaggttatcttggtcttttctggcctagcagatagtcactttggagtacggttccctactgtgtgcctggatatgggataggtcctaatattgagtgcctttttggtgtatacataaa

SEQ ID NO: 65018 - DNA, 1515 bp, Homo sapiens
acagaactgtacttgtccccagcctcttctgattttcctcttgggataagtgatgagctatgctgcagtcaacgaggaaacatctgtttgactttccgaagctggcatggggagctgaagtctgaatcacaaatgccactttcataaacaggtctcccacaggaaccttgctaaaaacatgactctactggggtgagccacagctctggtgagtgatggggaaggctgctctcctttccagctatttgaaacaatatacactttttataggatttgtctgtggtgggatttaatgaattccaatctgttaacagacgtacctgaatccagttttaatttgggaagttagttcatactgaagctccaaaggctctaaatctgggaatttttaattagtaagaaagctatggctgggtgcggtggctcacacctgtaatcccagcactttgggaggctgagggaggcggatcacgaggtcaggagttcaagaccagcctggccaacatggtgaaaccccatttctactcaaaatacaaaaaattagcccggcatggtagcagatgcctgtaatcccagctacttgggaggctgaggcaggagaatcacttgaacctgggaggcggaggttgcagtgagctgagaccgcaccactgcactccagcctgggcctgtctcaaaaaaaaaaaaagcaagcaagcaagcaagcaagcaagcaagctatgacactgtggtgtgtggttactgtgttcagaaaagacacacaaaacctcaaattattttttaagcatattgacgtggtacttaaaaatcagcacacagttttcacattttattttattctagtattgttgtcatcaacaatgtgaataactcagaacaccactctggctagaggtgtgtctaacacacccgaactgtaacctttctctttccctccccccatgaaactagggagaaaacacctttgggagctgtatctgcccaaaggcaaactcctgtggcaggtggaacagggagctggccatgctccaaatgcctcccctgttagaatcttcacatctgcatgtctgtttaggttgtccaagttttcaacttaacttatttttaaaacctcttttctttagtttagtgatttttctctttatgaaaaatgactgcttgctgtttgattcctctcttgggatatttactcattctctcctgaacagggctctcatttccttgtcagcacttggtttggctgacatcactgtatgattattaacctgtgagtgagctggaaatatttccgagataatctaaacacacacccacacctacacacacccacacacacacatacacacacacactagcctagtctattcaactgaagtatttggcaaaaataatagattttataagctatatcaaatagatcttaatgtaaattgttaggctggtgcaaacatcatcctgcatatttctagttcaaaggtagagagcatttgtgtcagaaaggagctcctttattat

SEQ ID NO: 65019 - DNA, 645 bp, Homo sapiens
ccttcgccaatgtccctactaccccagagccttagacctgggcaagaggagtcttttgactattaaataactccttggaaaaagacgcggaacccacctcccgcattttcagcggtctcttctattgggatgcctggaagggcttttgaccacccacccttcttcatttttgacacccgagtggggccgaggttgccggatgaggagacctatggcgagcagtagaatgggctgacctggagaagggcatttctggggtgaagggtggagagagcttggagcaggggctcctcgggagcagaaggggccgctgtgctcacagggctagagggagagttcagtgtcccaacgatgcgggggggcccggggccaccttgcgcggccgctcgctgacgcctcagaggccccagcctggctgtgaacttggtctaaggcggactctactggcagctccgggatgttacagcctctgcctctggtccagagcagcggcggtgcggacaacccgtgcgctttcggtttcccttccgcccaaatatcgcctcccagacccccacctctccctgggaaggatttcctttctccctccttgggatcccttgggattcagaaaacagaaaagaaaacgaattagagagatgcatg

SEQ ID NO: 65020 - DNA, 1748 bp, Homo sapiens
ctcacactgccgtatgggtctaggggaggcaggaaactcactacatggccccccatccatttcggtggcagcaggccccaggacgctctctgctggtgtgtgtgaactgagtaatccaggaccctaagagtggggcaccgccgctcctgtctgatactgaacgttgccaacccagctttgatgaaaaacgcccctttctgggagacaactcttacaaaagatcgagctgtctttagaatcactctgtgcctaagatcagcacttccttgtctaagaggacctcaagaaggcaaaggaattctctaattcccagctgtctacccccctctggtggccacttctcagctaagagagaagccccaggcagcaggcaccatgggaggaagtggcctgggaagttgaaacaatttaggtgagccaggagggcggaatccttgaagcgggctggccccaataacaggagttcgttttcgcccctcgcccaaacttccctacctccagcagccagggtttgagtttgtggtccaacaaaatgtcaaagcccaggatctcaaagcaggcgctgttgagtgtgtggttggggaagcaggtgtggtagttatgcctgatgatggggtgggccgagatgagggtcttgatgatgacgtcctcaatatccctccatatctgctccacgttgtagctgtggtcctccaagtatgcactgaaggtggagagcttcctggaagggaaccacaggccaggaggcagtgtagctggcttctggtcacccgaggccatggcatgctggaaaccagaaactcctggcggagacaaggctccagagccagcgaggatgaacgcccaggaaccagggtgacacctgggctgtgtcggtgccagatgaggtcccaggaatcccaggaccacaccctccaagtctccagagccccagggtgggtgcagatgcagtcacataggacatggtcaggacactttcactttcactgtgacccagaaaacatctatcagcaggggaagggatgagtcaagaaaaccccctgacaccatggttttactttggcagcaatgattcctcagcctttggtgttcattagaagcatgtgggcagccttttaagaacactgatgcctgggtcccacctcagccatctgaggggattctagggacactaatgacacagaaaacttgttttagggctgcccacaaggaaaaggcacccaagggcatgtccacagataaggttaccaactgtgccaggcaaactggactgtcccagttttagaattgcaagtcctgaattccaggaaacccctcagtcgtgggcaaacggagacagctggtcacctgatcacagatgaactcagagatgtttacctcatgtggaatagttcatgaggaaatacctgagtgggtactcagccagctctgagctgggcattacagagagaggatggatgtcacaaatccaagaggcagtggtggggacagacatttgccacctcacatgcacacaaatgtgcacagacagccaaagtggaagtggcagtgtggaaggaggaggtgcaggggagtgaacagcagaaagaatgaaaaagacaagagacacggctcatccaggcagtttcaaaagctcactagatcccagcccaaggggtcaagaaggaggaagcagggtcagccagacaatgagcatttgataagggcctttggtgcatgcaaagcctcatgcaaggaggggacactag

SEQ ID NO: 65021 - DNA, 2159 bp, Homo sapiens
caagaggcccagctgatgcccacagcccaggtggggaggagaggaggaagtcgcagagcttcaggcagcacaggtggctgacatcttctggaaaagggggagactgcctcccaccagccttccacatcccctttaagcagccttaacttagcgattttctgtgtgctttttggaatgctgccactgagggggtcatgaactgtcacatgcctctctgatggtctgaagccaaactaattgcctgttcagaggtcctttgaagcctggtgcagcggaaagagaatgagctctggggtctaacagacctcgcttctccacccagtctagcagtcacagctgcgggacctggggcaactcacgcaacctctgagactcagtttcctcatctgtaagatggagatggcacctaactcacagttctccacctacagagggcagatagtaatgcctttgccatagtgttgctgtgaaaaattcaagaataggccgggcgcggtggctcacgcctgtaatcccagcactttgggaggctgaggtgggaagatcacgaggtgaagagatcatgaccatcctggccaatatgctgaaaccctgtctctactaaaaatacaaaacttagcggagtgtggtggcacatgcctatagtctcagctacttgggaggctgaggcaggagaattgctttaacccgggaggcagaggttgcagtgagccaagatcgcaccactgcactccagcctggcgacagagcaagactcagtctcaaaagaaaaaaaaaaaaaagaaaagaaaagaaaaattcagcaataaaaaatgcacagaaagcaccaagcacagaccccaacacacatgaagcctcagaaatacttgctccttttccctttcctccttcacctggtcaagttcacattcttcagtcccccgttttcttaaaactcaaatgagacccgattagacaataacaggaatggaaaagcctctcgtgaagatactctcatgaactgctctcaatttccccccttctgaggaatcttcaagccggctagccacatgtcagggcactgtgacacatcatttgagaatctctaatggagcaacgtccaggggaacatgggccaagcaatgactgcctggcaagtccttctcacgtggcagactagcgatcaataaatatctgttgatttggaaatatcagaagggccaactgtaataagggtatgttttggtgtgtgtatatattctgctggggaaacagctcatgtttatctctcctcctcccagcctcccagggtttacgatggggccttcttttaatgattaacagccaagagggcagagatgaaggaatttgttctgggttgcgaggcaaaggagtatattctcagaccatgtgacccaagatggaaacactgatggggactaacagggtttgggtagaatcccagaaagcagttctgaggttggtagggaaaggaaagaaaaatgaagcctcttccttacctcttactgccagagtgtgcatctcgactgaaatttgaactgtgcttattaatggaataattagtcaggtgcatgcagatatcatcctggggaaaaagacacacatctgtcgggtcagctcggaagggcaggccccctgcttcctctctgtgccctcccatggcccctggggcttgaagggatggaaagaaagggaagttttagggcttatttagtgtggcaaaatacaggaagtaagaaggggtgtcctgcagcctcgagcctaagaaactccaattctgctgggcgtggtggctcatgcctgtaatcccagcactctgggaggctgaggcaggcagatcacgaggtcaggagttcaagaccagcctgaccaacatggtgaaatcccatctctactgaaaatacaaaaattagccggggatgtggtgcacacctgtaatcccagctacttaggaggctaaggtaagagactcgcttgaacccaggaggcagaggttgcaatgagccgagatcatgccactgcactccagcctaggcgacaaagcgagactccatctcaaaaaaaaaaaaaagaaactccagttctttctgagattgggtggtgcccagcctgagaaaaacttcaggagtcctgggggtccaggaaaggtggggatggca

SEQ ID NO: 65022 - DNA, 739 bp, Homo sapiens
cccagagagatcagtgtgtccccctctgtccacactcctagagggctccctccccacagtgggctgtgacctatgacctcaagtcaaagagaaaagctgattgctctccagcatcatgcccctttcccacatgagggcttccccaaaccaaaggtgctctcctagccctaatgtgttacaggaaaagggccagcctggcagggccagaccaattgacaagggtaaaaggataacagacactctggcccgggcacgtgtcagcaccccggtcagaacgtttggtctgacaaagtgcaaggcagaagccaggtcagctccacctccaccttcaccctccatcccctcatttcacattctgtccagtggagctaaagtccgcggttgctgtgggtgataaataaataatcacaatgaggaagtacctttgaaatatacagctgacagatcatatcctcccctggtttgatttctttcactgtccgggtgatgaatatacctttcccttggcagcccgaatccggcttacaaatgtatgtcttattttttcttgacctgctgtaggtctgcaaatctccccagctaccagagcagggagggaacaagatacatctttagctggggagcaatgaaaaggaaggctagccctttatgaagaaaagaaagaaaagctgtctaatgtgacaaatccctggcactgacagatgcccagaggtccagcaatgggagagagtagagcaca

SEQ ID NO: 65023 - DNA, 375 bp, Homo sapiens
ttgccttgctgctgggcattctgaagtccgttttgtgcccctgggttctctctcacaaaagccagcgcgacggtttcttttggatcttctttggaactgtcccccttctcttcggagttttccccttcctggctttccaaagtcgggcactgtggcatctccctggcctgggaggaggctctggggaaataccaggcccctagagagagggcagagggagccgcagttacagagatccacctgcagggggaccccctccctcgctcatgtgggtagagacccagggttctaattcaacgcaacaggttgcagtttataaaatgccacccggcctccgcggtttgatgcaagctcagggagggagctgattccacc

SEQ ID NO: 65024 - DNA, 1080 bp, Homo sapiens
tggcgtggtggcgggcgccgtatgggcaccgtggttgtcccagctactcaggaggctgaagtgggaggatcacctgagcccgggaggtcggggctgcagtaagccgtgttcgcaccatggcactctagcctggacgacagaaaaagaaaaaagaaataaaggtataaaagaaaaaaaagaaaagtaaacagcttcttccaggggatgaagtaggtttatttcggtgagattgctgctcaggacttaggagagccatcaaaggcagaagaccgctcctggggcccggtcacctgaacactacaagtcccagcaagcgccgcgcgggggcggggcttgctgaccgttgtgacgtgtgggcggggcaggcgggacgggctctcccttgggtgcttagccccgcccccgtcccactctgccctgttgctgtcgcgccgctgctggttgctgtccctggtgagtgcctcaagtggaaaggggcagttaggccctcggggtgcccacattcagacttgcagtcctgagaaggggccacgggggtagaggtgtggcaagtttcggttctcaccgcagttcaccctctggggtgatagtgggagtggtgttctgaaggccctggagcccctcccgcggcccgggagggttgcggggcagttttgtcttgcggagggcagcgctgcagtgctgtgtggcagggtgggaggctcctcgggaagaagtgacacccctggcggcggcgagggtcttgaggcggcggctgccgccccacgggtcgtggcgtcccgtcccctcccgcgggcccaggctgtggtggttccgtaatccctcgcctggatgtcatcgccgttggcttcgaggcggaggtggagccttgttgcgtcaccctgagcaagttactttctttttgggcctcagtgtccccctttacgagtaggtttgatccctgaagcgccttgccttttgcatgctgcagctgtcggagaagacgttctaggcaggaggaaagacggtgtcgtgacctgcctctacagttaatccattgcccctccaccactgacccagcttagtttgggagctaatgtt

SEQ ID NO: 65025 - DNA, 1345 bp, Homo sapiens
cccagtacatctagttgtttctatatataggtgagcttgtgagtttttttgggttttgagatggtatctcactctatctcacccaggcaggagtggtgtgatcatggctcactgcagcctcgacctcctgggctcaagcagtcctcctccctcagcctcctgagtaactgggactgcaggcacatgccatgacacctggctaatttttttttaaaaatttttgtagagacagggtcttgctatgtggcccaagctgggcttgaactggcctcaagtgatcctcctgccttggcttcccatagtgctggaattataagtgtgagccaccatgcctggcctaggtgagtgttcttttttttttttttaacacaaacagaactaggtgagccttcaaggaaagaaaaaagactgtgtgcatgtgtgcgtgcatgcccgtgaatgcctgccttgatttccaacacacgcgtcctcctttaaatcctccctgagctggagactgacttgtgggccctgggagagtgtgtgggagtgtggagagtgacctttggacctgggtactttccggcccctcctcccatggaagttgctgcactgatttggcctgtgcaaacaccaggcacttttcgctgggtcaatatttcacatccgttgtcagggtctaatccatcttcaacatctgttccctgggatgttgtgcactgctctgccacctatgacccctcatggtctttgtccccagaagaggatctctacaaggtccccagggctttctccagcttgaggctgctcggttcttctctttttttcctctttaaaccctctcacctttgcctgagccaataatctccctcaaattacagggagaagccccttctgtctggaagccttccctggctccagaacacagggacgtggtagctgctgttgtgtagaattcagcaaacctcacctgccagtgggtccagaacacgttctgacccagtgtcctgcttgccaccttgtacttcctgactgctgcttcctgctgtgagcctgctggagccctggggacacacatttacttgaataacatctcaaaatagactgggaagacaaaatgtactacaaggggccaggcaccgtggctcatgcctgtaatcctagcactttgaggggctgaagcaggcggattgcctgaactcaggagttcaagaccagcctgggcaacagggtgaaaccccatctctactaaaatacaaaaaattagctgggcgaggtggtgggtgcctgtagtcccagctactcaggtggctgaggcaggagaattgcttgaaccaggaggtggagtttgcagtgagccaagatc

SEQ ID NO: 65026 - DNA, 2404 bp, Homo sapiens
acatctttttaaaagaatctgcatttctgattcttcaaaataaattcctagaagtgatattactggatgaaaagtggatggagagcttaaaggctcttagttactcaagaattactgggtcaaagaggatggcccattcacagcctttgaataaaaataaatattgccaaactgctttcaaggaaggttttctaattcatcctctcaccagcaatataggagagcgtgtggctcacattaataaaaagaactctgctgttttgagcagtactaagcggagcgtttaaacttatatttctttgattaggaaggctgacattcgttcctgcaattcatatttcttccttactgaattgcctgttcctatcctttgctcgtttttctatagggatattatttcattctttcagtgttgtttttacaaaataaacaatttttttgtttgttttttcccccgagacggaatcctgctcagttgcccaggctggagtgcagtggcgcgatctcggctccctgcaacctcggcctcccgggttcaagcgattctcctgcctcagcctcccaagtagctgggattacaggcacgcgccaccaccatgcccggctaatttttgtattcttagtagagacggggtttcaccatgctggtcaggctgatctcgaactcctgacctcaggtgatccgcccgcctcggcctcccaaagtgctgggattacaggcgtgagccactgcacccggcccaacaaatgttttagaaagccatctggatgatagtccatgactgctgaacaccggctgaggtccacaaaactgcgctcaccgcttggggactttccagccggcctttactctccatggaaagcggtctttccacaaacctccacggtgggaattactgcaaaggcatcggctctcccggcctagaatatctcgcgggatctcagctgtccttgggccccccccctcagcgcaactaccaatcccaacatgcaacgcgccccgtggcccaagcgcccgaatgaaggctcggggccaaagtcatgtgtctgactgcgtcacacgtcccgtcatctctcccacgcctttttcttcagcgtacaccttggtcgccatcttgtgcgcgaggttatggaacctctgagtcccgccaactctatggtcgagcgtttcagggatcggccaatcgtaatccagatctcgtaggaaagccccgcctctatccgcatggaggcgggaattgccacgaagctcctgtggagggagaggaagcagctgcggaaagccaataagagtggggaatcgatgacgtcaaccaatggggacgcggggatattacggccaatgagaatggagaaggtccaggacacgtgggtgggggaagctgagcgctgagaccaagggctaaagctgggaggtgagtctgtcaccttgagccgggcgagcgctgtgggccaagcaggggttgcagggtagtaggagtgcaggtgacttggggccgggagccagcaataggcagggttgtgggctgggcagtgtggaggggtatttccccccagtgctgggagaggctatggcaatctagatatggccttatcaatgaatgttaattaccaacggtaatgaacgattgactgcctcggctggggcgggtcggggactgctgtgtaagatgggcaggatcctgcgcgacacctgcccagtatccgcctccagtcttcccgagagaccattccctttcgcaacatttccttcctggggcttgggcacatttccttgacttccgatctccatgactttgctttgaagacccactgctctgtccctctgacctctaatgccctcctcagctggggcacggtgcaaggaagagcgtggtctagggaggacggacgggggtgaaggggacgaccaaaggtcgtcattataagcaaacaaccagggtctcagtgggattattattactattttttccccctctgcagactgaaaaaatgcagaccgccggggcattattcatttctccagctctggtaaggtgccgcgccgcagtgctctgtagtaccaggtgtatggtgtggacgccatcagtgtttaatgaatgaacccaggggagcttggcgtcctgatgatgtaggctctttgaggtggctgtaggatgtgatgaaggtaacccctgtttatctgggcctgtgaaccaagctatcttggctttggaatgtggtcagagagtctggatttgatttttatccccagtctgtcctggccatagagacagcccactaaaacagtggttttcaacagtggctgcacgttagaatcatccagggaactttttaaaatcctgatgcctaggctgcaccttagaccatttgcatcagactttgggaatgggggtggaaccca

SEQ ID NO: 65027 - DNA, 303 bp, Homo sapiens
agcaaatgaagaggctcagagaggtgaggcattctgcctaaattctactaaaccacagctggttagtaaagctgggattcaaactccagaacctgtgttcttagctttgtgctgactcatctgaggtttgcacaagtgtggtgacttgcccaaggtcatagagcatgccaatgattcgaatcccagtctgacatttatacaatcatggcgtttctaccccaggatttcttgaccttggcatatctggggccaggtaattcattgttgtggaggggactccctcgtgtagtgtatgtttagcgg

SEQ ID NO: 65028 - DNA, 2583 bp, Homo sapiens
gtgctgggattacaggcgtgagccaccgagcctggcagattatttttcactttaaacattttaggaaagacccaaagaatcctcagggtttacactcacagtacctcgattcctgtatattccaagatttgtgggaagaaaaagtactaagcttggagtcaggaggcctgatgtttcttcctttcaccaagcttctctagttctgtttcattatccccatggcaacaactagcaacagtgactggcatttagtaggcccttcataaatatatgttgaataaactctaaaagaggtagcttttcattccaagttgagttctctcttggtcctgttgcaggcaagggcaatggtaccctgccctaggtgcacaagtgtgcaggagggatcaatcgcagagcctttccgagagaaggggcccaaagcgagtcaacttctctactgagcttcccatgaggatgctggatccccaatcctaaccatgcagacgtctgagggtcgccgccattaacgggaatgatatggcccttcctcccccactccctcctctcttctcccctttcaacacttgaattgggctctccgctacttccgcacagcgcaggacccacacgagcccagaaccatcacggcctgctagttcccacccctcccgtcctggaggaccgtaggtggacgctcttgcagagcgcctctcgctggttggggcgggggtgggcggagccagcaccgtctgggctgtggaagcggagggggtggggacactctggcccggttctcggtggtgcgggagcgggcgggagcagcggccgctctggtcggcggacgtgctgccgagtagtcccggaagcgaagcagcgatggcggagagtccgactgaggaggcggcaacggcgggcgccggggcggcgggccccggggcgagcagcgttgctggtgttgttggcgttagcggcagcggcggcgggttcgggccgcctttcctgccggatgtgtgggcggcggcggcggcagcgggcggggccgggggcccggggagcggcctggctccgctgcccgggctcccgccctcagccgctgcccacggggccgcgctgcttagccactgggaccccacgctcagctccgactgggacggcgagcgcaccgcgccgcagtgtctactccggatcaagcggtgagccggggtttttcctcccccagccccgagctccggggctcgaccttccccgccccccaccctctcccactacaactcaccccccacccactgcgctgccctcgcggcggcccacctccacggcccaaatcttgccagctccgggcgtcgggatccaactcccttctccccccaccctcagacccgcaagcaccaacccccgcctcgtgtgcccagatccgaccccgcccctcgacaacctcccgtgagccctccgtctccattccggccaccctcccccacacctcccacctccgggtggaaacccgaccctttagcgcttcagtaacgccccctcccgccttcggcgccgcccctatttccccttccccaccccaaccttgctagatgctgcccgcaggccccacccatcggtcccctctcttctcctctggagccccgttcctaacacagacgaactcagcttcctttgccatgcctctgactcgagccaacctttctttttatcctccgtttttctcagattccctccacacagtcttttcccaggtctagatcgcttccctcgccccaatctttccttgaaccccttttccagtgtcccaaagctgtccactcttacgcctcttccagaaacacaggctacctccccccaattccccagtgccactctggattgtaatatcccactcaggagcttctttcttgtaatttccctccccccaccccccaccctccccgggtcgtctgttttacttctatgaagcaaatatactcatcaaatataggaacaaaggcctaagtcctttctgtgcttatttcttgggtgactgatcttagatcctatcatttagtagatgatgttttccagaagcacatagaatagtacctatcgcataagaaaagggcagtgctctttagctattaatcctgaaacctgtttgacttctccccatgcccccatcacaagcatcttcgtttagttcttattccccatgttccacgtcctttcagatgtctctgtgtctacttttcaaggttgtaataaaaattaatataatgtgtgtaaagtacctggcacagtgcctgacacaggaggtcaactgtggagggattgccacctctaactgaaactcagcactcaactcttttcctcctccagccatttcagtcatccaattctgacatacctttgagtttggccaatgctttcctctgctttgtcgcctatttgccctttttatgtccctacccaccctagcaagtccctaggcttttcgccacctagaatgttctttagccccttgctctcaactgatccattccagttggtgagatatgagtcagaaatcttatctcctatggaagtccacatgtcatcttccagatgggagattcttagcaa

SEQ ID NO: 65029 - DNA, 1446 bp, Homo sapiens
caggagttcgagaccagcctagcctggcgaaaccccgtctctactaaaaatacaaaaattagccaggcatggtggcgcatgcctctagtcccagctactcgggaggctgaggcacaagaattgcttgaacctgggaggcagaggttgcagtgagccaagatcacgccactgcactccagcctgggtgacagagggagactttgtctcaaaaaagaaagaaaagaaaattcttaggtgttcctagttgactgtattagctttatcagccatgttttttttttcctctttacctagaaaacaatgttgggctgacttactgacaaaagaaatttaacgagagttgactctgttgtaaagcttcagagagcagtaggtctagagttcctgggggagcaaagctgaaaagatagaggcacttaagagcagtccccagtgaagttactattaggcattactgacttgggctttcctcaagtacagcagggaaacagaagcaggcagtcaacttgaacaagccagtcctggcttaggttgtgttcggcttccagctccggtgccatctcttcaattaattgagctaaaaataaatgtcattaacatccaagctgtcccctccccctaatacttggttgggtttatgaaagagaggagcaattttggtatttgacgttttccatatattattttcagaccttccactgtctggaagcaccccttattctcttcctgttctttggaagagttgtgtagtcttaagagaatttgacactccttgggggtttgatacagaactggatccccaatagccccaccacatggcctctaaccagatggcttcagtcacctgtgtccctttatgctcaacttccctctcccctcactaactccatcaccacccataaacaagctctttgagatccacggagattaacatttagacaactttggagctaattgcttacctaatttcttttgttttgattgtcgtaactgtttctagtacaaagaaaatcccttcaaagttacatagcttgctattacctgttcttttgccccccccccttgatttgaggattaggcaattgactgatttctggtgaaatcagaacatgagcatgagacagaggctgggaaattccagagtattaatagtgaaagagaaacttatggtgagtcacttatggtggtgttgccgggccccagggtacttgttccctattctttctctgcctcaccctccattccttctgatgtgtttacagtacatggactggacctgcctggagcccagcccagagcatctcctcagtgctcatctctatccagtccctgatgactgagaacccctatcacaatgagcccggctttgaacaggtaaggccagatgggcctggctctggggtgtagactattgtttttgtttgtttggttggttggtttttttgt

SEQ ID NO: 65030 - DNA, 1586 bp, Homo sapiens
tgtcagacaaagagaccagcataagttaagagagtgggcgctggaggccaggcgcggtggctcacgcctgtaatcccagaactttgggacgccgaggcgggcggatcacgaggtcaggagatcgagccatcctggctaacacagtgaaaccccgtctctactaaaaatacaaaaaaatagccggacgtggtggtgggcgcctgtagtcccagctactcaggaggctgaggcaggagaacggcgtgaaccctggaggtggaggttgcagtgagccgagatcgcgccactgcactccaacctgggcgacagagcaagactctgtctcaaaaaacaaaacaaaacaaaaaaacacagagtgggcgctgggttcccccatttgtgctgccacagctttgggatgaaaagaggaggatctctgtaaattgttttcttagggagaaggatagggtgaaggagtagaatcgacgactgtagatttgtgagtagaatcccatttgtagttaaacttgggtaaatgggagaaagggctgggcatctgggaacgctgccaatccaccggaagctggagaaattctgtgtcccggggccgagaagccagtctcagattctgttgggaggtgattaacgggtaggacactgctccgggacaattcagtctcgcacgggtcaggggcaggttgtgggtcggccttcttcctgctcacctctgcaagtttcttcttggcgatggcgccagctcccaccccgcggcggtgcatccccaccctgggcccgcgggccgcccggctgccgggaccccgggtctccacgtcccggactccgccgccggctccccaaggcggaagcccgagccgcgcgtcatctgcacgcgccggaagccacgagccgcatttcctgccgcgaggctgagtgtctccagttcctaccggcccggcgaccccgcctttagctagtggccaagattcgcaaagcctcgcggcgaggaaagcacgagtattcaagcgcggctgaggccctccttggctagtgctgggacatggagccccggcagccaaggccaaccttgtgcattccacccacgtaggcgcctggggccctggtcttcctcgactgcctctccactgcctggaggtcatcaaatgcccctggaccacctcctacgtgccacacgctgtgttggccatccaaggttccatattgagcataaaacagccctctgccctaaaggagttaacctgttggaatcacatacaaaggattctgactaccaagcgccttgaagttaagttgaactctgaagacagattgcctggctacaaagctcagttccactacatatggtccaggaacttaagacaaattattttaatgtctttatgtttcactatccgctgtagtgaaatagaataatacctactcatggcctgacgcggtggctcaagcctgtaatcccagcacttcgggaggctgaggcgggcggatcacctgaagttaggagttcgagaccagcctggtcaacaagacgaaaccccgtctctactacaaatacaaaaaaattagcagggcgtggtggtgcgcatctaatc

SEQ ID NO: 65031 - DNA, 629 bp, Homo sapiens
gactccatcccccgccaaaaaaaagaaagagtgtgttgggttgggttggggggtttctgaggtgttacaggagttaggtaatcaggggagtgagattcagagaaggggtgatgggcagtgccatcgcaagagaaccctgggtcccatttcccagcccttcctgggttctgactgggccctcaggaatgagaactgtaacagcagaagagcatctggggtttgcttgctcttccagtccccactggtgactcaccgccacccccaccaccatccccatccccctcgctggcgcagacattctggcccagctctgcagccaggtcagggtgactcagagggctggctgctgcctccccgccgtggaccctgcttttgaagttcacttagtcttcaaactcacagctgactgagaaagccgacttccctctctggcttctctcacaccagtcaacagatttcttcttaggcagaggaggaaacaagaggtgacttgatgcccaacaactttgccaagtcctccggtctatcctgatgcttagagggactatctccagcttttccccacagtcacatcacacacacagtcatgctcccaaacatttttgccgacagcatttcccttaggtcct

SEQ ID NO: 65032 - DNA, 663 bp, Homo sapiens
atctttccctgaggttcctggcatgcttccccgaagcttcttcccagccccagccctagcccctggctgagccgcgtagaaaagtctggcacaacaagaagagcactgctggaatcctgatgtttcaaactcctttcctaagtgtggaagttccaggctaggaattccaacaatttcagaactggtggtgtttgcttcaaaaggagaaatgttgctggaatcccagaagccaccttcctatccctgggtcattccttgtctctgaggaagatctcactccttgtttactctagaaatgagtgttagtgggaaagtctgcaacaatgttagtgagatcaaggccactcagctcttgtactctgtgactcaagccatttatcttatcttgctctttccatgtgttgtgtaatgccaagcaaagccttggagaggggcaggttcattcaggtgcatttaggcctatagagaaaggaataatgtgctcaggatacagaatttgaagacattatggtggaattacataaggatgtgaaggagtgaatgaaatagcattaaaagaacctttggagtcttaaaaatgttagcaaatgagtatatataactatttagtatttactcctttgccaaacactgttctaaatgctttacttgtattaactctca

SEQ ID NO: 65033 - DNA, 2243 bp, Homo sapiens
cctaaattcttgcacaatatttattgtgtagatattgttattaccaattttcacttggacgtttattttctgttttttactattataaaccacacagctgagaacatcctggaacatacgtcttggcacttgccttggtgtttccgtaggttaaagtctcaaagatgaaactgctgagtcaaatggcgtgtaaaaatttaatgtagccagattgacctgcagaaacttccgtttacatacacgctcactaaaatgggggagagagcccagaggggagtgtcttttccactgatctgatttaatcctaaagttaaggataatcgcccagcaaggaagggtatctgagtgttatctcagcagtcccacctggtggtttttaattaggcacacacgcatgtggaggcgaaactttagaacggttttctcgtgagctccagccacgtgaaacagtaggactcgcaccgacgcagtcaggctgggggcgcaatttcaaagtctccgttacgcgcgtccctggggcgcctggggtttgaaccgttgttccccacatgctagtccgcttcccttcccgcttggccaaaataccttttctaaggcactccccacgtaaataaataaataaacaacccaggctccgtgcgccgcgcctcctgccctggagctggggttggagcaggctttccctggacccagtccggccccacatcgccaaccccgccagcctgctgcctttccgacctcccagcccccggaggagcgcaggaagacatgatatccccgggaccagaaacgccgggaacacgaaggacgcagaagccctcgccacgccgcccgtggggccccggtccagggcccagtccctcaaacacggacaccgctgccgctctggaaaggccgcccagagccctcctagcttgaggagactcgcggccgccttaagaagccagcaggtcccatggtgtaatggttagcactctggactttgaatccagcgatccgagttcaaatctcggtgggacctcacgagactttttggtcctacaattcctgttttggagaccgcttccggcagcagccacctcgggctgtgtgggtagcctcactgacctggcctacagcggcttggggtccctccccctctctcaagatgttttcatttcagggccgttctgggggtgtcagtgcgcacgcgcgagagtcgggcagaaaaataaatgtgttgatgggagagcgaacgcgacttcaccctggagggcagcttccgaaagaacccgaaggatcaggaggatgctgcttcgggcggggcatagctaggtcggccggtctaggaggtcccaggttgccgagggtgccgtcatgcttcttattggctactgagcaagcgcgatacgttactgctgcctgagccgccaatgaagtggcgcgacagaaccaaggggcggggaaacggcgcctgcgggactccaattggtcacgaacaataacgaggctgcgctccccagaggggtgtgtttttggggtctggaacgcaccctagtgtgtttgtcttggttgtccggtgctcagtgaggttgtctgtgtctgtcagtcagaaaacaggcccttaggctgtatgcggtggctcacgcctgtaatcccagcactttgggaggccgaggcgggcggatcacctgaagtcaggagttcgagaccagcctggccaacatggtgaaccctcgtctcaactaagaatacaagaattagccgggcgtggtgacgcgcccctgtaatctcagctactggggaggctgaggcaggagaatggcttgaacccgggaagtggaggttgcagtgagccgagatcgtgcctgtgtactccagcctgggagacagagaaagacgtcatctcaaaaaaaaaaaaaaacaaaaaaacaaaaaaacaaaaaacaaacaaaaaaacagtccctagatgctgtagttggtgaaagagagaagagattaaaagaaagaaagaaagaaagaaaacagtcccttagatgctgtagctggtgaaagaggaaaggagagggagagagacagagagagaagaggggagaaagagagagagagagagggtgaggggggggaggggaagagaagagaaagaaagaagaaaaagaaaaacagtcccttggctaagggaccggttcttcagcccgccagggcgtcttaagcgagtcttcagacggattgagcgcgtctctctgggcgaatctgtccaggat

SEQ ID NO: 65034 - DNA, 3103 bp, Homo sapiens
ctcctaaagagccggtactgtgcttaaaattactacccattccaacactatcacaagctggaataaatatctcctgattgcaatacgaccgaaaggcaaaagctgggtgcagagtaatttaaacaaaaatagctgatatttatcacctgcttattgatagaatggtgcaaagttcatcctcagttccagattctatatatggaggctgaattccctaaccacaattaaaatccttccattaaaacaaaatttcaaaatgaatgattttgatggcaccatccccattaagacatgaaatcacagttaacaaagttgaaaaaaaaatcctttttatggagcaggtacaccgctatgagaatgatatagccttcttttaagagatcagatcaacttcagccaacgcataaagattcaggataggcattataaaacagaccttggactttgctgttgaaatttgctacatttagaatctggtgccaggaacatacattaccaattggtcaagtctaaacaaattattttgactctagttttaactttttctgaaagactctcacatacatttcctttttacaggaaaacgaggaaatgataatttacaaatacctaacttatcctaatcaaagaacaaaacacaaggttacatgcataagctactttgttgtttattgctcagggccagacaatgtactctaatcctttttaaaaaaaaactaaccaactaaacaaaacacacaacgcaagttcctttcacttttgcataacagagatcttaacctgaagtcccaggaccagcttcaagttgactttagtggcatacaaaattatgtgtctatttaatggagaagacggttctaaagacttccatgaacccaaacaaagattactaaccactgaagtcagttccaggatcactaaaacttagtgaacagtttaaacaaaattatactaaaggtattacctatctgaatactgtgcacggtcctgatataaacaaccaagctgcctgccaccactgacaatcacagtgtcaagccccactcacaaaacagccccactcgacgacatcacctgtattcagctcagacaccacacatcccagcaacagcagctcctcaatccctaagcacacacatgttgtcaacaaagcatgtgctagttgccattcccagaacaatacgggcctggccatcctctggaaaaaaaaaatacacattctttcctgaatactaccctacgaatacattatgccttgatcatagatcccaaacactacaacaaaataggagaaacttgcacacaccatatctaatcaactgggaaaaaagcatcactcaggtgttcctgagggtccacgggagatgcatgtaagggatacactatgataatgatgcttgaacacgggaacaatctgggggcaaaggcagactcacgcaggaacaccccgaaaacgtggatgtggaaagcacccttctccaaaggcacaagcacattcctttgattggcaaaagccatttctgacaatggatccgcggtgacaggggctgctcggcaatcaggaagtgagtgagtgtatgagtgtgtctgtgttgtgggggagggatgctctagttgtgatcaaagctggaccttttcagagaaggtctcgaatcctgaagacagacttcgaggtgaggcaggggcatttatcatttctattggagacatccctcgacaatgaacatgttacgtggagatgtaacgggggtgtcactacctttggtgtctcggatctaagaatcttcagcagagcctgattggaggggaggaggaggtgggggtggagaaaggtctgcattacccactggggtgagtgtggggctgccggtggcgggtgtacatcagacgcattttatctactggcggcacaatactcccgggggttggaggtttgggtgcaaccgcaaggcgggggaggtagtgggtgcaagccaccagctgcagggcaggagaacgctcgcaggaggaccggtgcaaacctcctctcggcccgctaacccgtgccgccccagcctcccctcaggcctcagggcgagcggacccgctgcaaaactgcagccaagcccgggtccaggaggaagggggcgaaagagcaggagcggggcgcccccagcccaagctgggtgcctgaggagctcagcgcccggggcctcccagccggatgggggctgctccggcctagcgcacgcagctgcctcggcgaagggttacgccggcccccggagcccgggccggccccgcgggcggcggagaggaagggctgccgggggcgccgccgcggcggtggcgagtgcgtgggggaaggggcccttactcacccgggccggccgcctccgcctccgccgccccggccgccgcctcggcggtccatccctgcggcgggggcctgcagccgcggcgctcgagtcacaaccgccggctgggccagcccctccccccctgcccaacgtctgtcctcagggccgctcctcagacccggcctcggccgctgccgctgccgccgcagcgctacgtggccgccgctccgacgtctcgcgactcccttcccagcgcgcgagggcgagcggggccggcggggcgggcagcgcggggcgggcggcaggggagggggtgtgcgtgtgtggatgtgtgtgccggagggggcagggagggaggcgagcggcggcgaggacgcgcgcgcccgcgcgcgcccgcggccccttccctcgctggcccccccgcccaacggggatcccgacacctccctccgcccgccccctcagcatcccggccgctgggagcggcggcgcgcatgcgcagccctcgggccggcccgggcgcaccttttctgtctcctgccacattgtgagcgctccgccgcccagataaccgccggctccccgcgccgcccccgccttctcccactccgcccactgccgggagcccaggtaaagacgagagctgcgcatgcgcggcgctctccgtgagtcggggggcgtggttgccgaaaggaagccaaagtgaagagtgcagggggttgtagcaggcgctgctgtgggattccacaaaataggcgcgggtt

SEQ ID NO: 65035 - DNA, 1288 bp, Homo sapiens
accctatgaagcatattactacagaggaaacagaggcacacagagaggttacatgagaagccgagattgcagttattaagtggtagaaccagaattagaacccagaggtctaatgctagcagacacagcttacctcctcaccatactgcttgtcaacatcgtgtattaagaacgacatgcttcttatggaagcaggagctggatgacatcctggggccaagataactgaagaacccatttgggagaaaggctctaactagctgcacagggacagtgagctctggaataactgggagggtggggctgaggcggggtgggcataagcacagttgacctaactagaaatcacgccagcatgtaactttctaacgctccgccccaccgtcgttgcccgctccagtctcaaatcctccctccctacttcccagacctcaactcctgagactaccctgatctcgtccagtgcatttaaatcttccttctctgaggctgggacacccggccctttacatttgtaatagcttctggattattcctcaccctgcctccatggacacctcccttactctgagcaacccctggctcgtcccgggctcagccccttctcccctccctcacaagtcggactcacgcacgcactctcctcgcccaaagtgcacatcatggagcagaggaggactgcagagatgcccagaaacgagcctttgccgccccctccattctcacctgcttccactctgacctccacatgaattccccaaccacacatactgcgcatgagctcctctgccccgcccgctttccaagatccacgcttcctattggtgtggaagagcgctgtgagttctgggaagggtggcttagaacctcaccctggttctgcggctcttagcagatgaactacaactcccaaaaggctatgcagcggcgggcccgcggagaaaagcgttttctctttggtgatcaacgcgaggatgttgccgcaaagccttttgggggctgtagttttctggggctaaatgcacgtgcctatcctgtacagaggctaagactgccgcaaggagagccttagggctccgggaaagaggaggtgggcgtccagctggtggcaaaaattagtaggggcaagttcatggctgatgaagaggacaggtggaactctggaggaagtcgtggtgaaatcaccggcaggctgagaccctttgggggaaacgaagggccgtcttccttccaaagccctgtctgcaaacgtcctcagagttgtgagacgttgattaccagacccaga

SEQ ID NO: 65036 - DNA, 1587 bp, Homo sapiens
tgcctgaagttggagtgagtgtggctcccctctatttagcatgacaagccccaggcaggctgtgcgctgacaaccaccgctccccagcccagggttcccccagccctgtggaagggactaggagcactgtagtaaatggcaattctttgacctcaacctgtgatgaggggaggaaactcacctgctggcccctcacctgggcacctggggagtgggacagagtctgggtgtatttattttcctccccagcaggtggggagggggtttgggggcttgcaagtatgttttagcatgtgtttggttctggggcccctttttactccccttgagctgagatggaacccttttggcccccgagctgggggccatgagctccagacccccagcaaccctcctatcacctcccctccttgcctcctgtgtaatcatttcttgggccctcctgaaacttacacacaaaacgttaagtgatgaacattaaatagcaaagaaagaaaaatagtacaaagagattttctggaaatacacatggtttgaattgtttgggattgggtgtgtggcagggacccaggtataatttccaattcggtcaattcctgccctcttttcccccacaccaaaaggggaagttttaacagaaatccagtaagttcccatgtatcactatggggtgaggtggggaaggagaaggggccctttgctcccagatcttggagagggaaagtgaaaatggccacgcaggaagctagccagctgtgaacttgaccagatgtcagaagtgaaactgaccacaggcaagtcagaggctcgccaggagggccaggtcacaaccccacagctcccagccacccacgtggcctgggagacacacacacacacatacacaccacagagagagagagagagaatctggctccagatggcctagcaggaggcattcggcaggcctggcctggagttaggcaggcaggcccctcccttgtagctctcgtgggcaggtcctaacccaggctcctgacagcctggcttcgagccccgcctggcccaggcctgggagctcccagggctgtagggctcctggccctgggcctgtgcctgtctctgaggctcagcctcagcccctgctggttgtttggccaagtcctccggggagactggcttgtggtcactgaggaagacaaagggaggcttgctcttccagtaaaaacagcaaacaagcctgcctgacctccagatccagggagaagggccagccaggcccagccagagtcagacaagggtggaggggaggttctctgtcttccattcccctcctacgcccccagactgtgaggggtgtaaggaagatggaagatgttgcgggagggattcagagtaggtaagagaaataatcctggtacttggaaaatcagtgtgatgggaaagacaatctctgtcttgagcgaggctcccatctaatgaaggagacagtcccagaattgaggatattctaacctgatgaaggaggcacacctcctatcctaagggtgcccccatgctgatggggaaatatactctttgacctaagagtggctctccactctgccc

SEQ ID NO: 65037 - DNA, 447 bp, Homo sapiens
ttgaggctgacacccagaaggactttcgagaaggagggtgtgagccgctggatgggccccgtgtggtttctttacagggctccatctggctggccaggaggggtctggggccaaggcagtctaggagtacacatttgccctttgtagctgggccacagagttttgtcctgggctgctctgggctgggttcccttcctggcatgcatggagtttgacctttggcctttggttaggcctagggcaaggctgtttgtctgtccactcaccccagatcattaggactgtgtagaacccagggctgggctctgagaggagctggcagtctgtctggaggtcagaggcagacacgcccctgccttcaggacagtagggacagtcgccactgtcagggagctcaaatcctatgggggatacctggctcctgccatcaggggccccacccagtca

SEQ ID NO: 65038 - DNA, 1205 bp, Homo sapiens
tgaaatcttaagaggctggggcactaaaggaggacaatgatgaccccaaaaggggtggaggaaggaactcgggaagtcttcccttcgaactctctaagatctcttctggcgtccaccgcagctgggccccttgctgggtgcccctccactccccctacctccacctctcgtctgatgtagaatcagaagatcctagattccatccccccagtagaagctcaggtcagcgctgctgtgagaggcccttctacctcgtgggtcctcctgacagtgtctgctgctcctctccgccaccattcactggcgcccagaggtgccccacagagaggagcttctcagtgggggttcctggaaaggagtggaggtcgcggttatccctcccgccaccgccaggcgtcaccaccagcctggaaatgaaaggcacagtcaggccggtctggacgccaggggaactgtcagcctcgggactggctgaagggcctgggcaggactggcagggtggccaaggacgtccggagatggctgccacttggcgctctgaccccaatgtccatcgggagtccagagaggcacacgcccctgaattcaggccgctgtggccgcgacacacgccaagcccgagggccaggtatgcagagagggtccagaccctggacgcccaccctgggccgcttgagtgtaaaggaagcgggaacttctcgccgtacgcgttatatagatctgtttcacaaataaagaacccgaggctcagtttcgtattccaagtggcaccaaccccatgacccgctccagtcgagactatttccagagatgcgatctcctagcacgacagcgacacttggaagtctgtggctgaacgagtaaatgaatgcgaatataacaacagccggcacttactgagcacctactgtgtgccagacgctgttctcagcagtctaaaatgtggatactcttatccccacgaagaaactgaggcacagagaggtgatgtaatttgccagacgacactgtggcaaatccaggatggggacccaggcgatctggttccaaagatcaaggtcaggctggtaacaacgcctctctgtagcaaatgctttatttttttgtttttaaattttttttagagatgaggtctctctcagtcacccaggcaggactgcagtggcgctatcacggctcactgcagcctcgacctcccaggctca

SEQ ID NO: 65039 - DNA, 1026 bp, Homo sapiens
agagacggggggtctccctgtgtcgcccaggctggtctcgaactcctgagctcaagaaatccaccttcctcggccttccaaaatagaatactgggattacaggcgtgagccaccgcgcccggctgccattcggttttatcgttgtttgagtttttgttttgttttgtttttttgagacagcgtctcgctctgtaacccaggatggagtgcaatggcgcgatctcggctcactgcaacctctgcctcccgggttgaagcgattctcctacctcagcctcccgcgtagctgggattacaggcgcgcgctcccacgcccggctaatttttgtatttttagtacagatggggtttcgccatcttggccagactggtcccgaactcctgacctcaggtgatccgcccacctcggcctcccagagtgctgggattacaggcgtgagccaccgcgcccggcccgccattcgttttttaagttgtctttattaagcgccgctgtgcgccagaaaccgggagcggaaagggtctgcgccccagcaggcgagtgagcagagcgcgcggcgggcgcggcggggcctcaccttctcccgggccaagcgcccacaggaggcgccccgagtgcccaccaggtggcgcgctgacgccactcgcctcccacgcgccacacccgcttggtctcttcatcgccccctgcggagctggcgtggaccgcagcgacttgggtccagccgacaggtggccgagggggcagccactgacctggtgccaggtgtccctggctccctgccaggtgccctgcagtctagcggccctgctcaggccctgctttcttcccttgcttctcacctctgaagacactgaagtgtagcgagaaggagccccgcacgaccccttcccgccagtgcttcactggggacagagcactttctaccggctacgtgccgtctcacactcgccacgtcctcaccccaggaggcgggcaggatgatccccctttgcagatgaggaggctaccgcccaagaagggga

SEQ ID NO: 65040 - DNA, 574 bp, Homo sapiens
atcatccatgccttgaaaatgatggcctaggtccactacagagaggaaaaacagaaatgtcattttagagagcagcttttttggttctgagcattgttaccggaatacaaagatatatttagctgcagtttgttttgtagttgagttcaaaaagttgaagttgttcaaaaggtgattatgcaatcacttgtttttccttatttcaccaaaactataaaattcctcatgaataaataccaacctgctaagatagccttgtgagcctggaattcctggccggcaacacacaagcagcagtctgtgaaccgggaattctcccacagtcctcctaactcatctgccagccggcactcaggaacctttaccatgttcatggtattctggccagaaatgttgacagaatcttgcacaacactcacctgtgaaagacaaggaaacacaagccaagcttttgttaccaggaatttttttgccagcagatagacgacttttacctaactgctgtagtacattcagatactaatattaatcatattatcttgaaaccacctccacaaatcaaggctttagcccc

SEQ ID NO: 65041 - DNA, 1668 bp, Homo sapiens
tctttcaaacatgtttttcctccttcttccttgacgtttcccatctccaacctgttgttgtttttttttccttccattatctcactgaccaacagttgctttcaactgctagcaagcctctggcatatttatatttttcacttcttaaaggaaaagatgctcccactccacagcccaaaggtcaaataaaggggaaaaaacacataaaaagtactaaccatattttgctgcctttcctttctgtattatggctaggaataaagctctaattgccaaataagagagcaaaatcaaacttacctgtacattttatcatctttataacatttaaatttatccagggtcctctgtttcacaagtcactttggttaggaattataaggccacttaaaataggccactatagttgagcactatagtctagtggaaaccataacctcaagattcacagtagaggaacaacctaggccaggcgtggtggctcatgcctttaatcccagcactttgggaggccaaggtgggcagatcacttgaggtcaggagttccagaccagcctggccaacatgatgaaacctcgtctctactaaaaatacaaaaattagccctgcatgatggcgcaagcctgtaatcccagctacttgggaggtggaggccacagtgagccgagatcacgccactgcactacagcctgggtgaccgtctcaaaaaaaaaaaaaaagagagagagagagagaagcaacctgtgcatttccacccccatcctcctttaaaaggatttccaaggtcctttccagttaaatgctttaagctatataaccactccctcataagcagtattcaatgtttcacagtcttcaaagtactctgacatttatgatcttatttgggattttcaacagctctgtgaggcacacagagcaagcaagtattttacaaataagggaacagaagctcagagttccaatttgctgtggtcacatggctattaatgggcttgagtttagaacacaaagtcttttaactcctaaaccaacactttgcaattcctttggggtgactcttagatcaggtatggtcttttattcaacatgtagaaatggaaaaaatacctgagaaagatacttatattctctagctttcagttccaatttcattttcaagtggcaactcagtatgaaagtatgttcttttggccgggcaaggtgactcatgcctgtaattccagcactttgggaggccaaggcaggcacatcgcctgagctcagcagttgcagaccatcctggccaacatggtagaaccctgtctctattaaaaaatacaaaaaaaaaattagccaggtgtggtggtgcatgcctgtagtcccagctaatcggaaggctgagcgggaggctgaggctggagaatcgcttcagcccaggaggcagagaggttgcagacagccgagatcacgccactgcactccagcttgggctacagagtgagtgagatgccgtcttaaaaaaaaaaaaaaaaaaaaaaaaaaaaaagttcttttgttctaatgaatttggagcaccattattaatggagacctcagcaaatcattaatgggttcgtgtctacttccatgactggatcctgggaacgaatcctatgttgtaattatttttattttttttaaattttt

SEQ ID NO: 65042 - DNA, 1790 bp, Homo sapiens
tggcagaggtaagcagcagcaaagtatccaaaaaaagggccacatataatcgctaactgaaaacccaggtcctagatcactgaaatactattgtacttcaaagttcgttatttacatttctttttgttatctgccaacgtgaaagaaacatcacattacttaaaacctccactgaataagttattgtccaccaacagtttcagattgctttccgatttgttttcatgttacagagcaccaataaggtacagataaaatgaaaagtgctaaggaagatctttgaccaaaaaaaaggcaaataggtcacacaaagtaagaaggccggtgccctttatctctcttatctagttctgcgaattaagaattttactaaaatgaaatgcctcacttagttccatttatgacccttagtcttctttagcaaggcttccaaaatcccctgccagaataagtgatgggatggagcacccactcctaaatttagggtaagttggtactaaaaggtacaagcacaacgatgggagtataggaatggaaaagtaatcctagaactagaagatacagtgacagtttcaaaagaagggtcagtgtgggacacgctggctctgcgaggcgtttgtagcctgggagtctctagggcaacaccagatgagaatagtgctttgtccgttaagtctttcacataatttaaattctcccctttggacaggagcaacaggctcattatctggcagcaagtctagcccacagcctgggaagaaggcggactcgtgctccaccggctctttatcccgcaggtccctgcaacaccgcgatgcgcatgcgcccccggggcagcgaagaagcagcccgagcgcgttcacactcgcgcatgcgcagtcacccatctcgccgcaggcgacagctcagtatttggcaagggggatggggctgggaaatgatgggggggctgaaggcagggggcgcgtttgtgtcttctgaatgcttgagatagggagaagggacggctgattcggctctggcattcgcaggccacgtaatccgggtgtaggaaatgggactgaggagagtatatgtgtgtggcggggggtggggggacagtgggggtcagtcacctcttcagggaggtgccccccccccactccgacaggacaaccccctccctcgactctcctccccccactcacctgagagcggcggcgacagctgctggtccccgtccccctgcgcttgcctcatactgtccgcaacatccgggacctgcgggaccgccgatacacaaatacacacacactcggagcgcgcacactcacacacacacatacacaccgacacacaccagccggggcgtcatggcgtcagcacgtcgacgcagccagcgcgtaccgccagaccccaccccgcgcggcctcctccccattactcccttctcctcccctcccctccctgggtttccctgctcctcctccctcaagactccgcctatctttcctagtgcgcatgcgtctcggggccaagtcagggcccggggatttgagaggaaggaggggcctgagtaaaaagaggcgggaacttggagggggtcgcgcgcagggcgcgggagcccgctgcgaggtgcgaggaccaaatagaggcgtaacaagccaagggtcggagtgggcaacggaacagttaaaggcatttcacaacagcgatttaggtctgcaagcagtttatggagtaccaacgactcttatatgtattaactcattttttaaaagccagccctgtcagtaaaatattttttggac

SEQ ID NO: 65043 - DNA, 1804 bp, Homo sapiens
ttggggtggtggggtacccaacaaattactatctgggtactcacagatcttggcaaacacagcattgatcacacattgaatgaagaccaaagttaaggcaaaggtgaacgtctcctgcttggctccttccccatactttcctcttgttctagaaatgaaatgcatgagaaaagagggagaaattagtgtatttcactcactgtcatctaatatatcccgagccactgaaaactttaaaattatcttgcctctctggatgtaggcagagtttgttaaggaccactaggctcatttgcaaaaggggctgattttactggatctagaaactagacatcccagcctactgattccaaagcctaagaaaagaatacccgaaaaagacggagaggaaacatgcagaacgagatagtgaaatcaggtaccccaggcaggaggagacggtatttcggctatggcaccaaggccgaggacgaataggttgtttgcaagcatctgggagtaccaaaagggggccgactcgggtcctgtttgaggaatagaagtctcagcctgtaaaacgcaggcccttagaaccaagcggggaaaaacagctaagaaaagaaaataaccaagtccgaagaatccagaaaataatcctggagttctggaattctgggtaggctcagccatagctgcaaaagtagtagggtgctaagagggcgacagccgggcaggaggacaagaggaaagcccgggtccagaggcagaaggcccgggatccctgtcacaggctggggagagactgtcggcccgcccccggggtcgctcacatcttttcctgcaggatcccatagtaaaaatagcagacaaagacacccaggaagcagagcggcaggcgcagccggtcgggcaccagggagctgctagaggccatgagacgcccagaggagccgactggagacccgctcacaaccggcaccggcagcagcggcggcggaggcgacagctccagccggacatcgccgaccggcggcaggggcctcataggagctgcatgcgaccgctgtccagcagggcccagcagtcactaccagaactgccggctcatggctgccaagggggaaactcctcagaacccagcaaccacttcctaggaaagaaaacccgccctgggaccttggctccatccctgagggccaggggaaccggcagcctcgagactgatccctcgccctggagatttttccaatcaggcaactctgaggacaactgcgacccagagcaccacagggtgtcctagagccacctgggcgtagaataatgacgtataaggatgtggaggccaccaattggctgcgctgtgcgaagacggacaggtaggcggggcgggaggaggtgtggtcggcagagcaaatccaatagtcttttccgcggcgggcggccaggcttctgctgggtcctaatgccaaattccttactggagcttcagcgccgtctagctgctgcccagcgtcagcgactttacctgctcattacctaggcacatcactaggcttccaagggggagagcggcacagtaagtctcggcttggtcacttaaaggcggggtaacctacccgtgtcacccaagttctgagccagagttttccaggtctggaaactagggataattagtaatagccaccttgtcgcctcttggctgttgtgaggatcaaataagagtgttttgtaaactgtaaagtatgctgtgcaagcttaaggtattattagtcatcactgtttgtcagccctgatcttatttcctcacatcgaggggtggaaatgg

SEQ ID NO: 65044 - DNA, 1321 bp, Homo sapiens
aggaatatgtcaggtgagcctcagacctccacagtgtaataccagtgttgaagagggtagcttggaccaggcccgggggcttaagcaggaatttgaatggagcccaaaacctagaagcagcaaattcccagaagaccaggaatgaaagatgggtagagtgcatattttggtttggatgcctaggttgatcagcattctccacctcctgactgcggccacaatattgacaggttgctaagagttcctcgagggctggagcccatcccagggaaagaggaaagctgcatggcttggccttgccagacccacggaggctcatcgctgacctctgtcttgctgtggcaagaagcccagacttgttatataaaagatctggcctacagctggagcctgagcaaaaacacacagcctagggcccatgcctctaaactcagccagggaacatctgaggccaaccctgccttcagttgacaaagagaaagctatctgaggagtgggatggtgacttcctagaaggctgaaagcaggaaatgacagaggcagaaataggtgggctacacagaagcctgccatctgacaaacagggatgcaataatgagcttacacactcaaaggaatctcaagtcctgttcctccaggaagccctccttgactacaaacatatttgaactaagcactcctatcaaaagacaaagttatgtgtgctcccaggcctgtgaggaggaagcataatttatcctacttgccttttccaaaggataaagggaatggcagtgcccagggctcccaggaaggaagcctactctctctccttcctggagggtattctcctttcacagtctatttgtagatccaaagagggccatgattttaactgcagcaaattcttgttgattcaaggtggggtattcccatgagaattccccttctttaaactttgccagatatttggctccatctcatcccttggctgtctgtttactggccctcatagaactggaatccagactcatggaggccaaatcttgtcctcatttccttattcttcattccaacatgccaagaacagtactgggcattcaaacattcactaacaacatttgaaaatggatcgcattaacaaaataaataaaggaaagaaactgacatgatgtggtcagaagaggtaccaagcactttcatgtgtcatttggccatcatgccacctacacagaggcagaccacgcactctccacccagtttgcaaaggaagagctgacttgcccaatgtcccccagggtgaagggctgactcggaccctcatgtcctagccaccctgttt

SEQ ID NO: 65045 - DNA, 805 bp, Homo sapiens
gttttagcaactgatactcaagttaaaaacctacaaacgttgacagaatttgatggccccattttgttgccttccctccagtgatttcaaaggccaaaagacaattttttggttattcttcttttgaactgctcatgtcaacactcacatctattagtgttaattcagaactggctttatgcaactcccagagtaatatctctatcaggaagagttgtcaacagatgccaacaccactgggccaaaggtcatagggaacagaagatttatataatcccaaagtattatccagaaaccacttacaaagagaataatgtacttttatagcctgggggctaccataccacctcaagtgatccaactgagcctgactagcagtggacattctggcattatgtatctcctaaagtgacattttatgaagtacatagctttatccatgagatgttcttgtcagaaatgtttaacctgaatctaatcaggccccagatctaacttcccatttacaggaaatacaggggatagaggagcaagttagataccaccatgaggaaacagaaaaatccagtgtgggacaaccagagacaattgacatgttttcaaaatgttagtctcaaaaaacaaatacagcaaaacaaagaaacaggaatgggaagtagttccagattgagagacttttaaaacagacataaccaaaaggggactttggctgggttctgatcaaaaacaaaagagccatcaaaggggaaatttgaaaatggactaaatgacatctctagtccatttttgcctttggcaaagccac

SEQ ID NO: 65046 - DNA, 1040 bp, Homo sapiens
cacacacacacacacacgctcgtacacaaacgatggttggaatgagacagccatattaagcaggtcaagaatctgggaacgtacaacttctgggacacagggagaagaatgcagggagctgggcatttgcaccacggtaaaagccgttaaacttagtccagcgggctgagatgaaatcagttccaggaggtggcataaagggaagcgcacgtgaagtggtggagaatggaactccagcgcagttgagagggatgctggggccaaactcaagctggagaagtaacacacggctgcacggggctctactccatgcccctccccctccccgtgcaatagtccagcgcccaccgactcctgctcccagcgccagccatccgcacggggcgcccccaccacgcgccactcctcctcacgcctcgctcccaccccctgcatcttccactcaccccacacgacacctctgcccacttttcggttacgcccccaaagccagcctccatctgccaggtccctcccctcacctccgggacccgactccccgcacactccgtcccagcggtgctccccacgtttcacggctcctcgctcttgctccctccgccctcatagactctgaacgccccctttctcttccctcgcccccatccactttcccctcacacttctccccgtccccctcccgcggtcacgcgccccccctcccccaatggctccttccacggcacccgctccaggcccggctcacctgcacggccacccccgtcccggcgctggtgcggctgctgcagctggaaggggatcgtggccctgagcggctgcagcccagcccggggggagccggcgggggctgggggagagcagccccgccggagccccccggcccctccgcgccccggcccccaggcacctccgcctctgccgcccgctgcggcccccgccatggctctcccggctgcctgcctcagccccactgcgagactcacacagccccccaacccccgaggccgctgcttatctgctgtacggggcggggaccggcc

SEQ ID NO: 65047 - DNA, 413 bp, Homo sapiens
ctcatcctagagctgtcattggactgcggaaacccagaccttccaccccagccaatccacagcttagccttccctttcctgaggatgattggtcgatgagcctagcgatccaagccaagaccccaccctcacaccgcccccttcggttttccaacatcccaggggctgctgattggcctgtacagaagagggctggttctccagcgccaccaatgagaagacgcagaataggggagcgtcacacccagtcccaggtagtatgcaaatataatgtcacgtgacgtcaggctgagctggagagtgggcgcggcgctgggtgtaggttggagtcaaacactagtgaaataatttttgggggcgggagtagggagcagtgtcaaactttacacagttgagtccctgaatcacagaga

SEQ ID NO: 65048 - DNA, 1666 bp, Homo sapiens
actttccagccttttcttaaggctcttctttcagcctagtatctgtgaccaacttctccttcctaggccctctcattattatttaaatgtccattcttttgggggcttcaacttcactaaaaacattccttcctcttcctccgcctcgtaactctctgctcaagcatctggatgccagaggtcatttgagctaaatggggttcaaagcttttctgactctggtactgcattccccactttcaaatcacatttttcaccccagggcccccagtggtctcaaacccaaacacagtgcggttaggaagtgggcactcgccacagagctaaattgggaattatttgacctgcagcttctggagaatggttttgcctcctccccgcgacatcaactaactcacttgctgttagctaagggcaaggacaatgtctcctctaccagacaggaaacttgatggcggacgctatccgttagttcctttttcaattccccattcccaccccttcgagaccacgatgtttcttaaaatacaaagtttcttttacaaaacatccctccgcaactttgagtttatataataaacggaaacgtcctttaaacaatcaggctacgaaggggttaaatctaatctcagcaacctgatggattctggggggtttccttcctcgactctagaaattaaaacgaaattttgcccaaggtaaagatgagaaccgtttacatcaactgtcaggcttctgccccaaacaagaatggctacccacgcccacaaacagagccactcacgtaactaaaaatggttggctccgggttccaccactggagtcactttctgcccaacttcaaaatggcgcccactagcttcaccaaaaggatcgaacttcccagcaccctctctggcccgtaacgtcaggtgacgcgagacccagccggaagtgaaggaaaaagcgcttcagcccgcggcgcctgcgcagaacgctccagacgctgagaggcaggaggcactagggatcgtccgcaggattgggactgatacagaggccgccacggagcccgccggagccaccgttcctgctgctgccgccgctgcccgaatcggaaccgtcgggccgcagccgccggcaatgccgcgaaggaaggtgagaaacgggagaggagggatggcgggtttctaaggacagtcgattgagcaccgtgacgcagttggccacgcctcacagtgcttgggtcccaactttccgctcccccgaaccttgttcagctaccctctcttctgtccatacccaacagaaaaatgtgggcccgaccctggcctcggcctatgcttgcaactattcccgccctctgcttgcctggatcggaggcgttcttattaattggtcgctgaaacgtctggaagcatattgattggctggtgacgccgcctgtttgggctcaacggtcacctccccgcgtgcgggggcggtgtctggccccggccccagcgctctcccactggctggagagaacgatccctcctctcctgattggtcgaggttggcagtctgtcctgtgggggcgcggcttaggcggacctcgattgggtggcccgaatccccgcctttccgagcggggacgctgataggtgcagaggcggggttttggaggcctcgttaccttccaggtgag

SEQ ID NO: 65049 - DNA, 1005 bp, Homo sapiens
cccctctcctgctgccccagcttccctggcaactggggacactgccccccaccccaactaccaacccaggccccgtgccttctgactcacagcagctcaacaggaaagcatctgatcatgcccacagccctggcatctggcccacaggagtggcacccctccccaagaccttccacacagtttctatattagggtaatgtccattgaaatctctccaccccacccccaagaaacccccctgtgatacgtggggatggcatagcgccccgccgcgcactgtgccaggtggagtgggagtcctgatcctaccggctcatcacattccgcacattcccagtgggcagggtggaggaggggctagccagggaggaagaatgccgcttgcctctgacatcctgtgtctgggtttgcttcatccctaccctccccgcctgggctcagctcccctccatgtgcctcctggcccctcacaccttggaccccctgtctagctcccgcctctcagggctgtcttcccttttctgacccgtccttcctctccattttctcctctctcgctcagccctctcctctctgtcatcctggagtctgtggtgagaattggggagaccaggctgggttctacacagggccactgttcctgtcctagacagccaagcacgctgggtttggtatggccacagctctgcgccatctccttgtgcatccaggacttgccctctctggccatgggctcctcctgggagcgctgggctcccagggtcccagtcctgatatctaagctcctcccaagggccttagtggggatggagcaaaccccaatggtccaggtctccatgctgccctggggagatttctccccaaatcctccttccaaatggcgcaggactagatttgagggtcagctgctcacctgcctcccaccccacctggaccccgctcctctcttgttggaggaggggctgcccacctatcttctttacgcacatctgtgggcatagagtc

SEQ ID NO: 65050 - DNA, 539 bp, Homo sapiens
tttgctgaggagccaatctcagctcggatcagggtgagtggataggagaaataaatctcggcaaagacagcgaggggcctgagtgcgaggaagaactcccagagaccgccagccacctcttggggactcacagcgctgcggaggcgagtccagcattctagccagccgcgcacggacgtcggttcccagatgcgccaatgccaggtctctccagcccggctggccttttcagcagcagcagcagcagccgcaggaaagcggccagacaaatcccacccccggccccgcccgtcacatccatcttgctccccaggcgacgctttctcggagaagcgaggggcggggaggggaaatctaagcctttgggggttgccgacaggtgtttgggggagaaggcggagctggggtagggaggatgaggagggaggggcggtgctgcccctttaagaggaggcggccgagccgggatctttttctctttccccggaaggaaagcgcagcccgggctgggctcgcaaggtggggaggtgcgggactgg

SEQ ID NO: 65051 - DNA, 1105 bp, Homo sapiens
gaagggttaaaaggagcctgcaggtgaaggagatgcgagggggtagcaagggaaaggcaggcgtggaagaggaagcgaaagggctggcggggctctgggaaggaaggggttaacccgggcttcgccccgcggaggaaagggaggagtgaacacaggggaggtgggaactcggcgcggcctccccaaaacaacaggccgccccggcaaagcgtgggttaagggggcgggcccgggggaagccacgtgccggggcggaaggctattggttcgcccggagttgtttgtgagtggccattggcgacgtcgaggcgccatgacgagccgattggctgggcgttggaatgcccgccagggcaagggtagggaggaggcggccgaaccgcgtcgctgggccgaaaggtgcgcgagcgctgcccgcgcggggaccacaaccaaagtcgcggccgccgcagccatgcgctgggtgtgggcgctgctgaagaatgcgtccctggcaggggcgcccaagtacatagagcacttcagcaagttctccccgtccccgctgtccatgaagcagtttctggacttcggtacggagtgggcgggaggcggctggcagcggaggccggcggggcgctgggaggggcagccgggggctagggggacggaggagaagaaaggccccgagtgacagagaagggttgtttggaaaggtacaggcaggaaagagttaatggggaagcaggaaccggccggggcctctcgacggggctgctgatgggaatggggggcatttacaaggacggtcccgaggtttcttcgtgggcctcatgaagggtcttgaagagtaaggggcagtgaagctgtgatgttactgcaggaagggagtagggtggtatccagacgcgaaagggttaatgggagttgtcctcatgactggaggagtaggggcccctcctcccaccagaggaaaccgggggtctgctggtgggagtgaggaggcagggtttagaggtgcagccatctgtagagagacctggactgggcatgaagggtcagacacccctgggcagagggtgagattaagccaggggcagttggggaagggggctctttcagaaga

SEQ ID NO: 65052 - DNA, 1654 bp, Homo sapiens
gtgtgtggaccccatacagggggtgtggcttgggtgcccaggacctgctaaagccacacgagctctccaaacccgtcagccgctccttgcatgaccgagcaggaccgaccacttactgcgcatgtactcgaggcatcatcttttctgtacacccaggcccatgaggtgcttactcccatgaaccccattttgcaaatggggacccgagggactcggtggcctctttagggcacaatcagcagcggaacccaaacctgcctggctcagaggctccggaggcgggacaccgccacctctcccccaagtgcagcgagcaccctcctccccagcctttgccttgtttacaccctgctccccagcagctgtggatacgagtgcacagggcacaccctcgcacacacccacaggcatgcacatgccacatgcacacaattacacacactcccccgctggctcagcaccccctctgctcccacacagggctgcagggccctcctcccactcactcaccctctcctcccgcccccaccgcccattatcagccccacactctcagcaagcctcctggcttctgcctgcatccacccctcctccttctcattcctggggctctggactggctctggagccctggaaagcagggtttgggtggatctccacattaccttgggctgggcttgggagctccggatctcaccaagggactcctgggggccttgattactgcagaggtcagcaggcccagagaccccagcctccctgcaggtcctggggaggggtgggggcaatgcctctcccgcctgttggtgcctgtctgtcactgcaccactgcttcaggcctcccttatataagcccagttctctctctggcctgcaaggggtgggcagcccagaggccagcgccactcgtccccaatctcccttcttaggatcaagaaccggcccaaggttgacatttggtgcaccaggcccctgaggggcttcagggcaaggccagggacctcggggaaaatcctcatcctctcccctccattccaagagtagcctgggccccttgccctggaggagccctggccctgtgagggaggctggcaggcgctgcccgctgtcactccatgccggtgccctttgctccacttcagtggccacgtgaccaggccccattcctgccctctagggttgttgagcagccacaaaaggggtggtgccagcagctggggcactctccctaagtgagactgggactttgaccatgcccacccccacccactgcccagcacagtcaggaagtggcttagcctcccagctcccacccgcttcatccccacctgcctcctgggaaggggcctcaggccccactctgcagtgggtctcctccccctcctctccccacctgcccctagcactgcctgtgtgcgggccctctctcccctaagaatcatatgagcatgaaggtctattttgggtgcgtttagggagcaagggattcggagccacataggcctggatgagagaatctcagctctgtgtgttaacttcctcatctgtaaaatgggtccagcagtagcgcccacctctggggttcttgtggaggtgaaagtggggcaggagggaagcacagggtggacctggctattggtacccagtaaatgcc

SEQ ID NO: 65053 - DNA, 708 bp, Homo sapiens
ggcccctccttaccttccccagcccctattccagcgcctaagggtgagattagatgtgactgtgccttccatgtctgcctcccccatccatctccccaggagcccaccactgtgtccccaacacagagcccaggacctagcacacagtaccctacagagacctgttaactgaatgtgcaaatgtggttccatgaccggggtggtgggggtgtggcttggcctgggttggaggccctgtttgctctgggtgctgacaagggaggagcggggaaggtcaccaagggcctgagtcagagggagaggcccagcaagtctgtgggagcccctgagggcacagggcaggagctggtgccagagatgagacccgggtcaaccccagctgtgcgcaagtgacgtggcctcctggcctctcacccttctccagctccacagggaacagctccaacctctccacacgcttctccagctcgtactcagcagaggctgccatgggatccacatcctcgttgcgacgatcgtaatcctcgttggagtaagtgctgaacacctggggagggaggcagctggtcagagaggccggcaggaggacaagtgcagaactggcatgaggaggccgaggaggcaggctgagttacccaccccatgcctccccatgatagccctgagatgaggcctcacccagtcccctgagaccccagctctgagcaa

SEQ ID NO: 65054 - DNA, 5842 bp, Homo sapiens
gaacaaacaggctgcctaccttgcacatagtccagggcaccaggcccactgcccaaggtcacatgggttaaactgtggccaggcagaatgagactgcacccagctgggacaggtgggtgggtcaccggtgacttggtttccactgcacacatgccccaggctctgggacagggctgatgtgagcctggactcagcagtgggatttggcccactttgcactggagtcccctgactctcaccctctgctctaggagacacggtcccttcatcattgagtctctacagtctcctgagtcaacgaaacccctccctgacacacatggacacacacgcccgctgtgacctccaaaacacacctcacagcctgtcctgggctgcaccctgccctcttctctcagcctatcaaatcctgttccctttctggtcctgccgcctgcaggaatcccaggcctgggctcagaggccccagaccacctcctacccctcctcgggctgcccaccatgatatgccggtctagcagagggccctaggggaggtcccacctccctgaggccaagctggaattgggttctctgccctcagcagaggcctccacctccagaagggcaacaattgggtcatccatggggaccgggaccctggacttggcatcaaggcaggggcaggaagaagaaaaagtggggcccctgtgccagggtggggaggaggaaatccccagtgaggctgaaagccagccacactgggcccgccacacacgctggctctcacacagggcgggccagctccaaagtcaccagggagccgggaagcactgctccaaatcatgtgctattttttactgaaaaatcagggtaaggcgtcaaatatagacagtcagaggcccagaccaaactccaactctgagggaatcggacttctcgcaaaattagtgggggtggggtggggggatccaaactctgcttcagagtcccaagaaacactacagtcccccattcccttcagaaccccactgccttcaggaggggaaaggggttgggagaggaccccgcaggtcccagcccaggggagaggctggcctgagagccactcacttttaacctttcaggcctcttgctggggtgggaggtgggagaggggcagaggctgacattctgggcgagtgagaggaaagttgggaagcttcagagtccaggagtagttatggaaacgacaagcaaacagatggtgctttggctagggaagggtaaaggcagggcagggtccaggccaaggagagtccagggacctggacacttccatggggcggacctggggccgggtgcagctgagcctggggcggtgaggaagaaccctgcaggctgaatgtgctagccaagagtggagggtggtgggaagtggggggaggggtggcctggggtttttgattccccccaggggatgttccctccccatcagggctgttctgaggatctcaaagctctggcacaacccacaaaccaaccaccaatagtggccgtggggatgagacccccaaaaggggcagctcccatccctctttcagggctcccagagaatgtggcaagaacacttggggcctgccaaggccatgggagtctgtcctattgagcagccaagagtaaaggcatgcccactactgccaggcacccagggggatcccagccccacctcctcctcctccatgcctgcagaaggcctctccccatcaaggaccacacaaagtgcccctccctgtgcaaggaggaccgggcagctggcctgcagggacccccagggaacacggcgccagccagtcacatggccacagaccagctcaccctcacgatctgcttccctctttcacttctgcaaagttggggtgggggtacaaacagaatagaggaagggctgcctgcggtcccctgcagcttcgttttgagaagttcctggctttcccctttctcacctcatccagctcccatacagggggaaagcaccccggccccctctctacccagtgaagggcaaatgtctctcctgaagacacacacaccccttcacactacccaaccccagcctctggcagcctctggaggaaggaatgtccgggtgaggaagggaaagcaggtgtcccaggacccgcgtggggcagggcgggttccgcggagcggcggggcggggcagcaggcggaggaacctgagggcaggtcggggcaggccacccccctcgcacacctgaaaatccctctctgacaaacagctggaactcccccacgcccccctgagggtgggaacttctgggaagggggctgggtggcaggggctgactcagcctgccaaacccggctggctggctggcgagcgggggcggccgcgtgcacgtggcaggggcggcgcgggggcagggcgggggggctcacttacttggatgggcgccgtgctgaaatggatcttccggctcggggctgggtcctcctcctccgacagccccgggatctccacgcaccccgactcgggctcgtaggggggctccccatcctcctcgtcgtcttcgtcgtcctcctccagggcactgcccgcagagtcctccccgagcccactgtaggcgctcacgtccaccaagtccgcctccgagaagtcctccttcttggattcatctacctcctcaggggccacgtccggggcccggccattgcccacccccctctctggcggcgctaccgccgccgcctccttctccggggccgcttgggcctttggctcctcgggcgcggggctggctgcagttgccacggtgctgccattctccagggccgcgtggaccgtaacctcggcctggatcacctccccgggcgccgactcggcctccgactccccgctctcctccacctccaccggcttaatcttgcgcacctcccggggcttggggggcggccgggcaggggccactcggtgctgcgggggctgctgccctgcggggcatcgctctttctcggccggggcatcccccgacggggcgggcggcggcggcggcgggggctggaacacccgggaccgcttgctgaccagcttcgagttgacctggggaacccctgcggccctggggagcccgggcccgcggtggaggccggtcctcgagtcggccttctcgaagacggcgctgagctggctgaccgtgggggacacggcgtcagcgtccagcttgtccagcgcctcggtgctgccgttgaagcgcaccacgacgtccagcttccggtcctgcaggccggcgcgctcctgcctcagcagccgccgcgccgcgctccttgtcgccgcctgcgcgctggggcgctccgttcgaacagcttccgcgtctcctgcagccgggacggcgggtgcggcggcggcgcaggctgcgcggagggcgcgggcttggagtcgaagcggctcacgcgctccgacacgctggtgcccagcttcagcagggcgctgtggtccacgttctcgttcaggctgctggcccgcggcagcgacaggcgcacgccgcgctcggacgcccgtggggcctcggccaggcccgcgccgccgcccgcctcgcccgagggccccgccgtcgtgcccatctgcaggaacatacttttgatgcggtggacgttggagccatatttcttgtggtgggcccccttgggtgcctcgtcgggcccgggcgcgtcgggcggcttcagcgcctggatgcccgcctcgtaggcgctgcggtgcggggaggcgctccggaggggacccccgggcccccgtggctccgtcttcatcatggtggggggagccgggttcgcatgcccctgctccccgctcccccgcttcaacaggcggctggccaagtcgggaccaccgccccctccccccgataaaagaaaccccgaaggccttttttagggtccccccaaaaccaagctgccaaaaacagttaatcccgctttaaaaaaaaaaatgaaaaaaaaaaaatctccaagcgccctgtgtgtgggtcgcctcccccaatcaagctgccgaagacagccagccccgcttcaaaagcccgagcggcctggtacggtcgcccccacccaaattagcaaagcggcgtctggggccggtgggagcgcgcgccctgcccgcgaagcagccgcggtgtcgccggctcacatcgtccgagacggtgtcagcggggctggcagcccgggcgtcccccagtccggccggaggcctcggctctcggggggcccggcaccccaacgcccatggctgctccgccggcccgggccgctccgccgccgcgcctccctccctccctccctcccccccgtgccccgagcctcggtctttctctggctttgcccgagcggcggctgccggagaccgagcggctgcccttctcgcagccgccgctgggggactggcacctctgggtcctaaagggatcggatttccggggccggagcctgtgagccctccccttcccctccacccgaacggatcccctcccctccccagccctcgcggagagccttccgctgcccccggacgttggccagcactcttcaacctgcttccatcacaacttctgactgcggtcacaacccacagaaccgcacctccatgaaatattggggggaggcagtacatccacgatggtctcagtgtgaggggagggggtttgtagggaggggcagaggttcattcttcagtgtcctcggagctagctcttcggtgtgcttcaagcctttagcatcagaatcgctgggcacttggtaaaaatgcagatttctgggatctctctcgaaccttgtgaaggagaatctccgaggctgaacccaggaatctgcattttaacacttcactacaggcaatctttggcccccttggaggtgtgaaaccttggtccagcgctggtgacctttcgatggtgggggaggggtggtgaagaaaggaggtgaaccccgtcatccaagtagcaggggatcaccaaaactgccgaagtctggaaaggatgtcctgtcgcctgtctgctgtgcacccgtcttcaggcccctaccctggcactcctgcctctcaaaccggaaggaagggtttgggagcaggaattcgagaggcctggggccaaagtttcgccagtgagagctctaacttgggtctctgatttaaaggatcctggccactgtgttccggttggggtgggggggtggggagggtgacagtgacttacacatcccctgtcctggcaacccagaaagctgtttgatgccctctgcaccccccgcatacacagctagggtgctggcgctgcctgggccctgggtgtgagagtccgccctctggacaggtccaggtgagctggttcattccacacatcccagaaactggtgaacacaatgggccctaggacccagagaacaactcaggcacaaagcctccccccactcccagctgcttcctgcatctcaggcctttctgcggcctctgcctcctcccccgccctcttcccctccatcctcttcctccttttcctaatctcccactctctcccccctggcctggaagggctggcaaagggagccctcctaccactccactgcaggggtgtgtgtgggttttgtgggatattaacgcgttaccatgtgcaaaagagcttagagtacagcgtgggggatggggtgtggggaagccgcctgggaaccctggatattgggatcgggaggggccaggaaccgcaggactgatcctgaggctggtgctaaggaagagggaagatctaggttgtgagctagagccggaagtgaacccagacctcacactttccaaatgccacctgcatctttgcccagttgc

SEQ ID NO: 65055 - DNA, 1463 bp, Homo sapiens
ggtcctcttgcctcagcctcctgagtagctgggatgaccgctgtgagctaccgttcctgtgctcagtgttcttaaggaggttgctccccttctcagggcacaggggttgagcaaggccatggctaaagcttcttccattatctcctgagcctccctgtacccattagttagtcaatcaactcatcaaacactggtttcgtgagcatctgctgaggcaggctgaggtgtagtgtacgtgcttaataattgcctgttgaatgactagctctttaggtgcccacgccataaccaaacgggttctttgactagcgggtgcctctggcttctccttggctatttctttctttctcctgaaggaaaccaggagttgcgcagaccggaggctccagcagccagcctgctgcctggggtggctccttgatccctgctcccttgaggaggaggctgcccacccctcatctctgggctcgccccctgcagccaggcagctcttgggcctcctgtgctcttcctgtgctggccagggctgggagagtgcaaggccagctcctcacttcccggctttgccttggggtcttggcagcgcctttctctctgctcagctccaaagagcacacgggagcctggctgccggcctgagaggaagcggcccagacaagtagctgggaggatggcgtgcctgcagaagacgctgagccctgcctgggcacacacgtccagaggcccccggcagcatgccgggagggcacagacatacttagcgcctccccactgggcaacagcccctccctggcgtgcaagattccagccagcagtcaagctccaccccccacagcccaggacaaagaagggcagccgcccccaccgccacctccaccgggagacttggcccagctgcacactctgctccacccctgtctcctccagtcccatgatggcattgcccctgttacccagtgggtggcctccaccttccttctaaacacagcacccacacgtggcctgacgctcagacattccctcaccacctctctatcagccagacctggtgactcaagtcgccacctagggccggcctcagccccctgctgcacgctgccccggagcaggactggaatcatgatcctgccacacaacagctggctcagccagctgagggttagtttactcataagatgatcatcataaccgccttggggctgttgtgagaatttgtgggaactggacactctggcagctcccaaggatggacacattattgcatgcaagcacacacaatcccacaaggccagaggtccctggggtctccctggcccctaagattcaggctaaatgaactccatttccacctgcaccttgtaaaaagttcaatctctccctgtgaattgggagtggaagcctaaatttgtatgatctttggtacggaactgctgcctagagctgcaccatccagtacagcagcc

SEQ ID NO: 65056 - DNA, 2072 bp, Homo sapiens
gccccccacagcccagagtgcaacgcttacccttgggcctcgggggccagtgtctcccttgggtccctgtgggattgggggagaagaaacaagaggccaggttagagaagggaggactgtgaggagtcacgggccgcgcaggggcaaaattcgagggcaggagattacctcgacgccggtggtttcttggtcggtgggtgactctaggggacgaagagacgcgcgttagagccaaggtttgctaatgctgctcccgtcggcagaggcctccagcacggagggccagcgagcgccgaccacccccagccccagccccaggccccaggccccaggccccaggccccaggccccgagcgcagccgcacctgagccgtcggggcagacgggacagcactcgccctcggggacttcggcgccggggcagttcttggtctcgtcacagatcacgtcatcgcacaacaccttgccgttgtcgcagacgcagatccggcagggctcgggtttccacacgtctcggtcatggtacctgaggccgttctgtacgcaggtgattggtgggactgggacaggcggaagaggggcgttgtcagtagtgactgcaacccccagcttaaccacctttcccccgggtctaagaggcacacttggatttttcacttcccgcccctccccccgttcttctttcctcaaatccttaaaagctcgcctgctcctcatcagcgcgggtgacagcgccgaggcgcctggccagggaggctgtaactctttccagttctcaggaatttaaacaaagctttagtccgcggtggcttccaactccaacctcagcccattggcgctgaagccaagtgaaataaaaaccacagggtgagagggggagggcggggggagaataggaggggccccatcgggagggcaggctcgtggggagtggcttgcgtggtagagacaggaggagggcgagggaggagagaagggaggtccagccctcatcccgcccccattccctgggcaggtggggtggcgggggcggggctaggagaatgggagcggctgattggaagggaggcccccccaagacttgaaatgtacctcaaaattaggagacaccctaacctccagcacctagacatcttaaaagcccgctctcggggccatccccagtcccccaaagccagccaatgcctccaggtcacttttagccaaagaaccaaaaagtccgcaaatagtccagaagttagctaaccactcccaccgcgctagcggctccccagacggccactaggtgtcgggcaacgctaagcaatggggccggggcggggccgacctcaccggcccgactacctctttaagaggcttgggctgccccatccctggctttactttccagatctagaggtgggggtccgcacccagcaataacccgggtcttcccgctccggctcctgccccagtaagcgttggaccgggagacgcagtgctcagcatcggtcagcagggggcgcaaggaccccgccccgccgagtccgcgccaaagtttctcatcctccacccgcccacgctccgcaccccctccgcggctgcccagcacccccacggccccagcaacactctagcccgcagagagggcaatctttccttatgaatcatcccacggccttcctgattgcttctacatcttgggcttcaaatgccccgctcggcgcccccatcccatcttcgacgtgctttcctcactctgcacccagatccccacttccccggttgcgcgctcgggattctctcttgcaccaactcacgccgcgctccaccctcacctcccgctcccggggcgcgttcaaccccaacctcgccccagggtgagctccctcctgtctcagggcgccgaggaagagccctcatcatctcccttccattcccgagtctccggatcatccacgtctcgttttaagccgcggcccccgggaccaagcgcaaggcgcgatatagagtatccttgcactcccaaaagtttgggacttactgtcttcgtcttggccctcgacttggccttcctcttggccgtgcgtcag

SEQ ID NO: 65057 - DNA, 587 bp, Homo sapiens
gattttaataaatccggctatcttatactcctcattgaaaaatgtaagtttttgcccagtgatagtttgtgtaataccaaaattttaaaaaagataatgacattttattcctctaaggtgaggtttgaactgtcagttattacatatattgtcatctgagcaagctgtttaagatcttagaactgatcttcagtggcctagtcaatgacttaaggaaatggtttcatttcatctttttcaaacattcttgtggccccatgtgaagctggctaaaaatcaatgatgtgctgctgggtctggtgactcatgcctgaaattccagcatttgggaggccaaagcgggtaaattgtttgagtccaggagttcaagaccagtcagggcaacatggcaaaaccttgtctcacaaaaagtacaaacaaaatcatccagacatggtggtgcatgcctgtggttccagctactggggtggggtggtgaggagctgaggtgggaggatcacttgagcctgggaggcagaggctgcagtgagctgagatcatgccactgctctccagtctgggcaacagagtgagactctttctcaaac

SEQ ID NO: 65058 - DNA, 1903 bp, Homo sapiens
gggcactggtgcccgcctagttccctcacccccactcctgctgaccccccacatctgtcccttgagttcccacatgcccttctcagcaccctcatttcaccccgcagggtatcttcctcctctaagctcaaccattttcccattttcctctcccgtaagggccacacctctgtagggctcccagcctgggcaggatagcagggagtgtggggtagagaccccaggccttgctgttgcagtggggcctgggtggggacaagaagaaccctggcagcccaagttggcaacgactcaagaggtggaggctccagcactctcaggacgaggtccccctgccaaggtccacctgcaggggaggaggggagacggcggccccttcccttctccaagctcacagtcacttcaaatacagaggggccagatcccaatacccctcggatcaggagactagaagattatcttcttaaggggcaaaaagggctaggaggtaatgggaaatagagacagggaaagggagagagagagcagggagacagcataagaaacagaccgagagactgggggtgcaggaccaaaccagggacaaggagaagggaccagagaaaccgagaaaaacagacgcctccgccgaggcagacagaggtgaacagagagaggagaaacagacgggagaacagagggaaaggctgggaactcgagagaaactgggtgcggacagatgggaagaaaccgaaacagaaaaacagaggctgggagaaacggggagagacacagaggggttaaatataagacagagaacatgactgggagagatgagggagaagggtgagaggcagagagcaaggaaagagaagaaacgcccacgacgtcgggggtgtttttcaggggtcaagacagattggcgacacagcaggaggcgcccaaggacatgacgttgagcctctcagggtcccccttggccgggccagggagcagcgccccacgctccatcaccccctctccccctcccgcggtcctggctgcactgctcctgcctcgccctcgcccagcgcccccagcccacaagccccggccgcgcccctcccggctcccgggggcacccgcgctgggcgacgctgccacctgccggccgctcccggaagctccgcgcctggagtgctggaggcggcggccgcagggggctcagaatcaggcccctccgcactggggcggcctccgcggggtctttccaggaatctggatgggcctgctcgcccgcgccccggcgggcctggcagaggaccagccccagctgcggaccccggggcagtctaaaccctggggccttgagttcccgttttgtcaatgggagaaaatgcaccaacacctcctgtaggatttcaagaggggaggggacacgaaggtacccacgttgtgctcctggtcttccttcctcgacctggaaatctcagggcactctgaaatcagccaggctgctctgtccctccctttttggtcaaaacacaatggggtgatatcccccaaccataacccctcaaaatctaccctagaaccttcgccttcccctccctcaacctctgcccccatttgacttctcaccagacccagaggtccagataagaaggggcttccacgtccccttcccactcccgccggtcccggcacccctccctggagtctggggcacttaggagtggaggagttgggagttaggaaggcccagctcagcggtgtggagttgatcccacctctttttaaatttaggttatttatttatttatttatttatttagagatggagtctcactccgtcgcccaggctggagtgcactggcacgatctcggctcactgcaacctctgcttcccgggttcaagcgattctcctgcctcaggctcctgagt

SEQ ID NO: 65059 - DNA, 740 bp, Homo sapiens
atataacccacacatattttattttatatatgtatattttttctttgcaaatatgtagataagatctagaaggatgtaagtcaatcactcaccacacttccaatagttgttggccccaagagtgggatgtaggtagcaaattgcaagcgggtcttcttcctttgtatgctttggcactgtgtgttttttacaatcagcaagcattgcttttgtaaatttagagatttgtttacgggaaactgtaggcagctttagaagtttatgaagatttgccttgtgaactttgatcaatggcaactgataaattatcagccctggtatgtggaagagaatacaaggactttagactgtggtacccacctgacatggatgtgacccaggggacagacacatgatgggaaagcctggatgcctgccagacatacatgaagcccacatctcagacctatgcaggacttatgaggtgtataatgaatgacagaaacagtgagctggctagttgggtgaatgagcagtttcacagtgacggagaatttcatccctcgtggctggtttagttgctcaaacccaatgagtgaataatgaaagatggaatgaatgaatgaagattaaatgggtgcatgaatgaatgaatgaatgaatgaatgaagagatctgccaccagatatttgtaaagaaacacagtctagttaacatcaaggagatgttcctcgtggctgtgcagttgaatttctatctgc

SEQ ID NO: 65060 - DNA, 1961 bp, Homo sapiens
agctagtttgagttggtttatcatcacttgcaatccaaagagcctaaagtagcctatagaccaactccctcattttacagatgaagaaatggatcctgagaaagtccatgacatccctaaggctgaggtcagtgagtagctaggctagaattaaattgcaaacatcttgatgggaacactcatttgtttttgcacagccgctcctcctgccacgccatgtgacatttccaaagcctgccaagatttccaaagtcctcagttggagggaaatgcacctaaacctcctcttatccacaaaacaaaggggaaaggataaaaatagaagacccctgaaatataactggagatctgggacctgggggattggcgcaggaagctgagaatggagagaacaaagtcagagttgttagaggtgaaaactgaaaggaccctacactctatttgtggctgagctctcacacaaggaagacaggatcaaaggaggtcttcatctctttgcaaaactctcatgcaggattcagattaaactgagccaacaaatatcctcctaaccgaggctaaaaagagatcagagacccactccagtgttggccacctgtgaatccccaaaactcccagccttccgaggtcacccttacctttaatataaagttgggtagctcaagggaggatccagatgcttttcctgcgtggttgcacagctccttgccagtccccttggctcctacagctgacattctcctcctatccccccaccccagcctagacacagcattcttcctgctccacccacccctgacaagcactgctaatcaagctgctgtgtggatctgacttttcctgaagtttcaggctaacagagaggggcgtgatgggccctggcaggttttcaggagttttagttcctcctgggccacgtaatatatgaggctaacagagtgagcctgaatcagactggtccttgctaaacagatgactcaacatcctggaaatgtgtagcaagatggtgtctggagccagccaagaacttgtccccagaaccacagtgtttgttagttcccagtggcttgctagaggcaggttttacaaccccatgaggcacttacgctggggtttcaggaagaagtgggtgaggggcaagtggcttggtgagcctcgctttgaactacctaagacttgccagatcttcatccaggacaggcagaagcttttggcccccactcccaggaaccctcctgggggagcccagagagccacaatcgctgacatcatccagcccgttgccctctagtgtcccctgaacctccacagccaaatggtatttcattaaggatcctggggcagagggcagcttctaggcagcttcaaaccccatcctctgcagaacctgccgagaaggtaacatctcaaaacacatacgtggtgtgtgctgcttatccctgaccccgctcgggtatcctcacctgatgcttccctggccctgcctgtggctagggttcccatcctctccttatgtccccaaaacaacgccaaacagcctgcagcccactctgaagagcagtttaatgctttttatctaagactttccatttttaggaggtctggccttccatgaacaaacacgtttatcaagatgctttttctaacccaaagagtaattggctctctaaaagcaattctgtttgattctggaccaacaattgcaaattcacaaaccctagcaaaagatattaaatagtgagaaatattctccaaaacatgaacctgattcatacatataattactgtagttctcatatcctagaaaatccaggatgtactgttgccaaatctattttccttatatgtaccacttacattgaaatggatcccttccttgacttttttacctggaaagcatcagagttcttcagagtagcttctcagagtctcagttataggacaagccctggggagtcttt

SEQ ID NO: 65061 - DNA, 1873 bp, Homo sapiens
gtgcttagaccttgtccaatgcggtgctcattgaacacgccgggttctcaaacaaatgttagggacagctggttagacgggaatctgggcctcccctgcttgctttccgcaacatttcttgagcattgctgggtgtccaaggcagggcgagatcccagagcagtcacgaccggatgtatgattggtgctcactgcacagtgctggggacgcacagggaggatgccactgatggtgtagggggtggggacttggcagagggagcagcatgtgtcgaggtctactggttctccaagtttggtcccagagcaaaggcatcagcatcacctgggaacctgctgaaaattctaatgcttaggcctcactaccgacctaccaaagcagacactctgggggagggaggaggggcactaaaaatctgttttatcaagacctccaagagactccaacacacgctagagtagtttgagaaccacgactctgggagcggcctgaggatgcttaggatgagcgcagagcggaaaggaggattcgtgaaggctctctgatgccagtcaaggggttagactttgccccgcaggtgcggcctccaggtttttaagcagacgcctgtggctctcacacgccctctcccaaggcggcgtctctgggagccctggcgttccctgggcccccgggaccgagagcttacccgcgtgggactgaactcgcccacgacccccgacaccaggcaagagaggttgtgccgcagaccctccactccccagcaccaggcgctcgccgtccaggtggaggggagcacacgtgggagccaggggcaccggcggagacacgagcgcagaaggcacgcgctcaagcccacgcccgcgactgccgggactgaaggtgttgcgagccccggctccacccctagcctgcggtgcgccgtgctttggccccgcaggccccgcccccggccccgccccggcgcgcgcccggcccgcctccctaggcgtggaggagggggggcggctcagccccgcgcccgtgcgcgcgctcgcggccgggttgcagggctgggcgcgcgccccgcgtcccgggcaggaagatggtggcgagcgcgcgagtgcagaagctggtgcggcgctacaagctggcgattgccacggcgctggccatcctgctgctgcagggcctggtagtgtggagcttcagcggcctggaggaggacgaggcgggcgaggtgctccgacggccgggcgggcgggcaggccgggcgcgggggcgcgcggggtcctggcggggctgcgggcggccccagccggggaagtggggcacgggccgcgtgcgtgcgtgcggggcgccggcggtcgcccagagcggagcatccggcccccggcactcccttccccagcaggcctagggagctgcgcgcgggggcagtgcgtgacctggagacccgggccctggtggattgggagtcgggcggggggagcaggtcatgctagggtggtctccggccaagggagcgatgaaggtcaggcgcggcgagcggggctgggaggcggggctgggcccgaacctgctcggaggtggggagccccaggccaaactttctgaagttgggagggggcggggatatgcgcgccgtgggcggaggagtagggccaagggactcagggcgtccttccccagctgagcccgaggggcagcggccggtgaggaaggggagctcgggggtggaattcaggcctgggacaaagtgtgtacccgggaactgaaggaacagggagtgacgccgaaggagagaactggagtattcccgaggtgtggcttcctcagccgggggtttgaagaacctggatgggtctccggagggcagggagaggaggaact

SEQ ID NO: 65062 - DNA, 2432 bp, Homo sapiens
cccaagtagctgggattacaggtgtacgccaccacgcccagctaatttttcgtatttttagtagaaacggggtttcaccatgttagccaggctggtctcgaactcctgacctcaggtgatcccaaagtgttgggattacaggcctcacccatgactttctcagctgtccactcatccactgctcaccaaatactagtaaaccaaaaggatggctggcctaaaagtggctcccacagggtcctggccatttcagaaggctgggccctttcttctcaaagcacatcaagcagaggtccaaccatgacccacacactgcccttgttaatctgacctctccatactcattccaaagtgctcaatagcattcatttgcagaagtaaaatgaactaaaattcatactaagatggtagtcccttgctgtatgacaagcctaggggtgcaactccttgcctgcaggtctccagacacagccatgatttaaggtccatgccagtgtctttagagaagccttgtgggtctctggagcctataagttcagagttcctgaagcctgggtttctgacatttccatgacaccagagactagctggggcaaaggaccagagataaggactcagaaagacaacatgttaaaacatgcccggcgccaggatctacctacctttaaacatctattcattcatttacatacttactaagctcaggagctgggcttttactttacttacattatctcactcacaaatctttgctcttcaccctactccccatcctcctcctcaaagtaaatggtaccaccattcatccagttgcttaggcagaaaccagagtcattgcagattccttctctttgctgtcctcacatattgttcaccagcaagctctgtggatgctaactccaaaacagatctcaaattcatccgttttcctccaagttcactgccaccacaaacatcttggctaaatcatctctcctcagggctattacgactttccatttgatttcctcatttccactcctatcccctttaaatttacataagagcaatagtttgcttctcaaaatgtaaaactggctcaagtcactctcctgtccctcactctacacaggtctaggtctcctgtcattcttttttttttgggggggggggatagggccccattctgtcacccaggctggagtgcagtggtatgaacatagctcactgcaacctcgacctcccgagctcaggtgatcctcccacctcagcctcctgagtatctgagaccacaggcaagcgccactacacccagctaatttttgtattttttgtagagatggggttttgccatgttgcccagtcggtcttgaactcctgggctcaagcgatccgcccacctaggcctcccaaagtgttgggactacaggcgtgagccatcacgccccgcctgtcattctttaggttttaaatgttatctcctcagaagccttccttcaccgtccaatctaaaaaaagacacacacacagacacacattatccttcttcacagcacttgccagtctacatctactttatatgttcatttattgccttatgcaccagagagaaccgttcgggggctagaagccaagtcttcacgttttctgctgattttccgaacacctaccgccgtgtctagcacaaagtaagacctcaatctgctgaatcaatagattaattttttcaaccccaatatgccaatgttactaatacttctacagagaaaggacccacccaaatccccaaccgccaaggaacccgtccgtgctgctgaggcaggagaaagacaagtgctcttcaaacgccctcactcacggctccacccaggatgtgtcacgtgaccagcgacaccgtccctcaaacctggagtaccccacacacttcccctcgcatccaaggtcctccgcggggatcagtgtcacctccttccctccctgctggagctccactctgcctccccgcctcaccccgctctgactactgcgtcccattaccggctgtccgggtcctcagcgccaacaccaccgacgccatgctttcgatcactcacttccggtctcgaaaagtttctacttccgctatcaggagatctacttccgggccctgcgtggcagttgaaagagtggcgggagaagttgcaggtgagcgtccccggtcgcaggcctgcggattgggcagggcttccctcctgaacaccgctctgcagaatcttggtggctaaggtgtccaggagcctctgcagcggaccgccagcctgagaggcgcagagcttgtcgggcaggggcccgcttgtcccactcccctgatttgcagatgtcaacggaggcccagcgaagggtcagagatgaggccccctccctagtcattcaacttactctacttagccagctgtgtgccagatgctgtacta

SEQ ID NO: 65063 - DNA, 1741 bp, Homo sapiens
tgaccacctaaaaaagttttaaatactacagcgggaaaaacacaacaacagctacaagtatcagtatttgctccttccaagcattttccattacaatggtatttaacctcccaataagcgtatgagatggaaactattatcaccattgtatagatgaggagatctaggcataaaggctaactagcttgccaagggcactcggctattaagcaatggagctgggaggagctaggaacccggttctaaccactgtaatacccgtccacggtggaagaaagactgggcccagcgcccaaggcaaatgtaatttatcaacggcagaaagcaaagtgtgggtcacccaaagtgagtctagtagggcgttggcgcgggtgggagggggaacggagtgggaaaaggagggatgtgggaactagctccacgctgacaaaactagatgcctgctatctctctggagctgtaagcttcagtttacaggggaaaggttgggggagagaggggcgaaagggactcccgccagtttcagcggaattcagatgacagtttaccagccaagctggggggagactttactttcttcgagttaggctgcctcagggctcgggcagccagctggaattgccagcttcctagaagagccaggttctgggccacacccaggtctaccaggaggcctactcccctggaacaagtcactcattcattctcgaatacatccagtaactgctccgtgtgctcctactcagagtcgggcacggaggtgggcgctgtgaaagccccgcaaaggtgacagattcgcttcttagcctgtaaaaagcctagggccagagaagcagatcttccctatgttctggaactgcgccaaagtgacacgtgtacatcccgggaagaaccttgggctggacgcggcctcctaggggacttagtcccaccaccccgcttctttttaaagaaaaggaaactgatgcttttagagaagaggaaagtaagtggcccacgtaggggccagcgcccggcgaaggtgggcgcctgggcctcgcgggacgatactgaccagctccttcaccgggacctcattcaggtcgctgaggctcaggtccagttcgttgccgtccagcttgtcgcggaggttcccgcccttgctaccggccttggtcatggtaacgccggctgagcgggccccggctccggggttccggcgggtgaaaggagctgaaatgtcgcttgtcagttcagcggccccccacccaaacgacgacgcctgagccctccgtcgccgccgatgcgagaccgcctccgcccgctggccgcactccgagcctcgcgcctagctcccaccggtgccgcgacgacgaccacttccgtgtccacgtcaccttccgcgaccactgagatgggctgggccagagcggcccgagcgtgtgcgggcacgccccctggtgcccagggtgatgcactgcacgtcgccgccgccggaggggtggggttggaggctgcgagctcggttcacgttcacccgtggcccgcgggcattattgctggcagtgccacgaggcgaaagggcacggactgggcgccagaagactgggttgacatccaatactgacctcatcagatcaccccaatccccctgattaggagcagaagctgggtgtcctctaaaactgctccctgtcctctacttaacccccgaataaccatcatggggaaaactcttcttcctgaatttctcctctctcct

SEQ ID NO: 65064 - DNA, 1638 bp, Homo sapiens
ataagggcaaaggtcacctcaggccaggctccactctcagccaccccttctgcctggcagggtttacttcatctcctccagtcaggagaggggaggtcacactgccagggcctttgccccattcttctccagctccttctctagaggaagagtcatggctaggccgaggcagtgtggacctggaacaggtataaactgtgctactctttggtgcccagtgccacttttcctagccaggaccagagctatcaccttctctgtcccgcagctctgcccaggtcttagtaccccactcacccctgggcctcaggaaccctaaggaggggcatagggttgctttccattcacacctggggcagcacagggaactgtgccacaggccccaagacaggcagatggaggatgaaatacacaggtcccagtccctgaggccaccttacgtgtccggcccccaaccctgtgcagaaggtcaaggcagaggcgccgaggagggatgggaggatgcctcctgtgagatggggtacaactggtgttccttctgaagctgacatctggcctcagctgggactctggcgccagcgggcccgcagggggctcacccgcgacaccctttgttctggctgcctccccaaccccgcggggccctctgctccagctggcatgcctcaaggacgcttcgcgcctgctcctttggcccccggctcgcaagtagcggggccagcacgtgacccgagggggcaggggatggatggatcttgaccttgccatctggcccctcacggatgtgctgctggctctccctctaggaaatcaacaaatttttgcgcttctaacatccaggcccctgaggatggtcgcgaggaagatctgtttcggactgcagctggggccttcggatccagaggaaaccagggctattcttcgagggtgggagggggagggccgcggggtcggaggggaaggtggccccgcgcgaagtcgccgccgccgcgccccgccccgccccgccggcggagaccgaatccgccgcaccccataggcagaggccaccctccccgcctccccgcccgctgcgcgcccgccccgccccggctcactttaaaagtttactcgggccgggacgcagggcaaagcgagccatggctgtctacgtcgggatgctgcgcctggggaggctgtgcgccgggagctcgggggtgctgggggcccgggccgccctctctcggagttggcaggaagccaggttgcagggtgtccgcttcctcaggtactggccccccgcgggaagagagggggcggggcagttccccgggagaggaacttggaggtcccggcgagcttcggaagccccacctctggacgagtgcactggggggaaggtacccgcccctcccccgccccccgccagcacctaggcaataggaaaagctggcttggcctggtggacttgggtggggagggggctttggttggtggctgcagtgacttcgagttctggtccaagactctcgattccttctcctttatgggcacagagggcaaggagtgtgggctttaaggagaatattccgatggggaggggcaagggccaaggcctgggctgtacccccaggacactgcctctgagttggaacccct

SEQ ID NO: 65065 - DNA, 1001 bp, Homo sapiens
ggagaattacttgaacctgggaagcggaggttgcactgagctgagattgcaccactgcactccagtctgggtgacagagaaagacttcatctcaaaaaaataaaaataaaaatgaaaaaagaagcctcagggctgaaaccatcagcaaacattcctgagaacagattctgcgtcatgctagcacatgctgtgcatatagaggccacagaactcagtcctcaccctgccaggaacttgcagcctcgtaggaggagaaataaatcaaggtgagcactattcggtgttgcaagtgccatggtgaggaatgcgcttggactttcgtcctctgttttctccgatctgctcacacacagcctgctttcctgttgcccaacacccaggcctattacttaccagaccctggttttgcctgagagaaaagagcaagggctttgaagttagactatcctggatgacagccctgggtcctctccctgttggttgtatgacctcgggcatgttatctaacctctgagctagttagttcattacttactaccttcttgctgtgttgttgggctgatgaataaaacaagcttgctcttgttctcagcctttcctttgaggcagggctgatccctggaaacccttgactggtgtctgggtgggaattctgactgatttgaaagtaggagaggatcccctgattggtggcctctttctggaacccaattatttctcctagctgattgccaagatggtgacttccacccagctacatgtccagtccttgggtctgctggacgtcctcctctccgtttgacgcagggctgttcagagtctttctctttttcttttttttttatttgaggtggaatttcgctcttgttgccccaggctggagtgcaatggcatgatctcaggtcactgtaacctccgcctcctgggttcaagcagttctcctgcctcagcctcccaagtagctgggattaccggtgtgcgccacccgcccagctaatttt

SEQ ID NO: 65066 - DNA, 616 bp, Homo sapiens
tggctagctagtatggcaccctccccaggaagcagggggtggcctcagcatggggactgttcctgcagtctctgggcccctcacaaatcaaggttctgagtccttcatcctccctccccagtggcttctgaagaggccttgcccagggcctgaggcatttccaccccccgacaggggcagggtccacctgtaaacctctggcccaggttccaagaacctctacccagcaggtaatatgtaacaggaggcaaaacaaacagcttctcctcttatgttctccatggcagacctgtttgcccaggcatttgcaatcctccctgccaactgtggctccctcagagcccagctctgcctgtggtctctacatgaccatgtcagaactgtgcaatcctttgtgcccagtgacctctagcccccgactttagttgccagccctgagtgtcacagaatgccacagctatttcacctgcattgccctgaaccagctggctcgtgttttctgtccagttcctgctggtaggcaaggctgggctgggcagggctaatgctggggcagaaggctttccaggtgggtccgaccaggtggctgcacaggtagggtgcagagccactatgg

SEQ ID NO: 65067 - DNA, 764 bp, Homo sapiens
ccccagggcccaggtctaagagaggctgccttaacccagctttgaggggacagacaatgggcctcagatgggctgggattccccccacagtctgcctcatggctcccatttcctgattttctaggctgttcccacccacgaagagctaatatgtctaatttccccagagacagggagcttcttagaagaaggactgtggcttgttctatctctagtcctagcatagtacttggcacatacgggtgctcactgaatgtgtgtcgaaagcatggtcgataaatgccatgaatggatggtaaaatgcctgtcgactacagagcacttcaccattcgcaaagcacctttgcaggcctgttcacgcttgaacgtcatggccctgctatggaataggcaaggcagtctcttcatccccttcgagccaaagagtaaacagataacttgccaggtcccactgggttttattggtttgttgtttgagacagggcctctctctgtcacccaggctcaagtgcagtggtgcaaccatgactcactgcaacctctgcctcccaggctcgagtgatcctcccccttcaacctccggagtagctgggactacaggcatgcgccaccatacctggttaattgtttaaaatgtttcatagagacagggtttccctatattgcccaggctgatctcgaactcctgggctcaagcgatcctcctgctgcagcctcccaaagtgctggcaagactttacaggtgtgagccaccatgcctggct

SEQ ID NO: 65068 - DNA, 1211 bp, Homo sapiens
ttagccaggatggtctcgatctcctgacctcgtgatctacccgcctcagcctcccaaagtgctgggattacaggcgtgagccaccacgcccagccaggtggtgttattttcaatatgcaaatggggaaacggaaaaagcgcagtcctttgccctgggtcacagcagtgggtaaacagtagccacaggaccacacccagctcctcttcccctggcaccacaatccctgcacaaacactgggactgtggggctgccagagtttggccccagcaatccaaactggtacacggtgaacttggtctgtgcttggtggagtgggcagtgggcccaggctccccacagtcccagggtcccaggacttccctcagctctgtcctcactgctcccccactgccagccagacgctatttgtgaagccaccttggtggagcctttggccaggttggacggctccagaggaaatgttctattggtgcccacacctttgcccaggcgccacaattcctgtctggcctcccctgccccaaaccagcccctaattcgctgctctgctgcccactgaaagaccactctggcactggtgggccacaggggactccaacttcagctggggagaggcagggctgaagaagggcaggcttgagcaggctccttccacccagacaaaggttggctgctgcccaagtgagattctgcccacatctccacacccgcaccctttcctgtggcccacattgaggtatgaaggtctccagtaaccagactctcctctaccttgttggttccccacccaaacctcctggctgaagcccctgtaccagggtgatttttccagtcccagagaagggattctgctctgatccaaggtagccccacctggccagacactgggcaccccaggggagaaaggaatgagtgaggatgcagacaggagatgggtctagtgacggaggagggcaaagggcagttagcagtctggagacagtgagtcacgccagtcttctctgtggagagacacctggggtcttgggccaaggattgacaatagtggtcttgcctttgccccttcacggagcccatgggcacgatgcttgcatcctgggggagcccttggtcccacgcctactgagctgcaatggacttgagaatgcagtgaattgtgtctgtgtggattgggcagggccatccaccagggcctctatggggcatgga

SEQ ID NO: 65069 - DNA, 482 bp, Homo sapiens
aaggcagcagcagcctcctcttgactttttaagaaatgaacataggtttaaggtattttcagtaccaggctctgtgctaggtactttcacattattttctctccaaatcttcccaacaatcctttcaagtagccattggtcccacttcaccaatgacccaacagaaactcagggaggttccgtatcttgctcaaggtcacacagctggatcagaacccagctgtctgttaggcaggttcactgcacactagttaccaacttgtcagagtccagtgaggcaaacacccacaagttacataacgctgagtccagcgaggcaaacacaagtgacatgcaacgtgtttattacctataggtaggcactaagggacaacagaaggctgggattcatttggagctggacccctacggctcaggaaagctgctgaggcagctgggggatggaccgttgtctgtgcatgcctgacttttttttttgttgt

SEQ ID NO: 65070 - DNA, 1906 bp, Homo sapiens
atgttggctaggctggtcttgaacttctgatctcaagtgatctgcccgcctcggcctcccaaagtgctgggattacaggcgtctacagttattcttgagaactacaagcaagaaaggaggggagaaccaggtcagttcaaggccactgggagaactgtcctgcaccgcctgcctctgaagcccatgatgtttctgctttgtgggacagttgttcaggtgcctgcttccccaggccttcccctgcgccttccccctctctcctacacacaccatctgactgtccttccagcacgtacacctccagatgcttgggttggcctgacccaaaacagtctactctcccggccaagccaattgcccctgggattttctgctcctccaagatcccgtgcatagccctggtggtggctcatgcccttaatccttagttactctagatgctgaggcaggaggatcgcttgaggccgaggagttcaagacctcccctctcccaaatatttgtaaatgaaattaaaagaaagatccagcccaagtgtctcttctgccctactgactcccacactcttaaaacagatgacctcacagcactgaggcggacggctctggtgtccagcaggcacggaattaatacgccttgcctgtcctggccggttggcttgcctctctcctgccagaatgcaacctggctttatgcacctagatgtccccagcgcccagttctgagccaggcacatcaaatgtcaaggaattgactgaacaaactaagagctcctggatgggtccgggaactcgcccgggcacaaggtgccaaaaggcaagcagcccgcctcgcggcctggggaaagaaccgacaggaggccgcagtgagcgcccgggcgcccggcaggtggcgccgcagccccgggcccgggccctcttgtcgcgcggtcacgcagcccctcttccttccgccggctgcgcactcacagtgatccctgcgcgcgtctcctgctcgggtcagtgcgccgcgctgcgctgggcgccatggcgctccccggagcccgggctcgcggctgggcggcagcagccagagcggcccagaggcgccgccgcgtggagaacgcaggagggtccccgagtcctgagcctgcgggccggcgcgcggcgctttacgtacacgtgagtaggggcgggggcggagcccacggtgtgtggccgcagccctggccgtgaccgtggccgtccaaaacccaggtggcggtttgtcactctatgaacccgcctgccgtgtttccgtgcccccgtacgaggtctgggatgggaccctgtgctttggcagggaaatgacttggtccagaaacctgaagtctctgctactcaccggctcggtgactctgaccaaatggttcaaatttcataacaattttcctcttagcaagacaaaattttcttaagagcagtgttctgactcggtagctgggaaaatggctcataggaaaattgtatgaaaattatatgatcccagaaagagcttgggttgaattccttcctgacgtctgctggttggaagaggcagcgtaacaaaggagtgagcctcagttttctcacattgaagtggatgtaataaccccagtgcgacctgccttggggagttgtgtggcttagatgtcctagctactgtggaaagacctcgggataggggtgggggtggggttgggggtgtgtgcgactgaaccctggaagtggccagggcagctctcaccgcgcacgtgcactcactgcccccagtggccttactgcgagaagcgctgcagttactgcaacttcaacaagtacatccctcgccgcctggaggaggctgccatgcagaagtgtctggtgaccgaagctcagacgctgctgcggctcagcggggtgcaacggtggg

SEQ ID NO: 65071 - DNA, 1054 bp, Homo sapiens
agctcgcagctgagatgtaccagaggggccgggctgtccttcgggaggctggcttccaccagtatgaggtctccaactttgcccggaatgtaagttctggggctgatggctggaggtggaggatgggcagactgcagtgtgaccagggcgttgtgaccttctgaagagaaggatcctggccgagatggtgggacattctaacctggggccccttacctgagtctaaaaatgaggcctgccctcttcactctgcactatttcctccctccccgcagggggcgctcagtacccacaattggacttactggcagtgtggtcagtaccttggcgttgggcctggtgagtcccgtgaactacagaaagggtgactcaggagaggaatgtcgtggctgtgtgaacttgggccacattaacctctccaagcctctattttctcatatgtaaaatgtggcaaaaaataatacctccctatagaactgttgagcatgaattataaggggcttaatgttgcaccttgcactagggttctcagcctttagtgtgtatgagaatctcctggagggcttgttaaaacccaagctgctgggccccaccctcagaattcccaattggacagggctagaggagagcccaagaatttatatgtcttggcattttgggatagatgattaaaaaaaaaagaaaaagaaaaaagggcctggtgtcatgtgcctctaatctgagctacttgggaagctgaggtggaaagatcgtttgaccccaggcgtccaagaccagcctgggcagtatagtgagacaccacctcaaaaaaaaaaaaaaaaaaaagaaagaaagaaagaaagaaaagaaaagaaaaataatttatatttccagtatgttagaggcagttgctccagggaccacatgatttaaatctggtaaacacatagtattaacagccattaatgtggggatggttgttgatgttgtcaggggcccatggacgatttatgccccagggggctggaggccacacccgggaggctcggatccagacactggagcctgacaactg

SEQ ID NO: 65072 - DNA, 635 bp, Homo sapiens
ggaatgcctgttccccagggccctttcctttctccagcttcttcagctctatttaaacatcccttccttaggaagccctccctgactcccccacctcccacgcccgccgactcagggctggttgttcccccccaccatgttcctgtagttactctggctcagtctgtttcacggtcttgtttcccattgggcatgtgctctttaaagacaagctctggcatgtatccctagaacctagcacagtgcctggcatgtagaagctgcttaaacaatctttattaaatgaatatgcaataaatggccagtggtgaatgctctgcttcccccacagagattctgcactttaaccagtgtcttgtgaaaccctgtgccttcacccagaagcatggatcagtgccagcactggaggaggctggcaaaacatctagttcagttgtcccaaaccactgtgcatcagaatcacctagggagttgaaaaaagtacagctccctaggccctggctccatgcagtagtcaggaagctgtattcataaaactcccccaaagattctgaggcagacattggactaataacttgggaaccactgatttagtccaactgactctttctacacatggaaagcctgaggcctag

SEQ ID NO: 65073 - DNA, 1264 bp, Homo sapiens
agtgggtaggatttgagtaggacctagagacgaggaggctgcaaaaagcaaaccttgttagctggtggacctggccaaggtacgccttcgccttggatctcatttctcatttgtaaaatgggcaggggttggacaaaatgagctgaagctctggcatcccatgtccctagcatctcccagccctagatcccacaactctccctattcccttgagaagggctgtcctccccaggcaggggcagagcccagttttatgcacagaatgggtcctcccaaggctcgggtgcctgatctgcaattctgcgctccgccgcagggcgacgctcggagaccagccacactgtcccaagtcccggcgaagacccgcccgcggctccgtaggtgcccggcccgcccctcgcagcctcctgacttcccttcctgtcctcagcggccgggcccacggccccgagcagccatgctgggcgcgcgggcctggttgggccgcgtccttctgctgccccgcgccggtgcaggcctcgccgcgagccgcaggtacgggcgggcgagcgggcccctagggcactccctgcgcctgcctgcgggcccagtggagggtcttccggacaccggtccccagtgccagtctggaccacccctgcatgcctggcccttcccccaccccacctccggtctgctcctgagacctggctctggctgtaaggccctcctcccctcctctcccgtcctcatcccttccctcctctccccttccttccagtgcagtgccagctcctcagggactgttctgacactgcttccaggaagccttccttgcaccccagtgctggatgctgggtcaagggcctttctccaatagtaccctgtgccctgtcacagtcctttattgctgcatggacctttcgttatttaggtctgcctgcagtcccacttccaggctgaactccctgaggtctctgattccctaggtgtcctggagtctggcccaggacctggccccacaggagtcccagcaggtgggcgctgagtgagggagtccccatgtctggtttcctctgtttgtccctcacctggtcgagtcccagaccctactgatcttggcctgtccagccaccaacagtaggctgccttccagtggggccacacccaggcctgccagagagatgcctccaagcagctgctccaggaagggccgggggaggggcctggggaggggtaagaatggagccccaagaaccattctgcccattgtgacccgccctga

SEQ ID NO: 65074 - DNA, 795 bp, Homo sapiens
ctccgcctggtgcaggctggggaggcagggtctcttctgctgctatcaaagctttacagcttcctctagctaggcagctcagtgaatgggagtaattccagattaactcttatttctgctgacagctatcagccgcacattgaaagctggaaattggcataatgaagctgttttggttaatggggccgactgaggctgggggaggttgcctcagaggctgcagatctggatctgtgggttggtgggggaggggggaagtgtttctgggttttccttcctgaagcttcagcacggatttgccacacttctggctggatgcgtgacctgagctgtctggacttcagcctcctgccttgggggcgggcttagctgactggcattacaggcactgtccgatggggacctcgtccacctgcccgcaatggaattaaaccgtgtcaacggagtgggctgtgcttcctgaggatgagagtccagggctgggcgtccagaggcaacctcctggtggaggtggtagggtcagaggccaggtgctgagtggggagctggccccctgggcggtgatgagcgagcgctcaagatgtttacatgcactgctgctgctgcctgcctagcgggagccagtggaggagggaggtgtgaaggtggccaggggcaggcagacaggaagagggggagtggcgtggcccaggccacctgtctggtgctactgcagacaatattctcttgtctgaaatcttggtgccaagaggtggtgaccatgggtccagccagcctgtcacctagccacctccc

SEQ ID NO: 65075 - DNA, 9041 bp, Homo sapiens
agcccattttacagatcaggaatgtagagtttcagccttaggaggaggacgaggacgaggacactcacgtggggctcctcctggggcttcacctgtccttccccccccaaccctgatcaggctgaagcagagggaattcacacatgttgggtgcccactaagtgtgccaggaaatacgctttgcctaccctttccattcaatcctcagagaaccctgggaggaagattctcttctatgattgtctctattttacggatgtgaaagtagaggcccagagacgtgccgaggtgatgtggcaaggtcagggagccacagagcctaagagggcagcagtttaagaggacataagaggcccccgctggacgatgctgcggcccccacccccgcctcacgggtacacacccgcggagcacaccccgtgtgctccccgtgtggcgcctgccagtggtctctggaacctgatggggaagaggtcagcttcctgattgagcacagaagcccttcccattttacagatgaggaaactgacctccggagaggaacgtgaccttctcaaagattccttttttactaggaaagattgttaaatccctctccctacgtcccctactcaatgactcatcggccccacggacttgttcgggagtgggagcgcctgtgtatcccagttcccccttggaaatagactcgactcctggactgttagcctcggtatttagagagacatccccctggcttggcccaggggccgctcgcaggggctgtcgccgtgccaagggcccccccacctctgccccaaagtccctcccagggaggcgctgtcgcaacccgcgggacgggggcagggagaccggacccagaggcactggggtagggctcggcagggcgggtccgggcggagcgcggggtgcggagggcggaggcggctccggcgcccgctctgcccgccgctgggtccgaccgcgctcgccttccttgcagccgcgcctcggccccatggacgccctgtgcggttccggggagctcggctccaagttctgggtaaggcgcggggctccggggtcactgcgcgggggccagggtcggccggcttcgcccggtccccgccgcctgccttcccgcggggccggcaggtatcccgggacggagcccctgagacggcctgggcgcccgggagggggcgatgggctcgggagggaggttggctgcgccgcccggagccgggtcccacgcggtgtcggggacctgccctgctctgcccttcccggctgcagcactggggagcccgggaaagtgaggaagagtgcgcggctggggcgcaaaggcacagtgcgtggctgggtgagtcggctccatcccagcccctccgtcgggtgcggaaggggcgtttcgcaatcagccgcgggttcctgatggagggtcttccctcagcatctgcctcaggttaggactcggttgcccacctgggcatggattgcccccagggcatccagagcacctgctcaaccaggtgttttgggaggccggctgtgcagtgtcccacccttcttaggaaggtttcctgccaccttcttttctctaggtaagactgaggtctgagagcaggccatccccaccactccggactcagaagggagaagcagaccccagtctggagacaggtgcagggtgtcaggattcctgtagtccaactcccttctcacagatggagaaagggaggcccagagagaggaagggacttgcccaaagttacccagttcaatgaaggcagagctgggatagaaaaacaggctacaggccaggtgcagtggttcacgcctgtaatcccaccctttgggaggcagaggtgggaggatcacttcagcccaggagttttagattactgtgagctatgatcgcaccactgcactgtggcctgggcgaaagagtgagaccctgtctctaaaaaaataaataaataagaaaagaaaatcaagcctttggtgactctcactccaaatctctttctaagacaggctgctcttcagcctgctgactccagcctccagcacagttcaggtgagctaagtgcatacagcctaggagctttcttaccaacttgcaaaacttacttgcctctatgaggcaagtgatcatgtggtctccgttttacagagggagctcagattaaaggtgcttctctgtggtcattaaaggggtgtccagggcttgtgaatcccaatctctaagtcttttcctattttgagtatttgtacatatatgccctttgtgtgtgtacgcacacacgcaggcacgtggggtgttacccaagagttcgtgctgtgcacgtgtgtgcacaggtgtataagtctggagctatgctcttgggctgtgtttagaatgggctgaaggcgttatatggattttttgaaacttggggcaatggaggtaaaaaaaaaaactgtaaaaaggcatatttgggattctctctttttctgtgggtgacccaaaggttaatccgagatggtgcaacttctctgccactgcccttctttcccagtcccacaggaacttcatgtattattcagcatggacaggccacttgccaccagggtccagaggttgtgcctttgcctcatgagcacacttcctttcactgccctttgggccaggctggtatgaccgtggcaggtttgtggtgcctgggatgccaaacagaaaatcaagagggtagttgtgcccaagcttcaggcacaagggctcattgttcctgggtagcctcctgaaccctgagagcttaggactctacagagacaggtctcctggaccccagagttgggaaattcaggactccctttttgtcccatgttcagacatcctctggctctaccttaacatgggattgtggaatccaagaaagtgggagcttgggagtttgaagcagcgagtccaacccctcagtgtagagctggggaaactgaggccaagggagtgaaggtcacaggacaatcaaagacagagtgctgggctgggaaaccggaccccggggctgtggttacagggttgccattgcctggctgtgagcctttgagcctctgggccctctggcccgcgcacttctccttgatgctcgtgagctatacacacctcctctgaggatgcaggctcagtgggagtcagctcatctacattatgaagccctcgtgagatctctgcttggataccttaaatggcaaactgaccaccccccttcccaccccaatctctaaacatctttcacattctcttctggctcctgaaagctgttccaggctgcacccagtgtggctggtgactggggaaggagcgtggagagagaaaggaggctcccagctcatcctctgagggaatgacagggtttgtacagctgaaaggagagagagtctacactggaagctggatcctctgccacagcctaattacaaaaaaggcctggagttctgggctgttcatttgtgatgtgctgtgttgcatctcatttgcatggtgtattattaaggcacaactccccctgaacctttaccttaggggcctgtgggtgacccactttgtgggaagtggttcagggcagcccggaagtacctgaactaggagtgaaaatgcaaggagggggtggggtgttcaggcccctctgggccgctcatttaatctaccaagatgctcagtagctcatccttatagcttcagtttctccaccagtggaatgggaaataacccaacccctacccacctcacaagatttttctgatcaaatgagacagggaatgtggaatgattttaagaactaagaagttttctatgggtggcaagttctgacattccccggaagagggaggagaaagaaaaatggggttagaagaaaatgtcagacgtgggaagacctgcagggaaagagctggtagggctgtcgggccagtggctcccatttcagctgtttgctggggagctgggagctgttcctggctcagtctgagggtaggagactggagaggaccatgccccttgggacatgtgtacacacatctgtgtactcacacaccacctgccaggtgaatgatttgtgtgaatccttctctctctcacccatatcgactttgaagcaggttaccaacttccctgaatgtgccttgggagtttttgtggaaataaattccaaaagagtgaactgtgtaattaaaccacctcactactcaggaggccagaggtgcctcagaacaagggaggaggtgggatcctctgcctgcaggattcctctctgttctgaaccacagaggttgggagcacctgggtggtgaagggagtatgtggaggaagggcctggaggtatttaccccccgccagataaacacctgttggcagaattagccttgatctgacagccccaggaagcttagaaatctgaagatcctgaccatgaaagccatccaaagatggcaaggaccgcctgagaagtagtgagctccctgtcactggggggtatgtaaggacatggttagtgactgcttggcggagatgctggagagaggattcaagccaggaaagaaggtggggtcctgagattctgtgactgggtagagggaagatgcggccagtggggattcattagttcctcctctgagatttctggactcctccttccctggctctctccctgctctacatacggaatttgcctagaagcagctcttggtagaggcctctgggtctccccttggttaggcccacatgggaaaggtgacctcattgttcccttagctgtttacccatcctagggaggggcagatccctggtcccttggaggctcagctccctgtgtctcctgctctgttttagctagccccaattctgctattcaccagctgtgtgactttgggcaaatgactcaccttctctgggctccagcagggctgaggtgggctctggggcctgcttcaggtctggagttgcccaattttggaaggatgagccttgggcttgggggcgaaggctatgcatgattagggcccttcaaagcttagagctcctgggtatcagggtctcctctgccttcttagtaggcagccacaaaaatgtatgagtaatgggcaaggctcctatgccaatgtattttgactcacaaatgaagacagtgtcctgcacatccatggggaagctgagtgggaggtagacactcctccgcttagcagacaccatagctcaccctcccctcaggaacccagtcctccctgcaaggccagagctcccggggctcctttcctccatctcagctgctgcaagcaaacccagtgctggatggctttgacctctgagctcttggcttctggctacggcatttcattgcttgtggcctcaggctggcttctcctcaatcctgctgttcccccacttcacctgggccttaggtccctgagggccagagagatacggggaaggaagtgagtcagggaagtggcattcaggagggagctttgccaagcccgcctgtagtccccagacagggaaatggtcttgaaacactgggcaggcttccagggaggaaggacttggcagggatgaccagctgagccaccccggagtagggccagagcacccggactgtattcagtcctctccattggggcaggatccctggggagttgggggtgaaatgagacctggtatgccattgctggggtggctgggcccctccccttcccgaactgaagttgtttctgtttctggtactgcggtgcagtggttggggctggcagggggcagggtgggatagtgaatgagagcctaactctaggcttggattttggatttctccttttttttttttttgtgacagagtcttgctctgtcgcccaggctgaagtgcagtagcacaatctcaactcactgcaacctccacctcccaggttcaagcaatcctcctgcctcagcctcccaagtagctgggattacaggtgcacaccaccatgcccggctaatttttgtatttttagtagagacggggtttcaccatgatggccaggctggtctcaaattcctgacctcaagtcatctgcccacctcagcctcctaaagtgctgggattacaggcgtgagccaccgcattcagccagatttctcctaactggatattcaggtttctagtcaggggctcccagaaccccagctaggccactacccaggtgttagccgctctgctccctcagctctgtgagaataattgcaaaaagcaggtgatatgagaatgggctgcatggctgaaaggtgatctgggtgcaagtgctctatccccagggtgggacatcatgccggagtcctaccaggtgtacaggaaacactaatcctgtgggaaggagctgggccctggaacaaaactctctgggtctaatcccagcatcagccctgggtgtcagctgtcatgagcgtgaaatgatcatcctggcccacagcaggagctcagtgaaccaaagccccttccagaagcacattggccagttgagcccgtgagccatccctgcaaggggccagcaggcgcagcacaaccagtttttgtttgtttgtttgttgtgttgtgttgtgtttttgagaaggagtctcgctctgccaccctggctggagtgcagtggcgtgatctcagctcactgcaacctccgcctcccaggttcaaacaattatcctgcctcagcctcctgagtagctgggattacaggcatgcgccaccatgcctagataatttttttaaatatttttagtagagacagcgtttcgtcatgttggccaggctggtcgcagactcctgacctcaggggacccaccctcctcggcctcccaaagtgctgggattacagcacagccagtttttgacccctgcccccaggccttccaaaggctgagggagggtgagtggggatcagcacgtgtccttgctctctccacgccttcattgctgctgagtcaatggtcttgtctgttcatcccttccctatctgggacttcaggagctgccctgcagtggtggcttccttctccagtaccacacaggaatagggaagtaatgactcttctcatgacagagactgtcaacaggcctggggcccccagggcttgggaagtccctggcaaagctggggcagagggctccggggtcctcaccccccgcccccatcgcctgtatgagtctgcagtgatttcagcttcagtgaccatgaagtctgccatgagggggcctctgccacgtggtccattctggatgtgggaccttaccccttatcagccccatccagctgtttaatcgcattattaaggaagctgttgttgctgtggaaactgtgtgggtgatggtgggggagggggctgtgggctcagctctcacctcccagcagtgctcttcagagcgggaatgagaggagagccttgagtagggatcgtcatcctgccctgcagggattcagggagtgttacagggtccagggaataaccttcactggccctgtcctcaccttcattttacacataactgagttggagacccttctgggtgccaagaactgtggccttggtaccagggagagaacactgtgttcctgggcatgaagctgcagaggctgcggctggagttggcaccctccatttatctattcatttgtttattcattcttttgttcaatagatggttattgagtaccttctctgtgccaggccctgctctaagcaacaggaaataccatcaactgcagaatacagagctaaagaatctgtcttcgtggagcatatactctagtgggaagaggcagtaaaacaagaatcataaaggccaggtgcagtggctcatgcctgtaatcccagcactttgggaggccgaagcaggaggatcacttgagcccagaagttcgagaccagtctgggccacatagtgggaccccatctctacaaaaaaattaaaaaattagctgggcgtggtggcacatgcctgtagtcccagctactcaggaggctgaggcaggaggatcgcttgagcccaagaggtcaagattacagtggggaaaaaaaaaaaaaaagaacagttgaatgtggcactgtcatgccgttcaacctgtaatttgaaggtagaatggacagggtttgctgagagaccggatgtgggatgtgagagaaagagaagaatcaggggcaactccaaggactctggtctgggaagagagacaggaggaaggaactgccatccccgggccaggcaggctagaaaggcagggacggccaagagctcagttctggacgtgttttgtatgacgtgtcccatagttgatgtcctagctcagggtctggagtgaaccaaatagggagttaggggtgagggcctgtgtgggcgggtaccccctgcctcctagggagggccctgcccaggtgggacatgcttatctcaaggaaaggagcccaggctgaatgcccttgagggtcaaagcagccacccagttctcacagccccaaagtcccctggttgttgccacagagcaggtgtctgcgaaaccaaaacacgggcctgacagctggaggctccatcacccgcttccctgagtgttgtcccgttgccatcgaagtgctttgctgttcattctccctcaccttctccccgctgtggggaggtgaccagatgctgtcatcactcccattactcacaggtggagactgaggttcaagggcacgaaggggctcaccaacagttgcatggctcaaaagtggcagaagccatcctggattctccgcatcggggttgggttcttcctgtggccactccccacccgccttacagagccatgccaccggcctgcaagtgcacacagcgattcccaccatgtccccacgcctgggctcctgtcctcaacatgcacactcccttgtgagtcaatggccccgtgtggcatcacaaagcctgggtgcctgtcccggccacacactgctgggtgtccttgaacctgttgccaaagtgggtgtagtttctcttttgtacactgggcctaacagtgcccct

SEQ ID NO: 65076 - DNA, 4650 bp, Homo sapiens
catttgagcccaagaggtcaaggctatagtgagctgagattgtgccactgtactccagtctgggcaatagagtgagaccttttctcaacaacaacaaaaacagatggagacaccgaagcacagaaatttaacagagggcctcccagggtccccaagttggtggtggcagagctggaatccacatggagccggctggccccagaggttctcctcatatcactgcaccaccctgcctgactgagagggctgattccagggccaggagccagcacacccctgccaattctgcctcctcctgtctggaggcggcggctgaatgagatgatcttcccctgaggggtcttcccactgtcagcctcttatcaaggaccacaaacctgtctctggccaactgcctcaccaagagagctgacgctgagcatcatctttctccacccaattctgaccccaggattgaaccctccctcctcccatccacaatccaggcctaggagttcaatgtttgctcagcccggagcttccggttgtcaccagctgttggaggagcctggggctgggcatggttagcagtatcctggctttcatggcttggagcctccacgaagacctatgggcccccagtctgcctgctgcaccccctctcagtccctccatgccactccaccccctccctgttcagctgcccggtggctgtaccaacagccatccttgatcttatctaccttccctcttggcgtcctccctggagccagcactggggaggcggggagagggccagactggggggatagctgggttttagagtccttgtggtagcagtctggccaccccttcagatgccctctggcagctgaggacagagtcgcttgtgcaattcttatgctgtctgttcccctcccagctctgagagccaagaaaacagctccttcctcctcctcactcctagccagcccagcctagcccttggcttcctggagcccctgtccccattcctaacccactgctccttcctccctggaccagacacaaggcttcagcagcacctgggaaaaatgcctccggcgaggacgaggtgctgctgggtgcccggcccaggccccggaagccctccttcctgaaggccctgctggccaccttcggctccagcttcctcatcagtgcctgcttcaagcttatccaggacctgctctccttcatcaatccacagctgctcaggtctctccacactccggctcactatagccctgccctgggcagcagggctggctggctagcccagaggaaggaacaacgtacagtgaaaagaaccccagaccaggaaccagggaggctagctccactttctgtgtgacctttggcaagtggcattgcctgacttgtttcctcactcacattcaacttagaattgctgtgcatatactatgtgccgggcaccgtggtgtgtacgttaacaagcattgggtctttaaatcttcccaacaatcctatgcggaattgccccattcccatgtcacagatgagaaagcaggaactcagagaggtgaagtgacttggccaagggcacacagcaaagaaggaatcaggtctgagtccaggactctgagctccgactgaggtgctctgtccccaccatcaggctctaacatctgtctcaggaatggcttggactagaacgagctctcaaatgagagggtgggaaggagagctgcctagtagctaagtccccacctccttgcccctccgtgcatgcattaatttgttcagcaaacatttattgaacctccagggtaccagaatggtgctcgatactagggatacagagttcaataagacagggtcttgatgtcttatgggagaaaccagcgtgtaaatcaattagaattcagtgggggcagaagtgttctcgggtgtctggaaaaccccgggaggggcaaagaagccagcctgggatgcagcaggaagcacccactggcttgggaggtcaacgaatttggagagacaagtaggtgaagaaacaggggaaagttcagcctcagcttagtcacaaagccctgaaacagcatgactcaggtgtttctgagtggcagaggaaatggcaacgagagggaggggcaggaaaacagagagagggagagctaaggatatccttgaaagatctgagccagggaggggcatctggcttcaaggatctcctgccaggagtgtgggggatgtagggcagggtggctggatggaagtgggccaacccggtcagatggagtccaggccaggaatgagacaagtattcaggagcaatttgggagatgggcgtgtgcgccagagagacagaggagtgccaggcaacctgggtgctggcctgggtaactggaggacgatggatcttttgctgagctgatgggctcggtgggaggaggaggctgggtggggggcaaggtggtggatggagtctggtcatgtggggccagtggtgctggtgggtcctccaaggggagattcccagctagctggaagtcaaactctcgagcccaagagtttgagaccagcctgagcaacatagcaagaccctgtctctacaaaaaagttaagatattagccaggcctggtggcatacgcctagagtcctagctactcaagaggctgaggtgggaagactgcctgagcctgagaggttgaggctgccgtgagctgtgatggcaccaccgcactccagtctaggtgacagagagagaccctgtctcaaaaaaaaaaaaaaaaaaaaagagagagagagacaccagtcactgggctggggccactggggcccaccctactccaatatgacctcaccaaatgaggccacgttcacaggtaccaggtgttgggagctgaacatatctttctgggagacacaacttaagctatcacagaaggggaggcctggctatgattatggctggagggctccatgtagtcgagaggagagtgtcccaacaatgaagagactcggtcatgtcaataggtgaaggtgtagagcttccagcagaggtggccagggtgaagctcagcggcaaagggggcaacagcgcagcaagttcctgaggaggcagaggaaggccagggctcgggggcaggggcagcctccgacagcctgagcaccagaaaaaggaggacaagccactggagggcagtttgtgagtggcaaggagtttgtgggtggcagggagttctcaatgggtggctaagcaagaaggcaggtagctgctgagaggggtggggggctgggatgggcctgaagggaagagaagagaggtgaagaaggccccaagagcgggggcggattagggacctagagaaggttgctaggcagtgctgggggccactgagtttggaaaggtggatttgagcggcaagagtctttgtggtcatgtggcggaatctagagcccccagcagcctaggagaaggagcagggaagtccagtcaatggaaacgtggcatttcttcccgccatatgtcaggaggtaagaaggcaggcaggtgaggctggtggtgagagcgtcatcgatagggcgtgcagcagggtccatggtggatagagaacgaggtgaaggcagagtggagccaggaggtcgtggtcttgaggcagtactgggttgaccctccctggcccaagaggttggagggggtggaggtttcagaggccaggggtgcagtggagactgcgggtaaaagcaaagggcagcagaggagggagcagccatgggggcagcactgcccacctcactcctctctcctccccacagcatcctgatcaggtttatctccaaccccatggccccctcctggtggggcttcctggtggctgggctgatgttcctgtgctccatgatgcagtcgctgatcttacaacactattaccactacatctttgtgactggggtgaagtttcgtactgggatcatgggtgtcatctacaggaaggtcagctggagcagggcccaggggaaaggctggccctgggcagcttgcaagaggctcgcagccaagtccacccactactgtctacctgcaggctctggttatcaccaactcagtcaaacgtgcgtccactgtgggggaaattgtcaacctcatgtcagtggatgcccagcgcttcatggaccttgcccccttcctcaatctgctgtggtcagcacccctgcagatcatcctggcgatctacttcctctggcaggtgactctccaaccctgacctctgcctccttcctctgacatgctgcagaagtggcaagagaggattattctggaactgggagcatggcacatgcttgtagtcccagctgctcaggcggctgaggcaagaggatcacttgagcccaagagttctggctgcagtgcgccacgattgtgcctgcgaatagccaccacactccagcctgggcaacatagcaagaccttgtctctaaaaagaaacaaagaaaacagaaaaaaagaaggagggttattctgggttagcagaggggatatagaattgacacaagagctggctgggcacggtggctcacgcctgtaatcccagcattttgggagaccaaggcgggtggatcacgaggtcaggagttcgagaccagcccggccaggatggtgaaaccccatctctactaaaaataca

SEQ ID NO: 65077 - DNA, 2129 bp, Homo sapiens
caataataataagaagaagaaaaagaagtagtaggagaagaaacccagggcaggggacagaggatgctgcctggggaggccggtgcagtggcactgagggtggagatggatcttgtcaggcagaggacacagggaggcaggggctgtgcattccaggccaaggcacagcacaggcccagcaaggagttgtgagaaggaatggtgggcagcgtggaatggctgcaatggatgagaatggatggaaggtaggaccctgtgagcaggaggtcaggggagggagcaggtgtgccactgacactctttctgcctgcacaggtaaagcaaatgaaattgaaggactcgcgcatcaagctgatgagtgagatcctgaacggcatcaaggtgctgaagctgtacgcctgggagcccagcttcctgaagcaggtggagggcatcaggcagggtgagctccagctgctgcgcacggcggcctacctccacaccacaaccaccttcacctggatgtgcagccccttcctggtgaggcttggcacagggctgggtccctgcctccagggctctgggtgcccaggcatggccagggctcattggactctaccctgacaccacctccacgctgctcaggtgaccctgatcaccctctgggtgtacgtgtacgtggacccaaacaatgtgctggacgccgagaaggcctttgtgtctgtgtccttgtttaatatcttaagacttcccctcaacatgctgccccagttaatcagcaacctgactcaggtaaccctgggtagggctgggggctctactggagttggaacaggttgttggggtcagggaagggtcacttagggcaagggataatcagggggagttattggattcagggaaggttgctagcattatgaagagctattcaaggttgaatgaggtcattaaggtcaggggtcatttggagtcacaggtggtcaggtcgggtgtctggaaacctgagttctgtagatagcctcctcttaccaacctggactttctctttgggcagtgggagccatggaagactcagtcgtgggagggaccccagtgctagtgtctgggccctcagggggtcctgcctagcccaggatgctggggatggggcgagggtaggggttgggggttgggaaagtacagtctctagggctgactcacatcctcccgtaggccagtgtgtctctgaaacggatccagcaattcctgagccaagaggaacttgacccccagagtgtggaaagaaagaccatctccccaggtctagagagcccctacctgggctgcctgccccagtccttgctccagaaaaacctctgtttcaagcttttcctttgttctctcctgaccccttttcttcttcctctgttcacatctgcttcgactctgacctcctccctcttccgggttctctgctctcctccgccctcctccacagggctccccacatccctttcttcctcccttttcccaaggatcccctccccatggcccaggctcctcccctgtcctcctttcccctgccccccagcctccctgcaggctaccccatcccttgagctccctccctgaccctgcccaccttggtcctctcaggctatgccatcaccatacacagtggcaccttcacctgggcccaggacctgccccccactctgcacaggtaccagcttctcccactcccttcccagctgcccacggtgggctggaagttcagatcaatagcagcaccctgcaaagcctttgaccaagaatgcaggaagagcttcagcctgccaggggggtgtctggaagggcggagggcttggttctgcaggtggagggttggagaccaaaaccctgatccctgcctctaactggactcctggggtccttgcccccagcctagacatccaggtcccgaaaggggcactggtggccgtggtggggcctgtgggctgtgggaagtcctccctggtgtctgccctgctgggagagatggagaagctagaaggcaaagtgcacatgaaggtgagagaggcaggggctcctgggcagggtgtggggctcagccaggccttgggcaagccccgaggtaaatttctcctgtggccagggctccgtggcctatg

SEQ ID NO: 65078 - DNA, 935 bp, Homo sapiens
tcagtggaaaaaataaagcggggaaggaatacaggaatgcctgcagagttgaatggttaaggtagcttgggaaatcctcactgagaatcagagaactcaacaaagagaccgagtgagccttgtctggagccagaaagctctgtctggggccatggaaccctgtatggggtcttggagttctctggcatgactaggagttgggaaatggagggaaaagatagagagaggcagaaccctgattaccttggttaagattttggcctttactctaaaaaacatggaacactggggaaaatttggggctttgctttttaacaatttttaactgtggtaaaaaccacacataacataaaatatatcatcttgcccggcatggtggctcccagcactctgggaggctgaggcaggtgtatcatttgaggtaaggagttcaaggccagccttgctaacatgataaaaccccatctctactagaaatacaaacaaattagccgagtgtgatggcgtgtgcctgtagtcccagctactcaggaggctgaggcaggagcattgcgtaagcccaggaggcggaggttgcaatgaactgagattgattgtatcactgcattccagcctgggcgacagagcaagactctgtcttaaaaaaaaaaaaaagaaaaaaaaacttaatcatttcttagtgtacagttcagcaatgttaagtacatttacattgctgtgcaaccgatctccagaaccttttcatcttgcaaaactaaaattgtgcctattaagcaactcctcattccccactgcccctaggccccagtaaccaccattctattttctgttcctaggaatttgactacttagtatcttagtccattttctattgcttataagagaatgcctgaaactaggtaatttataaagaaaagaaatgtattttgtacagt

SEQ ID NO: 65079 - DNA, 1023 bp, Homo sapiens
aaaaataaaacattttagtcagtagccaggcatggtggtcctgcaatcaatcctagctactcgggaggctgaggcatgagaattgctcaaacgcgagaggcagaggttgcagtgagccaagatcgcaccactgcactccagcctgggtgagtgagaccccatctcaggaaaaaaaaaaaaaaatctgccatcccaaataacagtggacaggccgttgtctccctgtgcctgtctgaccccatttttcccaccccccgcctccctccagggcattaacctgtctgggggccagcggcagcgggtcagtctggctcgagctgtttacagtgatgccgatattttcttgctggatgacccactgtccgcggtggactctcatgtggccaagcacatctttgaccacgtcatcgggccagaaggcgtgctggcaggcaaggtgaggcctgccagaggctaagggggctaaggtgagatctgaggcccgaagagagagctggtgagaggctgaggggtttggatgagacttggaggtgtggggggcgcaagaagtgggcatgtgggttgggcatcaggagaaacctgtggggacaactcccccacctgcgaggttctgagcaggctgtggcgagcacagggtgagtcacccatgtgcctgtccaagctccctggcacatgggcacacttcacactcactctgtggctccgtgcctgtgccaggggtgtgctggagggtggtaggggtgagagcctgctgccttctccccagacgcgagtgctggtgacgcacggcattagcttcctgccccagacagacttcatcattgtgctagctgatggacaggtgtctgagatgggcccgtacccagccctgctgcagcgcaacggctcctttgccaactttctctgcaactatgcccccgatgaggaccaagggcacctggaggacagctggaccggtatctgccatcctgggccctctgattcccatgccttcccagcattccccctgtctggggtctctga

SEQ ID NO: 65080 - DNA, 953 bp, Homo sapiens
ggcactgctgattgaagacacactcagcaaccacacggatctgacagacaatgatccagtcacctatgtggtccagaagcagtttatgaggtgagttcctgagagctcccagccctcccggaggctgtatcaggcctccccaggccctgccagatggggtgcaggtttctccctgacactcccagcctctgtcctggggggtgcttgaggccccctccctgggcctgaccagctgcctccacagacagctgagtgccctgtcctcagatggggagggacagggtcggcctgtaccccggaggcacctgggtccatcagagaaggtgcaggtgacagaggcgaaggcagatggggcactgacccaggaggagaaagcagccattggcactgtgagtcggtggggcaagaggggctggaggggatggacaggcaggccccagcagccccagggtttatggagtcccctgtccctgactgccatggctgctccctacaggtggagctcagtgtgttctgggattatgccaaggccgtggggctctgtaccacgctggccatctgtctcctgtatgtgggtcaaagtgcggctgccattggagccaatgtgtggctcagtgcctggacaaatgatgccatggcagacagtagacagaacaacacttccctgaggctgggcgtctatgctgctttaggaattctgcaaggtgagcttgtgggggtgtccagaaggggctccaatatcccttcttctctgggctgccaggccccccaaaccgtgcccttgcatccaagcctccctaacccactctggtcaacccgtgtctctgattctgcccctttgtgcccgctcactagtccaggtgagccagcgccctctgccttctccaacagggttcttggtgatgctggcagccatggccatggcagcgggtggcatccaggctgcccgtgtg

SEQ ID NO: 65081 - DNA, 3806 bp, Homo sapiens
accccttcccccgagacattctgccctggtctttttgcgcagctctaattacatttcactttttctgtctcctccggggtattttttgtttctgccgagtggacactttggagtcagattagtggctctggttcctgcttcaacagaggtcttcgtgattggcaaagctgaggtttatcactcccctacaggcaattttctatctctttggccattgtgtcctctggggagctggaaacagagtgggaatgctgccaccttaatccctctcttcttccctggacctggggcctatggctcctcatagggcctaagctgcctccctctgaggccacgttgtatccccaggaccccatcctgttctcggggaccctgcgcatgaacctggaccccttcggcagctactcagaggaggacatttggtgggctttggagctgtcccacctgcacacgtttgtgagctcccagccggcaggcctggacttccagtgctcagagggcggggagaatctcaggtaaacactgggagtgcagaggtcaggaactgcaaccctccctgggaaaccctggcgggtgctgggaaacctgacaccaatgacacagagatgaggccagcccggatgtgcacagggctgtcctttcgtattgagcatattccgtgtgccaggcatggtgtactgccccgccgactcctcacacaagccccagcggtggtccatgatcccacttcaccggtcagggaactgaggctcagagatggtaaagggcttgacctaagttgcacagctgggagaaggcaggtctgggatttgaaccagctctgggagattccaaaaccctttgaggaagccctctcccctccagagctttcttacagccccagattttatgtcctcagccactgggctatgcactggaggggccagtagtcacctcttactgagtctaaaggttggagatacctatacctgtgctagctgtgtgatttggggctagttgcttaacctctctgtgcctacttttctttcactctaaaaggcagataataacagtccaaacctctttgcattatgctgcccaataaaaaacaaagcaagtcatgcatatgaagctaatgtttttttcttatagccacactttttaaaaaggaaaaacaagcaaaataaactgtaatactataacttatttagcccaatatatctaaaatattatttcaacacatcattgatataagtattagaaatattttgcgtttcttcctacaagtttgaaatccagtgtatatttcacatttacagaatgtctcaatttggactagtcacatttcaagtgctaatagccacatggggccagtggctaccacctggacagagcagtgttagggtcagtgtgatgacaggaaaagcgcttcgcttggatgctcctgtaaaatgtcagcttttcccctcctcccttccctccatcttctcctcctcctcctcctcttccctattttcatttttatattcagtccatactcatgcaccctccccagacctcaaaaactaaaacaaggccaggcacagtggctcacgcctgtaatcccagcactttaggaggccaaggcaggtggatcacttgagggcaggagttcaagaccagcctggccaacatggtgaaaccctgtctctgctaaacacaaaaattagctaggcgtgatggcgggcgcctgtaatcccagctattcgagaagccaaggcaggagaatcgcttgaaccctggaggcggaggttgcagtgagccaagatctcaccactgcactctagcctgggtgaccgagcgagacttcgtctcaagaaaaaaaactttacatttgcccagcacttaacaatattcaaagcactctggcctccactttctcctttaatctttaccatggtcctgtgggccagaaacgagcctccacggtttgaaatgatttcctcgcagcagttcagctggtaaggggcagagcggggactctggctctgtcccaaacctttccttgctgtatcacagccacctccctcacctggacaacattccccaaggcccctcattatcccaagggtgggactcccttgccacccacgcagcccttaagactaaatatgcatcttaagtggctctcacttacataaccacgtgggggtggctggcggacaaacatggtctctccagaccctgtgccccatgactgtctcttgcttgatccattcttctcacctgcttgctctcaacacttcccccagagcatgccccaccccgacacatgccgtgatcagagacagaaatcagctcccctcctccctcactgagcttgtagccactttaagtataacctgtgtcctgtgccagttccaccataaatcagccctgagttctatccggcggcttattctgctgccaaaaccttcattagttgcgggaatgggccagggagagagcccggactttactccggctgtggtgactcacgcctttgggaagggctgaggtatttgtccttggatgtggggatgctgtggcctctggttgggaacacagcctcgttttgtctgctggctctggcttccagagcaggaggctgaaggcgtgtgtcctgctcctcctttacctcctcagtgaccagacacaaagagtccccgggtgttcctctgccctgccattttcttgtcccagaagcagagccctggcctgtattccctatggggtgggaggtgactgcctgaattgtgtgatattaggctcagcaagatggcatcgtgtggcctatttgcaaatatccaagaagagccatgcaagtatgttcttactaaggtgtaaatggctgatagagtgaagcagagaaacatcacggcactagctgaaaagcaaggatggggaagaaagcaccgagagaggaggccaagggtgccaagagcagaccagggatttcacaatgccttttagcactggctcattccccaaggcccctcattatcccaatggtgtccagacctctgctccgttctggagggctgggctgtggcagaaatgggagaagtcagacagaaaaccagtcctgggccactgaggagtgaaacaggtctgggaatgaggcccagaggcaggtgggaggcccccagctggaaatgcctgccttctccactcccagcgtgggccagaggcagctcgtgtgcctggcccgagccctgctccgcaagagccgcatcctggttttagacgaggccacagctgccatcgacctggagactgacaacctcatccaggctaccatccgcacccagtttgatacctgcactgtcctgaccatcgcacaccggcttaacactatcatggactacaccaggtgggacacggaaacctgagcaatggggaacctggtggggccacctggggcatcaggaatgggcagggcagattagggttatctgaacaaggcaatgttcctgggattgctagggcatggcaggcagagcagagtttcccaagatctggataaggggcagaccagagtggggtggcctgggctcaggggtggggtatacaatgacattttcatttttcttcttcttcttcttttttttttttgagacagagttttgctctgttgcctaggctggagtgcagtggctcactgcagcctcagcctctcgaagtactgggattacaggcgtgcaccaccacatccggctaatttttgtatttttagtagagacggtttcaccatgttggccaggctggtctcgaactcctgacctcaagtgatccacctgtctcggcct

SEQ ID NO: 65082 - DNA, 4882 bp, Homo sapiens
cagaatggacttgatagcaaacactgggggcaccttaagattttgcacctgtaaagtgccttacagggtaactgtgctgaatgctttagatgaggaaatgatccccaagtggtgaatgacacgcctaaggtcacagctagtttgagccagttagactagtccccggtctcccgattcccaactgagtgttatttgcacactgcactgttttcaaataacgattttatgaaatgacctctgtcctccctctgatttttcatattttctaaagtttcgtttctgttttttaataaaaagctttttcctcctggaacagaagacagctgctgggtcaggccacccctaggaactcagtcctgtactctggggtgctgcctgaatccattaaaaatgggagtactgatgaaataaaactacatggtcaacagtatatacacagtagtctttttgcacttgttcacaaggtttggggattaggatctttggaggaggccaagaggaagactttctacacatgtacatggttgtagttacctgaacttcagacccaagagctcttggctgcaaatattgccttcacagccaaaattccctgggtaattgccagtagctcctgctctgctgtgcagatattgtaaaacggtgagaaaggccctgaaatctgacctggggcctcttgggaaagctgctgtgaacacctccacgttaatgtcatccctcagccctctatgcctgtttctctagggactgagaagtgcatgatgcttttacttccttgctcatttcgaagtctgttccagacagttcctataaccagtgaggcctccaagtcattcattttcctcagtctagccaaagctgaatgtgtgagcacaaagaagccgagaggccacctcctgcccagagagaagccacccacactcccaggttggcagacaagatgtgaggggtgaattaaatttgttttcttgagcaagccaacaaagagtttcttttctgcaggtcagagtccacctggctggcaccggccttctatttggaatggatctcttctccttgttcctaagtgttctggtctcctctgtctcgctctcatttcctctatctttgtcttggtatgatgtgagtggctgtgggtgatggtggttttctccccaaccctaaatggcttgcagtagatatggatggaggtggatcctttgactggttttttctatatgctctgggtcagcctgtgctgcaggaccatttgttaaaggttaatcacatttttttggcaggctgtttctgcccaggatgtttatgagtatatggaagatgacttccatccttgtgataaagcaagtatgaaagcacaaatgcccaaattatcctgcctctccttggtgctaagaaaaggtctctgctatgctctctgatttattaggccaatttggcttgacgtctgctttgtgaggtgctagctggcctgaaccaacagaaaagcagactcattcagcatcagtatcagctaaagatctggaagtgtaaggctgtgtttcctctcctgtcttgggactttgcttctgagctcattgaggccctgacaggtgctgacaactcaaaggagaggctcagttgggtaaagtaaataggataatcaaaaaatgtggttaataggggatgacctccatctaactggctcagctactccagggaaatgaagccgactgcgtgaactggaaggaaagacgccgcacaaaatatccgtccccaggtgctactgacagggtatgaacgggatgtggaggaggctcaggtggagagagggcccttctaattttcctgcagagcttctggtctctgggactgtccaacaatttgaaccccctatgattagaactgtagtgctgtttaggaagccaaaatgaaggcatataggatcggtcagttaatatttaattttaataatacttgttatgtttgaacagtcagcaatgcacaaagaaaaaatcttcagtgaatgtttacacacagtgtgaacacatgctttaaatatgcagtggaggaggaggggtgaattcacagttaacaaagctaaaaaaaaaatccttgttataaattacacaaagcatataaaaatatttctctgaatgcatagattaagactttaaactcacctaccagcaactgtgcagtcttattccactgcgatacgcagtagtcagttgaccacagaggattttataaaggagaagagagaccagcataggacagagatacatcaaacccacctctcaccagagacaccagtcccttgcttgcctctgtcgctaagcccagaacatgccctgcagctgctcctctggaggccatctcccagccaggggctccactgctccactttaattaatctgggtggctgaaagtgttttaacccaagtaacttaagacatgaattaatagtgaatttatttcctctaggacagaaccagacttaactttattagtaaactgtaactgttttagaagtaaagaaaaaaaaggttactacatctagttaaattcacttccgattggttgaaacacaagggaggggctgggccgggtggctcacacctgtaatcggagcactttgggaggccaaggcaggtggatcacttgaggccaggagttcgagaccagcctggccaacatggtgaaaccttgtctctactaaaatacagaaattagctgggcatggtggcacatgcttgtaatcccagctacttgggaggctgaggcaggagaatcgtttgaacccgggaggcagaggtttcagtgagctgagattatgccactgcacttcagcctgggcaacaaagcaagactccgtctcaaaaaaaaaaagaaaagaaacaccagggaggtttcttctttaaagcacttgagagaaagagggtaataagtaaccttcactctgctatgcaaacactgtacaagggtgagtaagtcaccagcagtaattggtgggatacaattaagtcactaaacagagtgagtccatgaagttagccttgaaaaacatctcaacctcatttcagcatttaggcagcagcaggaggccattatcttagcacaacattctcttctgttgacatcttctgcacgttctcactcaactgtagtgttctaataaaattaagttaacacagttaggaagttgagtttctttggaaactataggcactatggggaaaaagcttcttaagacagcagggatgctcttcgacagctggcttcaaacccctgctctcctgtttgtctaagtgtgctagttcttatttctgaagttaagctgtttgtttcaacaaaacagtggctgctcttttaacattaatgacactgaaggaaaggaaaagaatccttgaatgcattcttctaaaaaattcctatgccatactcaagagcttaatcaggtgttttgtttctatttttcagaacaaagtctggtagactcataactgactttgtgaagtgaattggtggtagtagtagggggatcactaagatcaaacaatttgtttacaaaagcaacagatttcagaattgtgtaaaaatcctaataatttcaaaataacctttatttttgatacaaaaataaagatgctaactcctttagctcagtttcccacaataacctttaaaatagcaacagattcagtctcaaaaattgcttttcatttgtagtggaaaatgaaagtggagaacatggaacagcaatatttgtgctcttctcataggatgcagttacacacacatatgactggaatcacttcagagtaaaaaaaaagtgggctgggtgcagtggctcacacctgtaatcccagcactttgggaggccaaggacaggagcatcacttaaggccagaagtttgagaccagcctgggccacatagtgagaccctgtctctatgggcggggtgggggtggggggcattgtaaaaaagcagttgttcttttagaaggcatcagagagccctctagtgaccacgaaggggagttaatgcagagatgactcgagacagagaagcagtcatgagtgtttacaaaggaaaaagtgagggagggaaagctcttttggttaacagcatatttacaattagttaactgtattcttaaatacttttaacctgagtaacatttataaatatgttataggaaacctcacagtcacaagtcacactagaatccatctgtccagtatctgtgctttccccacaccagaatccatctgtccagtatctgtgctttcccgagtcttcctctctcataagttcccaatgtcagcagagttgtgagcatgcaacaccaagaaaaacgcatcccagcccttcaggtgcactgtcaacaggagtggctagaaataggctccgctctctctcagctgctgcttagacaactctcttacattctggacataaaacacactggatatagaaccttcagcttctgcctctccagaccacttctcagctgttcaaagcttcaagcaataggtttactgtgcaccaagaggcttggaagagtggcaccactgcttgggggtcaggggcttcctaccttggcagaatgatgttagtatatactatgcagtggcaccagaggccctcccgggcatctgaggcatttagatcaatggcttgtccttggcccagaggtgatgcacactgtcataatactcagtgataaaagtccctgctgcattagtaagtcagttttgaagctctcctgttatagcaaggcctttcagtcagtgtggatgcagcatttctgaacagaaaattattttcacttatcatcagaaccagttccagctcctggaaatcttggagtcgagcaacatccttgtcctaaaacaaaa

SEQ ID NO: 65083 - DNA, 2757 bp, Homo sapiens
gccaggaacggtaggctcacatctgtaatcccagcacttttggaggctgaggcgggtggatcacttgaggccaggagtttgagaccaacctggccccatctctaccaaaaataccaaaaaaaaaaaaaaaaaaaattagccgggtgtgggggcgcgtgcctgtattcccagctatttgggaggctgtggcaggaggatcacctgagccggggaggtagaagttgcagtgagccgagactatgccactgcactccaccctgggcgacagggcaagaccctgtctcaaaaaaaaaaaaaaaaaaaaaaaaaaaaagaaagaaaataatcgataggataaacaaatgagttttccctcaaacaggcaactacaggcagcagcagcaaatcggttgcagtgaaacaacagagaagcagaatggtgatgcaaatgtgtttttttttcctggtcttggctaaggaaatcgtgctagtttataaaattcatatttgctcagttgcttatgcttttagctctgcaagatgcgttctccagaagcacctacggcaaattaactcaacactcgaattggggtgagctccaacgcatagtcgctgagaatcactgcctccagcaccgctctgaccaagtgagccgggagcgcgggggaagggggtagggcaccagagtcccagtgggcgctgccccgagtggaccacgtgggccgggatttgggcaggacgcgctcccgaccgcacgaggcatgggggccagggctggcctcaagagagcacaatctcggaggcccgaggtggcaggcctcgccgtagccaggcgtcccgcgctgggcccaggtcgcgactgactgccccacgccttccgaccggctgccctgaccctaggcctcccccgctccccacttaccagccgttgacctcattttgggagttcacatccaccccgctctccaccagtttctgcacctcccgaatgtcccctaaggccgcggcctcccgcagcctctcctgctgctccttctgctctaggagggcgttcatcttcccacagccccaggcccccgcccaggcccgcctgccccgccccgcccggggcctgtcagcgccgccgccgtcgccgcggcccgctcccggccatggggagggagcgcggaactcgcccgccctgctcgcgccgctgcccgcgcccgccccgggacttccgctccctcccgcgggccgcccctgctgctcccggcccgcaggcccaggcctcctcccgggccgcgcctcccgaaggccggctccgggggaccctgttcagtgtgacaacgctgacccagatattttccgttccgacccggggctccggcgcccgggctggctgtttatgtaactactgcacaatattatatgccatgattcattgactatttttagacttccccaccccgcagtttcaagggaggaggacaagacacatgaaaagagaaaaaagcatagctgagggccagaaaagccttatcctctggtgcaggctgtttaccaggcatccaaaataattggtgggttctttttattgggatttggggtttttttgttattttcccccagtttggttggctccttttccttatctgagccaattcgtgcccagcaggatggggaaatgggctgaaaacgatcctactataatacgcccattattacagagatagattagactcttcttctttttgacagtgcttggggacaattcagttagaatatttatttcaattgttgttgttttacatctcattttagacaggatttcttctaacctggctttcaggaaaaatatttatattgtgctcacagtttatgaactgtaattactgcttacagattgtaattagttactcttcatgaaggccatataaggagaaaagaaaggaaaaacaccaaagaggctttggaggtgtcctggtcctgattccaagtgctctgggaagagctgtggtgtacatgtaaacagcattttgcttcacttcttgcccgatctatctaatgaggctcagagcctcagttggcactgttttatacccagtgggagaaaaaggaaatattgttttgttgagcccaggtgccctgaagagatcctccgatgtggcacaggatggaactttacagatggggtcaagattaaggaaatagccctggggaggaagggaggaaggcctgaacaaggagagatgaaataggaagggataaatttaggcatggagttttcatttccgtctcttggggctgctgggatctgcacagcaagcatttttcttgctacagtttaagaaaaaccaatgtctgtttgtttagtatgatacagtaattcacacagtacacagtgcacaccaggtggtgctgaatataaactgactacacacttaaattgacccccatggcaaattgtaaccctgcttgagcttacattttcatttgttcccccaatttaaattttaattctcacatccagcatgatactctatctgaaactgatgtgtatggcactggatttgagtccttcaacacaatttcagtgacatgggagtaggtagtggcttgttgtttttgtttgcttgtttttgagacagagtctcactctgttgcccaggctggtgttcggtggggcgatctctgagctccttgcaacctctaagtccaggttcaggcaattctcctgcctcagcctcccgagcagctgggattacaggcctgtgccaccatgctcggctaatttttgta

SEQ ID NO: 65084 - DNA, 1863 bp, Homo sapiens
ttgctcttgttgtccagactggagtgcaatggcgcgatctcggctcaccgcgacctccgcctcccgggttcaagcgattctccagcctcagccccctgagtagttgggattacaggcatgcgccaccacgccaacctaattttgtatttttagtggagacggggtttctccatgttggtcaggctgatctcgaactcccgacctcaggtgatccgcccgcttcggcctcccaaagtgctgtgattacaggcgtgagccacctcacctggcctactggatcaatatctttttaaaaaattccacactgggagacatttggtgtaggactgaatccccgtattttagaagccgccttgtctcttcttgcctcgatttcccatcctgttaatcaggagactcagggcgggaggacaaagccaggtgcaagaggcgtgagcacagcgactaggaaaatggagtcggaagccgtaatcttcagtttcctccgctgcatgaggcaccatgtgcaccacgtggactaaaggagacactttctccattttgaagcggtgtccaggcttcaagacctaggctccaatttctcaccgtgaagaagctcgggaaaaccgggcgcttggggaggcgcgcgggcagaggctacccgtccccgcggcctctagacaggggcggagtccctacccggcctccgcgggccccgcccccggacggcggaagccgagctcgccctctccgcccgggcctgggcgtgtcccacgggcgcacggcatgctgggaaggcgtccgcgcggcggccattttgtcttgtcggctcctgtgtgtaggagggatttcggcctgagagcgggccgaggagattggcgacggtgtcgcccgtgttttcgttggcgggtgcctgggctggtgggaacagccgcccgaaggaagcaccatgatttcggccgcgcagttgttggatgagttaatgggccgggaccgaaacctagccccggacgagaagcgcagcaacgtgcggtgggaccacgagagcgtaagtcccgcgggccttggcctgagcccgggctccgtgggggaggggagcgggcgcgggctgtggccctcctggccgcggcgcgatgtggccagggccgcacccggggtcgagcgtctgacccggtgcccatggagccaggagggaggatgctgtccggacccggggatgggggtgatttggttttgttgttctagtatcaagggggtccgggagagcccttggcataattgaaaagcaccttgatgaggcggggaaacgcgggaaagaaggatagcagcgtcttattaaatctagcggctccgaggtttcacctcattatgaaatagggagaagggcacatttttctatagtttgggttgaacgtcgtatttagactaaaatttctgaccaggattcatggtaaaaatcgtggcggtattttatttaagtaattacagcatgacgcttatacggggaaatagaaatgtaaaagaagtcgtttacttgttagggtttaccgtgatgatttacaagtattgttcgttaacagtattctaagaagtcccttatagaggcagctgtcaaggttttttcttccacataaaactcatttgatgctcttagcccggggagtaaaggtaaatattataaccccagtttcactggtgagacttaaaaaggctcacccaaagtcttggcaactgaggaaactaatctttgtagttctgttagctttccacaatcctatgaaactggttctctgcacctactgtagcatttcaagtgttttgatctagttttgaacatgcagtgtaatgtttactttaggtcttatctggagaatagatacagaa

SEQ ID NO: 65085 - DNA, 1599 bp, Homo sapiens
aaaggttttggtctttgtcctaaaacaccaccaagccattctggtttttagcagagagctgtcataatcagacttgcattctggaaaagagaaaagcctcactgtccccaaaagaatcctgtggggtatgcacattattattttcattttcagacaggaaaattgaggctgaaaggggaagtagtttgttcaggttggtaaatggccagatatggatgtgaccagggccaactacataatttgcaaagccgagtgcaaaaggaaaatgaagaggaagccaatttccccttctcacagccgctgctctaacccagggcaaatgggtgacgcccagggtattgcgacctccccacttgaacgcaccaactagctggatgggggtgggtgagagtgtccagggctgcctgccactcctcaacttctgatccttgttttgcctgggcaaaggtgacagcggaatgagggactctggcagagggttacagcagtggtggggctggtctgggtgtggagaccatatgtatgagctgaggctccaactcccaaccctggcacatgctccattgtcccatcggacaccacttacaaaacaagttcagggctaaaattatgacacatttcaagtcaacaatcacagaatgttgaaccccaagcccagggcctttctgaatgcaaggccctgggcagctgcactgatcacagacttatgaagtcagccctgtttgtgccaccctgccagatgcctccaaggagatgagacgctcctgcccaactcagccccttcccaggacaggaataatgtcccctcccctagtgagcggggatctgcagtcttctctttgcctttcaattctgggccctggaggtggctcagggctgtggctccttctcaggcagcccctgtagcagctgggccccagcccacctgccagtacctgacctgatatcgatacctgatagagataccagaacctgacctgaaacgaggccttcctgcctcactgctaactcacccaacacacagcccgagaactttccctgccctgtccactacgtttgaaagcattttattctgtggtcaatgtgtcagctctgtgaacggccagagtctcatagaggtcacaaagcatgccctttgcactcaggcagatttgggtctgaattcctctgccacttagtagctttgacaccttgggcaagttacataacctctctgatctgaaaatgaggttaacaatcctacctcaccagattgtaagaagtcaatgagaaagtacacagaaggtacaacttcctagcagttgtgagcaccagtaattgctggctgctattattatttattatagctatagacacttgcttccttctgaaaggacctttggtctagttgctctgctcttcactaccccactggcagagtggcggaggccacagggcactgctggccacagcatcacctgtgtcccagccttccccagccccctgtcccatcctccttgaggaccatgttgggaacaggactcccagactcacctgctggcttctccccgatgtcctgttccggttcagccatgagtcacctctagtccgtcagatgtg

SEQ ID NO: 65086 - DNA, 722 bp, Homo sapiens
gacacctcaatggtcccagcttctcaataaccctcagtcagtgtcaaagtcctaggcaggatgaaccaaggctgagttcccaagcaccccctgcaggaattggatctttggcccccttaggcttccatagggggaacactgcctccagcccatcttgagatttgtatcctcccctctcgattggtatttggatgacaagcaactaaaatcagcaaatgcacacatctctctaatttccctgaatgtgcatttgccaagaggcagtttcaaacctgcctcatttgagcagtctactcagagtgctgtttgtttatgccactcggagagcttgccaaatacagtgaagtcatctgaacagcctgagcgcttccagataaatacattggcctcctttccatggcccccatagtagctaacatgtactgaacagtgggccaggcactgagctcagcgctctacctggaggattgccttgggccttactgccatttttccaaggaagagactgaggcccagtggtttactagctttccccagttcacacaggtctagatgggaataacagggacttgaccccacacagcctgtcgggccctgctccctggtgatctaatggagcagacgttaaaccaataaccacaggattacgtacgtgattaaaaggagcactggaaagggaaagaacagggtaggaggagggaggatggcagagaagacaattc

SEQ ID NO: 65087 - DNA, 1199 bp, Homo sapiens
ctcgtccccaaggggaaatcttatactttctgattccacaataagttctgaggaggaggtgaggagggttgctggtcagacagacactggggaatctacctaggaagtgtcaatagccagttcagcacacgcagaagtcctggctggacagaggagggcccaggtgttctgcatgtgggaacacagtccttaggaacagctggcttggaggcgatgctgcctaagccagcaactttttccaggccccactggacggcacccaaggacgttatccaggcgaatggtgactccctgcaggatccattcattagccacatggggtggggggaatgacatggggtggggggaatcccacaagccaagggtcagttaccaggtgcaaactgtccaaggaacacctggagaactttcttgcactttctgacctccagggtctcgacaagcctgggcgtgccccagaggtccagtttttatgaatattggagctccatgctgttcatccaggaagctcaaagttaaatgaaacacctggggaccccacagagttattatattgtgggggggtgctagtctgggcccaggcaggatgccccattttctccacttcagggagcacctgggatttgtggtgggagatggagctgcccccgtgaggactctggcttgaaagtgacaaaatccaacatgagccagcttgggcagaaagggggaatttgctagaatcaaccaaaaacttcagctgcacacttggccgctccgcatgtgggaaaggctgagctgcagagaccctgcatcaggtagggttccgggatggcatggcagccccactagggccacgtggttggaatagggggagaagctgcccccaggaagaaagggtgttccctgaagagggcatgcggcagatcaagaggcaaatgtgcgcctcaccaaggaacttggcttagcgttgccaaattttctctgtgttggattagggtcaaactcttgtttgacttggcacagaagcttggaggcccgctggctgcatgactgcctcactcagagatgagtatggagggtctagagggggcgctgtggggctctggccagaaacagccgaaagtagaaaaccatccaaatatccaaaaattgatgaatgaatcaacacaatgtagaacctacaaacaacaggctgggcgcagtggctcatgcctgta

SEQ ID NO: 65088 - DNA, 2177 bp, Homo sapiens
ccacactctgtacagaatagtgatgctctctgaacagtcccaggtcacatgaaggagtttggccagcttgtggtggtattttcagtggatgacagagtgctcagccaccaagagaacttagggaagcctggggaagggcattgcccggggaagtgacccaggcgaaaagttatttgggaatgttaatttctggctgaaatttatacaaagctttcccttcaaagcctcattctttgatttatgttcaaaccggaagatattacaagcacccaaaaagccaaactggaaaaggaaactgcagagctccacagacttgttgccttggccaggggtagggtgtggcgatgggagtggcaactgggagtgacctgggggtgtctgagtttgtgcaatgaacacgcactttccaccaacaccaacttctggaggggtagtacctgctgtgagccctgacatcacaaaaccaaaagaggctttgtcactaaaggtaggaaaacaaatgagatgacccctagagggagcttctagcctgaggaagtttctagattaagcatgaaactgaaactgtcttaaaaggaaggaattcgacatccctctgacacagcctgacgcccctctcagtcccaccttttctttccttggacttcttactggtcctccccatctcactcctgggtttgatgaataaagaagttttaaactatttctctttcataatgtttctgtacaaagcttgaaacagtgaaaaaataagttaaaatgttcaaattcaaaggcaggttctcccaggagagatgggctggcagcagagcttctatttctgatttcctctgcctttttccccaagggttagcagcacacattcttcctactgtggctacatctgatgaagaacacacacacacacacacacacacacacacacacacacacaccaggaccaaggttttcctctcaactgcctgttcctccactggagctgggaatttgagggagcccaggcttccccgggtgcttccagtggacattgtacccattcttcatagctggatatctccccccagatctagcatccctaagataggcacagtctcacccttttttgttcatacccctacattttcctgtgtattatgattatttgggcgtgtgtgttatcgtttgctagaatgtaagctcctttagaggttccgaaggattgtatatatcactgccagttcctaacgcaggagatgcttaataaatgtgttgagtggatgaatacaggagctgtttttaatcatatctcaccttgtttgagaaagaatttagggacaagaatggaatctgagcccagggcagccacttgagtcaacatcacccttttgctatcacaagtactagtaaagctcaggacccaagacttcagtatgtgaagtgcctatagttgcttctcaacaaatctaatcatccagagagcagtcgcaatgtaagtaagtaaagctagcacgtagccctcaaactcatatcttactccattgtgtttttgcaaccgatttccctttcctaattgtgcctggcaaaggctgatagcaaaataagtttgggattgctgagcaaacaatcacaagtgaggtttgcaggagagggggactgggcacaaagtgcagcttagatgacttctaaataatcaggtggggctctttttataaaatcgaccggttgaggtcaaccaagggagcaggatagtgtaatggttaaggatcatggactttggaaacagaatcccacagttcaaatcctagctccgctggctgtgactgttgcaagctctctgcctccacttatatatctgtaaatgggagaaacagtacaaccttcagagggttgttatgaagttgaactgaatttaaatggggcagtatctagcacatagtaaattcatataagggttgccattattactactgagcttttggggttggtcattccctctggattccataagactttgtgatagtataaaaatcatccttcaaataggcagtgctttacgtaggagcagttccccatcctccttgaaaatctgggaaaaaaacacgcgcacaatctttgggaaatggcggtgtcagaacttctgcaaagcctccttccgaggaaactgatctccagggcaagttgtcaggcagtgtatgcat

SEQ ID NO: 65089 - DNA, 888 bp, Homo sapiens
ctggttagaatactgcatgttatttaagctaaaattcaagccatctacaaaagatttctcattgaggcctccataggctgcaaacacatcaaaggcattactgtactggagaggactgaggttaagggggctgtcacctgggaacattccattggtactactaccttgaccctgcatattaggaaaaataaattccttggcattaggagaaagagcagaggttttctgctgttgttgctgctgtggtggtggtggtggcggtggcggctgggctggctgctgctgttgctgtggctgctgctggctacccaagccaagcccatacagagagtgcattgaggaagagatggctttctgcttcaagaggtcattcacattcaagccgaggttgatgggagaagtacgtgcaaccttgttgctacggccactattcttcattttggtagagccgaacttggtggcagcaaaagtggcagtggtaaaggttaaaggctgagtggaccggggcatgaaggtagggcttacagcagcagagtgaccaaaaggaggcgatggagagctggacactgatgaggctgggtcacttatgggcataaaaacctgggcctctgggttaaagctgtttttgatctccttatccaactcacatccattttcattattatcatccacgtaaagcaccttcactggtcccttttcaccaatttggtaagaaacctcaaatgggtcgatccaaacactaagatcctgtggcagattgccacgaacatcatcaatgtccaaaccactctctttggatgcttgttcaatcactgggtccactttctcccctatgtgtatacatctaaaccccgatcctttgtatggcttttcaggataccagtgccc

SEQ ID NO: 65090 - DNA, 4381 bp, Homo sapiens
tttcaaaatgtctaagatcctgtgttagtctgctaaggataaaaagaaaaagaaaatgtctactaggacagaaagcctgaaaactgttactagcacaaaataaacataaaatagaaaatcgtttattaaagtttaaaatgacacaggaaaatgtagatttacaaatgaaataatgcttttaaaaacctgtttctgaatagagttctaagaagaaaaatctctagaacatgcattcttctctcctcagttctcacaagaatatttattgtactcagcatcctccccccacccccatatatatagatgccacttttaggtagtaatttttattgttattcaccaacttagaagtgaatccatgttttagtttactttggatatatactgtttaaatctgctctgtcactgacatttaaaaatttggttacgttaggaagatcattttaatttccatagtacatgatgctaaaattaaagacactgagtactaaatgaacttcatcctagtaaataattatgaaccaaattattctatatagtttcggccttaagtatactaagagcatacaatataataaaatccagcttctctgggccttttgttttcaatgtgtatttttctaaatctgaaaatacctattcggcagcaagtataacaaaagcaaagacacaaattaaaactattgattattctgtttaaggccagggtttctgagttttagtctgattttaaaaaacctccgtctgtccctctctccctccctccctctcacggtaacagccggagaggcaagtatggtaaggtcgacctttaaacgtttgctggatcagcactgggtggggataagaaaagatcaagggcaaacagaagatatttgcgaaagggatctatttgcacactgaagttgatttaaaagtacgtttaaaaatcaagttggtcttaattcgtctgttctattttccatattcgtggtgacaaagggaaaaagaatctctggctgcccccaaactacaaacactttccaagtcaaaagcctgagtgccggcagaggcagctgattaagcccaattgcttgaaggtgcagccgagcgaaattcaggctcggtggaaggtagttacaaagcaacgccttaagacaggcaggagtgtgaagaattacataaacagccagttagatctcattagatttctgctcacagccctcggagcccaagcgctacagcagcagcaacagcaagaggaggtggaggtggaggaggaagagagtacgagcctcctcggagaaggaggaggaaggcccgggaaatggaagagcaacctctcccggctgggcacccagcaccgagcaggtcggggcgccgggtcagccgctcccctcccccgccgtaacccgacccgctgctccccgccccgtggcccccgccccgggctcctgggagccggccagagcctgggggagcaccggttcctcggcaccattttcagcctcgcggccaccggcccctcgaaccccagcgttccaccgcgagctcgtcgctcctccgggcaccccaaccccccaattcccgtcagctcgccccgggccgcccgtccccggccaactgcccaggacgagcccgacgcgccggcggcccctcggagccgctcccctcgggtcctggcgctgccccctcggcgcccagggccgcgaccccgccgtccccgagctcccgagggcccagggctcgacgccgctgcagcccctcctccgccgcctgggcccggggctcccgtctcctcgccgaccccgcccggcgccccgagatacttacgggctgcttcggggcggcttggaccacagacccgcggctgggcggggagcagcgcggcagggcgggggcgcgggagggtcgggagcggcgagctcgccgagtgcaagacgttgccgctgcggggctgaggacagaggacagaggcctcgggcaggccttgggagatcgccgttagtggctcggggtggcgggcacgggggtcagacgagcgcgctcacttctccacacagcccggtgcccggcccagcgtccccgtagtgcgcccgctacacgccgggccagagcttcgctccttctgccgcggcgcgcgccccgcctctcgttttatggcctcctccccgcccccatcccctccgtcggggtgcgcgcgcccgctccgcgtcacacagctccggcggcgcagccattccccgcgctccccgcccggcaccccggtcccccgccggccggctccgcccctgccctgccccccgacgccattggccaagtcccgcctgcccctgtccggacgcgcggcggacgcaggggtggggaagccgcaccctccgggctccaggagggccaatgaaccgacgatcggagcactggggacggaatgaagagaacgtctggaaagggactgtgggggcagacgtgccaatgagagagaaaggggtggggtagggcggctgacgcccggtttaggcggagagcgccgggcagagggggagggggacgaagctggtggcgaagcggctcaggagaaccggggctggaggagcggcaagagtacccagaaagtgccctctccgcgggggtctgcggccaaggaggatcctgctcgtggaatagctaccaaatcggcctccagcccaccccaggggcggggtagagaaagggcaaactgtgaccgggacttgtgcacccgattaattgaatattaatcaccccaaggcctaggccaaccgccacccagagagtggcagctgcagaacccaaagacgtggagccgggctgggggtggggaagggaggccgccacagctcccgccccgccggcagtttaactgcttccgcagcctcaggcctcccggtgcgaccccggctgcgactcggatccgtttattccaaatgtcccagcccacgccgtgcccagagtgtggcgacacgaggccaaactgcgtatgtatctgtgtccatgtctacacacacacgcatgcgtgcatttctagggcttgctggatcgcaggtgcacagaataaacgcggtgcctgcttgtaaagcgcgtttaagatcattcttggctgaaatatgtgcgggtacctagggagtggggtaagagagggactcgtggtggggggcgggtaagtgcctttttcacaacctgccccagagaaatacacgaaattacatcgggagtggaatcgagcgtccctctcagctaaaaatattactcacaggtagcaacgacgcctgattggctgcgctggtcccttcgcaacgaggcgattggctgcctggtatccaggagaccgacgtcaaactcggactgggaaaaggggaaagtctggggggagcgaaggaggggacggggagaaagaagcaatgaatgaaacgcccatcgcctggccttcccctttcccctttcccctctcctctccattcttggagcacttcctggaaaaacaccagttggggcgccgccttcccctccaaacgttggggcctgcactctcaacctgctataaggaagttaaaccgcagctcaccgaggagtagggtgtctacggggcgggcccgtgtagaccagctgtgctcctcgggcacaaacccgccgtacatgccaggcctagaagcttttggctttgtggacgcaaaatctggttggagccgccttctccaccctgactctcccgcctctcctttttagaaggaaccgcactgagaaagggtatttctgaaggctcaatgcgtaggagaaggggtgggaagatgggtttgtggaatgggctgagggtggggagtggtcaggtgactgatttcatgtttattgtacagattcctaaaacatagttttactaagtgactccttaaattctgattaatgtgatttttttttttttttgagtgtttgggttttttagttgcaaacaggagtggaattgaaatgtgaaagtatggcaaaactgtgaaagcatttaaattaaaatgtcccttcctctgcattgaaatgtcatcaaagcgtcaaatataaatgatttgttcagttttctttttttatttgtttgtttttggttttctgtaatgacaagtccatctgtaataaaagtgagttatttttagttttctaattaagcacagaaatttcaagaaactagacaggatatccttggaatgccttaccaaaagaaacacttcatttttcacgtgttctagaagcacaacttcttttaccattaggcaaataatggtactgtaccaaacatctagaactgcgggaccatgtgtcttgattagtaattttatattgggggggcatattaggcatggctgagactaaaatgtctaaagatagatgaattgtaattttg

SEQ ID NO: 65091 - DNA, 1007 bp, Homo sapiens
actggggtaaacctatcagtgtctcccatgacttttagggtgaggaccaaagccctcactgcagtctacagaccctcgaggatctgctgcctgcctgcctacccagcagaaggccagagcttgcccaaccttcctccaccctctcttacttcctcaaatacaccaggttccctcccacttcagggccttctgctagtcctgcctgcagcctctcacttactcctctcacctcattcatccctagtgagcttagcatttggcttttatttcccttcttcaggggaagctgccccagtcctattacagcaaaccctcagctttttgctcccatagttcctatgcagctatttattcagtagctgtctccaccgctgagcaatgcagtcgaaagggataggatctgtgtctactttgttccttgcagtatcctgggaccccagcacagagcctggttcatacaggacttaatgaatgagtgagtgaatgaatgaatgagtgatcctgctgtattaccagacagatcgtggtaggggcaacagttgctgtgaggttttgggaagctgtctttgcctgggaggtggggaaggcagggcagagcctaaagaagccttgaagggagagtgttgcttcatgggcagggaaaggaaaatgacattccagactcagcccctacacaagtgtgaggcagactcccatggttgtcaggtcagagtagggagaggcagagataaggctgcgattgtgggtgagctcagcctgggaggagctctgcataccaaaataaggactgaaccttgtgtaggtagtgggggaacctgggaaagtgtgttaggcaatctttccccacccccttcctctttccacctctcccctgctttccttcctcctggagatagggagcaaggtctccaggggccaggcaggtgcttctggttggaaaggccgtgaccaggacttgttgggtccatttgactcaacggacccctttcttggccctgtccccagat

SEQ ID NO: 65092 - DNA, 1062 bp, Homo sapiens
atgttggtcaggctggtttcaaaatcctgacctcaagtgatctgcctgcctcggcctcccaaagtgctgggattaaaggcgtgagccaccgcatcctgcccaaaaaattttgataaagcatcaaatcccagtctggtcacctctgctctaagaaactaagaaatcctgtccctgaaacccagatcctggctgccaaaataacaccatcatccttgccatcagccaccacaagggcacttacagggcatgcactttgagccaagctcaatctaagcctttgcatgtgctaatgaactccttccctgttttgacctcttgcccacttactgtctgccagatttctggatttggccctcccagctctgagctctgacagatcccactgaataccagttccaatggctcccttgctacaggtttctgcaggtcgtatcatgagattagttgctatcttaaatggaagctcatgaaagtgcttctccgctaaggtagaaggaaactccatttcgaactctctctgtcactgctgctaaatgtcccttttcccaatgctgctgggaatctgacccatggacttctacaaaccttcagcaaatatgtgttccctggactctggctgcctacctggaggctgactttgcctggaactttgcaggcacctctccttcagagctctcatacctactaacacccaattacatccttcattctttcctagctttatccaaatgacagtcaagctgcctggggctaagggggatgatctctgagtcctgcatatagatggtgtatgagatttaaagaaggtgtgattttaaaaaaagtgtgatttgagggacgctatttattttattttacataaaaaagaagaaccaggatgctgaaaatgatgctattgattataaataggaagaaaacgctagtcggttgaaatagccagtatggtcttggtcattcataaggaaagaatggcccctgtcctgggagctggctttagaagaacccactgtggcagaactggtcaaatcctccaccacctagtacctataggctttcaatttc

SEQ ID NO: 65093 - DNA, 1377 bp, Homo sapiens
cactgtactccagcctaggcgacagagtgagactccgtctcaataaataaataaatacatcaatagcccacgattaagccaggcatgctggcccatgcctgttgtcccagctactcaggagactgaggcagggtaatccctcgcgcccaggagttcaaggctgcagtgcacaatgattatgcctgtaaacagccccggcactccagcctgtgcaaatagcaagacctcatctctaaaaaaataagataaaagccaaaatgcccactatctgactcaccaaaaggtgtgtatttaaggcgttgtctgcagtgcctggctgaacctactgaagcctgaggaaaaaggaaaaatcaataatacaggttctgtcttcattgaaaagtttgatattttgcgtctcatggattttttgcactaatttggatgttgaaaatattgcattaaaatattatttatctagagtattgggtgttttaggcactcccttaaattttgtgcctaaggtgagtgcctcactctcctggtcatagtcctggcgcagtgatgtctacaaagactaataagatttacctgttaccaagctcctactctaataaacatacttagctcattagattagctagttgataccagcccgatcagctcacataattgcttccctggcccttgtttatccagaaagtagagtcctgcctcaaatttcctagccagtggtcatgtctgtactctttgctgccaaaccctttccagaccctcatactgactgcctggttgggcccctaccgacactgtcgaccctctgaacattgtgcacaaccctaggaaggagcactaggtgctgcctaactctggatccccgacactaactccctggcccaactggactctttctcatttatctgtgtctgagtctcctgggcctcattccaccctcccagaagttcttcctttactgcttgcctcctggtcaggtcttccctgaaaaaataccccacctgtgtgtgaatctttctggtttctgggtctcgtgcctcccctaagcaatgcaaaccttgagtcaagtactacgctcttgccccaggcctggcattgttacgttaataaccattgagagcataccatgtgccactgacccatgctttccttgtgttaacccacatgcacctcatcgtaaccttatgagtagatactattgtcatctccattttacaaatgagcaaaccaaagcccagagaggcaaagttatttgcccaaggtcacacagctaagaagtggcagaaatgggctacaaacacagtttctagagcccaactcttaactatcatgttacctagcttctgcttacagtctaagaagccctgcgtggaaagtttggaa

SEQ ID NO: 65094 - DNA, 2522 bp, Homo sapiens
agatgtccaaacacaggtgaatggctacacaaactataacatatccatataatggaatatattactctgcaataacaaggaaagaactatgatagacgcaacaatatgaacgaatcttgaaatcattaggctgagggggaaaagtcagaggtaagagtagagtagaaactgtatggtaacgtatacaaaacatgcaaatctgatctgtcatgacagaaagcagattggtgcttgcctggggccagggaaggggcatgactgactcagaaggggccacagggaacctttcagggtaacggaaatgttctctactttggttattgtggtaggtatgcaaacatacaacagtgcacctaaaatgggcacattttgttgtgcgtaagttagacctcaacaaagttgacttaagaaataattccttcccgagagcctggcctacgaggtgcgggcaagcagagaggcctccctcaaggcactggcgatactgccaagctggaaaaacggctcgctggcagcctggaaaaggccgttctctggctcttgatccttaaaaggctggaatttctggctgaacaagaaggcctgggcccagtccccagggggcagcttctcctcagctctgggcagggtgcccggccacccctcacacaggtgctggcttgctgcccaaacacaggaccagggggcctgggcaggcccccacagccctgctgggggaagaggaggagaccagcccgtagccagcccagcctcagccccagcagcctgtggctggcagggcctctgcctacacagcaagctctcagagtggggggatgggagcagcgcccaggcacccacccagctcccccaacccagagtgtcaccggggacctttaccctgaatggggatggttttaacagcccctagagagggtcagggcatctgtgacaggacagggtctgagccccggactttcacctctcagcccagtgcccttttccccgcagcagcctaagctcccagtgattctctgggggagggatttctgatggggctggttctaaagaaaagctctccagggcagggcctgtgaaacccaaggactgactgctgcgggggctggatagcctttggggacagaggaggggagagggtggcagaacctaaacagctgcggccgctgctttgtccaagggcaacccagcctcccaggtgtggccatcacctctgcctctgacctgagtctcagaccagagccagctgaggcctgggtgctcccttcagccccttctggttctgcaattcaaggcccagttaaccccctgtggggtcatagagaagcttgcagagggtgaagcctgggacctgattctgctcaccctggactctggcccagccagtgccttctggcaacagggaccctctggggtcccaggagccctggaacctcctctgctccctctggctctgtctcctgccccacccccttccctgttgccacctgcacctgtttttccagccttgctcaatctctccaatccacaggctgtttgttcccaggggtcgcctccccttatctcccaggcagctgttggccatggcctgaaggtacagaattcattgttaactcttcagcttccctcacacactccacccccaaaaaccatagcagcaaagagcaccagggagggcccaggtttggggtctggggtctggccctccctgctgtgtgaccttgcctcattgtgtgaccttgagctggtcacttacccgctacacttctgttttctcattggtaaaatgagagcattttacctttttattacctcagctctgtacctcttcccccgccacacacacacacactcacaaactctttctctctctctgtctctctgttcttaaaatgtagggctatcaagtaacactcatccaataattattaattcaggagctgattttttttttccagacagtctcgctcttgtcccccaggctggagtgcagtggctcgatcttggctcacctctgcctcccaggttcaagcaattctcctgcctcagcctcccaagtagctgggattacaggcacctgccactacgcccggctaatttttgtatttttagtaaagatggggttttcccatgttggccaggctggtctcaaactcctgacctcgtgatctgcctacctcggcctcccaaagtgctgggattacaggcatgagccaccatgcccggccaggagctgattttgtatgaagcaaaactaatcagagcttctgagcagcatgtcctggttttgtttcatacaaaacagaatcctgaatgagtaattactgaataaatgtacatttatcatgtccctcataattccagcaatgaaacttgacattttagttaagccagtgtacccttctcacagataaatattctattttctgttaggattttataaagataaaaaacagcaacaggtctctttctccctgctcttttctgatctggggtggggtgtggggagccaggaacaggtgatc

SEQ ID NO: 65095 - DNA, 1988 bp, Homo sapiens
ctctgcctcccaaagtactgggattacatgtgtgagccatagcatctggcccagccaagcctataactcttaatctctgtgttctctctgcagcagggatgacggcgctcctggaggctggctgggaagctggtcagggtcccaggactctgacacccccaatggcccttgtagccttggggagtcctgtgatccaaggctggaggactgagtcccctccaggtctcatagcagacgaatagcagcttcacccaggcctgttttgtcgtggccccattcagaggccgccctcctctgtggtttagagcatgccctggaatccctagcacaaccaggtgacgagagttccccgctggccccctgccgcgggaacacaaagtacctttgcacataacctttctttgtcctctgctggtgacggcaaatagggcaggcccagggcaacgtggtaaggtggcagaagtttgttttggacagtgtttgcagcttctctgttccctttccaccaggggttacctcctgctggctgaccccttcctgtgctgcgggctggaatatagggtttaaccctgttataacccagaggaacacaaaaggaggaacatcaggctttatggagagactggaaatgaagtggaggttttccttgctcatgaaacctggctcaccctacaggtagtcccaaagagagcttgtgattttctttcccctttggtcccccgaccccttcagagctctctgggaagctatgctctctcactgctttccctcccctgatcagagtccctgtgccaaggctcctggatactggggctggaaaacctcctgtcccttccaccactcctgtgccctccagggaaggggtctggggtctcggggctcacccccacctgtgtgccagtccctgtgctaggcctgcacagacatcagctcgctgatcactacgagaacctcaactcttctccccatttcatgaggacaccgaggctcagaggtgttcgtgatactcaagatcacactgccagagcgtgagttactgggatttgaactttggtccgtgtggctgcaaagccagtggctgctatgattctctttccacttgctgcagcccacgtccctctgggcaagtctgacaccctagctgccctcaactgcctggccccgtggcgtcccagagggcgaggggagcacagggactgggcacagaggccagctggggtcaaggcaagggggctgcccagcacagtggttctgctccagaggtgcagtcagactgcctgggttggctcatgcctgggtctgtcattgtgggcagcgtgaccagcctaaacctcagttttctcttttgtcacctatgtgctaaaaatacttatttctggagattcttgtgaggattaaatgagatcttccaagccaagtgctttgcatagtgacgcagggtaggtgctcaagaaattttgttgtctgcctgtggtctgggtgggggcagggtggggctgcgatggtgaagaaatgacacagaaacccacaggaaacttcatcatctagatggtacatggatggcacattcaagggaagtaacgaaacgagaagaaaaaacttttacattttggctgagcaaaggcaacaatataattaccatcatttataaaaactgcctcccattaatgtctaattcccacaaagcgcaacaatgattatctcattaactatgtgtcagattaactttgttgcaggttttatttgattaaaacagtgaactcacaacacgtattatgctcattcttcatagtttgtggtttctggagcatagtcctctgttggcaactttttctaaattagagggcacgtttctgggtaagttgttttttagaaatttagttatctggagtcccaaagcacccagggtggagggaagggctcagagcttcctattagcttccacctttggatttgctaaggccagtgatgaaagatgaattatgtat

SEQ ID NO: 65096 - DNA, 1638 bp, Homo sapiens
tcatggttaacctggcctcagggatggctgtgaggggccgagggaggaggagggatctgcacctctctggctcccatgcccccagcctgcggtctctgggtggagggaggcccctcctctccatcactcactgctctttcctctcctatcgcagcttgactctccaatgcactgcggattgccttgggcccctctggtcgagttttggggggctcagctcacccctctgaatgtgtgtgtgttctcccctgggccccattgctggttcctcccagtcaccgtttcccccacatccactgatgaggccccaagctcagaaagttcaggagacctgccagggtcacccttctgggctgggcatggcaggaggagggttgtgggagggcagctatgtaccaagtccagcgaggttatttcaccccagcaaacaggtcctgctggtttgccatttggagagagtttggccccagttcccatggactggttaaatggtaacttgtcttcagttgtttgtggaaatgtgacagggcacaggccaccagctaggccggaaaagccgtgtgaggcccagctagctctgggcattggactgcaagccatgcttccctcccctcccctcccctcccctctcctctcctctcctctcttttgagacagagtctcactctgtcacccaggctggagtgcagtgtcgcgatcctggcccaccacaacttctgcctcccaggttcaagcaattctcctgcctcagcctcttgagtagctgggattacaggcgcccaccaccacgcccagctaattttgtatttttagtagaaacagggatttaccatgttggccaggctggtctcaaactcctgacctcaagagatccacccgcctcagcctcccaaagtgttgggattacaggcatgagccactgtgcctggcttttttctttctttctttttcttttcttttctttcttcctttttgtcccccacaaggtttcaccctgttgcccaggctggagtacagtggcatgattacggctcactataaccttgaactcccaggctcaggtgatcctccagcctcagcctcagcctcccaagtaccagaagtactaggactacagacacatgccacgcctggctaatttttttttttttttttttttgagactgggtctggctatgctgcccaggctaagcaatacttattttccttatttttattctaataagattccagaatcttcccctttcacatgtcttcctagccagatgagtaagagcaaggaggagtggtgatgttaataacagagtgacacagcctttgagggcctttcattggcagatttcttaaccaagagcagctgtgcccattttacaggaggaaaaactgagacaaagaggagtgaggtcactatgagtcactggcctttctggcctaactcagactaggctcaatatggctgagccaaagagacagagcaggctgggggtggggatggaaagaaactctggttcttcaaagagagttgactgtccttgctggccttagacatcaccccttccctttattcagtgcctgcctgattagagctggacatacaggatctcatctgctcccacaaccaccatctaaaataggcag

SEQ ID NO: 65097 - DNA, 576 bp, Homo sapiens
gccatgatttcatttcctcctcactgcaaggtaaagatcattagttctcttttataggtgaagagacttagactcagacagaccctgtgtcttgctcaaagtcacctggccagtcaggggtagggctgggtttcgaacccaggggcaggccctctccgccccccggcatcggtgcagagccctgggtcgccctcctccaaggtcgttgtggtgtgaacagccaggcgccttcatgcagggcctgactgcagccgccagagcctggtgatgtcagcattgccatggaaacccttccccgggcgtcgggcaggaccagcctccccagcgcagtttccctttgtgtggactttgcaatgcgttgccaaggcagtggggcctgctgggcgggttggcatggggtggggaaggcagacaaaaacccacactgcaactggcagctcacaacagggcccacggtgcttgtgggagggaggggctgcaggctggtggcctaaggcgtgagagtcggtgggcagggggttacccacacacctgcttaggacccccatctggcaacagccttttggcgtctttggt

SEQ ID NO: 65098 - DNA, 3154 bp, Homo sapiens
gtctcgaactcctgagctcaggtgatctgcctgccttggcctcccaaagtgctgggattacaggcgtgagccaccgctcccagccttttaaaaaagatgctctataatttgagatggtatggttgctgcaaagtttatgagactattctccacattgtcaaatattttggtaacttccaattttagttattttatacaatcttgcaaagggccgtgttcagcgctccacggaattgcagggctgggggacactccattcctgcgtcctagagagcctctttcaagcaagctctttcaagcaagcaaggagtgcaaatcctcctgcctgcaaattgcgggctgtgaggcctgagccaacgcactggagctctctgagaacggctgtgacgagccgagctaacaatagccctgcttagcagccccgcggcggctgacttggtgaggcccgcaggcccgcctcagcccgccctccctccgccgtccgggcaggaggtgcaggggcagcagggcccgcctggctcgctgcggccgcttatcagagccggctgtggcgccggttacgtaaccgggcggctaatgctgttttacttgtcgatgaaacccaaattaaaagaggaaattattgtcctgatgctcaactcgcctaatccccatctgtctcctctctggtcccccgcgctgccgagcgctcgcatctaaaggtcttgaacgcgttccaggtttctaatttcgtttgcttatgcaaccaaaaatattatggccgcgtttcctgggggtgatgaagtctatattctgggctacaggcacactaaaaacggcagcgccagggcccagcgccgctcgcgcgtgcaccacgcgccggctttttttggttcctccgaggcgcgggcagctctgcagccgcgggggccgcaggaggtgggggctggacccgcccggagctcgggagggcccgggatggccccggggagcgcaggtcccggcaggggccgagcgaacaagggccggcctggggcgcccagagacgcgggggaccgttctggtcgcagctgcctgggtgacctcttggaacctcagcttcctccttgttttttttctgattctgactctgattcctgtgtgctgaatccaggctgtagtgagctgtgatcacaccactacattccagcctgggtggcaaaaggaagatgagagagagacagagagagagagagagagagagagagagagagagagaagagagagaaataagggagacatcaacaccctggaatattgtgtagatgagttttaaaaaaaaaacaaggtagatcaagatgtattaacatgtatcagattgttaaatttctttaagaaataaagtcattgaaaaatagaaaaatacagaatatggttcaacttgagtttttaaaaatccatgggctggtgagaagcaaaacagacttcagtgtttttaccccacttctgtattgtctgaatcatctgaagagacgctgttcatgtatttcttgcataattttaagtatctgattttaatggtatgagggacgggatagcaggggccttcctgaccctgtaattctctggaagcagtggtcagatcaggagtgggactggctgcaaggcttctgcccccgatccccgaccccaggctggggcttcaggatgcccgaccacagtgttctgagggcctctgaccatcaggaggccactggaagtcttagggctgagggaggcatgggtactgggcctgggagggcagacgctgagggcagagcaagggccctggagtcagaacccaggcttctagtccctggagcattggctcaaatggcagagtctcccttgttcctgcggccactctgggtcttgagactggtggcatcctctgccctgacagccaggccaggaccagtgcgaggaggagccaatggaccctggctggctccgaggctgcggggctgggtgtgaggcctcaccttagccagttctggagatgtgccccttgacgtggcttctctgggcgaggccaggctccctgtgggccccagatgcagagagccaggattgattctcaagccacgaggtaccccccatccctgagataggcccagcctatgtgcgtggccctcatcagccagacacttggaaatatccgcacagttgctggagaagcagagaagaggccgcttgaacacagggagccatctcccacagcacaccacagacttccccgggtgcgcgccgaggagcacggattctgacaaggcgttataccttcaaatcaggttctaatagccaagaattgcaggaacccctgtgatgaactaacttaagcaggtttctttactttaggacttctcaggacctttcctatgctggggtacatgatgagtctccatgaaggtgtaatgagtgcaacttttactagaaacccacggactcaggagccctttccttccagagcatctcacagggctagagggctccaaaaacactgagccaatgaaggtgggaaacaagcactgagggtgcaggaccatcgcagacagagtttgggaaaacttaagaggaggatgaggcctggtgcagtggctcacacctgtaatcccagcactttgggaagccgaggcgggtggatcacgaggtcagaagttcgagaccagcatggccaacatggtgaaatcccatctctactaaaaatacaaaaattagctggacgtggtggtgggtgcctgtaatcccagctactcaggaggctgaggcaggagaatcgcttgaatccgggaggtggaggttgcagtgagccaagattgcacaactgcactccagcctgggtgacacagcaagactctatcttggaaaaaaaaaaaagaggaggatgagtaagcactgtcctgcatcactcaacaagggggatatgtcctgagaaatgtgtcctcaggcaatttcgtcattgtatgaacatcatagagtgcacttacacaaacccagatggtagtatggactaccacacacccaggctactgctcccaggctacacactcagagagcttgttactgtactgaatactgtaggcaattgtggcacaatagtaagtatttgtgtatctaaacatatctatacatagaaaaggtagagttaaaatacagt

SEQ ID NO: 65099 - DNA, 1360 bp, Homo sapiens
tggctggatttgaaagcagatggcccctgggtgcagaggaaggataccccttgctccctcccccgccacaccacagcgtttcctacctcaacatatggggtcccccaaaggcctgtgcaagccacctgcttcccactgtgaaaacagctggcagagcagattcctcagcccctagctgggtgcctggagagaggttctgacagcccccagcctccaaccaacccccgtctcgggagctcaggtctccagagcactttgggccaggaccatcagtcttgggcctgggctgtgacccactgtgggcggctctctgcagctgcctcgaatgtgtgcatggatggtgttttcccctatccctgagctggcaggaggtctgggcacgtgccctggccctctggctggtcaaggacaagccgatggatttcgaaagctatttaatccctgggttctgacgcacccggttcaccaccaagcgggatctagtgcccacaatctgatgtcagagggcgggagtggccttggccaggccttggcatgactccatcccctgcccacatggcactgtggtggagccggcagggagcaagaggcgcccagagccttcgcctcttgaatcacaaccatttgttaggctcgcaaacaccagcatggcctagaaaatgaggtaaaacaataacaaggaaaaataatcaggtgctattaagtgaaaagagcagataagcaaaacattataatcgtgtttatttgagaacagtaataaatatatttaggcagagggaaaaaactggaaaaaccaacagtgactatctttagaaatgtaccattcaacaaatatttactgagtacctgctattggtcagattgttttaggtgctgggcatacagtagtgaagagacaaaaccctttaagaagcttatattctagagagttaacaggcaataaacaaaatatacgagttcaatatatagtcaattagccaggcgcagtggctcagacctgtaatcccagcactttgagaggccgagatgggcagattgcttgagtccaggagttggagaccagcttgagcaacacaatgaaatgccatttctgctaaaaatacaaaaattagccgagtgtggtggttcatgcttgtagtcccagctacttggggggctgaggtgagagagttactcgatcctgggagttaaaggctgccgtgagccgagatcgagccactgcactccagcctgggtgacagagtgagaccttgtctcaaaaaaaaaaaaaaaagttaaatggtgtaaattgtgttaagtataaatggtgttaagtacaatgggaaaaggctggtttgggtttgagaattgtgggttgggg

SEQ ID NO: 65100 - DNA, 965 bp, Homo sapiens
atggggagagggggcagctttgagaaaacctggccccaagtcccggcaggtggagcagacgctgcatgcggctcttggtcagcttcccaaggaccccccgccttgctctgcatgggggtgccccgcaagcacccagggctcagggcatggagaggccccaggatggggactgggctttccctccatctgagctgctccccaggccagaacttgggggccacacctactttttcttccgctcccagcctctgggtcctggccacagtcatcaaaactgctgagtgaaaaaaggcacaaggccatatccagagggcagcctctctgacctttgggaagtgacagcaccaggtcactggactcccgaaacaggaggaatggacaggagaggaggagggggagaagggggtgagggaagagaggccaggggacaggacagaagacaaggagagggaggaggaggggagagtccagaggtgaggggaggtaggaagaggctggtgtcctgagctgtgtcctggtcccacagcctggtgaaggggcagctgacagcaggggtccttcttgccacctatctgtctctcacatgccacatctagtccaccagcccatgctgtgtccaccagccatgccgggggctccccctcttccctcgctgatgcctccaccctcgtcgaggccacccctctctctgacctgtgcctctggaagggcctcctcccacttccgtcctctacagtctgttctcagagcagccagaatgacccttctcaaacaaaacccagatgaggccatcgcttcagaaaccctctcccttccctagagtgaaaggccccctctcgggccaccgagtctgccctctggtctgcagtcctcccttcagtcctcccacagcggcctccctgccgctcctccagcagcccaagcaggctcacagctgccacagggcctctgcacttgctgtgccc

SEQ ID NO: 65101 - DNA, 2209 bp, Homo sapiens
agagggtttcaccatgttggtcaggctggtcttgaactcctggcttcaagtgatccgcccacctcggcctcccgaagtgctgcgattacaggcatgagccactatcattttttgtttttaaatagaatggaaaacaaaaacttaccttgaaaaatcattcttactgaaatgattaaaaagtaacattcctgtatcttccaaagctgagcagacacacagccgggccccgtcatccctgccctgggtattcacccaacagaaatgcattcatatgttcacaatacacaggaactagaatgttcatagtggcactattcaccatagccaggaactggaacctccccaaatgtccattagcagtaacatgggtgaatacattttaacagagccacacaatggcaagccaccagcaatgggtacgaacagcccttgactgcctgtgagagtactgacaaacctcacaaacataatatgcagcaaaagaaaccagacgcaaaacggcacccactgtatggctccatctacacacagttcagaagcaggccagagcgcctgcgggctgagtcaggagagaggctggactcgggaacagtaggtggaaggggtctcgaggggcttctgggtgccggtgaggtgctgttttttaatttgggtgctggttgcacaggtatgcaaagcatgtgcaaattctttcagttgtacactttgatttgtgcagtgttctgtgtgtgtgcttaacttcaattttaaaaagtcttaaaaataaaagtcatgtctcctggagcaggttaaatccacctcccttttctatccaagggcaagtggagagcaggtggctggcctccctggggcacaaccacgtgtcccctcatgggtgctaccagagtccctccccagcctgagactcctgaagccccagactcagggattttctttccactaagctctggtaagtcccaccatcacagaccaggcctgtgtcggccccagaagcaggatcagtgttagctgcagcctggccctcactggctgggttactccgggcctcccttgccatcggccacccccaggcttggcgcggaggcgcaggccgcctgggtcctcgggttgtgtccgctggcctccctccaccttcttgcccctggtgggagatgggagtggggcttggaggtggggaggtggggctgtcggtgctccagggtccccgcagagggcagggaagccctggacctggtctgaccttgcgcgctagccccagaggtcgccgtgctctgctgtcggcgttcaggtgcccgcggtcgggccggggagggcagtaatcaagccggcccggcggctggcgaggggcgcgggtccagcgcgctgccctcggccgccgccctgagcggttatttataaccgcgggtcgcgttacctcctgaccttaagctggggcgggcgatccgcagcgattagcatctatctcctccccgccgcccgctgcgaacaaacacccctctgtgcgccctcccccgcccgccccgcgggaggccctgcaggaagcaggatgttgacccggagcctccctgcgctcctgcggcggccccgccacatgtgagtggcgggcggtggagtgcgggtgggggggaagcggggagcaggagctactcgtgtttgatggcttcccgagttgccaatgtcctggtctattctgagtgaccgccttatttacaatatagggctccccagcccgtgtctgcccaaaggggtgccctctcccaagccagtgggggccagccagccctggttggggcagcacctgcacaggtggtcccagaatcacaggctgcaaaccgcatcctccaacagccaggccgtcgttgctcgatggcagctgaaggccataggggaaggtggttgcgtcggggtcccacagccatccacggcagaccccggctcctgcctgatggtttttcccaacggctcccagaactcttgattctggtctggagaagcctcatgaaaggaggctggggtcgcaagattggcccattcattcaacacatttttattttatgtatttatttttgagacagggtcttgctctgtcaacccaggctggagtgcagtggtgggatcaaagctcactgcagcctcaaactcccaggctcaagtgagcctcctgcctcagcctgagtagctaggactgcaggtatgtgccaccatgccc

SEQ ID NO: 65102 - DNA, 2324 bp, Homo sapiens
cctgggtgacacagcgaggctctgtcgcaaaaacaaaactggtgacgacgtcagatcctaaatttttttatttttttgaaatgttagtgatgtgagaaatccgaaaggctgagacccactgggctagcttgtacgtggctctgggtgaaacctggcacaggggggcaatgttttttaattgagggatgaatctaaacagctggaagcttctcccggggggaggaggggctgggttcttgcccagactcagcccctgaggccccagcctaggcatccccaggaaacctgagcagaaggaacattcacgtaactgtactgggaattctgagaagggcctaggggccagttccccatgccacacaccctctgctcatccctgaccgggagccgcgaggcaatcttcccttaaaccccacctcggcctcccccagcacccccaaggctggttccaaaatagtccaggcccttggaggagacatcatgggtcgggctggctgcctgtcccgagaggacatggcaataacgctgtggccgaatatagagggacagtagacgctgacaggggccctggggcctgggagcctcgcaggttccacggtgcctgctccacccccatcccttctgagccctgcaccccctaacctggacagctgggaggctggcgcccctctcctggcccagcccggcccacctggggacaggtccgaacaagcccaggtagaacaggaggccggcctaggagggcccagggcctgggctgggcatgagcttggggccacctctctctagggactcaaagcattttataagcttaacttcccacaggacatcccgagatcaggagaccaagaggaaccggggtgtctgctgcagagccactcctgctctctgttctcagcttccgaaggagaacagggccataaagctggggtgtgggaggctgagaggagagcaggaagccagtccaaaccccaataaactgctggttgaatcgaatcacaaataattagtcccgatggccaagactgcctccaccctcctctcctgggaattaaaagtcaaagggcagagctgctgacgcagatgccaggggagacatgaggcttggaacagctgggactcagctcccaggctccactgccccaggtcgcaggccctggttgccccggttgccccggacacgatgtcccccaggcaggcccctagagcttcattgccaactcagggaagggggctctgctccctcacccttcccctggtgctacgtcaacagaactagattcaaggttaatcaggctgccctgaaaactgttgccagatgacagcctggaagaagcagttgccagcctctctccctcccacccctgtaagaggaggaagagatctctgcctccctgtcgagggggagcctggctccctgaaacccactgcgccccttcccctaggtcggccttgccgcaggcaccccctggacggctgcaccaggtctgcgcgccagcggtgacccccagtggtcagtgcaggacttgaacctgagccgtgggcatggctgctgcagactcatcactgcagcctcagcccacagccagtgacttgggaagccttgccgtgtgagtggtttggggatttgatcttggtaaggctgttgctggcgtttagaggtacttcgtaggtgctgatttttcctaattgaactgtggctggatcttggcctaaaggtcccactgtcagcaaatccgtgtccacatgcctaagaatgaattcatcatcttctagccctaaaccggctcctcctcctgacttccctatttctattaatagcaccgccaccctccaaacctccgagtcatcttcagccgctccccacactgggcggggtgcctgatcttgcccctcctccctccgcaggtcacccttgcattactctcctggacactcgtagcctctcacctgcgtcactgacatcctcaacgatgctgctgggtcagacctgggcaggggacccacccctcttccacttactggcctcgcgaccctgggcaagttacttaaactctctgagtctcagcttcctcagctgtaatgtgaggctaataatcacagcccctctctcctagggcattgcatgaattaaatgataggctgggtgtggtggctcatgcctgtaatcccagcactttgggaggccccggtgggaggatcacctgaggtcaggagttccagaccagcctggccaacatagtgaaaccccgtctctactagaaatacaaaaattagccatgcctgtagtcccagctactccggagactgaggcaggagaaccg

SEQ ID NO: 65103 - DNA, 477 bp, Homo sapiens
tgtgtgagggtgggactgaaaacaggagggttgagtggaagtctaaaatcactagttagtaatatccctagtaggtagacagtcccacaccagactggccaggtggccttccttgctcacccacacaggaaataagaggtttgttttctcaataaactcaaccagaaattttagactaggaacactctaggcacagccaggcaggtgccaaatgacaagtggaattacatgaaggtctaaagtctacgtactaaacagtaatagggcctccttcctgccttcatccaggttgcaataatgtaaatatctaggcttacctaccactccaccagccacacctcaaagagactatccttctctggaaaaactcaagtgtctctacgaaaggaccatgggatattgaaatctgggttgccaagaggcagtaaactgtatccaggcacacaaagcttccaaccctccttttttagtgtctca

SEQ ID NO: 65104 - DNA, 838 bp, Homo sapiens
gttgggactacaggcacatgccaccatgctcagctaatttttgtatttttctgtagagacagggtttcatcatgttgctcaggctggtttcaaactcctgggctcaagcaatccacctgcctcagcctcccaaagcactgggattataggcatgagccactgcacctgccctaccccacatatttggtcacagaagtcttctgtgttatgtgtgttttttttttcaggtctgagaatgtgccagtgttgtaacaaggttcaagggtggcatatctcacacacctgcatgaacacccaatcaccatgctcatgaactacaaatacagcgggctgattgtttttggtgtgagagcagaagacagacagttcgtggttttttttttccactcttaagcaatggtttctgaattagagggaagggtgagacagttataatcacaaacaccctgagtgatttttttttccaaacacacaggccctgcctagcagcacttcttccaaccagtctcacaagcctgtgggggtaaatgggtttttacttatttatttatttatttgagacggagtttcgctcttgttgcccaggttggagtgcagtggtgtgatctcggctcactgcaacgtctgcctccagggttcaaccgattctcctaactcagcctccccagtagctgagattacaggcatctgccaccacgccagactaattttctgtatttttagtagagacggggtttctctgtgttgtcaggctggtctgaacttctgacctcaggtgatccgcccccctcggcctcccaaagtgctgggactataggcatgagccactgtgcccagc

SEQ ID NO: 65105 - DNA, 588 bp, Homo sapiens
catttagattttttaaatgcataaatatttacagaatagtaagtataaggcaatgtaggtaaagtgtctgaaataagtctgaaataattatacccaggagaagtcatggtttttctgtatatgcaaaagtgaaaggacttattgaaaaactttttggaagttttagcataacttggcaccagaagtaggaacgataatttgaatgcacaaagagaactttaaatggttagtcttagcaatttgacctttagcatatccatccatccaaccaacaaatttctgttaattatctactgcatcctagttggtgggagaataaaagcaataggttagtttgacacagcgctgaaagtgctacaagagggcaagaggactgtaagctgtggaaggatataaaatgtgcccaaaccacagtcgggtgttaaggctttccagaattgaaacctgaaagataaataaaataaggcaacagaaaagaagagaaagtgagtgccaagcaaagggacagcttttaggaaggcctggagagaggatactttttacaaaccaaattcaaaatgttcactgtggctcaaaaagaaacagatg

SEQ ID NO: 65106 - DNA, 590 bp, Homo sapiens
aaaaattagctgggtgtgatggcgcgcgcctgtagtcccagctactcaggaggctgaagcaagagaatcgcttgaacccaggtggtggaggttgcagcaagccaagacactccactgcactccagactggcgacagagccagactctgtctcaacaaaaaaaaaaaaaaaaaaaaaaaaaaaactttggcaggatccacaaggcaggaggatccacttgagcccaggagttccagaccagactgggcaacatagtgagttcagcttgcataacataacgagaccctgtttctacaaaaaaaattaaaaattagccaggcatggtggcgcatgcctgtagtcacagctgctcagaggctgaggaagtgggatctacttgagccctggaggtcaaggctgctgtgggccatgattgcacaactgcactccagcctgaacctcatctctaaaaaaaagaaaaaaaaaaaaacccaaccaaaggaaaaaaaaatcacaaaaacaaacagttcagaaaaaaaaaatggtatttttaaaaatatgaaaaaatgttggccgctgccgggcgtggtggctcacacccataatcccagc

SEQ ID NO: 65107 - DNA, 650 bp, Homo sapiens
cgacagagagagactctgtctcaaaaaaaaaaaaaaagagaaaagaaaactgataacaaggtgtgtttatgtttgtggcctgggagtgggctcatttagcatttcataaatgttctctgttctcaggtcatgaccctttgcccaatggtttcactatggagaatttacagatgtaactgaaaaaatataaactacaaataaattcattggataacctattttttttagagtcatttactcaagaaattaatagggaacccagagtctagcagtcgggcaattttgttttctgattctgcaacctgtggcagatggttttcttggcacgtgtgaccctggcattttgcccatatttacacggactgacaggagtttaaggctggagggagcatttattttacgtgaggtaaaaggtcatgtcaggcttgcttgtcacctgtgtgtacatgtggttaattcccagtcacttccatgtatatccacacactggcaaggggctatatgagcatgaagcagcaagtagcacttgacctctgttctataaagagtgctaacaaacaagcggaaattgtgatcctatcattatttggtttttcatcccttccttccctatatgaaaggaaaagctcttgaaatagtccattctggcg

SEQ ID NO: 65108 - DNA, 3605 bp, Homo sapiens
taaactccttgtcagtctcaagaagccaaggacctatcacttgcaccctagaactccaaaaggttcacagagtcgaggtgagggcgcccaggtcactgctcgggtgctagagttaacaggtggccaaatgcacgtataaacagcagtctaagaaggaaactcagacggaaaaagtgttgccaactgtcacctacatcttcccaaccccgccccccaatcctttttataaataaacggagggtttttgaagggaactgtccaaggttacaacctgatacggaggaatgctttggtttgggataccaacgaaattgtttatatatttattgagtactgccacacaacatctaaaagttgacaaagtgtcaaccaaggcacatagaacataaaataagacgtctttctcaacaagattaaaacgtcaagaagaaactgaccgaaagagggagatctctaacttcccaaagcaaggcaaccccctggaaaggtactggaactagcggaagttacatatccagggcagaagtgtccccctccccaagggtaaaactttgaaccgccatctgactatcccacggtggtcggaaacttccctcaacaagaagcaaccagacacccaacaatctccgcccttggccaaccccaggtgtcctcaggccaggctgccgcttcctccccgggccctgcctcctccatctcgctcccttcccaggacactcagtagccggcctcggcttccaacgccggcctggctcccggggtacctggaggccgccgggatcggtcccagggggcatcggcctcaggcccgccctccaggaggcccgtcgcgcctctagtccccgaccgggccgcgaccccgccccggccgcccccggagacggatcccgcggcccccgccctgccgccggcctcacctcctcagcgtgcttgcgcagcgccttctcccgctcgtactgggtgatgagctgctcgttgtcgtcccgcagcagctccagctccacctggtgctcctggtcctgcgcgaacaccgagtccaggttctccagcacagccaccaccagcggcatcagctctttgaccacctcctcgtcatagcgcccgataagccgctcgaactcgcggtagatggagccggccaggccggacacccgctccgacatcacggccccggagccgccgggctcctcctgatacaccacaccgtcctccagctccatggtggcaagcggacgggcgggcggcccggggcgtcgccggcagaggggcggcacctgcccgcacgggacggacccgactcgggctgggacgggtactagggctggagcccgggccggggctggggctgggcccggcggggtgggggccggggccggaggaggggaggggtggcgtaggcgctctcaccccaaccgccgctgcaccaactgccggggcggcccggccgcgcgcgccacacgtcatccgcggggcggggccggcgccgcgtcggcccgatgggcggggcgccgcgggaggccaggcgcggccgggggcggggccaagcgtcttcgggcgctggcggaggaagccatggcgtcaacacccggcgccgcgaagacggtgcgggcgccaatgggaaagactgcggtcggcgggtggggagaagtatccatccacagcgggattcgcggggcgggtcccaggggaaagggaggggttcgggaagagtgacgagttaacttagctggcatttctatggctttttaaagctcacaaagcacctactcacttcatccccacaacaggcgtaaagaggtagatatttggacctcgtttcacagacaaagaaactaggcccaggaaagtggcgttgctctcaaggtcacgcagctacaacgggaaacgggctgagccgggactcaaaccaattacccagattgagaattccgggctccgaaaaaaactggaaacagaaagggagggaaaaaaaaccataaccagggtctgcccaagtggaaaggtggtctcgaatagaatagaactgttttgtgctatggaagagcaagggtgagatgaggggaaatgggagtgactgctaataggtatgggatttcgttttgggataataaaaatgttctaaaaaatgtattatagtgatgaatacacaactctaaatatgctaaaagacattcaactttacacgttaagtgagtgaatcatatggcgtgtgaattatatctcaagttattaaaaaataaacaggaagggtgatagcattctggagaagggtgaaactggaacgttacatgtggcactttcccacatagtgtgtctgctacttctggccaacttgggacggggacatttccaggctccagccaccctcctctcctcaagtcttgaagtggggcggaaagggtaagtgggaggttggggaacagaggaggtaaggggtggagtcactggagtgaataagtcccatgacaagtgaggtttctgccgcctgggagagtgtcacgtgtggggaatgacacaacgcccacgcctagagcgggctgagtcaaggatcccggtgtgctcatctaacgtccgcaaatgggacggaagacactctcaaaagtcccttctctgtgtctcaggtgactcagctctccgtcccgactcgtttaagaaaagggggaggaaaggcaggataaacataggtttaaggggagaattggccacccaccgggatcataactacccttagcttggggtttacaagtttaagtacttcccaccaagtatgaagtagtcccctaaagtttcctacgcatgacccacctggagacccataaaaacaatatgaaggttgggcaagagtaaacctataaatttggaaggacaaagatgaaaatactaagtcttatgaagtgccagatgggactgaatttgcggcctgtgttttttcccgttctcaccctcaccccacattcacccttatgtcatttagatatttgggtagtaggaatgccgaccagctggttggctgtgagccgcaaatgccctttctcttcttaacctttcatatttgaaaactagaaaaagtcttgatctgaatctctcctcttttattttctcttcctgagggctgtcactcacctggtctacctatatgcatgcctctcttttcctgggggatcagaagagccaaaaaacatagggcaaggctttactttttctttccacaatattatcatacacatcaaaaaatttaaagaaaaaagtatcagccgggcgtggtgactcatgcctgtaacccagcactttgggaggccgaggcgggtggatcacaaggtcaggagttcaagaccagcctgaacaatatggtgaaaccccatttctactaaaaagtacaaaaattagtcgggcatggtggtgcacacctataatcccagctactcaagaggctgaggcaggagaatagcttgaacctgggaggcggaggttgcagtgagcagagatcacaccattgcactccagcctgggcgacagagtgagactccatctcaaaaaaaaaaagaaaaaagaaaaaagtatcgatttttcaagtacgagattttaattgtcattcctaataagta

SEQ ID NO: 65109 - DNA, 2472 bp, Homo sapiens
tgcaaccacgcccggctcatttttgtatgtttagtagagacggggtttcactatgttgcccgggctggtctcgaattcctgagctcaagtgatcctcccgccgctgctttccagcgtgctgggattacaggcgtgagccaccgcgctcggccaaaagttttaaatttcagtaagttccaatttatcaactttttccctgtatagattggtcttttggtgtcgtctaaaaactatttgcctggccctaggtcctgaggattttttttaactttttttttccccataagtgatttattgttttacatttaaatctatgattcattttgagtaaattttgtataaggtgagaggtttaggttgaggttctttgggtctatattcgtccaattgctccagcatcatttgttgaaacggctcctgattccatttttgtacctttcccccgttcatttccccttagagcagtgggaatgtttttttgttagtgatgatgtcatgccttgtgcaaaatctgtattagcatctcacaacataagatttggctctattctaacggcattttccaccactcgatgtccaccgtaatacttggctctcgaagaatcactgggctggctccctcacttcatgcaggtctattctattatcacttactcagagatttctctggccttttcttcacagcacttacaaaatgcgatctattacatattaatttgcttatttgcttcttgttttcctatactcccatccctcccagaagctccaagagagcatactgttttatccctagggcctagaataatgcgtccacgtagtaggtactcaaaattttttgcttgacaggctagaaaaggtgaataaacacaaagcgggagcgaaaagtctacttctaggtcaggcactctttggacttcacgcaacgtgtgagcgccacctctcgggaagccaatttgctcgcgaacgaaggaagtgagtcagagaacccgggggtggagagaagaaagcaagcagctaaccggaaaggtctgaaaaagctagcgccggaagttaaactgcagaaagttgttccctagaatgactgcctactcccaagaggaagcgtgggcgagcggtgttctgcaaaatgggctctccggcagcggatctgcgcagaagcgttccgtgcgtgcaagtgctgcgaaccacgtgggtcccgggcgcgtttcgggtgctggcggctgcagccggagttcaaacctaagcagctggaagggtaagaggtgttcgggatcctgagaggaaaaagaaaggagtgtagtcgcgggagtgggttaggtgaggagttagtgaagagatgagttcagctctaagaggcggcgaggaggatcggatgggaggaggggcagggagcgcctgtggacaagtgcagaccggtcggcgcacgtcccacgccacgtggactcgcctttgtcggtggccgcctttctcgtcaggccgcgacgacagggctgtgccttatttgtgtctgtcgagagcagtgccgggcacggagttggcgctctgtaagtgcttgctgaataaatgacgggtgtgtgtgtcattcattcagcaagcactgagtgcttactgttgtgtcaccgggaccgatgtggagggacatttttagggtgtatttctggcgctttagtcctgttttctcctggacaatttatgcttgccccgcaccccatcgtgcgattctccgcagtctttgggctttgtctctctctctttttttttttttggaagttgcagaatggtgataaatgattttctttgctcctattgactgctaggccctgtggctaggtaccatagagtctctacacaggactaagtcagcctggtgtgcaggggaggcagacacacaaacagaaaattggactacagtgctaagatgctgtaagaagaggttaactaaaggacaggaagatggggccaagagatggtgctactgtctactttagggatcgtctttcaaggcgaggggcctcctatctcaagctgtgatacagggtaggtcatgagcgcagtcttctgtaaaatgagggatctggacggaatagttactctctaggcttcctttcagtatgatgtcccgtatcagatattcctaatgtctgtagttctcccacaccccaccgtttattggctagtcaaaatattctttgcattgtaaagtgtagcataacattacaagaatggattaatgggttgggaatgctgggttttggccttcattctggtgctgtggtcctgtttcctcatttgtaaaatgaagggggttgtaaagatatattctctaaaacccctaatgctatggctgtggcattaagtcaaactattatttcttactgctttgtaccggacatcactttcacattagtaaaacttttcatcagtgtagtttctcccaagcttgattattgagaaagatagtgccttgttttt

SEQ ID NO: 65110 - DNA, 2482 bp, Homo sapiens
gcggctgtcagtcagtgctgcaggcgccgagaggaggggcttgtgaccgccccagggaagctgggcatcaccaaagggagcttgtttgccagggacactgcaagtaggaagtgtctacaggtcgatgacaggcctaatctctatgacagggtctagactttcctcagggtccaggggcgcacctcagggtgaactggaaaactcgaccgcactttagtgccaggtgggcagggatccccatgtcagggtgggagtggggcggctgattggggctggaaatgtaggtggggaggcggcagccagggagcagggcatcctgcgagaagagcatcccgctaaggagtctgaacgccatcctgtaggcgggggagtcatcaaggcagggcagaggcaggaccagatggccgtttgaggtgctgagcaaagctcccggtttgcgcggagaggtgagatcgaggccccttgggaggccgaggcttaaccagggctcaagcagaggggagggaaggctggatttcagaggtagggaggataaggaccgtgggtgcacgacggggagggagagccaagtcaaggttaatgccggtgctcgggcggatggtgaaagcagcagatggccttgaccggggtagagaactcgagcacaggagcaggttctgtgtgtgtgtgtgtgtgtgtgtgtgtgtaggagcttttggggtcacgggaagtactgagaggtgaggagtgggatttgggacgtgcgtagttgaactcataggacgtccaggtggagaaggaatcacttcctgtctctggatccgtctcgatctctgcctggcgagggcgcgccccggctgggcgtggacactgttctccggccgcgtcgggccgggcgggtggggcgttcctgcgggttgggcggctgggccctccggggtgtggccaccccgcgctccgccctgcgcccctcctccgccgccggctcccgggtgtggtggtcgcaccagctctctgctctcccagcgcagcgccgccgcccggcccctccagcttcccggtaaggcggtgggggcgcatcccctggcgactcctcccgttccctcttccgcttgcgctgccgcaggtgggcccggtctgtgggcgccccccgatttcccgcaggtcccgcgcggcgtcggagcgggagattcccttgcagcttgcgccccgcgggccttcgggctccgcagagggacgccggccctgcgcggggcggaagcggccgggaagccacgtgtccccgcggccgcgcgtggtgggggaggagggaccggcggcgcccacgtggcctccgcgggccccgccagagcctgcgcccgggccctgaccgcacctctcgccccgcaggaccatggccaacctggagcgcaccttcatcgccatcaagccggacggcgtgcagcgcggcctggtgggcgagatcatcaagcgcttcgagcagaagggattccgcctcgtggccatgaagttcctccgggtaactcgcccccgtctccccttccccgctgcagccggctcgcgggtgtttttccctcccggcggcggtttgtccgcgtctgctttccgagttcatttcgctgccgcgaaatccctttgccctctgcccccgcccacggcggcttgggcccgccgaccctttcccggggtggtggggacagacgcccttgggaaggtgaagcgctggtagcgtgactcgccctccgggtttgggttccttcccgcgggccgctacctgcccacccgccgcaggggggcagcagggagcggaaaaaccccgggccccagaccccctgcgcctgcccactcgggtccacctaggcacagaatggaggcttggaatctcctttgctttagtctgaaactccgagttccagtgcggtgctcctcctttagcatagggtagtgagtgtattttccacattaaatttggggcacagatctgaatccctacacttacgggtaagaatctaagtactgaaattcaaccaggctcatcggtgaagagaatgttctcagttattatctgaaatatttaaaagggcattgtgagtagcccaggggagtttaacatgacctctgccaggcagatgacctgacatatgtacttcagttgcagccaaaatttaattccctaaatctagatcctcaaaccacctactttttaggcttacaaaacccctaatgtcattgacggtatgagggtgtctttacgattagaacagtcttggccaggcgcggggctcacgcctataatcccagcaatttgggaggccgaggtgggtggagcccaggagttggagatcagcctgagccacatagcaagcccctgtctctacaaataaataaataaataaataaaaattaattgggcatggttgagtgcatctgtagttccagctacttgggaggctgaggtaggaaaatcacttgagccctggaagttgaggctgcagtgagccat

SEQ ID NO: 65111 - DNA, 830 bp, Homo sapiens
cattaggatagaataccagcgaactaaatattaatatataaactataattgatttatcctatgtaaaacttaccttttatttactatgagggcgcttaactggaaactcctacattagaccaaaacccctgaaagggtctgcaacttcattaaaaggatgagtgagaaagaagttgattatactcaaaagacctatgagggagcatttcaggtccacgctctcggtgaagaggcttctctgggattttgtaatcacaggcctgacctcatgagttaagtctgaggttgaaattttctcttccctctatggtcagggaactcccaggccaagaaattaaagtggttccaggctaccagtgccctttgatacctagcagaagcaaacctaaattagatcaggaaataagtcacctaccattcaggcctttcagcattcccaccaattttatcaagtatgagcgcacgatcaaatagcaaacacataataagtaatccaccatgagcaagcatcagcagaaactgattaagaatccccaatactttgggcattggaattgacagagacagaacataaaacaagcattatgagttgtttaataagaaaaatattattgaaaaataagcaatataaaacaaacaccaacttattagacatggctaaagagaattaaaaaatggaagatacatgataaacactcaaaatgcagcaaagaaaaatagaaaactggaaaacaagatgtcaaaataagagaacagaatgtaaagatccaataaaagtctaataagaattcttaaaggagtgagtatggagaatggagaaaggcaatgtt

SEQ ID NO: 65112 - DNA, 2253 bp, Homo sapiens
caattagaactactgaaatatgggctttcctgggcagtagtgagctctcagtgcttttaggggtgtaagcagggttcagactacctaccacttgtcagagaggctgcagaggggacggctgctttggatgacctctaatgtctcttccgactctgaaatgttaggattcttatttcacaaaggagaacgcaatggtcacagaagtccaccgacttgaaacccttttaaatatgcagccttggaggctgcttcccaaacaccactcccacctctcccgcacgtgcccaccccgccccctttcaatatttccacctccacgtgcaaaccgcctcgcggcactgcccccaaggcagatagacaccttcccctgcaaagcaacgaaactgtgctccccctccccgccaagaagagaggactactccactctcccaccctgggtggctaaaaaaggaaaagtctcggatccagcctttcccccctagccagagcagggggcgggggcaggacgcagagaaaaactttcttctcgaatttttcttccaaagggtggaggagatggagagaaccccaacgagtccaaggctgacggggtggggggaggggaacccctgaatcgtttaacggctggaagggggaggggggctccggaggttgagagggcgtgggatggagaagcaggccagggagcggggtcagggagctgcggggttcctggggtcggagagctgcaggcgtcccccccacctggcacacaaagcggctgccgcgctcggctctcaccagatcctttgtgttttccatcagggcctcatgggtaggggttgtccgtgctccccgagcccgcggcgccccctccccgggctgggggcaggtgcctctccccgggactgcggcgactacagggggcccccggctgggcccagaccggtggcgggtgcagcagcccccggatttcccccctttaactcgggtggccccaggatatcaacaacattagcatagccctccctccccagcgcgcctgcgccgtgacccgcgccccgattggcccacttccctacataccctcctctctcgcttccaccgtgggaccctctgcaggctccgtactccaaggaccgtaccaagacgaagggtggaaagcgtattggggcttgtgtcaagtcaagtggttacagccaagaggaaaagcagaagttccattcagccgtcccagtgtatagtcggggtttcttgcgctcctttcaatatgttgcagctgcgaaattgtgttggaaaaattttccactccagtcacgccgcttccccctacacccggaagattggccctcccggaggaactcccacacggggcggggctgggtaggggagcgggagttacgtagagggagggagtgctggtcacgtggcaagaggctgcgcaggctccttccggcccccggggcttcggcggcggcggcccgcgaggggcctgggcgcatgcgcagcgaggttccacgtgagcgcctgcgtttctcctcaaacctaacgatgccgccggagcggaggagacgaatgaaactggaccggagaaccggagcgaagccgaagcggaagcccggaatgaggccggactggaaagccggagcggggccaggcgggcctccccaaaagcctgccccttcatcccagcggaaaccgccggcccggccgagcgcggcggccgctgcgattgcagtcgcggcggcggaggaagagagacggctccggcagcggaaccgcctgaggctggaggaggacaaaccggccgtggagcggtgcttggaggagctggtcttcggcgacgtcgagaacgacgaggacgcgttgctgcggcgtctgcgaggcccgagggtgagggaggccgcggcgcgcgggctgggcgcactcgggcggggcgcgcggtgggcggtgaagctccggggggcggagcctgggcgacctgcggcggcggggagcgctcaggtgggagggagcccgagaacgcgggcgcggagggtcgcagctgcgggtccctcgcctccctgctccagactgaaagtgcctggagggcggggaccgcgtctttctccgcccctggaggcgccgctgctcgggtatctgctttgcgaactgtggtcgtgagcatctttcgctgctgctcgactccgctagcctcttcccaaactgagggtggtcttttgatcacctgcctcagttccttgtgattcaggaattcgatttcgttgatggaat

SEQ ID NO: 65113 - DNA, 921 bp, Homo sapiens
aggatcaggactgacttttatgtttctgtattttcagtacagtgtccagcgcatagtaggtgctcaataaatgcttgctaaagtgcattgagctgacttgggaatggctcacacaaagacaaaaggcatgttctaccatggcacttagctgcaaggtggggagctgcatatgtacatcctgagctgctttgccactgctgtgaaagcagagaagggttgagtccctggaaaaggaatttgggtaagtgcatgggaggatgggaggaagcagagagatgcccgtgagtgttccaggctgtggactttgatgggcagccaagatgagacttttcaggggcaatgagacatttgttcagcaaacaaacctggggcagaacctcaatgttaaaagctctgttagaaatcatctgatagaattcccaacatgtgacatcatagtgtggggttgaggtgggagggcaggacggatgactgtaaagcaccaacataaagctggtgatccagtataacatgctaatacctcaggggaaagataaattgcaagacagggtgaaaaaattcagggaagggctctgattggcctggctgagtccagtgcctatcccttctaccaatcacaggccagagggtctcttgcttcttcctgtaccagttactagaagaggtggcggaaaggttgctgggaagacagaaactatgtgttttgatatttctaaccattcctgttagtctggagccagtatctgaatcttgtttttcacagatggcattgcaaagacagcatacctgagggatagttgagggttctcaggggccataaaatgctacaggcaagaaagatgtgggctttcttaaacgattgtctgaaaaaacagagggaacacagggaatgcacagaatgcattctgggctttctagcta

SEQ ID NO: 65114 - DNA, 832 bp, Homo sapiens
tcttgatatatcagctgtgtctaggcagcgggcaaggtgaacccattgggcagttacgcagctgctggatgaacaaataaatgtgtggaaaatgaagaaaaaccgagagtcaaagcttacagactctgcgatgtgtcctggatgcaaaggccacctcctggagtttttgctacctttgcttttcagctgaaagtattttgggtgagctcagccaagaggtggctgcagattgtaggtggagatgctggggagtgtgtggggttttgcgattttccaagctctagatgtacagccaggggagcccctatgcaagactcagcctactcaccacgtggggcgctgtgcagtcatgatatttaccagcagtcaatccggtagggagcctcagaatggtgagttggacttggcaagggcatgcttggctttcagggagtttgtttgcacagtcagattgatttctgctctcctgtgaccagaggacaccggtgcttatcttggtcccctctccaccctttgtttgcctgaccccttggctccctttttaatactttaaaattttaaggttttcctttactaaatatcacagaattttttttattttttcttctttttttaaatctgggagcttaccacccaagctggcccagcctgatgtttttttttgctttgtattttcacaaggatgagataagtccccatgatctctcctgggttttttgctggtgctgcttgttaactcgagtaactctcggcattttctttgcttcctttctctggcatttctgccaaagtgtttctgaacgttcaaggcctgagtgaggttgagctagat

SEQ ID NO: 65115 - DNA, 1096 bp, Homo sapiens
tcatctggctgtacgcttttgattagtgcacttttctgtgtatgtgttgtacttgaaaaccaagtttacttaaaaaatgttgtatcagccacagcagccaggatatgctttgaagcctttaaaattgaggcaaaacctgcttcgagttattttttaaatttgtgaactcagttcatcgctggggtcatggaccaatcctggagcccaagtttaccctctctcctgtcagttagggcaaaggctaggaatgtattaatgaccaccgcaccatcacttggtagttcttggaattttacattttctacgttgaagttcagtgatacacctggaatgcttctgagtcacagcattgcctactctgttagccccagactagactctggcttattgactgcctggctctccaggaacacacttaaatttggctgttgtaggcctcttctgacctttaggacagtctcacatgtctaccagttaatgaaggtgagccatggtttcttcagggctgtttattgcaattggcttgcactttccctgcttgttcctgctttggtgctgtccctgccgaactctgaacccttggcactgcccccacaacgttattcctctgggcctttgacttctatatttgcattggtctctttggcattggattcatgattctctctaatggactttggcttgtaacctgtctcaatctgaactgccctcactatgcatgaccctttggaaaccaatctccgatgatttcttcttggctgatgtcctccctcattgggttccccagagaggtggtcaggagtggtattccagtagctacgaccttgatggtggattgaatcatgctcctcattcccccagccactagctagggtccaataatgaataagttgatcacttgaataatgcaaacccttcccttggcttcatgtaatctccactcttgagttttgctattgtgctcttctgtcagattggacttgtcagcgttgatactcacccagaccaggcttgagctaactataccctttggacatgatatcttgaattgatgggtcctctctgaagaagaaccagcttctatagcctggtaagc

SEQ ID NO: 65116 - DNA, 925 bp, Homo sapiens
tgacagaatcttgctttgttgcccaggctggagtgcaatggtacgatctcagctcactgccacctccgcctcccgggttcaagtgattctcctgcctcagcctcccaagtagctggaattacaggcgcgcgccacaatcccagctaatttttgtatttttagtggagatggggtctcaccatgttggtcaggctggtctcgaactcctgacctcgtgatccacctgcctcggcctcccaaagtgctgggattacaggtgtgagccactgtgcccggcctcttggctttttctttaaaatatatccaattatttctcaccatctccctgccaatccccatcagcccggtcatggtcagtgccatcgtctcattatttgggttgctgcaatcctcttctattgtggactctgccccttgtagtctattctcaaccaagcaatgaggcgatccttttgtcaacagatgatgtcactctgcttaaattcctagattgactttttgttacaatgaccttcaaggggcagattttcagaagactgaccccctctagaattaatctctgtgccttctctggtgactatatatgtcagtaatggcaatgtcactgtgtccctctgaatgactgatttccactggaggtaccatgttcagggccaggcaggagttggagagagcttaggtcaggatgtacttgaactgccaaagttcccatcagttctgtggttagtatatgtccctttcaagtggaggcacatgcaaatagcaaaaagatgcttcttcaaactgaaccaaagttggaattaagagaaaaacatgctgacaagtttcatggaatgtgaaaacatcttcactgcaattagttttaagaccctggagctaagctttccttcctccttagggagaaagcatgataggaaggaaaagc

SEQ ID NO: 65117 - DNA, 1221 bp, Homo sapiens
agtgttctgtatgtatcctgctgggaggttgttatatacaaatcactgtgcccgtttagcagagaaggagactgaagctcagggaggttaagtgtctttctctaggtcgtattgtggagaaagtggctgactggggacttgaatgaggtccctagtttcatgctcggagggcaaagaggaatgtccaattggcctgagataagcctctggtaaaatgtactgtacataataggtaatcaataaatgttggctgatgacaaacatgttttctttgttcattagttatagtgattatgttctaaataactccaacaaggaagtcagcacatttggaatatcattatctttccatgataatatctttccatggaaagataatgatattccaaactgggagtgtccctagcagatctgagtctgtgtattggccctggggtgggccagccccttagactctatggtctcattctctttgtttacaaaattgagataaggccttattctctccccaccccacccatccatattgttttgagaataaaatgagaggatgtgtgtcaagggtgtattttggcaatagtctctgagccattttctgagcacctccatactgttgacactcaagtaatatttcatcagcattccattcagggtcctcccttaatgaggtgtgcgatgtacaagagtcgtgaggtggcaaaggatgggctcctgaggaaacacttaggaaactgggctttctgccattaaaagagacaaacctttgtggtgacctaattaaagtttttaaaattcaatttggaaagttagcaagctaggctcctttccaggaaaaataaggagtcagtgcatgacctaaccggtcccgggctgcttgccattccaaacaactgcagtaagtttatcaccttctttcagggactgaggtttccaggcacagacttggataagaaggatgtcctatggggtcacattgatgctgtggcccaagagaggttgccatgactcgagaaaggttatgaagtatggttttcactaaaggaaaactgatctctttcgattgtttctatggaagcttgtggattataaaacagtatcctttcaaatccatccatccatgtactaacccatctatccgtccatccattcatccatccatcaatgcatgcatgcatctatcattcattcattcatccatccatctatccacctattcttccg

SEQ ID NO: 65118 - DNA, 815 bp, Homo sapiens
ggccaggctccccgagcattctttttatagagattctgctaaaatcaaatttctgaatcctctggactgcagagtcagtctggcaccttagatgtccctgatacccagcctaagctttaggcactgtgacacatacttttaaaggtggagaatgagtcagaatctgataaggtataaatatttggttactcacctcctgaaggtgaattagctctcacaggttgccagaaatatctctcggttccctgaagctgaaacacacttgctgatgtgcattaatagccaaaatggtaggaaatggcagagtctgccattattcatccacttaccaggggaggaaagaagataaatttattgtatatgaatgaattaacacaggcattgtgcctgttgagcaggtgtgcagggaaggaaagtggatgaatatgtgtgtgtgtgtgtgtgtgtgtgtgtgtgtgtttctcatgttcctatccttaatcaagaaaatggaatcccttctggaagacctcatgaccacatttgaagctctaccatttttctgttttggagaatagtggtttgggttttatagaaaaactggaggcagctctgagtaagagaaacatggtggtggtgatttcccagaactcatcgggcttctccaagttgggacacatgttggtcaaaggatgagctgctggcaattcatgatgaagacactggagtggataagacactcatggagacacttaaagcaggacaccaacctaggaaggatctggaagtagaagtgagtggaagatggcactaaaagtggaagaaaatcatgaaag

SEQ ID NO: 65119 - DNA, 1182 bp, Homo sapiens
gagcatgtcacagatctagagctgggccccacagtacacagaagtacacagaaaacaagagctccttgctgcgtgcagtggcattgtcttgtgaggagccagggagttggaatgggtggtagggagaaaccccatacatttcacttcttcagtgtcatcacacagcaaactaatctgaactgcagaatttctctggtgatcagctgcctgttttcctggggtgatccatctatgaaaagtttccaaattgtgttaaaactgccagtttctcgacaaacagcacggagtgtactttccagggagaaaagttcaataattaaaatgagtcagcactgaagaactggagggcggtttgatctagtttagcagccgacgttttcttagcagaaaaatgcaatatccataatacataattttgtgctgaacagaagtcaactagaacagaattgtctcaggagggaccaaagtcagcttgccagaaaatctttttgaaggcagcagaaaacctggtcttcaaaagctgaagttggggagtggctgaggggccatgtctcaggtgcctacaggctggaggagctccctgagctgttttgacagggactcccctcttgctctctccagagcaattttaaagggcagataaacacaacacccaggttgtctgaacacctggagttcagaagcctgacttctcaccaccagcagaaagacctacttaatattgggcagctcttattctagggactaagtttgcctttgcctggggtgttaccacaggaggtgggagtttgggggtaattttttgtttttctgagaaaagaagagtgattaaaggagaaaatcatttcctctgggtggtaagggtccctgcaaaacatcccccgactgagcttccaggaagagtgaaaactgccaaacctgaaagtggtttggcttggagtctaagtccccaccagaggttgcaagtcctccctgtgcctgcagcacagtctcttcctggggctggctccgcgatttcaaaaacatagacaaattggctctcttctggcctcctgaagttcatgcaatcatgggaccaactaaatttgtgttagattatgccaaagactgaacaacattttgctttttttttttttttttttttttgcttcactgacaatagtccaagagaggaagccttca

SEQ ID NO: 65120 - DNA, 1346 bp, Homo sapiens
cattaactgtgaccacaaaaatcctgagtggagcaaagaattcatgacaatgaggcagccataaaaatacatgcctgggcaatgaatgactgtacatacaaggtatcctcagagtatgtaataatagtaagggccagaatgcctcttaagacaacaggctggcagaaactcaaccatagcttaaacaatgatattacatcaaaagagaaatatgtgtcaaataaggaggtagaggttgtgatcaactgcaaaaatactattgttgaagcttctatgcatccatgacttttgcagtataactttagaactcctcttcaaggtaggagtccttgaatataaactaaacttttcatcccctttggctgataaaatgcaatagaattcatggtgttgttaaaagataaatggagatacattaaaattttaaggagtatatttcagcaggtaacatattgtgaattaggcagaccaaagagagttttggggctctgccaaagggcataaggggaagcttttatagggtcaactcagaagcaaggcaaagaaaatatttgcatggttaaagtggagcagtagctttatttggatcattccagggcaaagtccctagttagagactggttggcagtttcttattggttaagcttaagttttgtttttctatttacactgagttgggttttggctgacttacatagggaacactgtgtcttgagtcttaggagagtttgttacgcagcaatagatagtgagacagaggtcataatcttaaaaaaacgacttaagagagattaatattattgatatgaatataaccttgtccaaaaatgaaatctggaatataaaaacagtctagttacttgggctttcccagagtttaagtgaggcacccctgaattctgactcctcgccagactggcaatgtgagcatttcatgttccaagaagttaagatcctattgttaatttacatttgtattttggatttctatccttcaacctaatgtgaatttgtctgatcatctcagacaggctgtgatgcaaatgtgaagtttcccttcacactgaaacttgcctaagaggacatccctgtctagcatcaacattctccttggtaccaagcacagggttctactaatcaatacagactcatcaaatgttagagatattctgcaatggaaatgctttactttttaaagtaatggtgtgcccatatgtcaatagcaatgggtattacaccagaaatatttgtcctgtggatattagctcaatacatagaagaacatttagtcttttagttcagtatagtgagaaaatacagggctcaattcactttaacacaaatat

SEQ ID NO: 65121 - DNA, 802 bp, Homo sapiens
tcctgtttcacaggatgcttcttctccgactctttggcaggttgctttcctatcctttagcttcttgaagcttctcagggtgccgtcctaattcctctcctccagtcccatgatactcactctcttggtgacatcatccaggctcatatttttaaatataatttattctgaaaaattataaaattatatctatagttctggcatctcctctgagctccaggttcctatatcagaccgactacttgccatttccaccaggttgcctaatagacatctcatacttaatatacccaaataaaacactggaattcttccctcacagcccccaaaactctacctttccagtattccccattgtattaaatgacaccaccattcgctgtattacttaggccctaaacctctgcttaaatgtacatacttcaagagatctttcctgactaccaaatttggatatttagacacctttatttcaaggtgactaggatattgatgtcatgggtagaagaactttgtttatcttgcccagtgcttaacaaactgccggccatacagtaggattgcaatagtgttgggaaatgaatggttaatgaataaccatgcatttggcaaaatgaaattcaataaatatttcttataaatcttagatggaagattttttattttagcaggttagctctgaacataatgtcctgaacaaatatatatattagttgtaaatcatttaaaaatgcatatgtatttaatgtaacatatgaaacttgcttattctcttcgataaatatatagcattgatactttc

SEQ ID NO: 65122 - DNA, 866 bp, Homo sapiens
ttgtcagagaggacttagatctctcaggcattggaggggactgcacagcattggtaggatggctctacttccttcacttgctttacttatttctcactgggctgtgatgacattgagtacagggactctattccatcctgggccacacagcagacactcaataaataattgtcgtgagagagaaagttgtagcctctttcacctatcatttgagaatctcagctccagtccctggaagctgtttgttcatgcctattaagccccaagcctactggcattctacaaggtccaaaaggctattttagccaagatagatgtttgcacagcttcgtcacttttctggcaagagtagaagtggacaacgctaatattcattctggatcagaatcaggaattcctgtttgcttagtttccagagataaatcttcctgtacatagaaatgtatcatgttgatgcttctgatgggcaggatgcccagagcttcattgagttatcaatgtttccacttgatctattgacaatggaggcttgaaagtaaacagctttgccgattccaaatagctggtttgaggctgggcaaacaggaaagctttgcacaaagctaaaagctggcacagggcttggggttttcagtaagtttctgcagttggttttaagaagagaaaaagaactctggattataaaattagggcagcagattggaccttgaatttaattagtgtgtttagagataactaacccattcaagaaatgaggtagtgctgtacaatagtgagagaaaaatggattttaagtctaaggctaccattcagggaaatcatctatcccttctggtatcaaatttctatatttctaagaaaaatat

SEQ ID NO: 65123 - DNA, 486 bp, Homo sapiens
atatcatcccctgccatcctacatatacacaaaatgttgcaggacttttccttagttcagctaaagacggggttctttgtcccacagccacaaaaattcaggctcacaaacaatgtgaatggtaaatggtaaaacagggttttattgggtaaaaaggaagtaaagggggaaccagcgactctcccaaggccaaagtccctgctagagtgcttcccacccacagcttgaatcccagattccacacaagaagaggaggaggccgacttttccccactgcaaagggcatgaacttctgtggctccaccccagtgcatagggcggttggggtttttccagggagcccctcccacctggctctcattgtgacactcccagataactggtagcaatagttatggttgctaggacttgggtgcatgatgctggctttggttagttcccttggtcttactttcccaaaaaggaaacctctgggcaacaggcacc

SEQ ID NO: 65124 - DNA, 486 bp, Homo sapiens
aagttaagggaaggtttaaaagtgataaagttgtaccaaagctgggtatgcatcaatatacgcactgttatcatacaattaaatatatgatgattagaggacagaattccgaggtgagcaggtatatattctacctgactgactttccaactgagcaaatgtttctcttggcctgaacacagaccttcatttattttcattgtgagtcattttcctagaagtcactgttgcataaatggtgcttccctgacttccgatcaactcagacagccaaaatcagtaagtgtacaaatgagctcaacaggaacattttttcccaagatatttcctgtcaattttctcatcctggaatgtgaaatggtcttttcctaaagatccccagatagtagtcatggaattaatctttattatctgtcagtattgtatttattactcatataaccctgtattccagatctcccttgaatgtggtgggaagatctcatt

SEQ ID NO: 65125 - DNA, 742 bp, Homo sapiens
gtgctaatctcctttaaatgtcttcattccacattgtaaacatatttgaagatatcacagtgtaccccataaatatttacaatttttattttttaattaaaaataaaaccttaaaaatgtttcaatcattttcttttgccattaggatgaagaacaaaatccataacatgatggacaaggccccactgacgcatcgtgtgtctgtttcttcagtctcatagaatgcagcatttccctttgatctcaccattccagcctgctgctcttctttcagtgctttgaaacaagagagatattcactcctcccaccacaaggcctttacgcaagaggtttgcatatttctcctgcaacccttgccctttgtccagtttattcaaacttatcctttagatctgtgttcaattgttacttttccagttccaggaatgctaagtaactaaatattggaggaaatttaagcttatttttatattgagggagaacaccaattatatagaaagaggtagccaacacaagaaagaataatcaatactgtgagtttcctgaaaagataaaaagccatgatatccaggggaaaaaagagaaaaaataagaaagaaaggattcgttttagattgaaggagatgacacttctttatttttttcctctcttctttgcttttcattcccatcttcatcaccataaatttgaaatgcctcaagtgttaattctaggactttttaatgttgccactttgcttt

SEQ ID NO: 65126 - DNA, 1950 bp, Homo sapiens
ctgctcatctgatgtgcaggtagaaagctgcggtgcttgggaggccgaggcgagtggatcacctgaggtcaggagttcaagaccagcctggccaacatggtgaaaacccatctccactaaaaatacaaaaattagctgggtgtggtggtgtgtgcctgtaatcccagctacttgggaggctgagacaggagaatttcttgagcctggaaggtggaggttgcagtgagccgagattgcgccattgaactccagcctgggcaacagagcaagactctgtctcaaaaaaaaaaaaaaaaaaaaaaaaagaagaagctgtggtgtttaatagatcctcaggcgattctggtgtgcagccagttgtggaaagcacaactctgaaacaggcagttctcttgcaatttatgttttcataacatgactattaaaatttgagaaattagggaacactatttgcattgcaaggacaagtattgattgtaaagggatggccaacaactagcaatgtgagtaaagagaaaaaattctgtcgtccacatagtgtattaagaacgctcttgctggccgattgcatctactttgtttgagaggctctgagcttcgttttgcaataacaagagatataacaagtcaataaaaaagagtgtacaagatgttccaataatgagcgtgccggtggttaaaggagaaaaaagccacttcgctttagacaattaaatgctggatcagctcagtgatgtttgaggattataactatatgtttagcctatggaaacactctcattattaaaaaaatttttaggaaagataacattcattgcatttatgtatttatttttgagtcagagtcttgctgtgtcacccaggctggagtgcactgacgtgatctcagctcactgcaacctctgcctcccaggttgaattgatccttgtgtctcagcctcctgagtagctgggactacaggcatgtgccaccacgcccagctaatttttgtaattttagtagatatggggttttgccatgttggccaggctggtctcaaactcctgacctcaagtgatccactcgcctcagccacccaaagtgctgggattacaggtgtaagccaccacattcagctgatttgataccatctgaatacagtcttatgctacataatgatgttttggtcaatgaatgaccacatacagagcagcggtcccataagattataatagagctgaaaagttcctgtcacctaatgacaattatatacagcccataacacttgataatacagaactatgttactggtttatgtatttgctatactatacttttcatcattactttagagtgcactcctacttattgaaaaaaaaattaactgttaaacagcctctggcaggtccttatgagttattccagaaaaaggcactgttacaggagatgacagctccacgtatgttattttccccaaaaaccttcctgtgggacaagatgtagagttggaaacactgatattgatgatcctgaccctgtgtaggcctaggctgaagtttgtgtttgtgtctttgtttttaacaaaaacgtttaaaaagtaaaatcaataaggaaaatttgtaagaatagaaaagaccttacagtctgggcgtgatgactcaagcctataatcccagtactttgggaggctgaggagggcagatggcttgagaccaggagttctagactagccttgctcaacatgttgaaacaggtttcaacatgatgaaaccctgtctctataaaaattacaaagttatccatagtggtatgtgcctgtcgtcccagctactcaggaggctgaggtgggaggaacaattgagcctgagaggtcgaggctacagtgagccaagattgtgccactgcactccagcataagcaaccaagcaagaccctgtctcgagacagagagagagagaaaggaaagaagg

SEQ ID NO: 65127 - DNA, 2232 bp, Homo sapiens
gagggtaaatatttctagttattcagtatattcagtggctaactatttattttgtgggtaccagacaccgacataatcggttacgtccttcccttaattctcataattctgaggtttgtgttattaaccccctattatctttggtctacccagggcagccaaagaggcgcagagaagaatgacaaggtgcccagcaagcggcaggatcaaagcctgggtctctaattcccaggctggagattctgggctgcctgctcctcctgcacggggcgaaaagcccacctgggatccgagcgggcggccgcgccactctcgcaggctccatacacccgccactacccgcctgtaccacctgcagccggcagcgcagcctcctcgcgggtcccgcagggcgcgctgcaggtgcgctgggcgtcccgaagccccgccctcgcgtccctgccccgcgcccagctcctcacgctcggtgcccgcgccccgcagcggcagcgcagaacgcaccgcctctgccagagcccgggaagcgctcgggcgaagaggaggagccaagggtaccgagcgggtggagtcgggagccggagagcggtggaggcggatttcctgggcccggccctctggcgctaccatggcgtttggcaagagtcaccgggatccctacgcgacctccgtgggccacctcataggtaaggaggcgcggggagagacgcccaggcaggcaggggaccgtgggatcctttcctgcttgatccattctcggcctgcagaggacggagttagtccaacttgaaaaaattattcccctccccccgcaactttcccaaggcacccgcattccacccggccccctttcgtcgtttccttcttggccaactcactgtagaacctcagtcctcaaaaatgtaccttcctttcgatgccgcctggggagtggaaccaaacaggtgaaccgcgggagtcaggcatggagtgtttgggcctccacgaggagacaccagaaacttctcggtaggggaagttattcctaaaggcacattctccagggcacggtattgttatgcccgttttacagatcagaagaggaggctctgggagactaagtgatgtggccttactgtgaggggcaggtctccccaaaccagttttctctagtgccaagcttatacaacctggattacttttctgggtaaacaaagagaatgaaaatgcttggcattggagtgaagaggaggggaacataggagccatctggggccacggaggtctctcgcaggccactagggactacaccagcatccacctaaatgatttctctctcctccggatgtaccttgcatgatgtatgtagaagccagtgattggactcctaccagcaccagctcactgctccttcttttccctgattcctcccttgggaattgggtgtggcacgagtgcatattaatgccaggcaaagtgtgatgatgtcaggaacttagtggggtgatgaaatcgtgagaacctagtagttgtagtaaagaggcccagatttggaaaatttagatcacagctctactaactgctgtgacaccgaacacaccacttaaacagaaccttagtttacacatccttataagatggtcagagtagctaccattgaggagatgctttcccttaatggctgtgcttttttggatattagaatgaaccccaagcagaaatggattcagactgtgtcttcataggcaaacgaaacttcagcagttcttctgcttaattttttaattctgtaaacatggactaactgtcagctatgtgcctggacctggatcaggcactggtgaggccaaggtgagacgtggtctcaaacctgagggaactcactttcttgtagagaagacgggcacagttttgtgtggcacctttgcaatgcaagaaaatgcaaaacacacaaaacttaggagaagggagaaatgaattctgcgtggcttttgaagggtgaataggagttttcttttctagggaggtaagctttgtccattcggtgccagattcaagttttttgttgttgttgttttgtttttgtttttgtttttgttttgagacggggagtgacacccaggctggagtgcagtagctctcggcacactgcaacctccgcctaccgggttcaagcacttctccttcctcagcctcccgagtagctgggactacaggcacatgccaccacgccaggctaatttttgtatttttagt

SEQ ID NO: 65128 - DNA, 705 bp, Homo sapiens
caaacaacctagatttgaatgccaattctacttcatactgactgtataactttggtaatttcctaacctctctgaacttctatctcatcatctctcacagtgggttaaatgaaattgcgtatgataaaatacttagcactatgcagttcaccttctaggtagctgctcactaagccctagttcccttctctgaaagccaggcaggcggagatttagctggcctggcctgggcctgtggccagctgttgtgcttgaggtctttattaataggtcactcattactgttgctgcagcagcactctgaacttgggttctgattgattcctgaattactgagaactgttccaaaaaaaatcactttgccctttggcaatgtaaacttaatgacacttgctggtgcagcctaggcagattatttcaggaataccagacattttttattctgttgtagctcagactcaacagctttttcttggcagaaaaggctacatttgctggagttcagactgaagattggggccagttcatgcacatctgtgacataattaacactacccaggatgggtgagtacagcatggtttccatgtatttgcctctgacaagaagcatcagaactacagcacgttttctcttgcaaatatttcggttttgttgttgaaagagtgttttcatcattcattaggcaccctctatcttttgaagac

SEQ ID NO: 65129 - DNA, 2245 bp, Homo sapiens
gaatttgcacttttaacaggttcccgggtgatgctgatgctgccggtcctgggcgccacactcccagaaccgttgcaatgtacttaacagtttccaggttaagtacattacagttatatattaacaggggtggggcgagagagcctcaaaggcctaattcatgcctctttgtacggaggaactgctaatcccagtttaagcccaagaaacacgagtagtccaatttccagagttacccttggcacataaaccacatgtggtttgcagagtgaatgtatgaataatacattttaaaagcgtgtgtgcgcaggagggtaaggcagactgctagatacccggttagaggctgcggacctttttttttttttttggcgaggtgcagttcatagatcaggggtttcactctgcagcatggtataagcacaatcactaagaactggatgctacttgcagttttgtcaccaatttctttggtgactttgggtgttaagtgactgttttgaacctctctcctcttaggtagataatatcggaaacctcttccacctacgacccgcagagcgagggcttgtcccgggatttgtcttgcacccccacctctcgcgtctgcgccaccctgcgggcggcgccggcccctacctggcaatagagccgataaaggggtacggcagcgtaggacgcccccagcatgcccacggcgacagcggccacgtaagtgagggtcgtcttgttctgccgccgccgctcctcctcctgcgcgcgtgtgaaagggttcgagctcttaggccgccgcggcggctgcaatgctggatgccgggctcgaaggctgcagcgcttccatgtcccaagccacctcagtcctctctcggcacctcctgtcccactccactctggcctaagaaacggctctaccctctctgcagccctggttggagacccagggtggatccagcgccagccacagaaaggaacgcacctccatccaggacgccagagccctcccataaccctctgaactaacacccacccgcctctcagggacgagaggtcaaatctcgcgaggcgtgctccgtctcgcgagatctgggttgagcctgccgctgccttggctaccaggctcctcaggtggcagcgcttgcagtcgggctacggaggccgggttgccagattacgggtaagtttgcgttttgctttgtgactgttactcccacttcgcttctcgccagaacgtctcttaacatttaggaaaatgcgtttcgcccgtccgcgtgcaagcttgccatcacttggggttgcgcctgtgatctttatttaaactccaccagcctttgtctcgacccggcagccccggcgacgctctcccgcggtcttttctcctggggtcccttggccgctggctcctgtgctcactgccctggacttagttcaagtatcacctctctcaggaagccttgctgtgttaaccgcagccctcatgggcacccacgacacctgcattttctcagcccgtgggcagtcggcttcccctgctctgatgccccttacaacttgcccagtggaaagcaccacagctggagcaggagggaggctgtcacgctgaagtttgttctggagagagtgaccaggataggagggccatttaaggagagactgaaagaaacgaaccccgtgggaggatgtaatagctttcttcagttgtcccacaggacgaactcgaggggggcagacagcatagcggattttactgtgttagaaggaagcatctttctagaaactataaaatagcagttaagagctcaggttctgaggttagggggttctggatttttacccgggtcctcaccatggccctgtgcccttaggtcagttacttgtcctctaagacctggtgtccttacttgtaaaatggaaatcagaacagtaaatgaataatattcatataacgtctttcatgatgactgaggcatagtaagaatgtagttaaaagttaggctgtatttctacttgctacgtggccatttctaatggccagagcaggtataattatccccactatgtggatgaggaacttggaggcctgagaaattttaactagtcattcgacattttatttatttattgccctctcaactgtgggcctgacaccaatcgacctgctggcactatagcacagaacaagtcgggagatcacttcagtgatggagtgtcctttctgctgagggactcagaaaataatcaagtaaca

SEQ ID NO: 65130 - DNA, 366 bp, Homo sapiens
tttttgtgattcagaaagtgactcctgtattctccaccattaaactatgaccaagaaacagcagtgagcttggagaaggaacaccagcacatagcttttggacagcccagctggcattcctgtttgcgcagacaccaaccatacctagtgattcattagaggtgaatgtagccttctaagcaagcattggcaaacaaaggtgtctatttcaaaattatcatttccaaatagttgtttgtctttttaattgtagaaaagatcttaccatgttaatgattctaagagaaattttattatcctatttataatatagaactcaatttagaatcacagaattttcaatgttggaagaatctgcaattcttc

SEQ ID NO: 65131 - DNA, 559 bp, Homo sapiens
atggaatgttcatatatggacagttgtaatatgtcaagcatgagaatactatttataaaaagtcacatagcaaagcatactacctgaacttaccctcaggtaattgctcctgtttttcttccttcccatctcctccaattatggaacttcaaaggagagggaggaatttaaatgatttaaattatggtttcttctttggactaatatgtgctgataaacattaaagtattaaaatatataccaatattttaaaataagcaaagctgtctcatcaagcttttccattttagttttagacatgtactttgtacagggtgatgtgtcctcatttcaccttgcagtggcattccagccctctcatgttacactcattagtatttctttaaaaccactttcaagttaggcagctctccagctttataaaggccttgaaatgaagttaacctgtgccgaatcaaatactttagtaaatttagcctccataataagaaattccattaaaccattttaaagagatattagtaatgtggattatcgtcaagagaataatgattctttg

SEQ ID NO: 65132 - DNA, 1588 bp, Homo sapiens
catatataatttttttcctcacaaatgtcagcatcccagacactgttctgcatcatttttttttacaaatcacataatgtatcttgaaggtctttccatatcagtgtctagagagcagagtctatttgtttttaagagctgcagacaacttcaagtgtggcccaaccataatttacgtttctatgaatttaaccggtgttatcgttggacattttgactgtttctggccgtttgtgatgtccaacaatgatgtaatgattatccttgcagggacttcacttcgcaggagcagaagcccatttgcaggataaattctgagttgcggaactagtgatttacagggcagaggtgcagtctttgtcttaatttctgaattcacgaatgttgaatgtgatgaattcgtgggaagccccgcagggagcctaagcagctctccagaggctgtggttgtcacggatgatgattgcgggacccgcagactgagtctccaagcgctccgccccgccgcgcccctctccgcgggtcccaccgcggacccgcccctgcgcgccccgggccaggagcccctagctgcaggaccaggcacgtgcgattccacgtgagcctcccggccggagcgcagatgggaagtgcgcatgcgcctaccgcctggaaagtaggtcagactcctcctctcacgtgacctgctccccttagctaccctcggcgcctccccgccggggcgcagccgggatgcgctcggcagccaacgtgacggggctgggcgcgggcggctccgcgagcgcccagcgcccgcgaggatttgccggttctcctcacacccgagcgctccgctcagaagtcgggcgggcaaaagggagcgcctcgggaagtatctgggagccgggctggaaatgaatggggcccggaagcgagctcaaatcgctgacacctggcaccgggctgcgtccactttcatgcttcctaaggcagttctgcctgcaagaagggaacgcgcatcgcctttcagtagatcacaccgatcgtttgcacgtttgcattctcaatttctgcactatatagggcaactcagacatgaaaacaatctttgtaagaagaagtggaatgctaatggttcctggagttttgcaggaatattccaccggccccatttctaatctcccactcactccctccccaaagacactcctactagaaagcttatcggtagatttctcaccttccacaagagacttcaggggcgctgctgctgctgctgctgctgctgctgctgctggaggctggagggggttgggagcagggaacgaaggcaggtctgaattagctgaagctaaattctatatatcagaaataattttatttattgccccattgctttctgatttttaacttgttgcacaaatgacagactctgcctcagtgagttgcaatccagtggagggcactaacaggcaaaatcatgggttacaatgcagtgggctatacatgttttaatagaggtgtgcccaggtgttatataagcacagtggtgggtaccctgagtcttgaagactaagtgggagttagctggcagagaaataaggcagag

SEQ ID NO: 65133 - DNA, 2046 bp, Homo sapiens
acagtgcccagcagctcagtcctccgcttcccgctctgctttttgcatcccattcggacttataggaagtagttattttttggtggtggtggaaactgggcaagaaagaagacgctaagcttggccggggccaggagaaatattgagaagggtcgttaccttccatccgatctaaaccaatcatctcaaacttggctactctttggaaccacctggggagctttaaaaattatggacgccctgatagcaccgcagaggttctgatctaattgatctgggatgcggcctgggtatcgcgatttttttaaaactcctcaggttattcccagcttgaaaactatggatataaatttctcattcctcttcccacccagaccaaaaaaaaaaaaaaaaatctaagcctaagttgatggcccagggaatctggcacctgctcccctgcaaccagccagtgctgcaaggtccccgaaaatcggcgcgagcggcgacgctaaacacgcggcggcggggcgagcgggccaggcgggcggtgccgcgcgtggccccgcccccgcacgcctatgggcgcgaggtgcgggccctgacgtcactcttgtcagggccgcggcacatgggcggccggatgcgctgagcccggcgctgcggggccgcggagcgctggggagcagcggccgccggcgcggggaggggggtggggtgggacggcgcaccgcctccggtgctggcactaggggctggggtcggcgcggtgtcttctgcccttctgcagccgtcgacatttttttttctttctttttttcaattttgaacattttgcaaaacgaggggttcgaggcaggtgagagcatcctgcacgtcgccggggagcccgcgggcacttggcgcgctctcctgggaccgtctgcactggaaacccgaaagtttttttttaatatatatttttatgcagatgtatttataaagatataagtaatttttttcttcccttttctccaccgccttgagagcgagtacttttggcaaaggacggaggaaaagctcagcaacattttagggggcggttgtttctttcttatttctttttttaaggggaaaaaatttgagtgcatcgcgatggagaaaatgtcccgaccgctccccctgaatcccacctttatcccgcctccctacggcgtgctcaggtccctgctggagaacccgctgaagctcccccttcaccacgaagacggtgagcgctgccgcggccccgctccgggaagggacgacgctccgggggtccccctccgcggccgggcacgcccgctggagcatcccccaaccccgctcccgccctgtcccgcggcgccccggccccgcgctgatgaaattgaggagctcacccagcacccttcctccccttcctcctcctccatgaaaggggagggacccctcctgagctacatttaaaagagcttcgggcacccggcctccctgggtcccgctcctgcggcgcgggtgggaggtgtaacttgacaggtcaggatcgttccctagaacgaggcacacccgcacgcagagcgagcccgcctgcggagggcagagcctcccgggctggggaggagaaaccctggggcctggttctgtgcggggcagggggcgggggtcggcttgagggagggggtttcactgcgtagcctgggttttggggttgtgttacagcttctgttactggttagtatttggaactcacgaggtgtgagagaagactcgttttcttctggtgaagggtagctgagaaagcggggtgggggctggggccggtggggggagtggtctctcggcgggaagccgtgcacgcctccagcgttgacactttcccggtgcactttttctggtgggaggggagagcggagcaggctcacgtgtaaccgcgcaggagcctcctctggcttgagccctttcttggtaagtcccaaaccttcccaagacaaccttggccttagcagtagaggaggggtacgtgtgatgaggccccaaacccggctaagtgatgccacggatttgggt

SEQ ID NO: 65134 - DNA, 2534 bp, Homo sapiens
ctcaaatgtttggagaagagaaggaagaaaacactttgtatttttttaaactccttttgtaaaaatcagtgtgccccagtggctttagaagcaaacacatgtgagctcagaaagttctcattctctgccaacatgaggcattggtcaagttccctcaagtctcagagcctccgagtctttgttgtaaatggaggtaattgttattttgcaagtttattgtgagatttttgagataatatatggaaagaaccaggtatccagtaggtactctaaacatgatgttaaagaagggtggaaggtccctgctttaccaaaattaagaccactaactcactggctttgtaagtctgaatgacctcctattgctgctgtgatgaattcctggaagataattcaagcctggttattggctgttgttttcttaaaaatgacagcagttgtatataatcacagatgttatattcctattttaggtttaagttattactcttctcaaataatgtgctgagactgttctctggtttttatcctagatcagcctgtagccctgccccaaggactagtgccttctttccaaagtaaataggaagatgttgaaaaacaggcagagatccacgtcctgcctgaacttttaactctagatctacaaaagacagcagccagagaaggaccctgccattcgtgagaaatagtcttataacaggccaggaaaagtgataaaagagcggtattgtttttcttttctttctttttttttaagtccagctttcccttcttctgcagcatttagtaaagataaagacaaggaaaagaagctggatgatgagagtaacagcccgacggtcccccagtcggcattcctggggcctaccttatgggacaaaacccttccctatgacggagatactttccagttggaatacatggacctggaggagtttttgtcagaaaatggcattccccccagcccatctcagcatgaccacagccctcaccctcctgggctgcagccagcttcctcggctgccccctcggtcatggacctcagcagccgggcctctgcaccccttcaccctggcatcccatctccgaactgtatgcagagccccatcagaccaggtaagtgccctgaagattctcccttcagaaagggaggaggagggtgaatgggacaggcaaggtagagttagcataaacatcttaacactcaggttttagcaaagatcctaagagaggtaccttcttctgctccactcctggcagaggctctcccactttaatgagcatccatatcactcatctggagagtccggtaaatacagactctttgtatctacccctagaaattctgattttgcaagtctggaatgagggcccaggaatatgcattttaaccagctcccccatgggattctaatgcagctgatccaagggctgcagtttaagaaataacttacagttaatgatttggataatttaagcctccatcgcatcttgtatctcttttcctcattccctaaacacgtagataacaggtagactctcaatagggtttggtttacctatattcactcttgtctgtcctgaaggaaaaaaaatgtgagtagggatatggggcaggtatttttttttccatccttttcatcttgttttgtcattagctgagaagtagaatctaaaagcaggctctcatattgtgtttctgagccttcttcaggaccagactccatctctctcgttgctattcccataaacccaactgttcttatctttttttttttttcattttcatctgtctatcacactcagtccacctgtatcaaagcccacaaggctgcaaggtcagctgtaaatgatcttgaaatagtacacaaaaatatcacctgaaatgaccagtacttcaaaacccactgctaatgctcagatataaacacagattgaaggagctttgaattcatgcctttagcaccctgtagtaccaaatgaacaggaagaaagacgatttcatgtgcacaggtaaccaggaacaaagattcagccagataaatcatccggaaggtcacagagctgagggccttagctgtgggggaagacagaaagcaggacaatgcgaaacttgtgctagagattgttactgaactccgtgtcctcgactcttgtagaaatttctgtggcacatggagcaagatttaaatggaaggaaatgatgtaaaggaggaagagaatacccctgcctcgatatattcatattgaagttcctcctttcagacctctgtgtgctggccccttctccaaaattcactttgaattataactcaaggccactggctggaatggaattaattcttagcctccagccacccctggaggctgtgggagcttgggaaaacatgcctttatgtgatcctgatcccctgctacttagaatgtgcggtaccactatcttcaatttttttgtaggaacaagcaacaaaatgaataacccttcaaagtgggaaaacagccaggagagaagggaacagagccccagtgag

SEQ ID NO: 65135 - DNA, 2515 bp, Homo sapiens
tgagaaggtttgggtatggaaggaaaacgctggcctgggaatctgagtaatgatggagggaagttctgtgcaggtgattctgggtttatggaaggtcagaggattctcttacttttcccaatattatgaggtgaagctccgcttaagggcgtgcagttcgtgtatctttccagtccagcagactgataatgtctgcaggttgggagcgccatgactgatagtagctgtgcccggtgtctcaagcatcttggaagtgctgttcattcatcaggggctaggagatcctgaaggggagggagtctgcatggttctggagacaggtagacatttttctgtttcttgtagagtttatcttctccacggatccctgtagaggacaggcttgctgacattcacaggatagtagtcccaagcctgtggcaaaaggtatttttgggtatgtctggaaagcaaggcaacttggtggttaggattgtaggctctgggctcaggggcttgggtttacatcctggacccacccctggcttgccgtgtaactttgtgtcaatttcttaaccctttaagcctcagtttactcgtcaatacaatggaaattataaatggtccctctcccttggggttttggcagggttaaataagatcgcatgtgacaagtctggccagtgtgtattgcacgagtactgggtgcattcagctgttatggtgtcagtggcatgaggtacagaaaggaatgactggattcccaatccctgttttctatttagggatttatttatccagtccccttccctctgcaaaaataggacatgctttcatgcattttttttctttcccatcatgtccaacacttacagcctgacctttctcttccttctgggttgggacgaatcggttccctgatgttaaccccgcagcatggcttctgggttaccaactcctgttttgccaatgtggaaacagccactgtctgggtgcccagtcccccagctctcgtgtgagccctggcaaccctggctgcctgcctgcatgaccgtgtgctccaggcacgtggctgtgccctgtggagcttgcccaacgctgtgtggtgtgctggcttgcttttttttttttttttccctcctccccctcgcttcccttcccaggagaatgacagcaagtgccagcaagcaattgtaatcctgaccctggcatgagaaagctgagctctggagggcagttcagatgccagggaaacctgttctgtccaacattctagccagaccccaaacctggccctctctcctgcctgtctgcccagaggccctgtcttctctgcactgctgcggtgggcaggattcctggaggccagctcctgccaagggtcttggcagagtctttccagttcagcactgtgcctaccagactagaaaaatagcaatataaagacagaattaggtggaggagaaggaaagggggtgggggaggtgggaagaaaaaaacccttgataacatcctaatgtagaaagccagaggaggggaagacagccgtgatttattaggtttctcagaaacctctcttccaattagcactaatcacttttacccaggaatcattttttatgtctcagcaatgaaaatggaggtaagagggaaggtagtagagaaagtaataagatgaaaaaaagtagaaaataacatattagagaggtacagggcctgtgtttgattctgtaatgggtgtgggtgagaatattggtcacagctaatattgattatagtatttggccctcccccagcaaatgtcttgtcctaaagctactaaaccactgtttttctataaatttaaatttccctcagacttaggtgcctctgtctcaccatgcacaatgtctgtcagaatgtcctgtgtttgagacaccagtctatacgggcaatatagcagtaatgttttttagagcacagaattgaataaacaaaacagcctgagtgtgaatcctgactttgccactcattagctgctcacgatctcaggcaagtcatttaaatgctctgagctttcagtttctcatccggaactttggaataatcattggacctgcctcataggactgttgaaggtcatatgagccaatgcatgcagagtaattgtcacagtgcctcgcacacagcaagtgcttaataacagctgctgcaagcagcaccttcaccaccatctaatctcatttcccatgggaggaccaagcgtggggctcagaaagagtcttgatacttttcccttcctagctaattaagaacactggtcaagaaatttggatttctctcctgcttctctgccaagtcttgcttgcccttctcttagcctttgaattttaggtgaccttgagtagctaactgtaccctttactcattcttcctggctcatgggattaaataaacaaaatgcattttgaagaagtttttttgtttgtttgttttttgagacagggtcatgctctgtggcccaggctagagagcagtggcgcgatcatggttcacc

SEQ ID NO: 65136 - DNA, 811 bp, Homo sapiens
cttttaggcaaagtgatgagtgacaggacaaactagcatgttctcagtgtcaaatgacgggtatatagaggcctccaatatctgctgaaaagaggaggttgaaagattaatcaagaaaatgaatataaataagggagcagtatagccaataagagctgccagacctcacaggaagaagcctttgctcaaggcaaaggtgcctggggcgaggcttcttggaagagttgtagcctgtgatgggcccggaaggaggggtgagagagccagattggagaggttaatgccccacaaagttatagaggcaggaatgcccacagggtgttttaggcaacagggtgtagatccaatttggctggtgcagaaaattcatatgaaggagtcagggagatgagtcagagaggttggtgccagtcaggctgacaacttcatgagtaccaggctgcagagcttgaactttatccagtaggcaatagggagccattgaaggtttttcagcaggaaagtgcatgtgaacatttccacttgagttcaaggttggatttgaaacatttttagaaacttgacaatagtttcctctggcaagccaggatttccttatttttattattttgaaaataaatactctcccttgaacatcaaacagcttttcaaaacacgatgttctaatgatctagagaaagtaattcaaaaacacagggtttaggtttcatttataaaacccataattttggtgattgggggaaacactctttggcaaggaaatagtttgagggatttgactggttcagaatttaaaagtccaaaagcaggc

SEQ ID NO: 65137 - DNA, 5498 bp, Homo sapiens
cccaagccaagtagtagatggattaagaatctgacattcttccactcataaaggatgacagagtttaaaaactaacgctgaaaagcaaaaaacatttgacaccttttggaataaaaaaatcaacaataatcaagctagttacttccttaaaaaatggtcttcatgccgaatggaaaccaccagattctctctggtgttcagcattccagaacaaccctgaaaataaattatctggctggaatcattgctccaacggttggatttcttagtggtcgtttactagccagacaaaataatttttttataaagaaaagaaaaaaaaaaggaaagcccacagaaggaaacaccccagggcccactgctggctcttttgatggcaacttttctaggaggacagtggccagagggggcctttggctgctcctctaggtggctggagtcaggtttgtaggacctgcctgtgatagtaggtttcatcttgcaactggctctgatggattagtaggtgcctgagaagtcattttgaaagggtctgaggctcggtctgggctcagtgaagagttctgtgattaattagtgatgtctgcccttggcttgggtggggcagtactggtgcctggtgtttgctgtcctgccagagcaggtttggaagatcctttagtagttgtccttctactgggcagcagatcaaggactcaggccggtgttgcttccgatgtcctggaaaagtgttttctgagcctccagcacataatgttttactctctgaaggaggcttattctgattagcttaacagagggtatggaagaaaggaagtctattgattcagctccttggtcacgagacaggaattgcaaggtggagggaagctgtaattccaacacgtaagtccatggatactccagtaaagcacaggcataggtgccactgatccagcagaggcagccacaaaccacaggccctggtaagctgcctgtggccagaggtcatggctgcagattccagggaaactgcgtcctcggtaggcagtcagccgtacactccatacttgcgattcttgatatttgaaatcaaaatcaaagtgcagccactttctttaaggaagctttggagaacttgccagtctgtttaggattgaaggtgattctcagttatccatgctaaaggaacagataatctgaagtttatttctcctcagctgtggaacgtgctttgcgtttttgtgctgttgatctgctttcctggtaaggtttgaactcttcagatttttctttctataaagaacggttgagggggagtgtagtgctttttgcagctcccccagtatgtttctaacatagccagccaaatgtctctgagcccttccagcctcctaactttaaatccatgaactgcaccagggaaataatcaaccagttgcaatttgttgagcacttactgtgtgctccctgggatccaggtaactgtgtgacaaggacttgatccaagagtgtgttgggcaatagggtgaagtgggctccaggttaaacattggctatagggatttacaaaagagttcactgagagtgggcctgacttcctctgctactgctgtttcctgttgtttccagtaactgcacttgagctctgcatacggttaactttcaattatcctgaggctgattaactggtttgcagattaaccaaggtgaaggctcacctgggcctgggagtcgctcatcaactcagctgctccataattagctggtgatggctgattgcctgccccatggttgggaagcctgggcactgggcgactgcaggggagggggaccaagggatgacttcttccaggaccttctactctctccaaccagaggtgccctctagccctgtaaacttctgcattctccagcacagttcctgagaggttcagaagttacctgggtcctggtgctctgctcctgctacctttcagctcctgcccccaacaccctgttcaaattgggaacaagttgaccacagggcacagtgaatttgaaagtccggagattaagtcatatgttgaaagagggcccagtgagcaggggccactaatcccctttcttcctcaacctaggaacctcctcccttcccaagatatagatatatatagattgagaccctgagcaatggatctcttttgaggccagtggagaccaagaccactgaagcaaggagtcagggactgcccacaacagcaaagctccccagagtccaggccaccccatggtgattgtttgggttccctgtgattgcctcccatggctgccctcgttcatagagagttgactgcatttgcctgggtccctgtggggtgagagtatggaagtatgtgtattagtcacaccttacaccagaccagaagatatacagtttaacctaggagtcaagctcctgctatatttggaatggtctcagttttgagacgtggtaccttggatcccaggtatatccaaagtcttgagagtgtccattgaggactttggtctgtagccaccaagaaagagtaaacatttgtgcaggatcatgtttgatgggattccatggattgttttcatttcttaagcagcattcccctgagcctttgacatgtctttccatctctggctgtgttctcacttgcatttgccaggcctgcaatgcctctgccttgatacaacacagtgtgccagcagctgcagtcccttttcagccagggccatgggtttccttgggtccttctctctggctcacgttttccagggctgttggtgtgtacagtctagagatcacattttattaacacaaagaaatctgcttgggctgcctggctcttgcagtcacgtggagagaaatgtgttcctttggtccttcagcctgcagcactctgtgcaaaatacagcagagagctgggcactgggccaagcttacatttcacttcggaacacactttcgcatcactccttggcagaacatccacggtggtgtctatttggggagtaagttagagaagtgttgtttgcctcttatgagtgtcgagagataggacctttagaaaatgttttacttttgcgcctgtcttcatcttcttcgcggtgcccaggtactgaggtgatccagctaaatgtggcagtgatgcctgagagaagccccttccttcctcgggccacccttttctcttgcaaaatcagtaaacagagccaggactgcctgggacagggaaacttaggccaaggtaataacatcaaaaccaaagtcctggaactcttgagtaagctagttaccctcccagataaaacaactttgttgtccaaatcttctttccaaagatctaagacctttctaatgttggtccaaggccagccatggaaggaaggaacttcagcaagccgcctggaatggcaaacactgttaaaataaacaaatggacctttgccatttggttttccctgacttgtctatttttatttcttttctccccccacccttgtactttacctctcgatagtacccccctttctccacccctactcccattctcatctcacttttctcaggggccaagctggctgttttgccttcagtaaaacaaatatctaatttcaaaaagaggaattaggagaaagaggtggtataattcatttcttggggtaatctcgcttccctcagctcctctattgtctgttcttgtaggtggccacctgaagcttgacttgcttttgaaaataaagttggttttggaattttaaaccttccttaggaaagacttgaatggttagaaaacaaagatttattggaataataatgacgtttcttttctcaatgaaatagacccctctcataacaaacggttgaaaataaactctttttccccatcacaccaagccataaattccataaggatttcccagcgccaagccttattcagagtcttatatttactgctttggaatgttacttttgccatcagtatcatccagccaagcaacaaccaatcaagacttacagaaacttttccagctagatgcatgtgccaggctgcttcttccttccatgatggaaggcctcccttgtcatagaggatgcccaaaatctcagggactgggatacagcctcctgccagtctgtgggtacagtctttgcttactctgcagaagggaggtgacagaaacccattccacctgtctcagaaacctgctggtaattaactttaaaaataatgccaagttctcacgtggctggtagatgcattagctcaatcaggggggaggcaggggagaagcatgctgcttcaaagagtaatactgttgcaatcacattagtcattccaggggaggttagataaggttattgaaaaggtgaagtcaccctgtacattgaaagaggtcttctgaaagtgttgagaaatagttgaagttcagaagttttatttggagctttgctcccccttccccttgtaaataagaccagtattttttaaaagccacattttctttgtttgatcgatgaacactctcatagttgatgattgagagtcatctacagccagtatcaagggtcagttctgcattactcatgtgtagattatctctttggtatactagccatggtcactgtgtaagccctggccagttgccacccagcataacaacaccataaggcatctaccccctgcctgcacttgggaagtgttcagggaatgtaatttcattttataattaagtgaaacaatgcacagtgcatttccttggtggattctaacagcaggacagttattattcagaaaggactgtgtctggactactttgagaatcagtagtttaagttgttgcacctgtgtttggcctatcctcataccagtgtaaatacttcaatcctgcaagattttctcattttgcataaaacaggtgaaggtttgttgaagtccatcttccaaactcccaaagtactctggataccttggtaggtccttgtggactccctgttgttgacttgcaagtttcccagaggtggggactggcttttatctccagcacctaggcagctgctttgtaccagagttgatatacaggaaacatttgttgagtgaatgaagtaacaaagatactaatttcattagaaatggtttgaaatgagtgcttgtgttggcagaattttgtccaacatggttggtctttgcaaagggttatgatagtatgatgcacgcctttgggccagatgtgagtcaggatggtcttggaggaggcgaagtgcagatatacccctgctgataggctcctcataatacttcagtgagctgtttttctcgtgactgtttcactattttctttttttcttttttctttttcttttgagatggagtcttactctttcacccaggctggagtgcagtggcgcaatctcagctcatggtaacctctgcctcctgggcccaagtgattctcctgcctcagcctcccgagtagctgggattacaggcatgcaccaccatgcccag

SEQ ID NO: 65138 - DNA, 683 bp, Homo sapiens
gatggggtctttggattccaatccttgtctcattttcccaacctgcctgggaagtgggtggttaaagtttaaagcctggaagaatgggggaaatagttcacaggcatgaggtgacctgcaggagaggctgatggtctataggagattggaggatgagtttggcttaaacatgttgatttagaaatgacagagggattggaggcaatgaccagcagtccacagatcagtttaggactctgtgaacgttagtggaagagattacagagaacactggctaggagccaaggcaagaaggctttggaaaggcatgtttgcctttgagtgcttaacttagagactcatgcgggaaagaatctgtggatctctttgagaagctgcagaacagcagatacacctgaatcctattcatgttcatccagaaacgcagactttaaaacaaccttgttattcttcctttgttttgtttcgtttggttttagggggttggaggggagggaagggtgtcaccgggggagcatatgggtcatttgtttgcagttcacaggggttcttagtgaacatcagcgaatattgtcgctgatttcgtctcctgcttcactctcttttctaaaaacaaaatatttaatgtagcccaaaggagaatagtcagtttaataactagccatggcagctctttgaaaact

SEQ ID NO: 65139 - DNA, 1365 bp, Homo sapiens
tacatatttacagcatttccacttgaataattcaattttctagtgttctgaacaatagcagaggtatagggaaacaatatggagagcaaaggttacagatttcaagagtgagcaagctatctgcacacaagttcatagcacttcttgaacaatccaatacccagatattataaacagcagcaatattctccccttcaaatatgcaatctgacccaagtacatcaaatggggaaaaaaatgcatgcatgtatgtgttcaggaggagggaaggtggtgtacacatgagggctgagggtggggacaagagggagaaaggaaaggaggagtgaggaattctaatcataaaatcactaccttcgaaaataggaagactgtatcttaccatggagcataagaagcagcaatgaagaaatagataaccattctatcacacatgtgaaaacaatgctccactgtcctagcgagggggaaaaaaaagtaaatttgtcagaaagtgttcagatgggaagtacgggttatcactccactatgttgcaatttccattcttgttctagttctcatggcctttacacttgttcttccaaggttacacagatttttgttgctgttaatgttatgaagtcacgagtaaaagctttctgttattttttaggttgcacatacaatagattctctcagcatatataagacatagggacagggccccatgatagttagaaagcctgaagtggttaaagcaaacaaacaaaatctgtctttttctgatgttttccatttcttttggatcccctctaacagaaaaatgaagttcctggagggcagaccacctccccgcaacctgccccagctcctatcagtgcagggcaaagtcctgatgttcagtaaacactccctgagctgaaatcacattctttgtgtctttttagaaggtatttacagtttttacttcaaatatcctggtgtggacagtaaatagtaataaaggaaattcagaaactaacttaggaaaaacagtaacaaaaacaaaaaatggcacatttactacaaaagcatagccacctgtatttctaagcaagttcctccttccaaaactgaaaagtcagaggtatatgtacaaagagtttggttcactgaggtctattcataaaatggattagatggaatttgccctttactgaggtaatttaaaagtacaaatttgtaatatcatcttgaatctattttcagtgtccaagtaggtataactataatttgagggaacgctagtattagactttcctccccctacacgtaacattgaccaaagcaaataataaagacttgtgtgagtaagtgaaaaaacataccccataaagcctgggcat

SEQ ID NO: 65140 - DNA, 1423 bp, Homo sapiens
agcaaaatacgtgaactctgtttgaataatatacacaagacttaattctgaaagctaaactttgcaaaatggtaaacgcaaactataagtataccttcatacctcacacactcatagggtcttttgtaattttcaagttattttcaagtaccttatctcattcacctatcacactgactgtgtgactcaggtattattattctcattttagtgatacagatactgaggctccacaaggtcaagtgatttacccaaaattaaagagcagggctgggcctcaaagcctgcctgctgactccaagctcagtgtgctttgtcactaccccatagctgctgctctcatcatatccttagtgtgcttgatagtactggaaaatagctctcaggtttttaagtggtaagtcctggggaatcagttaggttttgtttggggttactgagcaaaggcctaccttcttagatgcctgctggggaggagtcctaaaacttcatccagtccaaagaacaagtcctgaataatgggatagtattctagtctacaaggcagaaaaatgtctactctttgccctacttgactaaagcatgccagcttggaagggtaccaaacacgttgagtcaactatttggatctgttgaaacagcatgtcatccactgtaccttaagtggctctttttccatgatacaatgtgaaatactgtagaaacgatgaagagggcacagagtcccattccataaatccatgctgttatcttttcccagcagtcatcagacagccgatggaggagggcactgcccacgatggccggaacaatgaggaactgagggaaagataaagaatggtgaatggaatattctggcttttatggaattgagtcttttactaaaaatacagagctttaccaggaacaattttagtaaaataatcttagagcaagtatttgtctctcctggataatcataacgagagccagatgaagttagctgctacactggaaagcaggtaataccactcagggtccaggaattgtgccaaccagtggggatacaattaagccatcaaggatgcaacatcattcagctgttgcaaaacagatggttttttttttttatcctaatttcattaaataaggacatgtttcattctactttataatctgatttagagtaattacttaaaatattcaaatgccaagcaggcagggtgtggtagctcatgactgtaatcccagcactttgggaggctgaggcaggagaatcgcttgagccctggagttccagaccagcctgggcaacacagcaagactctgtatctacaaaaatttaaaaaattcgccaggcatggtggcaaacacctgtagtcccagctatttggcaggctgaggtgggaagactgcttgggcctgaaaggttgaggctacagtg

SEQ ID NO: 65141 - DNA, 2116 bp, Homo sapiens
ggtaagaatgacaaactcttaatcaaacaaggaaggggcaatttcacagaatattgccactgttctctgaaaacaggaagagcacagacgtgtagagaagtaaaaccaaatcaaaccgcatgcacagggcttcactgatcatgactggagtgcatgttacattctctctaaaagcccctccggtcttcatttctgacatcaggttctaaagtcagaacactacggttccattttgcccttagacacaccggtatgaagttccactgggggaacagtgccaagcattcaacaccctgactgataagcaatatattcagaagtcaatccaagtcttcaagctgatccccttcctggtggcccagaccatggcaactcttctgtgcatttgttgcctcctttaccctttgggactgggggaggaatgagatgggtgagagggcagtgagggcatggagattggaaagaaaaaaaaaatgtgtactttaaaattctgaaataaaaggtagtgtctaaaaactcaacaaccttcttggaagatttcatgcatttcttaaaatttcccctgtcactgcacccccagcaaacatgctggtggtgaaggtccgggaattcacacaaagggatgcagttaccatatgccctggagaggtgaactttcacccacttaaacagaaaagaaaagcccggagttcctctcagagtcatgggctaacctccatccattgttagacggtggagccccagaggggagtaaggccacggcgccccccagcccggcatttccaccagctctacagtgaatgagcagtcggccagccttccggtggcgcctccacggttcctcctcctcgtttcctaacaccggcgcctccacagcaggtctcgccacccgaaagctaacatgccccttcgcagagcccaaaaatagcaccgccctgggacgttcagctggagaaccagcaaggcccctacacggccaggcagggctaagctggcggagcgtgcctcagtttccctgttgctagggccgttcacaaagcacccaaaatgcctagcaccccgctttacgacaaatctctccgcagggcgccaccccgttccgcgcgccccgggagacccccaccctggaggtaaagggatggaggccaaagccaggtcggaggactcgggggcggtgcccggggctggggttcgggttcccagagagagccagagcccagcctgtatgggggtcgggagggtgagccccaggagcaaagggatccccgggaaggaggacaggcttggagtcccggggccgggaatccatctgaggtccgcagatcgcgaggggagacccgggtgaggcaggagctcccatccttggaggaaggggatcgcccagggacagcagggtggggaatccccagggaactgatccctggccaaggtgcgggatccacccaggatgaatccaggtgaggagccgggagccgtgcgcttaacggcgggatttgggaacccgcttctgacacgggcagcgggaccgggacgccatccctctcaccgctggaatcgattcttgaaccgcattgatcctctgctcctcctcgggggccaggagctccgtctcgtcagcaccggcggccgggcgcgcggccctcatgggcttgggctgctccggaggccgcctgcgtgtccagcggaacccttcggccgggtagggtcggagtgggccaggccgggggtcgggacagggctggggccagaccgggcggctgggggcgggagggaggccgcttcaacggccccaacacctcccgcctcccgcctcccgcctccccggctcctccgccccggggctcctgcgccccgccccggagcccggctccgcccccgccggctctgttcgcctgcgtgcacccgcggtcgccggcgcgtcagcgcgccggtcagccaatcggcaccccgagcggcgcggcggctacgctgccattcattcccgccgggctcgggcagcgaggcggggcctcgctggggaggggcggggcgaggggaaggggaggagcgcgggaacgcggcgcccttctgtaagagacaagttggagaagagatcgagggagggagagaagtggtg

SEQ ID NO: 65142 - DNA, 2653 bp, Homo sapiens
tttgtgggaaattgtggtcatgtctgcaagagttacaagacaggaagactatgatttagtgatattgtggttttgatgagacataagacctttctgaagttggggacaacccaatataagtaatatttatgaaggcagcatagttcatttacaaactgtcaaaagacaaaattacaacaaatttaaagatcttaattggcttttgtttgccattctagagttgggcaacacctcattccataaaattgaatgagtgttcctatgagctgagcaggggaggttagcttctcggcaagggctgaggaaagccccaacagagaacaaagagtagattggtgttcaaagttgcttttcttgtaaaggttaaggcagagcaggcttcctaaaactcgcctgtttggggagatggctattatctcttgatttcttggtaggtcagataaacaactcagttccgacatggtagcacagaacattagcacgagtgactccattttggtttggcctggtggatctagtgcagggggagctcagtccaaaccaatggcctcctgtgaattttattcagcaaaataaatctacaacaaaactcaattaaatgtaacatctctgtgtcctgtaaatttaactgtatcagagaatcacactgtctgggcactcaagctaataactatctgtcccatctctttgttgccaagtaagcttctccccaaaacaaacaagagactcgctggcaggaatcacagtccttgttgttgggggtgggaggtcatctaggtccaagtgggcagaaaaggtaaagtctggtgaagcacaaagacacaggaagactgtgagccaagactatggagaacagcccaggagaatgtttctgttgatgagtaaacagaggcttggacaaggtagatctgtcttactgataaagggactggtgcttccagagttgactcattagtgagaacaaaggaatgcgggtattttctggcaatacctgtaactttgtaaacagagatgtgagagagggcaatgccagcgtgataggtagcattacttttttctttactgactggcttaccaccaccgataacagtcacggtttacacacaagcccgaaggaatgctaagcttaaaaaaaaaaaaagttccacgtttgcatggcctttccactgagcctcagtcacaacttttggctggaggcagatggcaggtctaatgttttgttattggttcttccctcccctgacactcattttataaatgaagctgctgaagtccaaacacattaaggaccagttcaaagtttctccgttttaataacttggcagtgctagagctccaataaggtcttctcactcatgatctgcaaagtgggagctggcctgacttgaggactgagcaatgagtgtgacttctgagtccacactgaacatggagacacaggcttttaacaatatacaccaggttctttttatgctccacttatttagctagtgcaaaggtcagtttatcataagcagtgagggttacaaaatcctaaggcaggaaatgtgatgttgccaagccgcaggaattttatagctatggggaaatggggttgtcctgtgtctttctgtggctgcctcatggctgtgtaatctttcatgtatgtttctccctttgctcctaccccatagttgtttttacgtctgtagactgacttcctttgcttactccttggcttgtcagtgccccatctttgagtccttgagacatttcaccttgacttgccctgccccggggaaacatgttttagtatagtggttaagagcatagactctggagataggttgctggagtttgactatcgatttaaaacttcacttctctgttttccacttttctcacctgtaaaatgggggaggccgggcacagtggctcacacctgtaatctcaacactttgggaggctgaggcaggcggatcacttgaggtcaggagttcaagaccagcctggccaaaatggtgaaaccctgtctctactgaaaatacaaaaactaaccaggtgtggtggtgcccgtctgtagctcctgctacacgggagtctgaggcaggagaatcgcttgaacctgggaggcaaaggttgcagtgagccaagatggtgccactgcactccaacctgggcaacagaacaagaatccgtctcaaaaaataagaataaaaaataaaataaaatgggggtaataacagcctcatcttcacagtagtgtgaggagtaaagatattgtccttaagtacattgagcacgtactatgtgccacacagtgactggcacatagtatacactcaataaatacagttgttcttgttgttgttagtattgcaacaattttagagtttatagctcctacttgagtatttttaagtcctaacttgaaatcttagtggagagagacagtggctgagctcatcttgtctcatgaggctgtagggtaggtaggctttgactcaagatggagtggggactgcagtggaacaaagacagatgattcattcaccacttcatcgggggttgtgggtaggaggcagatcttctagaagagggggtggctagcatctaaaatatgcctaatactcagtatgtgctagaatttgttctcagacattcaatatctaat

SEQ ID NO: 65143 - DNA, 1221 bp, Homo sapiens
ggttttaccttttggtttagctttatgaagtttgcattaattagccttagggtccctgcccccagacccaggtgttttccttttgatccacctttgggaagtcagcatggattgaccttagactccctgcccccagacctttgtgttttctcttttagaaagtcagcacaaattggcctcagattccctgcccccaaaccttggtgtttttccttcattcaacacgaattggccttaagttctccatctccagaccctattctcctgcctcttaaccacggaaaggtgctggcctggtcacttgctaatcttaggatggaaagactctttgttgggtatgattttggagactgaacagatttaagcagaattcttgtgcacccccctcaccaatctcacttctgctaacatgtaggtagttgaagatttacagagtgtatttcctactcttggtggaaaatgaaattcaggaagtgaaggttgagacttgaacttagcatgccaatcctgaccatttctggcctgagggatgactcaccctttaaagtttccccaaatgtccccctgctccaaccctgaacgtcctgcctcagatcacaaggggtctcagcacttggttaccagatgaacagactcctagggtggaaggaaggcagggagcagctatgggggatacttttaaagtaagaccatataaaactttagaaggaaagtgatttgcccagccttgagagactttctttaaaaaattcataattgaataaaatagaacagattggttgtgaaaccgattattttgagtgctggttacagcaagtctaagttggaaaagatcttataattttgtgaaactcttaatttcacaagagaagggcccagagaggtaaaaattatgtctcttaggccccacagtcgttaattgtagaggattgaacaaatgtctagatatactcagaccacttgactgcttccccttcctaccatcaaaacaaaatgaactgacccctcaatcaaaaactgagatatattctggtaggaatgacatcattttattattataaaacttcctaaaaggtggagtttcagcaatagcagtaactgcattaatgaatatttaagaagtaataaagggaaggcttgaattgtgtgaaccacgaaagcactaaataatctagaattcaggtaggggtttttgattataagcttgcatcaggtctgttt

SEQ ID NO: 65144 - DNA, 1159 bp, Homo sapiens
aactcagaaggcagaagttgcagtgagccaagattgcaccactggactccagcctgggcaacagaatgagactctgtctcaaaaaaaaaaaaaaaaaaattgctcttgacatggtctcatgttctctgcttgagaaatctccattatataatggaatattttgagtagcaaggcaaagtgactaggaatgacagcttgcttcaactgctgtctgatccagggcaagcttttcagtttcttcatcactgaagtgagaagaatattactgactatctcatagagctgtggagattaaatgagttgctaatataatgtcttaacagccctgcctggcactagtacacactctgtaaagattagctgttattattaccaagaaaggttgcagtacttaaactttcttaagtggtcttttgataaagatccccaggacatggtaagaaaaaggacggttagtctctgtatgtaatggtgatagacagggaaacaacaaccacaagaaaatctcagatcagtgatttctgttggagaccagattattcagtaccgagactggaaagaaggagtgtctctcctatcaggtttggggttaaagtttcaaattgtaattcaattcattaaaacattgccaaatatggctattggacaggtattgtgccaaatacccaggaatgggagacaaggatggtgagcttacacactacagtctagtgacctggaaaattccatgacactggctgaagggaatcactctatttactctcgttattgctgttatttgtaagcttccagagctttatttatttttcttttagttctttaattattctcaaagttcaaacagagttagatccacaggataaaacagcagataaggccatctacagaagggacttacgaggatgtggctagataatattcaatgagtgatgtgttaacattctttccacccatccagttgtcatctgaaaaacaacctcaggtcaggaaattagctcagggtagacatgagaagctaaggtttcttcataggaggtttttgctttgtctggagatcagtattatcactactaattttttcctcctatatgataatttatcacatgtcacacagatgggctcaaaccctggcttcccctaatagtggctatgaggcttg

SEQ ID NO: 65145 - DNA, 1885 bp, Homo sapiens
aatgaatttaccagttttcctaaactgggctacctaaggaatttactatatatttcctgcacaaaagatttaagactctttctttcctcctgaacaatgcatatcaaagtctctgaaaaattctaaagaaaactaaatttagactgtatgcaggggctgatgcctgtaatcctagcattttgggaggccaaggcaggaggaccacttgaggccaggagttcgagaccagtctgggcagcatagtgagaccttgtcgccacaaaaaataaaaagattttaaaaattagacaggcaaggtggtgggtgccctcagcaacttgggaggctgaggagggaggatcacttgagcccaggagtttgaggctgcagtaagctatgattgggccactgtactccagcctgggtgacagcataagactcaatctctacaaaaaaaaaaaaaaaaaaaaaaggaaacacttttaataagcctggcatatttgacccacatatggttttaataagcccaagtgtatttggccatacatcctattgttcaggagtttgtgtaaatgttcctgaatatagatgttccccagaacagttagagaactcttggtgtagaaactggtaacagctgaatccagttaaatcaccagttcatttgaaaatatccagttgactccaggcagcagtatgtgtgtatacacacagtttcgtgtatataaacagcagagtgaagttgctaacagagctggggtagtgatagtgataggggaggaaaactcatagggctggagaggtgggggattatgacctcggccatggatttcaaattctgtctggaggtaacttagagtggagcaagttctcagcttctcaaggggagtttgaccgtgagtctggacaaatcaagagcttgccatgaacagcacacagaaagatccagctctgctgcctccacgtgctctgctcacatagtggccatcctgttccagaaaatgggctttgtcatcacttggctcacatcctgtctctgggtgacctgagagtgacctataaatgtttgactttgctttctaatagaaaaaataatgctgtcagtcgttgctgtatattttgggtactctcctcctctgtaaattgtgtctttccttagacatataattccagtgacaacaaagccattaggtcaacactcactaaataaattttttaaaaacccaacactttgatagagagggaagtaagatgctcagtgatctaagtctccatagggagggctaggaatgggtggctgtgtttggacactcttaccacatccttttctctgaagtacaccacctgggcagttccttagaatgtgagaccacgggctgggtgtggttggctcatgcccataatcccagcacttagggaggctgaggcagaaagatcacttgagcccaggagttcaaggccagcctggacaacataatgacactctatccccaacacacaacaaaatttttaaattagccaggcctggtggtaaacacctgtagtcccaagccacttgcaagactgaggcgggaagatggcttgagcccaggagtttgaggctgcagtgagctatgatcaagccgctgtaccccagcctgggtgacataaataagtaagtaaataaataaataaataaaaagtgaacccatgcagttaggttttgaagcatttaggttactcctgttttctactcttctgccttcctttcacgtttaaaggcctgcaaaccatataaatcatcccataggtttcttggcaagttcagcactgatccaaataaaatataccaggatctttgttctgggaatggcagtaacgatttccaggttgtttttaaaaataatagtgtatttttaaacttttt

SEQ ID NO: 65146 - DNA, 1202 bp, Homo sapiens
cttatttgaggaaaacataatacagaaggtaaaataatcaaaacaaatttaaaatcttcacgatgcatcataaatattttcccatgccagtgactactgttctacaacatgagatttaatgaccatattttttttcatcgtgaagagataccataatttaatgtattccctatgtgtgggcattaggcaattttgcattattcattactagaacaaacactgcaatggatagtcttagagagaactatctgtgcacattcattattgtttacttagaataaattcctggaagagacattgctcagtcaaaagctatgcccttttcaaagcattttgatactgatttccaaatttccctctggagaggttgtactgatttacagcccaccagcagtgtttatgagtgtttgccaatgctgagtaagtgcaagcatttaaagaaggctttggaaatatgatagggaatacatggtagcttgtggattctttaacccgtgttgtgtatagagtgtaaatcctcatctggtctccgatgcctttcgcaacaggattgccacctatctctctggcctcatttcatctccttctattcctctcccaccacccccacgctgcccccctccccacactgttgttcaaacaggattcatacattcttagctttgtgctttttctccctagatgacactcatattccatccactgtcaccttagccttccgtaatcgcttaaaatctattaatatcatttgagactgggtgcagtggctcatgcctataatctcagcaacttgggaggccaaggtgggaggatcagttgagcccaggagtttgggacctgcttgggcaacatagtgagacctcgtctctacgaaaaatcaaaaaaattagccagtcatggtggagcatgcctgtggtttcagcaactccaggaaggctgaagtgggaggattgcttgaattcgggaggttcgggctgcagtgagctgtgatcatgccactgcactccagcctgggtgacagaaggagagctgtttcaaaaacaaaaacaaacaaacaaacaaacaaaaacaaaaaaaacatgctgggtgcggtggctcacacctgtaatcccagcactttgggaggccgaggcacatggatcatttgaggtcaagagtttgagaccagcctggccaacacggtgaaaccctgtttctactaa

SEQ ID NO: 65147 - DNA, 2015 bp, Homo sapiens
ccgctatctggatgttctattactcactttctccaattgttcctacatccaagcaaacaggcccccagtcacaatctgcagcgacagcagtttaattaatattccttctgacaatgctggtgtagctgttggtgacttccacttgcgtggaattaatatgggagtgctgggaagggaagaccctggtctctttaaataataggaaaccggggaagggaagtgcagggtagaggagggcgtggtcccttgttagggatccaccccacggacctaggtgaggacagacatttcctgcccaactgttgcatttcccgacaccaccctggcctgccacgccccatcctgtacctataataaccgttctccacccccaccccccgccccgtaccacacacacatcctagcgggcagccacacatcaaaaggagcacgtcggctgaagaagacacaagcagctggtcgttgagaagagctcgcagaagagcatgcctcctctgcggccgaagagcatgcccgcaggcagtggagtctggccagggcagtctggccagggcagtgggaggacagccgggctgctgagaggcccaactgcaggggaagactacctcccttgtggatcctccgtccgctgagagctacctccacgcaataaaattttacactcattctccaagcccacgtgtgatttgcttcttccagtacaccaaggcaagaaaccccggggtacagaaatccctctgtccttgtgataaggaagagggtctaattgagctggttaattcaagtggtctgtagatggcaaactgagagcaccctgtaacacacgcccactggggcctcaggagctgtcaacattcacccctatacactactaacattcatccctagacactgccatggggtcggagccccacagcctgtccgtgtgtatgcttccctagaggtttgagcagcggggcactgaagatgcgagccccacccccatcacacgccctgagagggggattcccatttcagaataagaagttgactcacaccattgattaattcggttttgaatgttttgtgttgttctaagtcatctctaggtgacctgggcttgagtcatctctccagagagtcattggatcaaattttctgcagctaggtcctagattttttttgttgttgttcaaatttatccttctgaaaatatggcaaaacctatttggtatatgtccaatatgtgtggcatatatgggtcttttatgaatttgaatttaagggacaaaagttggcataactatccttgcctcagggaagttgtccctgaatctcaaggtgagggtaggtctactgttagaaatcctcatactgttcagttctttacaattttagacttactgctatcatatttatatagttgattatgcaattatttgtttactgtcttccttcataaggaactatgtcctttaaaatgatttctctaccccaaaggtttagcaacatgcctagaatagatgctaaaaatgatttcttggctgggcatggtcacaactgtaatcggagcactttgggaggccaaggcaggaggcgcgcttgagcccagaaattcgagaccagctttggcagtatggcaagaccctgtctctacaaaaaataaaataaaaagctaggcatggtggcatgtgcctataatcccagcgactttggaggctaaggcagggggattgtgcctaggggttggtggctgtagtaagctatgatagcaccactgcactcagcctgggcaacagagtgagaccctgtttctcaaataaataaataacataaaaatatttattgaacaaattgttactatgtattattatcactactagtagtagtaacatttgtagaggtctttgcagttttcaaagtcctatatgttgttaactcatcatccatagatcttaaaaacataatgctggccaggcatggtggctcacgcctgtaaccccagcactttgggaggccgaggcaggtggatcaca

SEQ ID NO: 65148 - DNA, 1853 bp, Homo sapiens
tgtaggtatatccaattctttgcatgtttaccggacctccacctgtatctgtgctatacaagcaacaaaattggagtacacagaactgagaataacattatgatggaaatgaccttcaactcaccctctgtatattaataggtaaatcattcacaaacttgggtaatttattattagaaacaaactatttacaacacacctgatggctgatggtgattcaccagcatgctacaaacccatggattggaaccactgctataaccataacttattacactttgtgatctaatctgtttggattcgttcatgagacacacttataaaaatctctgtataaacagtgcttatttataaaaccaataatagactgggcgtggtggctcatgcctgtaatcccagcactttgggtggcctaggtaaggatcggttgaggacaggagtttgagacaagcctgggcaacatagtgagaaccctgtctctataaatttttttttttttttttacaaaggaaattatgagggggtagtggcaagcacccaagtagtcccagctacttgggagggtcacttgaccccagaagttcaaggctgctgtgaattatgattgtaccactgctttccagcctgggctgtaagagcaagaccctgtctcaaatttttgtttttgaaaaagaccaataatgggtaaaaaagagaaaatgaatataaagtctaagagcagaagagatgtagattaaatacagagaaatattcttgatcgtgagagttgtcaaatccagtcttgctgccatttaagaaatcaattattcccctttggcccctggatcttctggttttccttctgatcatgtgtataatgactgctgcgtatacatttttgtctccaaaattctataatcatttttctccctccccgagtggcaaacaacttttcacagatacatttccttataagaatgtctttatcaattctgacaaacaatccagattccaaattccactgccacgtttccgctgagccactcttgggcaaaccctcccttggagcggcacacttttctctccctgggtcttcctgattcctccaagccaagtccttttcttcctagtgtctcctgagctttgtattgtacgcctgtcaacttcaaattgcagttgaggccaccaggctggcaatgcgtcaagcagagaaccagcagatcccagcatatggctggtgtttaattaaataatggctgagtacagagaagccttgagaaaaaaaaaatatgcgcagacaacttcctactatcttgggaggatgtgaaatagctaaaatctttctcaatcctggtgttacaaaacccttatctggaacactggcagcccaagaaagtcaaagtcgaaataactgtacaacagaggtagataataagtgatctcatactttctgtatctcaatcactagtgtcttcagggaagatgacgtaatgagaaagagactgttcttgctcctcttgggcaatacttgtctgtgtctgccctctagttctcaggaattgttctaatcaaagagattatgttattttgcattccccaaaagtgatggcagggagagacagatctcaaaagtgtgacttttctgcacccaccttgctgaatcatcctgttgctctgcatggattctgggcagctataaagttatagtgtaaactcaggactaaaagtcaggatccctggattctgctgatcccaccctttcaacctaaaggtgtttgcatgacagtctcaaactcccttgtttctaaaataaaaataacggttcctcctcttacaaatcttcaggaagattaaatgaggtgtctggcattcac

SEQ ID NO: 65149 - DNA, 1133 bp, Homo sapiens
aaaaaaatgcaggaaagcagaaggaattgcttggatgtagaaattcttatttgggaattgtctgcggggaatgaggaagaaataagtgacaggttgtttttttgaccctcttcccttaggcaagttcaactattagattcaggcagccaggcacagggaaataaataaaatttcctatttaagcctacctaataataatgatttaatttcccttttcttccccacaatcatgacaaaagttgtagattttgcggactttcagattccatttctatctccttccaagccatccttctgaagcaagatatcttcttaatcactcctatcattatcaactttcagtggctctccatggttattaaaggccaaacatctcaagcatgcaaacatctccacaaccccaacgctgcctgcctttcccttttcttccgctgacctccccacatgaccaaacttccctcaataatgtggcagttacttgtaagttcatgcccttgccctccttttggcttggtgaaccctcatggattcttcaaaactggctccaattgtcaccttcttttgaagtttttgtatcttcccatgccagaggcttttgataacctccttatattgtcttggcctggtgtatataccggcttccagttttgttttcatttctctttccctaactacattgtgaccatttgttattcctactgtggccctaccccctagtagtgtcagtcataggactgatgaacaataaatatttgtggaatcaatgaagctcttggtagttaacctttggccttgataaggtggacatgtttttatgtattggctgacgtaccgaaagaaatcaatgtcaaagggaaaaagtcttaaattgtgtttgtcctttgaaatccaactcttttttactttgtatgggctacttttattgtgactaaacatcagtacacagtcactgttttacataaacatggagctatagtagacataattgtttaagaagcggaatgtaaccataataaatgaggaggacacaatagtacggaataggccccaagtaggagctaaacaaaccagacaatggtaagataaagtgaaagataaggagataacactcacagggatatttgccatcatgt

SEQ ID NO: 65150 - DNA, 743 bp, Homo sapiens
ctagaattttgtgcttattctcaatatagtactctatttttaaaagggagattttcagcagaagtatatccaaataaaagtgtttaggatggtgacaatttctggaagcaggtcccatggggaatgattaatttttaccatagacagcctggagaagggataatatgatctaaaatatttgaagggctatcaagtgggagagggagcagattaatttagtctcattctaaaggtcaaaaataagatgaatttagtgattcatatctaacgggagctctcctgttagatatgaattcttaggaagacagactcttgaaaagattcctctttgaggcgaggttttgaaccagacacttgaatcatctgtcaacatccttttaatgaataacttgttggaaaagtgcctttgaaaacatttatggcttcctgtgacttggcttaatttggaaaacacgtggttactttgtcttcaacagattccttgcagtcaccttgaattcatgaatgatgtgattgacttttggtctacagctttcgatagtgagtccctcagtgaagaccttccctatcacattttttattctcagcccttttctcctgtctacttttcttttatgttattctatttaatttaatttttatttttaatttatttttaaattttaaatataattttatatatttaaaaatattgtttgtagttatttgtaattattatggatacataataattgtacatattt

SEQ ID NO: 65151 - DNA, 1184 bp, Homo sapiens
aatacacatgtcttagtagatagtcgagctgaggtaaggctgacatttttaagtgcaaattgttaagtctgagaagcacaggtgatgaacacaaggatatctcaccacttctattaggtggcctaaaggagtgtcctcagttcagcatctcacaacaatcaatatattggtttaggcttaaaacattctttaacttattcctgattttcttttgtttgggagaaccagggagctggaacctcacctaattgcaacttttaaggtcattatctattcttgaaaacgtattcatactgtttatatttcattttcaaccatcttgatccctggaaatacactgtttggtccctaggttcacctatcacctttaggtcatgaccacaggtctacagatttaacctccatgccatggattggccttggacctagagttctcttagatctggtataccacagcttcctggaacttctcctggtgctttgcttctacccacatgggtaggtgctttgcttctacccaatctctgcctcaagagtccaggtagcataggggttaagagtgtgcaattgggtgccaaatggttgacttctaatcttggcttggctgtttagtaacagtgattgtgtaagtgatttgacctctctaactctcagtgactcatctataatgcgggaataaaaatacttccttcctcagagattgttgtgaagattaattagataacgcatgaaaaatcctagtacattctctagcatatcataagtgttcagtaaacaaaagctgtaactttatgtattatttcaatttctattttcctcctaccttctttggtgcttttgttgggctgacaacagagcctgctgaacctccatcagttcccacactttcccttcttgtcagcaggatgcagtagaaagagcatggacctggaaatgtgatagacctagttcagaactgtgcttacacaacttttgtgaactcatggccttgtattgtataatatttaatgtcctgaagccttagtttcctcacctataaagtggagataataaaacaaacttatagaggttgttgaaaattaatagatatcctcacccttcccactccagtgagcaaggtgccttgcccatagtcaattgttattgaaaacaagcaccccactttttcctcgtatctaaatttc

SEQ ID NO: 65152 - DNA, 773 bp, Homo sapiens
taaagaagaatatgggaatgttcccaaaagatcagggaaagtctcttttgttgagaagcttctgagaaactatcaagcatgccaaagaagagagggagcaagaaataatacagaaaaaagaaaaataaaaaaagatttccataaagcttaggaccaggcaaaagatttggtgcttcaaatgcttctgcaaattttttttgatgatgtcatcatactaatgggaactgggagaaaagttctttgatcagtgtttgcaaatttcctaaaccttgggttagtatctgactgctgtgttttatttgatgttaatgattgatatagtttggctctgtgtcctcacccaaatttcatgtcaaattgtaattcccaatgttgtgagacggacctggtgggagatgattgcattatgggggtggattttccccttgctattctcatgatagtgagttctcatgagatctagttgtttgaaagtgtgtagcacttcccccttcgctctctctctctctcctgctccaccatggtaagacatgcttgcttccctgtcaccttcctctatgatggtaagtttttggaagcatcccagctatgctccctgtacagcctgcagaactgtgagtcaattaaaccttttttcttcatgaatgccccagtctcaggtagttctttatagcagtgtgagaacggactaatgaaatgatttaaacatattttattttgtctttgaaaactaccaaattcattttgcaaaaacagtataaataaacaaacca

SEQ ID NO: 65153 - DNA, 769 bp, Homo sapiens
ccaatccataactgtcatttgacacatttacagcccacttccttcagagaaaatgcttattgaatgttgtacaataaaccatttcctagtcttggtgctgaacaacagtgacccacaggccccttctctgtttcaatgagctaaatgctggtggtttttttttttcccccacagcctaaccaacccagcttcccacgaaattccaaatggattaactctttctgctcaagggggctcaaatgctgagctagctgaagtgtattcattctaaaactggaaacagaacaggataaaatagaccatttgagttttccttagagcttggctcttctttgctgtttcaaaatctctgactcaccatttgtactgaacaaaaatgaccaggactccagaggataaaagtacatccacactttacagccacggtatctctgccctgccagggttcaaggttcaggttttacctaaaggcctcaaggacttgatacctgtgattcctggactactctcttaggtagaccttttaacaaactccaccttggtgcttcttgttagttaggctggtcttgctgactctgtgaatctggagtctcgcttttgacaccagggaacctgcctgttcctcactgccttgtctgctttagagcactggtcagtaagtgacaagctagcttttgacaccagggaacctgcctgttcctccctgccttgtctgctttagagcattggtcagtaagcgacaagtcataggtttgattgctgatgcaga

SEQ ID NO: 65154 - DNA, 857 bp, Homo sapiens
aagtatcttttatcatagttctggacatacactagttctggccacagtcttcacctgtctggatgattgcaataaagtcctaatttttgcctctgcttttgatcttgcctccttcatggcattctgcatatgcagctaaagtgattgtcctaacacacaaatctgatggccacatcactctcttgcttaaactccttcgtcagccttcccagtgctcctcagaataaagttgaatgaccatcatgatctgactgtgtcatatccctctagcagtggttgactaatgttttctgtaaaagcccaaccagtaaacattttctgctctgaaggccaaatggtctgtgtggcaactacccaactctgctgtcacagcgagaaagcagcttaggcaatatgtaaacgaatgagtatggctgtgttccaacaaaactttacttacaaaaactgggaccctcctgcaggcccaggccttagtttactgactcctgccccatagtctcaaaatcaactccctcacccaatgccttaaatccctgtacccaagacccatggaatgacttgcaattccctaaccatgctctgctctctctcaatattgtacttttgcacataatcttccctcagtctaggtcaacttccacctaactcgttgtccagttaacctccagttattttgtgattccacttgaacttccttcaccaatctcacttgaacctgtattctcacttatcacactggtagacaatttacctgtttgcatatgtctctcatacctcactataccataggctattggagagacgataccatatgttactcatttctgtaatagccccagtgtccctggcaatgaatg

SEQ ID NO: 65155 - DNA, 821 bp, Homo sapiens
acaaagttacttaggggagaggggtctgggagtggaggagggcagggagcatggtgtgtactatgacaaagaggtcattttgcccatttccctaaagtggaagccaaagattcaggctctaaggttgcaaaaggggatgttttgattttcctattgagtttgtgctgttgaagacctggcaatttctcctctgggaacacatgaagttcgcattttgtgaagcatgcccccatgtgcatttgattactcgcctgtctttatttccaatttgcttttgcttggtgtgtttgagctggctaatttccagcagccttgaggatgccagttcctcttggccttctgtccaatcaccacatgcctttgatctcagtcatcacccagtccaattggatgcagggagatttgggaagctggccaggttttctcctctctaatgcttcttttaagggtgtgcctgcatttatgttctgaaatcatggacattttggaaagtgatctgtgcttctgtgttcattttggatagcaggtcatgttattattcctccttttctttttttctcctccaaaacacttttctttgaggtctaggacattaaatagagagatctgatagtaccaagaggaacaatgaatgtgccttagatataaatctgtattttactaattggtggtcaatttctaggtatgggaatctcataagatccatttgaatatagaaagggaaacatacatcttttagattcacattacaatccccattctcttaccccattttgttctgagtaactatgaaaggtcacataaacataaaaaaatagagc

SEQ ID NO: 65156 - DNA, 2907 bp, Homo sapiens
attccttatcattataatgataaatagtaatttataaatgaatagtaattatagtaattattcaattacatttggaaaatggtgcctaggactagaaccaaagtctgattgatgccaaagcatgtcttcctaatccctgtggaatattgtttctgtgttcaaatgatggcatgctttctgtagctcataaggagtaaacttgccttcaaataatctcttgggttttaaaatgattgcttcaccagaaaaaaaaatgccattgccttcccacagaacctctgtagtgttatattaattgaggatagaactagctcaacaaatcttttgggagcatttttatcctcttaaaaagtctttgatattcacgatgtgtgtgggtagtaggaaacagaacactttgcccagctgaactgagttcaaaatagaactgtttatctaatgaacttatcttatggaacaatgcagagaacagatctcttgctctctttctttagataaaatttttaaagtctcgttttgtaaaggagacagaactttgctgtctccttcttgtttacttaaataaactatacaggaaacaggcattattgtctttgaaaaagcaatgtaaaaacttggtaaaaccaatgatccccagagagtacacagccacagaatgagaacacgatgtttcttccatcagggcacacagaagggcaccgagtctactttgaattccagctgtacatttgtacccagttaatgaatctgctgttgataactttggatgacttccagtatgatggactcagtagtctcagggaaaccttgcttccctgatttatttcttgctatttattttctaagtttaacttagtttgcaaaactttctttacagcactgatagggcttgattaccttatttttacagcgctaatagggcttgatcatcctttttctagaatctaggttatagcatgaggttttggatcgcttccacaataaaatgaacatttctgactctccaatattatgcaattaaaattagccattaactgaaagtcgagaaacttgagtttgattcttttcctctttgtggcttgggcaagtcacccaacttctgagtgctctattgtcagatctcaggattccatctgtagatacttcattattcttttcttagaaaaaaaaatcctatctgggctcagaatatcagagaactgagacaagacaacttggggaaatagctaacactactacacaagctaccagaacagctgtaggaagcctcttttttaaaaaaatattccctgatgcaacatctgtcagcaaagccactgaccttttactgtggatagtcatctatttccatgtgaagagagtcacaggcgtctggctcggggactgactgcagcacaaaggttttcttcagtcccaatcagaaattctaggttttcaggttcgcacactaattttcactccttcttacccaaagccaatgcagtaaggagcatggggtgtccaataccataataaactgtaaactgcatttgaaaggaaagcagcaggggccagaactcacacttgtggagcctcaccctgctgtgactgacatgacgtaagtcggagacctcggttcacagttttatgtgacaggacacaggagcagccaactttagggaagactgataggaaagcccaagggtgaatctctctgggaacaggaagcatgtaccgcgggaccaacaaggcttttggacagagaactttcacgggttttgtagaagcaactgggctcccctgaggctgccaagagggtgtgctctgatcacatggactgtgcatttccttagagcacctcccttcccagcccacggaatccagaaagaagctgctgtgctgctgtgtgacctccatcagtgcagtggattcctttataagcacacagttctcataagcagagaaaaacgtaacactgtatattcctctcttctccaaattttcttattttctttttggtaaggttacaatcttaccactgtcaaatatgtcctgtacaccagggaggatttgtgctacctgcctcagaatcacacagggtgcttgcaaaaaatacaggtttctgggctccaccccagacctactacattactgcatcaggatagtgtgtgtgtgtgtgtgtgtgtgtgtgtgtgtgtgtgtgtgtgtgtgttgaaaggtcagaaacttgtgttttttatctgcatccatatgaagtttgagatcctctgcttaatgctaatacagaaagctatcaagtttgcaaatccggcctcacccctctttaaaacccatccatgattccccctcatctgaggtctagaatctctacatgacacacaagtcttcccatgagctggcctctccctttctttccagtctcagctccagcttggatcaaattacaaatcacaaacaacacattattttatgtttgtcatgctttgttggttcctactcttggaggctcaagatgatgtctactcatcttttcatgactacctcaagcatcacctgcttctagaaaccttccctggtaagtcctcctctattttcagactaggcagcatgaggtcccttcccccatgttcccgtaatgtttatgccagtgtttctcaatctgagtacttttgacatttggggctggataattatttattgtgaagagctgtcctgttcgttgcagaatgtttagcagcatctctggcctatacccactctatgccagtagcaacccctcctctcctgcacagttgtgacaaccacgaatgtcttcagacattgccaaatcaccctggcgtgaaaatgttcctggctgaaaatactgctctgtgcttacatgtatcatagccctcaaaaaatagtgtggaaagtggctgtttgcttgtt

SEQ ID NO: 65157 - DNA, 607 bp, Homo sapiens
ctttcatattgaattgttttagtagttattctgaggaattttccacttactggatttgtctgattggggtcttatgactagttacaagttagatattttggcaaaaatgtttaggtgatattataaacttattgcatcatgtcatggaggctgtgatgtcagttgtcccactatttgtgatgcaattgatagcttggttaaggtggcaaccactagatcttcccattataaagttacactttcctgactgtacgtagtaagtaatcaatgggtgattctttgcaatcaaatgaaaagtctaatctgcataccctttcacccagtggttgcagcatccatttatgatccttgcctaaatctattaattattaatagggggtcaaagaatgcaagttttcaaatgttgacattctttctacctgaattttttggcattcttttctaaagaagaaattttctcctctctgtcttccctatttttcttccctactttttttttaattgagtaacactgtggacacacagatttctttttaaatccaatattttataatctattactataactattctttgtgatctcaaatttcccaaaatttggagactg

SEQ ID NO: 65158 - DNA, 501 bp, Homo sapiens
agaatcagtcttttttccaagaatcttttagtagacaatgatatacagaagccaagaactggccacaggtgcgctcaatgctaatggcatgccaatgcttctaggcttccagatcattttaatggacagatcaaggaacacacacacacacacacacacactgaattgtactgcattgctgaatatatcacaactcgttttatccattcacccattaaaggtcatttgggttgtttccagtttggggctaatacaaataaagcttccatgaacatttgtgtacaagtcaatgtttgaacaatgctttatttttttctcttgggtgaatacctaggagtatgatgattggattgtatgttaagtgtacgtttaactttttaaaaaaattgtcagttttccaaagcatttgtactgttttcatttctaccagcaatgtatcagagttctagttcctcagcatccttgccaacacttgctttgattaatctttttaattttagc

SEQ ID NO: 65159 - DNA, 1352 bp, Homo sapiens
cttctccagctcttccttccttccccacatcaagtccaatttttctccttttacttcttgtctatcctcctcactccttgctcagccccgcccgcttttctaggcccgcccctccagggccccaccctcaggccgctcctccagtctaggccccgccttctcctcagtttcctgccaatgacgctggggcagccggggcagccggggcagcccggtcaccccgcccccaggcccacactaagggtgtccgcggcctgccctccaggcggaggagcccggactgcggaaggatggagctggccgccggaagcttctcggaggagcagttctgggaggcctgcgccgagctccagcagcccgctctggccggggccgactggcagctcctagtggagacctcgggcatcagcatctaccggctgctggacaaggtagcggccaacccgctggaggaccgcggggcctagaatgcgccggggtcgacctccccgcagggagtgcggggcggcagtcgcggaagggacaggggcgcgtcttctccggctcaggaaggagctccgcccggaccctgtctcaagctctggagctagcgcaggggcggtgcctccaagtgactgccgtgcagatccaggggagttggaaggtcacaggagttcagcctcaggtcaggcccgacggggcatgtagttagaagttaatgacagttgaaacgtgggtcagctggttcctaggcccgtgcacacgtctgcaagggacgttgatcctcactctccaatgcgtgtcagtggcatatgggggctggggtgggggaggggcggtatcttagggcttggatataggaggaaaagaaacagaacttttcaaggactggatgtgcagggtggtgtcaggggttgccgagaagggccctactgttttagtgactcgtttcttttggttgttgccccttccttccaagttgctcttaataagttgagtccgaatcttcaggcaggagtaaagatgtaggaggaatgggattggttgttgaagtctttggaatcaggtagccatccaggtggaaggcattgcccctgaggcctgtcatccaaggcttgtcatcagttgctttgtgtaatagtcgcagcatggcaagtaggttaaaagtcgcctgcaggtaatgtgggtgaaactgaagtttcctaatacaggaccaggatattatagtgttagagttaggaggatacctcatgctcacctggttaaaccccaggtttcataggtgaaagcaacaggcctcaagggtgaagtcactcctgaaatggcccagataagtgaatagcagaggtgggattggagggttcatgatcttg

SEQ ID NO: 65160 - DNA, 1062 bp, Homo sapiens
aatggattatttcaaggagttagggaaagaagtattacagtaggaaaagtgctttgccgataagctctgcaggcatcttgggagttgcagagccgttcttttataaagaggagcaaagaacgttagaaagaaccatatgcggggatgtgggatgaaaggatggcatgatcggatagcagatcagagaatacttttccctgagcccagcctgttttcaggagggactgtatgctggctcaggtttaggatgggccaaagttcaggggcctggaggaaggagaaaagttcaaccagttgggttaacaagcattttgttctggttgatcagtgggggtgggcagcttagctaatcatttataagacaaagaaagggaaatctggagggtctgtgtctggccttgtcataggtaaacgggggcatccgtgagtcttatctaagtcatatggggaagggtagtggatcttcacagtaaactttatgaaacacaaaaggtaggggatttcttaaccttcactgtaatctaggatgacagggttcaaataaaattcagcattgttgataaggaccactatgtcaattaggattgtttttagctacaagtaatagaaaattggacaatcaatgacaaacagaggcatgtttatctcacctaataaataggtcagagttctacctattggtagagtttgctgtcattgatttagcattcagtgatgccagcaaccctctgagtctttctactctgtttctcatgttgattgcctcttggtcataggatagttgcagcagttccaaccatcatgtccacatttaaaacagggataagtcacacggctacctctccctgcagaggagaccagggaagttattggctgtttacattgccacggggttctcttaataaggagaaggagtgtttaccacatcaagtcttatgtttcttctggcagttgcattctgtacatgatactggctaattctctacttccaacataatccttttactatttgaattgtaggaaactaaatgtcttataactggagcattagaaaagtatcca

SEQ ID NO: 65161 - DNA, 867 bp, Homo sapiens
accctgtgtcaaaaaaaaaaaaaagaaaaattgtttcaaaagagaattcaatgcgtcgattacaaagcctattgcttctttcctttcttaattttgctgacactctgatattttaatctccattctagagtgtgagcttattcatatccattctagaggaaggaggaggtttgaaaatgaagggacatgcacatttgtctaccctgtcatgtgttaatggttcccattaataacaaaatagatgaggattagataagaggagaaacagaagaaaaaaagatcaaaagtgttcactaaaatgagttgtattctagttattttcaattttaggagaaccaaggtgaaaaaatgcactaaccagctgacaaacagctctgccctccggaggcttggcagacactgagcagctgctcctggggccaggcacctctggctgtgccagcagctgtgccaaggctgaacaaggtcggggggaaagaaatgcttcacatacctttggatttgtttagtcattgacgcaggaaataggtctgtgtcgctcagctggtagcatcattgcgtttgcctggaaggtcaagggttcaagaaccacactagaaagttggcagcttcccgaagccaatgcttgcactgtcatggaaggcaggtggtggtgaacactggagaaaggaatgctctctctgcatgtcccagggaaatggggctcacaggggcaagacagacacaacaccactcagtttactttgacccataagcttcaaagtactcctgtgtggaactagcagaactgtcatccaggggacaggattgtgtcatagacaactctagaagacaagcggagtttggggctctctgatgcatgctcta

SEQ ID NO: 65162 - DNA, 602 bp, Homo sapiens
agaggttaagtaacttaaccaatatataacgcagctagtacagggcagaactgacgttcaaacccagactccagagttctggcaaatgaacaacaactaacaatcctaatttttctggagtaacaggatatctccaaagtactagaattagcactaggaagaaggttttttattttgtatgtacaaggaagtatggggaacaaaagcaaaatattacaatgttgagataccatcttgctttataagctgaacctgtttctcggcatctttctgaattctttcagcaaacaggtatcagataaataggagtaattttgtaagccactttcttccaagtggctcttggttaaggccattctcccctgaggtctgtgaacaggatcctgaatgactaacatttggttaatcattaatagagtggttaacacataggctttaaagttcagatgatctgggtaaaagtctcagctctgcctagctgtgtggtcttgggcaacttgcttgacatctctgagtctcagattcctgatttataaaatgaggataatcactgcatctaccactgtatttatcagtcagaatgagcttatgtcagagtaaca

SEQ ID NO: 65163 - DNA, 652 bp, Homo sapiens
ccttattgttttgtccctccacacttatgtcaagagtagctattggccaagttcactccatgaagagtaaatcattcctctggcccaacaaaaggttcttttgcaacacataacatttgtaagctagtgatgggctcaatggacactggccaagaactttaatcatctgcaccacatgcctaaagggctaactcacctcaaacaggcttacagaatgaaattcagaccctggaaaattctggctctaaagacaggaagctccacctctagaaggctctccacgcttcagacttttgtttcttcatccatcctatcctgtatttcctcatgctgaagccttcatttcttgagaaccagggtggtcccaaagcagcagcacctgtgttttacaggtgaatttgagctatttggctttgatacaccttttccagtttgtgttttgctgtaggagttttgttattgtagactctctgtaatttgccttctgtttacctctccaatgcgaactaacttctcctccaccctactcacactccacacaagccattcacacaaatactctatgattccccactcccaccattttttctatttggtcagttttcccagaggcgcgatctgatcactcacccaggaatgcatttggaggctg

SEQ ID NO: 65164 - DNA, 942 bp, Homo sapiens
cattggcatccacttaaatggaaacaaaatggaaggtaacatttattgcatagttaaaataggtgaatccctttagaagtgacactaatctagcattctttacacgaatgggatgattctcctaattttacaggaaagaggctaaggcttggagagattgaataccctgcttgcagtcccacagctaggacatagagacaggattcacatttgggtttgtttgacctcagacaattcacatgtttccgctctgccatgcttaattgtgctatgaaggtggaaggtgactgcaggtcagattgcacaaggttgagcatgttctagtcgtttacaaggggacctgcagggactttgatcagaaccacctatctgtgttggaggagaacataggtatgacacagctaaaatgtttaggaggaaaaaaaaaaatggcaaaacttggtagcagtagacttttatcttctcttttgataaattcttaaaagttttcttttgcccaatagcagaacaaataactgcacatttccattaattatttactttccttcagattcttttgacatttctatcatgtgctgacagatgcaaacaccctcttattttgtctctctaaggctacatttgtggagagtaatgttaatgactgctactatttttttgagtacttacaatgaggtagccacacatttgcttacgtcattctcccaacaaccatgaaaggtacgtattatttatcccaatattcagatgaggtaactgcaggcaagagaggttatataattcattcaggtcacacggggagcaaatggcagagtcaagacataaacttgggtctgtgtgattccaaaatatattctctttctgttgcctgaaggtaactggataggctgtacatggaggcagtggcggggtgggtgagagggggtagtcttttccggtcat

SEQ ID NO: 65165 - DNA, 2235 bp, Homo sapiens
aggcagggcagccactgtgaatgactgggccacatgcacttgtgccagtgcctttacaggtggtcacaggtaaagaaagagcttccttggaaaggagaatttcaccattctcagtccctccccagatgagaagccttgaggttatgctggctaagagctgggagaagtatgcttgaggccagtgagaaaaagaaaaacctgtgctgagccacacatgtgtctacacacctggcatggcaatcctgttctccatgacgacatccctccctacccctccacaagcccagcctccctgcaggaggattcgggaagactgcctctggagctgtccagcttccagggttggaaggaagcctttatcaatcccatcaccacttcaaacaaagccatgctttctgaggaggtgtagatcttattatattattttgttttccattcttttctatcagttcactggatcaccctctcttttgctgagtagcatgttgacattttttatgactctctgttaccctaagaatatttctacgtaagttttttggcctgaattattgacaacagctacaaatccctgcctgcagacacctatgcacacactggaaagttccatatagggcaaaggtcacaaagtggcagcccagaaactagatgtggtccaccaatatgtaattttctttgacctacacaatgtttgttaacacttggaatcaacatgattaagttgggaaatttcacacattttcacatttctagcttctcttaaaaatatgaaaagacgtggcagtcctgggtcagaaccccacatgtcagtaagcagctggagctgggttaccgataccccctttagacgtagcattcggtccctattttgccacagtctccaccactctttattacctgacacaaagcccactgccctcatttgtctcacttagctggcctctgtaggcatttaactttgagatcccaatgtgtggtaatggtattggtttaagcagaagctagttggtgcccacaagttataaatgcacttgggtagtagatacaactgaattctaattcctttccctttcctttaggcattcttctgctcatcacattctcttcccaaaatgctcagcaccttatgatgaatgccgagcaccaaaatatcgtcccttcctgccactgtagtgtaacataaccccaggttagcctccttccaccaagactctcattccatgatgtctcgcttatcactccctagcccaagcagagtgaccttgagagctgactcagggagatatcagtgacattgctgtcacttgagtcaatattggcaaaggaaagtgcaagagaaagaatgtgatgaagtaattagttgattatttgggaaaggatttgggacaccggggaagtgaatagagtgacctgaccaggtggaatgatcagcctggagagctcactctggggacagagtgagaggcaggatggagggacaaggacctgacatggggagcccactagggaagttgtggctgagtgtttccaggctaagagtgtagtcccatctctgctcactcagtgtgcagccacctctctggtcctcagtcttcatctgtgacctccttatgaccttatagcattggtcctctattactcactttggcacctaacaccctctacctgctgttttcatcatgaaggtgcagtgaggacaggacctgctccctttggttggaatcttcccctggttagtgctgtcagccatgcaaagtttgtattgtgtcatcatcccctgaagaaaataagaagggaatctgggtccagatattcccaaatgatatgaatgtctaaaatgctgggtttgtggctatgtgccagttgtaatttgtgcattttttggtagtaggttttgttggatttagattagtctttttataaaataagcagcatggtagagtggagaaagtgctgggttggggctatttccagcctgtctactactaggaaacacgcccttaaatggggcctctttagagtagatgggctgacaaagccaagggtattgaaaagaagaaataagcacgtaccatgcaagcctaactgggcctttttgcaactctgagtttctggggtttcatagccacaatctgaccaacagcaccactgagagagctggtttttatccattaaataaaagcattacttccgttactctcagctacacttactgcagtaagcctaagtaacatt

SEQ ID NO: 65166 - DNA, 830 bp, Homo sapiens
ggagcctgtatcacaccctgggaggctgctgcaagtctcgggtggggagggccgttcaggtgtgatactggcagggccatcaaatgcccttcagcttggcctctggatgttgtcctaaaagaagcgagagggggaggaatatagaaagaccgaaagagcaaagtgtcttattgtgagtgtcactcaggcggtgagaattctcttctaaaccccatcccggttctcaggaaaagccccagcggggtaacgaggtgagtcggcaaggctcccagtagaagacgcaattcccaataaatccacaaggtggcagagcagaaggtggaaccagggacaactaagatcaggggaaagagctcaaggccactaaggttaattattcaagaagttgccagcgattccagagaatctactggaggtggagagagagggtgctgctgcacctaaaactatttccgtacttttattttaattgatgtactattgaaggcattcatcagatgttgtggcctaggaaagcggtacagtaagtcctcataacattattgctgataaattcttggaaactgagactttaagccaaatggtccagaatgaaccaattttaccataagctaattgatatacacaagaggtgagttcctatggcatatttctggtcacaaaacatcaccaaacttctaaataaggacccaaaacatttctaatatcaaacgttgaaggctatacatgtatttaagaaagattaataaaaacaagtaagatagttattaatatttacccacttattctagttcagggccgtggtggctggagcgtgtcccagcagctca

SEQ ID NO: 65167 - DNA, 589 bp, Homo sapiens
attaatcacacgtattaagacacacaactttattgttgaaatatatatattagaaaagaaaatatggttcatttctaatgtgagttgacttgccccgtgtcaacaccgcaggccctggcttccctttacatatcctcagcacttctacaggcatacaccccttcctgtctgcagcagcaatacaatggtaagatgttttggccttggacaggggcctttccggcctgctgcacgcctccacaagtggactctaatttctactctgggtccaggatgttggcctcaactatgtctgcccagcaggtgaggacagccaaggtcagcatcatgttcctgatggccagtgtcaggcttctctccaacttaaacagggacaaaggagcattggcacaggcagaatcacgtaagatgggtatgaataaacatactaggggagtgaaccatgcacaaaataatttatgaaaccacttctaaggctactgtcatacgacattacattcaggaaaagtgctaggcctctaattggaagagaaaagctctagttctggggaaaaatactgaactgtgtcacttttcttggtgggatctc

SEQ ID NO: 65168 - DNA, 1986 bp, Homo sapiens
gctttatcttctacagttaatacaaatatacgcacatacacatgcatatatatgcacacataataatatatacatacacacatacacgtatatatacatctatatgtgtattcttaatgaatgttatgtcttctctaatcgtttggaagatattatcaagtatttctttgcagttttcctatgatctctgcgtttcttttctgttcctttggtcccttgcttcggtgtgtgttttctttccatcttttatgctagaggaagtccgcaagcaacaagtggtcctcggctcccactcctatgtatgtatgtagtaggaaggaagccgctgagtgcagctgtgcgcgccggggcggtgcctgtgcctctctggattccgtgtttcttcgggggtgctgagcagcggtgcttccgcgtccgcgttctccgggtagctgatgtgctgcaggctgcagcccgcgtggtcgcggctcaggtccgtgttgggctggtaggactccagcggggagcgagcattcctccggaacctggggctggacgacagcagcaggaggcgtgctcccatctccggtagtccccggctcccgctgctcccctttctccccggcctcgggcgctggcgggcgcgggcgagggggtagcgcaggggaggcccgcccgccacggcagggggcggaaaccgcggccgggctcggggtcagcggcgacgagcgggcggctgccccgctcgccctcggcctccgcgcccgcccgccgctccgcagcggaggagccctcaggtttgcgttactgcggccgccacacctacctcagcccgccgcggccaggtcgggcggtgccgcgcaggccgcctccccccctcgcttcccagtcggcttacgcatccccggcggcggcggcgccggcatcggctagaggttcggctcaagtcgggggcactcgtgtctgcgccgagcggcgggcgtgagcgcggcccctgggccccgcgcggcgcggtgctgcgaggaggatcctcgtggccttgccccgccggcggctttccagaattttctacgattacgaagttttggcattcaaccctccatcctctcaaacgccccactgttactccgcccccttcccctaggccccgcccccagccgcagtgccctgcctcttccatccgtctccagcctcctccacggccccgccccctcaggccggtccgtctcccctcccacctcacacctccgccccgcccgtcagccctggctccgcccagccacggggctcgccgccacaggccccgcctccagctcgcggccccgcgcgccggatcggcgtgcgtgcggctggagccttaagcgtttcccccgcccggcttcatccctgctggcggcccagcgtcgttctcctcctgcgcgaggcggccaaggcctgctggcccggagccgcgcctccacccgcgcgaggtagggcttcgaggaccggcgcggcgcaggtctccggaggcctcccgagaggggctagggtcgccgggccgcgcgtgggagcgggtggggcccgggaggagacggcgccccggaggggagtgcgaggcctgggccgacggttacgggcgccgaccggcgttgcctggcctgaacgcccggcctttcggtggagggcagcttgcccctgtatgttgcgcccttccgtgggtcagaccggcggcaaggtgaggcggcggcggcagcagcagccgccttgggctcctggacgcgctcccgaggtggggcgggttggggagtggggattggagcgtgatggctggacgtcgccttctcggcgcggcaggtcccgggagacggggggacgaggcgcagtcccgccctcgggagagcggagccaccttcactgagggcgcccggtttggccccggaaaggcaggaagggggcggggaagggatggcgagctcggggtgcaccgcctgtttcttttctggttaggtatcgtccttggagaagatg

SEQ ID NO: 65169 - DNA, 525 bp, Homo sapiens
cagatatcagaccaagaacacttcagtctctctaaggatgccctgagctacctcactgttaaaggacgacatcaacacagaatgcactaaacaggaaataagctgtaatctagagaatttccattatgtgttactttttggtgactaacatggaatgttgaaaaggaagagctggaaagctcagttgttttccttgttcctctgacattgtccaggcaagagggcatcctgatcagatgagtagatttggctgagaaaaaccctagagtaaggcaggcactttgtggaggtggatgatgatggctcataaaaacgtttgttctcagtccagttcagggctctgccagcagtctttcagatctgaactgcttaaacaaaccctacagataaattggcactctgatttgtaattctgtttgtacaagtttagagcagcctagctcgagtcctcaaccccagtcctcttagaagtgaactgattgcactggatccctaaacccacaatgttgaggacacatgtgatga

SEQ ID NO: 65170 - DNA, 1209 bp, Homo sapiens
aaaaaaaaaaaaaagatgaagtagctcacaggggctgaagcccaggtgcaaatctgctcagtcctagccacctccagaaacaaaggcaaactgtatatgaaggaagctaatatcctcatctgatttcaattaattttcataatcaatatctgagtctcctacctccctgctcagatgaatactgcacagaaatgggaaggaaaatcaccaccaccataacagcagcagccagtatttattatgcacttactgtatgccaggcactgttctagtgctttacctgtattaacttacttaaagctaagaacaacactatgaggtaggaattacccagcctttacagacaaggacactgaggcacagaacaattaagtgacttgccccagctacactactagtaactggcacagctaagatcccgatattaaaatcatagacacatgcccaaactgagcatgctggagatttctagaaaaaaaaaatttccttcccgtaactagcaggctcaacatactctggctctctcttccacttcccagactcttcaactccacccaagatattctgggcggaacctgatcttgaatctagatttgaacaacccagtgacagtcacatgtaggggttggaggcagggaccaaggccacactaactcaatccgaaaagcccaagctgctcatgatgtttcaaacttgacctctgtgacactgcccttcgacctggcctctaacagtggccaagataaggtgtgggccaaagaccaggcctacatacatccggccttgctggcctcagagcaagaagagacctcagaacaccccaaggctgccaactgcttcactttcaagagctgctcatagcactacaccctgagccctatattttgaaagatttgatacaccattaatcaaacacatgcggcagtaccctcatcatgaatggtgcccacacgactccagaccaaaggaaagtgacccaaaaactttggtagcagcaataatcccctaatcaaaggcaaaggactttttgaaatcctgaggatcccttcacagactagagacttgggtcttccacatgggaggcaccagagtctcaagtccgaccccaccagtggccaaggcaacccagcccccgaggctaagggcattgcccagctgagactggctctgccaacagtgatgagcagcagtagcagggctcaaaaagca

SEQ ID NO: 65171 - DNA, 5122 bp, Homo sapiens
gatgggagaaggattgaggccaggagttcaagaccagcctgagcaacatagtgagatcccatctttacaaaagaattttttaaaacttagccaggtgtggtggctcacatttgtagtactacctactcaggaggctgaggcaagtggatcacctgagcccaggagtttgagattacagtgagctatgatcaccccactgtactccagcctgggtgacagagtaagatcctgtctctaaaagaagaaaaaaaaaagccaagtttagagccaggcacggtggcacacctgtagtcccagctactcaggaggctgagatgggaggatcccttgaggccggaagttcaagaacatcctaggcaacatagcaagaccctgtctctaaaagaaaagaaaaaaaaagccaagtttatatgctacacaaagctggatgcagacccccaactctgaccttgctcaggctactgtctcctctgacaacacgaagacgggtcttgttctccctgaaggtgctgtgagaatgaaatgaaatcaggccatgctttggatcttaggctgatgtaacaaaaggtggtttgatttcagcctctgctttgaggccacaaggggaaggtatgatccccaaaccacctaaaaacattgcagacctgaaaggcccttaggaatccacctagtcccacagcctcactatactggtgaggacccaggtccaggggccaaaccccatgctcaaagtcacacggccaggacggaggacactatggtgcaagagtgttggctctccctgtggctctgatccagtgattactgggacgctgcccaccctccctcttaggcctctaataacaacccttcctgatcacaggaactctccggcccaccaaaggcttttgcttacatgacctcaagcttcctggactgtttggtgctccggactctacggacctggatacgaggctggtccatgggaagaaatgcaaactatgaaatcgaaccaacccgggtcacaatgcctgcgtggctatttactgcattaggtcaggctaagttcatttctctggacctcagtatcctcaacagtaaaatgaaactaaatcatatccacctcctgggtgccaccaggacttcgtgagggaacagaggtaacctccaacgttcatagttgacattcaaaaccctctactaaacaccatcagatggtggggcgcagtggtgcacgcctttaaagacctcctagcactttaggaggtcgaggtgggcagatcgcttgagctcaggaattcgagaccagcctgggcaacatggcgaaacctcatctctacaaaaaattagcgagcctgtggtcccagctacttgggaggctgtggtcccagctactcttgaggctgaggtaggaggatcccttaagcccgggaagtcgaggctgcagtgagctgtgattccgccactgcactccagcttgggtgagagggacgagaccctgtctcaaaaaaataaaaataaacaccatcagacaatgacaggattatggcaagcaacctaacctgtcttcatggatgatgggaagggactatataatctcccatcccctttctactctgacattggagatgccccggcctcgaattcaggcccatctccccagggcgtccagagtgtggcagagaggcccccggtggcccctctgcaccacccatcaggccaggctgccctctgcacccagcaggccgttccctacctccaggtcggcgctggcctggctcagggacgcgggagagcaggtcttatgctccaccaggcagatgtggcagatgcactcgctgtgctcggggcagaaaaattcccgcagccgattgtgctgggaacatttgcggcgcaacaggtcgcgaacgggcggctgcagcgggtggtcctggaaggcggggctgtcgaagtgcggctgcaggtgctcctgacagaaggaggccatgcacaccaagcacgtcttcacggcggcctccttcaggcagtggtcgcaggccacctgggcattcgggctgggtgcagaggcgcgggcgggcggcgtccagacgtcggcgggtggctcccgggccaggtcggcctgcaggaactgctccaccacgttgcacagcaccgtgttcttgtgcagctgcggtcgcgcctggtagacggcgcggcactgcgggcacaggtatggcgagccctggactgcccacgtctcattcaggcacgacccgcagaagttgtggccgcacggagtggtgaccggctccttgaagggctccaggcagatggagcacgacagctcctcggccagggggcacagctctgccatggcgctcccaggggtcgggacacaactgctgcacccgcgctccgaggccgccgaggaaacgaaacctagctcgagaggagcagtccctgaagccgtcaggaagtcacgtggggtgcgggggggcgggcggcgaggactgggcgggcctcgcgaggtactcccgggagcctgcgggcaccgcagtcccagtcgcccatgagctggcgaaggtcggccgcgctccgatccccaagagctcccgcgggctgggcgcgggacgccgggctcggccttagcccccgggatttagagcatcctcgcgaccacccggaggcttctgggggccactctgcggatgaggaagctgacgcctgggtgcagaaccccggacccccggattcagagcccaggtccagccgcgcttccgcacaaacttgcgctcggagcaagtcccctccttcccagcactcatctgagaccagaggtgtccccaccgtccccgctagcagcgctggttatattgtgggccaacctttaaaaaaataaaaaggaactgttaaaccacagtgctttttttcttcttcttttttcttttttttaatccttcctctttcctcttcccggactcggacatgcggacatacaatcccggaagactggaggccgtagtcacacactcaaatttaaacctggtgatttctttccattctactgatgtatcatgcttttataaaaattcccatttctactttcctgggatttggagttacccagtttaacaaaggctttctctctccttctctctctgtctctctccctcgctcgctcgctctctttctctctgtcgcgcgcgcgcacactcacacacacaatattggaacttaaatatttttctcaaagttattgatttaaacttacttcctttaatattttcttttgctctgttttccctcctctggcttgactgcaggacatatgggtggacaggagagtagaagtgttcaaaagaggggggatggtggcaaagagaaggatggtgttttggaaggagttagttggagtttgctttggggacagagtgagtagcaaaatgaggaaaaggtaaatgtcttagattaccttgtaatagctactatttatgggggggtaccttttgtgtgctagataagtcacatggttatctcttataatccttataaacccctgcaagactgccagtccattttaggaatgagagtctcaatttatgcaaagcaggactgggactgtagctcaggatcgctgacctccccattgtcactcactcctggtccccctaattcttgttctgcagactccttttcccctaaaaccttttaccatttaccttttatgtattccctttctttcttttcttttctcttctcttttctttttttttctttctttctttttcttgacaaggttttgctctgttgtctagggtgcggcactcctcccaagtagctgggaatacaagcacgtgccaccacacccagctaatttttgaaaacattgttttgtagagacaaggtctctgtacgttgcctgggctcattttgaacttctgacctcaagcaaccctcccacctcagcctctcaaagtgccaaaattacaggcatgagccaccatgggcctgtcccacatcttgtttgcacagagaggaggaagacagaagaatgaggggataggaaatgaaagctatgcatagaatctcatttcaccaaaaaaaaaaaaaaattacagatgagaaaactgaggcttagagaaactaaatagtgtgtctaagaatggacattggcacacagcccatctgctttccaaagccaggagtttcctaccataaaatgctgcctccaaagggaggagtggagcagtttccaggaaacactgtgaaatcccctctgacctatttatcatgggtgaggtggcctagtgattcatgccagaatgtggaattcactttccaggctggttggtttagaagggcttgttagaccaatgaggatgaataggagggccatactttatcaaattccatgcagtagatatttactaagacctactgtgcaataggcatgcaacagactgagtgctaaatgagtaagatgtgagtcaaacctgggcctgccttctaaaacaggaagaagacaacagcataaagcagtaaagagaaatatggggagaagtcaggtcctgctaggggtatggattcctcatctggacagtaagaatcccaataataccttcttcatgggatgttgtagaataaaaatgtaacacatgagcccgtcacggtggcttacatctgtaatcccagcactttgggaggatgaggcaggtgcatcacttgaggtcaggaatttgagaccagcctggtcaacatggtgaaaactctgtctctactaaaaatacaaaaattagctaggcatggcggcaggcacctgtaatcccagctacttgggaggctgaggcaggaaagcaggagaatcacttgaacccgggaggcggaggttctagtgagcagagatcgtggcactgcactccagcctcagcaacagagtgagactccaccaaaaagagagagaggaaggaaggaaggaaggaaggaaggaaggaaggaaggaaggaaggaaggaaggaaggaaggaaggaaggacacacgtaaatcccagcgattttatttaattttgagacggagtctcgctctgtcttgcccaggctggagtgcggtggcgccatctcagctcactgcaacctccacctcctgggttcaagcgattctcctgcct

SEQ ID NO: 65172 - DNA, 568 bp, Homo sapiens
tgctggtcatggtccccctaaattgacttcataatccttcttggggactctattcatagtctgacaaacacaacagaggaaaggagtgactcataaactgataataatctgagaaaaacacaccctgaggtcaaaattttcctttggtcaatgttcactagttatcttaatttgttttccaaaccctggaaggcaactgtgctacacagaaccccagtgccaagatcccaccgttcacattactctcatcctttcgggagtaatacttctcattacaaatcaataaatgcacattttgaaacacattcatgtcatgcaaagtaaaactggccagcatctccactggcacagtggctcccagatcagatgaactccactgaaccaaactttgcaacatcagactcatcagtcaaagcaaaccttcttattacagaaaattgtaatctctcacgttattgtaaaataagacaataatttgcaatactcaacatgataactcggtagagatgtttagttcaatatgattttatttaaaaatgtgtacagctgaaggagggatctgatcttt

SEQ ID NO: 65173 - DNA, 1048 bp, Homo sapiens
gagttcgagaccaccttgaccaatatggtgaaaccccatctctactaaaaatacaaaaattagccgggcgtggtggcggacgcctgtagtcccagctactcgggaggctgaggcaggaaaattgcttgaacccgggaggtggaggttgcagtgaaccgagatcgcgccactgtactccagcctgggtgacaaagcaggactccgtctcaaaaaaaaaaaaataataataaaaaataataataaaatgcagattcctgagccccaaagttgactacaccaatcaggatctccggggttcgcgaacgtgcatttttacagccccacccccctccaaccctcgtccccttccccatcccccatcccctccactaccaggtctagcggcttcaggcccgggcgtgcgcaggcgcgtcccccgcccgccgcccacccggccgtcccgctccctgcgccgcgcacctgaggcagtcgttgtctctcacaaggcgcgcgctctcggcggggggcaagagccccccctccaggtagaggcctaggaaggccccagaactgaagccgaagcgctggcggatgagactaatgagatctgtgacgactcggcatctgttcaagtcgaccagaagccagaaggccgtacagtgcggggtagctggcggcgggtaatcaaattgaagccgtagcctaaccgtctcggaagctgccatcttgcttggtgctcaacggaagccgagagataccacggggccaccgagaggcgtgctcgggcggctcgcccccgccggagcctttggcgtgtgccacctagtggtgaaacctggctactacaggctgcgtctaggcgagaactcggagcgtggttgatttcattcaattttgttcacggcagggctgaggaagggaataagtgaaatgcctttattacatttctactgggcgctatgtagggtctcctaattaaggcaactctctggataaataacatttctcctcagcagtagtcttctaagatatttgctcatcgacgtgaaagatttttataaaacaatcc

SEQ ID NO: 65174 - DNA, 578 bp, Homo sapiens
ggcggtggttattccctttagtatttcgatccggtcacacaacctaaatccaacatctgcatcaaatgtctcctttccgaaatactctccctaaaatgacagagaacctggccaggcggacagaacggcccctgcgcatttgcaggggtcctggtgggcttgccgggcagagggcgtgcgggtctcagcaagctgccgggtccgcccaggccccgccccatgcccattcaggccccgcccccgacccgcaggccccgcccccgacccgccccgtccgcctccgtcacgtgatggggcgccgggtccagcctgttgctgatgctgccgtgcggtacttgtcatggagctggcactgcggcgctctcccgtcccgcggtggttgctgctgctgccgctgctgctgggcctgaacgcaggtaggttcaagcaagaggcgcaccagctgccatgcctcttttttctccaggcgtgagagtttgttactgggtttgtgcttttgaaaacatgtctcttttccccggttcttaccttgtgtaattatattgcttttgaatctcactcttttttttttttttcct

SEQ ID NO: 65175 - DNA, 1595 bp, Homo sapiens
cccaaagccaatatgattaaaaagaaacatgtaaccatgtttgccattcttgttttttttttttttttgagacagggtctcactctgtcgcccagggtggagtacagtggcgcaatctcggctcgcttcaacctctgcctcctaagcttacgggatcctcccacctcagcccccaagtagctgggagtacaggcatgaaccaccatttttctgtattttttgtagaaatggggtttcaccatgttgtccaggctggtctcaaactcctgagctcaagcaatctaccagcctcagcctcccaaagtgctaggattacagatgtgagccatcgtgctgcgcctggacagccattcttttttttttttcttgagacaggatcttgctctgtcactcaggctagagtgcagtggcgcagtcatagctcattgcagcctcgacctcctggactcaagtgatcctccaacctcccaagtagctgggatcacaggtgaacactaccacacccagccaattttgaaatttttggtagagacacggtctctctatgttgtccaggctggggctattctgttactataataaacaattaaccttcagtgggtcatataatccctttacttatgggcattaggatgtttctgatgtttctgatgatgtttctgtctttttcaaaatagacatttcacttccagggtactggggttggctgtagtacttggcaatgaaatctacactttctcaggagaaaaaagtcccgcacttcatcaatcatggttgtttctgagatggatttaacgctgtgttccaccagggtcacagctcgttcttaccttgtgctttttctttgaaagccacctggctcctgccacagccccttgaaggttgcctttgttagttgctcactttccctttaagagttgtgagtgtttcggctggtaaagttccaagtgccctctggacaaattggcacaatgtgaggattttccaatttggaagagaaagagcctgttctccagggagggctcttcaaggtaattgctctctgagaggttcttgccactccctttggcaaccttcagagaaaaatccctcttgctgttaggaggaggtagaaacccacagatgggaaaagaggagctcagggcagacttgccgagacctttgaaaccagtgacctttggaaatgcaggaaaagagggaaaggccagtgcaggcaaaggcagtcgcgcttcccttcccaagataggcactatagctccagctgtaatgaccattttcactgtagtccttttactaaagagctttagcaaaggagtagtggccaaggaagccccttgcagggagagaatggcgcttactcagaagaaatactttaacaaaccacctgggctggagggaggcgcccaacggtgtgctggataagaaaagatggtggttaacaagagcaggggtccaagaaaaaccacagagaagagcaagacatggagaatagagaagtcccctctgggtcaccacccctaccctggcaggggatgtgtggagagaaaagccaggtggtggggtgacaagaaatgggtggtaggctgaaaagaagt

SEQ ID NO: 65176 - DNA, 728 bp, Homo sapiens
gcgccactgcactctagcctgggtaacagaggggactctgtctcacacgaaaacaaacaaacatgcaaaaaaacacaatcatattcctctgcaaatgtgtcctccaacttttgtcttggctcagcccagcagcatttttgcatataactgtcctgaattcaccttctttgttatctggttctgcaggcgggtgactcagttacaaaaggtgaggtttgcagggaggtcctaagggaatttgatgacagtgaaggggaactctgaaatactgatccagccacacttacaaacactgctgctatggctgggagttacctctatagagcttgaatcctgtgctgttagaagccttcttctgcaggagtggccttggttttattgcttcttagcggttgggaaccagcttcctgccaactgtttggaaggacatgcccagtttccagctctggctagatatgaaagtgaaagtttctgaaaatgatctttgctggctgggatctgaagcacctgtcaggaggaagaacagattggccctaactcgagggtgctcccaagtggctgtggatcagctatgagtcccttgcagggagaggcaagaagtgtgagcaaagctacaggtaaatgaagaaacgggagacgtctgagacatagcatccattttatttttccttttagtcttttgggcttgcagcagtcaatatttttaattaaaaaagttaatttacgaa

SEQ ID NO: 65177 - DNA, 670 bp, Homo sapiens
tttaggaattgcataatattccaacatgtatttatttgtatcataacttagctaaccattcctttactatcagacctttaagctatttctctatttttagttgccctaaggagcttgatatgtatggattttgcttttgttttgaaccaattccctcgggataattttctggaagtctggttattgggtcaaaggatatgaacgtttttttatgtctcttgttaatgattactaaattgcttcccaaaaggttgaacaaattcacaaagccatgccccaactccatggcataattgctgaggttttcagagaggggcagacaatactagaagtctgttggtttttcccatgacaaatcaataaatgactctaaaaatacaagtcctattactttacctaagaagaaaggcaagaagcctagtaataacaacagtattattatggcactgcttgaccatctcaccctctatgggccagcactttccttgcattctttctattatataattctaatatatattctataattctgaataccctaggaagttagatcttgctgctcctcagttcacagatgagacaagggtgggaagagaggtttaatgccttgcccaagggttatacagtgagttagtattgtaatgtggatttgaaccctgtattgttgggc

SEQ ID NO: 65178 - DNA, 2566 bp, Homo sapiens
gggattcatatatatatgaatttgacttaaatctcattaggtatagtaaatggcatctgtcatttaaacttgcatttgatcactagtgaagattaagcattttcccaagtaattgttagttcttagcatgatctattttctatattttggccaaacaaatgttcatttaaagtcactttgttttaaggatgacagcagggctggacagccaaaaccctaccctctccatttattttggaggaatttattttcccaaggtcctggcagagatagtgactcaccgtgactatctctgcaaaaatcattccaaaacccacaccaattcagagaaaagtgcttcatttcgataacatcgacttgtgaaaacgagcaagaaagttgcatttgagtggtaccaggtttcaccattatgcagttatcgagcaattattaatggccaacccaattatacgctacaaggaaatgacggtcacagggaagctcaaagccccgaagcgagggaagccctgctcctcaccggcccctccgccttttccagggcgctctccgtcccgaggcaggagatggcctggttgacccttcgagacaaggcggcaaaaccggtgctgggcttgcggggcagggaatcaaggttcctccggttgctgtaccgtcccgcccggcccctctcccgggcaccggagagatgacggctctctcgcgagagcgcgagcaagacccggctccgggcggcggcgggatgttagcccagcgctgtagaccgcgccccctctggcgcagctgggagaggcgcggcggaggcactgccgggagcggccggcggcgcgcacgcgcaggtgagcggggcgggctcgggagcgcgcgggcacaagggcgaggggcggggcctgcgtcgcgctgcgggcacgtcgccgcgcgtcttcagtatttaatgtctctgtgttccacccgcctgggctagcacgtgggggagctgcggaagcgcggcgctgcgggccgggccgcggggcacagccgggggccggcggcggcgcgcggactccgcatcccgcaccccgatggtagccgaggagctggtaggtcgggggcagctgcgccggggaccccctgccggagacccgaaggcggcggggtcggggcgatggggagcctgaggtgcaggtgcagggtgcgacgcgccctccaggtaccccgggggcgggacgctccggacgcagaggtgtcctgggggctctcggccgccgcgcgctgtcaggcaggcccatctttccctccctcgtctgcgccccctctcgtccttccccgccggttgtctgcccgcgggctcctgacagatcgcgtgtgcgcggctctgggcggcgctctgcggccgcgccgtcctccccacgcgcgtcactgtcctcgggggcggggggcgagggcgcgacgcccgggtcgcctctctgcacctcaacttaaccggagcgtgcacacccgcctgcgaggctgacccgagcgcgtcccacccaaggtcgcccagccccgcgggcgtttacttttcaaaggtcgtgtgtacacagtctgagccggagctgccccttcacttctggagcctcgcccaacttctcaccctcggctcgcccgccggcgcagcccctgggagttccgtgcggcgagccaggggaactgggaagatgggccgggacatcggccggttgtgatccaaccgtgtttcgggctgagggaccgttcgaaccgaattggggtctggaggtcggaggctcaggggcgtctcggggggaatttgcattcgtagcccctgcaggcgtgtccggaggggtggaggccgtccagcctggggtgtctgccgacctcacgcccgggggccccgacggtcacgtgtccggccccgcctgcggcccagggcccggggtctgcgatctggagggaccgcgccagttttggggttacgatgtgctaggagaggcagtggctggatgcctcgaacgcgggctttctggcgttcaactcttttgtgccctagctgaaggtcttcctgtttcccttccagggagggataggagaagaaaggtgctgatcgtggtaggcggtgctgtggcgactcggaacggcatgggagccctgggcgtttcgggatcttcctctcctgggggatgtcctgggtggcggcgccttcctgccgccgttaacacaaacccggtggacttcgctccaggtgcgagtcgaggcctctcaagctgggtagggtgtatgcgcagggcaattagtgaggttaacctgggtatctttcccctactgtagtgcgcgttacttcgtgtttagatttgtctccagtgaaatctaggctgctggacctggtgcaacagtatctgttagttactgatcaaggaacaccgttcacaaaaagctattaattctggcaactagtagccttacaagctcttgtaactgctaagtccttcccaaattagtaccttttttttttttaactctttatttagaaagcaaagcttggactcttagcaccacccatccactttgctcttaaaggtacagaacatctttg

SEQ ID NO: 65179 - DNA, 1689 bp, Homo sapiens
ttatagaaggcaagatactatatgatgcatcctaatctcgggatgtttaaatgtttcttaaaatactgcatctgaaaatgggtgatttttattttatttattttttaagaataaaggagtttccctttgcttactgcccctcagctgaattaacaagccccgcagccttgtctgccaactctagatggatagtagtagctactcagacctgttgaagtcttctgagtttaggcttgaacctaagccgtggtgatgggcagggaggtttagggatggcacgtggaaatgaggtaatactgtccacgagcatgcggtgggtgccaagcacgaggttagtgcctcgcatgtaccttcatgtcagccctgctttgtttgtgaggaagttgaagctgagaaggggaccagggaccaccccactgagggagctggaagctggcctttgagtgcagcctgctagagtccgggtgtggttctgagccactgctgggagccatcgggatggcaggtgttagccagtcccattctgtggggcagaggctggatactgtgagtgagcagagctccccgccccctcgcccagcccctgtcagcctgttatgcttcccgcaggctagccaagcagtcttcccccagaaggggtacttttccctgcatgaatcctgttcgaagcgcctagtgttaaggggggaagtcattttgaaggtgattcttccttagctgggagcaggatctcttgggccttagttctctgcatccagtgtatgggttacttggcaaaggattatactcagggtttggagaaaccatgtggaaggtaacctaattggtagactctcaggagtgatctatttctggtgattgagtcatccatatttaagccagggccacttctcttgagctgatctggacccgcttttttgtgacggtccctttggcacgctcttgagtgagagtggaacagcccaggtcgggagcagagtctgttcccattgggttttcttgggcatgagctttggctcagtcttttgaccaagggagtatttgagccagaagagtgttcagagttgcatgaatcaggcctaagcaaagggaaaggagactctccttttttagtccacatatggcagaggaacgagcgggtccccgctaggtataagaatggggccctcaggcaggccagtgaggactttgtctagctctgctgggctgaaggccagtacctatgaccctgggactgggccctggggacaggagactgacccttggtctgagggggtaggatagttggaagggtgtcaaggtgtttgtggtccatcggtctggctctcaggaccatgtggacctcaagcgtgtctcctcccccgccctctgggctccccttccctgggcgcagtctgtctcttccaagttcaccacttgtgtctctgctccagcagctgtggctgggtgcggctgccaattaagcaagtgggactgtaagtgacaggctaaaattaggtgtatcgacacccccagttctcctttcattggggttgttctgagccttctagactgtaagttgacagtcacctgccaagcttgaggagcgggtgtggggcagggcctcctgggaatgtgagtttgggaagttcttggttactggctgctctgagtggggtctgtgtgtgtgcgtgcctgctgcttcttccc

SEQ ID NO: 65180 - DNA, 2047 bp, Homo sapiens
gggtttcctgaaataaccacccttcccatccatcccagagacaccccaaaagtacttctcgttatatacaaacatttgctttgaacctcaatcatgtgaccttgactcctataacctatcttattacatttttaaaacactgtatgattaacgcggaaaccctttcttcggcactttctcgccactggaatcgcgtcagtttctcaaagttccaaaataacctttcccgggcacggattggtacctctactggggaagggcggggaaccgcgcaagacgtgccggtgtggagccagagccagagagaacttccagcgcaaaaggaaaataaaacttgtggctggtgtttgtgcaggagggtctccgccatcctgaagccccccgatcctggggcgtctcgggggccgccaaaggagcgccagggtgtgggtttgctcccgacgtccttgacctaaatttctgagcggtggctggaaacagggcacagcggagggcgggcggctggtgccattcccggatctcggcggcaggggccggcaaacttgaatggagagggcgaactagagagggtggggggcgtcttctcccaggtccgggtgaggagccgcagcaagctccccgcgcctcccctcccccgatccacccgccccccgcagcccatgtgatccagggaagtcggggtgcgctccccctcgccctgcgccctgccggcccggaggcggggtcccctccgcccgcggggttcgcgcgccacccttgtgggtccggccgtggggggccgagtgtgcgcgcgcgggcaggcgggggccgcacgggggtgcgtgacgtcaccggcattggttacacgacgttctagaactccgccccacgtgcgccggggaggagggggaggaggaggaggagatgggggtggggaggaggagggggagaggtggggatgggccgggggggcggggacgggggggtgtgcgaggcagcggggctgagctaagccgagcccacgtgtgacggctctcgccgctgccccggctccgccgctcgcagagagattcggaggagcccgggcgggggggaggaggagggggaggagggagcggagatctcggggctcggagccggccgccgctccgctccgatcgctgtggggcttggttttttgggggtgggggggcgggggggctcagatatggaggcaaatgggagccaaggcacctcgggcagcgccaacgactcccagcacgaccccgggtaagtttccagccgctgcccaccgcgccgccttgggctcgctctccttgcagcggcggggacggcggtgcgcggagccgggcatctcccgcgcccccccgcctctcccgcgcgccccccccgtggaagttacacacctttggattgcatttcgccgtcaccttctcccccaccccacctcccggctctcgctcgctcgctcccccccgctttccttttagcttttgtaagttacacgtcaaaatggccgatctgacatcggtgctcacttctgttatgttttctccctctagtaaaatgtttatcggtggactgagctggcagacctcaccaggtaagggagggagggggggacgcctgggtcccccccttcttggcttctttattgctctttgttatcccggtgtaggagcccccccccccccgccattggctccccacttctcctgtgcaaggttattttttttaaatagcaaatcctttctgagccctctatgcgacctctgttgccgaatttcccccgcgtgtgcaaaaaatgcaaaaacaaaacagaataacaacagaaaactacttttggattttgtccttgatcaaaatttgcattgctttttttttccacaccttctctcccccccccatctctctctttctctctctacagatagccttagagactattttagcaaatttggagaaattagagaatgtatggtcatgagagatcccactacgaaacgctccaggtaaaccattcccttctggattttgtctttattttagaacaaagtttaagttttat

SEQ ID NO: 65181 - DNA, 564 bp, Homo sapiens
agatgtgtttttttttctttttttaattttaagttccaggatacatgtgcaggatgtgcaggtttgttacaaggtaaatatgtgccatggtggtttgctgcacctatcaacccatcacctaggtattaagccctgcatgcattagctgtttatcatgatgctgtccctcctgatgagatggttttaagttggcaccagcacctgtttctcatgccttgcgtatgcagcaggaactgtgaactagggacaggttcatgccctttggccactgcagacgtggagctgtggacgccagtacttgtgtggagagtcggtgtctgttggctgtatctcagctttcttttcagggcagacctgatacaggtgttctaggtgggaaaagccttagcacttgttgtgaactattatattgttactctctggaagggaaggtggaaaggggaatctatgccagtgagcacaacacaggccgcatatggacacacatgaggtcgctcggcatgctcttaggcccagaggagacagaatcagatactagcctatcctctggctgctcccaggcta

SEQ ID NO: 65182 - DNA, 629 bp, Homo sapiens
agtttgaatgattaactgagtgagttaatttcaagccattggtttgagtagccgtgaaagctgaggttagtggaaggggaatctgtgtgttctttcctgcccaggcctgccctggtgcctaaggtcttgtgattgttgctgctgtttgcgtttttaatcgaaatatcttaaacatttaggcagaacctcacaaatgcagctagattgtggaaaaggacagtgtgaatcagcaaagagtaggattacgtatatctttccaaatagaagaaatgccattctgttttgcaatatcacagagtcctggtagcaagaaagggccctttggaaaggccttttgccttccagtgtttgacccaaggctgctgtcccatctgtggcctctgttgctctctcatgttcttttctgcccagagaccaggtctgggggtgttatcaggagttagtcctaagactggaatgagactcctgggattcaatgatggccagttgaccacaagatgtttctgttaggttttaagttgagattctgctacgcctgctttgatggctaggtaacactcctcagcaccaggtgatggatttaacctctgtgagctgtgtttctaacctgactgggcccagggatcatg

SEQ ID NO: 65183 - DNA, 1443 bp, Homo sapiens
aggcttaatttaaaaagattggggtttcttggatcaacttgaattgcttattttaaacagccctcttcagtgtagtttggcaaagctctctctttcgggtttatttgtttacttacctacttatcttcaacacactgacctacccacctgtgtatcttatttggttaacatttatccaagtttgaagatggaaatagttttcctctgaatcagaactttcagtgtaactgttccaagaaaccgccaccacagatgtgggaagagggaagagaatgaggaagattcctgctgtctttttaccgcttgggtttacaaatgtggcaaatttggaaaatgtcaaaaagtaggaaaaataaaatgaaacctgagatctcaccacacagaaataattatagtcaacatattgatatgttttctctttttggaggaaaaaagttacagatgaacagaaatttgaaaacaagctgtgcctattttctgtttcttttattacacattttattatcaatgaatactttctgctgtaaaaaatataaatgatacagaaaccaatagtagtgttcccctttctagaagaaactataaaagggtgtactgttcatcgcccctattcacgctttaaaggagatgtccagctccagttgaaaatgaagttttcttacctggcaatctggtgtttctgaatgtgatttgaaatccgccaccccaatgagaatgaggacagttttgtttttttttcctgccaagagggatcgatcgtattgattaattgactgcaaaaataaattcagaattatgaaaataaagggcatctggatttagaattaccaaatatggctgggcacaggggctcacgactgtaatcccgacactttatgaagccaaggcaggtggatcaccttaggtcaggagttcaagaccagcctggccaacatagtggtagagacatatctgtctctgccaaaaaatacaaaaattagctgggcgtggtggtgtgtgtctgtagtcccagccacttgggaggctgaggcacgcttgaacccaggagacggaggttgcagtgagctgagattgcgccactgcactccagcctgtcaaaaaaaaaaaatcaccaaatattaggtgtgttaagatcctgggagatcaaatttcaccctctcattttacagataagaaaactgaggcccaacaaacattagtaattgcctcaccccaggtcaatcagccagttaggaacaaaacagatttcaggttctagtttgtgtccttttttctttttaaatgaagatattgatctattttttaaaaacaagaacaaaggccgtgtgttagtctagtttcagttgcagagagctgaatccactcccatctggtttaagcagaaaggaatttgtttgagggcattaaaatgcttccagaaatcatcaggagatacacggaaac

SEQ ID NO: 65184 - DNA, 518 bp, Homo sapiens
tctcgatctcctgaccttgtgatctgcccaccttggcctcccaaagtgctgggaccacaggcgtgagccaccgtgcccggcccacaaatacttttttaacctacttgggatagtcagttcagaaggaaggaatgagccaagcctgacttccctcaggtacgagtctgctaatctttaactctgacttgaatcagggcatccacttctttccttagatatccttctgccctgttacatcacctcatgtgttgcatcactgtggctggctccacagttggaattctgtgtcggggaaaggacagggaatttggggctctgcccaggtgagcagggattctccacagttcagtccagcaagtgtttttggaagggaggcctcctgtgcttagagcttcatgccccttcaccttctcagtgacctgccctatggaagtcatcatctttacaacaaggacttctgatatatttgactatatttccctggattctgcaaatggcagaatttggaaagacatgca

SEQ ID NO: 65185 - DNA, 1497 bp, Homo sapiens
atctcttgacctcgtgatccacccgccttggcctcccaaagtgctgggattataggcgtgagccaccgtgcccggccacatatttttaatatatgtgtgtgtatacatattttaatctctcaatggccatcagagatttaggtcacagtgttaccatgctttagtcagaaggaaagaactctgggtcactgtgcaatttctggttggcttttggaagctgacagcctcattgctgatatcttcttcaggagcacaaagtctctgactgggaactgctggctacatggatggagagcccctctccagctctaatactctctgtgttccatgcctctgggttatcagcaagaagcccagctgctcggcccataactcagatcagttagcatataaactccagaaaataattgccctcttaattgctactgataccatgtcttgaaccaggctttgttcaaggtgggatacaggtgggacacaggcttggttcacaggtgggagggtgccctgtgcaggccgtgggaggataatttgagaattcccttgcctgtccctgctccgcggttgctgggcacctggcgagagcgttgggttgtttgctttgggtaactatggcagatccttttaattgccaccaaataacttcagctcaacctcgtcagtggttgttttgctgcgtcgctcggaagaatgcctccctctttgtaagagctggatggatgggagcttggcagaggcaggccaatgctctttaatgttttccttcccatttaataagtgttgagtaaaacttgagtttagggtgtttatgtggcacaaaaggtaaaccatttgtggtgttttggaacctgggctaagtgtttctcacacacatcctcatgacatggtaatgactacctttgtgttaaacttgggtcactgtcaactttcttctgaagtgctccctgctttgttttgggggcaggggtgggaaaggaatgaggtgagagaaggtgaggtgaacatgggatgccgcacgggggcattgtcctcagtcggactttctagaaaaaggcatcacgcggcctggagacaggaagggagagattttaatcatctgctgtggcttttgctcttctgacatcagaatggtaggaggccctgaacttttgacctctggctccaggtccataaatgtcccgaggttcccaggaaaaggaagacttgttagatgggaaccctgatgtttgattagagcagcttttagtcactactgtcatgtgtttgtttattcaggcaccagttgcatctgagtagtggtaggtcctggagacaggaggcacagcctttactcatggcctcatggtaaggtagagtcatgcagaacatttaacgaaagtatggcttggccgggtgtggtggtgactcacgcctctaatcctagcactttaggaggctgaggcaggaggattgtttgagcccaggaattcaagaccagcctgggcaacatagcaagac

SEQ ID NO: 65186 - DNA, 3773 bp, Homo sapiens
ctatcactacaatcaggatatataatagaactgttccatcaccccaacaaactccttgtgtttctccttaatagttacaccctggccccactcctaactcctggcaaccactgatctgttcctcatcacaataatgttgtcgttttgagaatgtcacagaaatggagtcatacagtatgtaatacagccttgatactgactttttcacttggtatgatccctctggtcagttgtgcaccagttgtgtaccagctgtattccattgtaggaatggaatggaatggtttgtttgtccattccccctgtgtttccaaaagatggtttatttgcatgcgacccattgcatcacagtacatcaagccgggtacacttacaaagttaaacctcactcatccgtactgatttcacaactttgtagttatcaatacaaagtctgttatcccattatgcagtcctcatccaacagatatttgttgagcatctgtgcatgccggggctggaatgcattctggtaatagcatagggtagtcatttgccacaggccaaatgctttcctgcgtgttgtatcaatagtttctacttttcaatgctggggtgaaggttaacagtgatcacgtgttccttttacacacaaggaagctgagctgctttggaaagccatgcccaagatcatgcgtaagtggaaatggagtgggatttgaacccaggatgtgtgatggcatgccaagtttcttttattctgtaactgtggcttcaactgtacccgctgaattgcttacagccagtttgctcctctagaaaatgagtggactggactcatatcctttttatcctctctgccttgaagagtttatgatcctccctgaacaagaagtaactttgcccagtgactgcatctctcagcctgttgctgcacttgaagtttgttctcagcagcattttcttagccattatttgaagacagtttcggaattcaaaagtagcaaattagaattcctctaaaaacagtcggtagttcagaccttccctcattttgctaatttttgacagggtctttgggtcaggaccaggactgggaaacccatgggactctagggatgactttagggataaggggattggggagattggctgccaggcagcccaaaggggaaggagcaggaacttccttggatgtcatcaaagccccatgaagaaactctggggctgagtggtgctgagtgcgctgattcgggtgcctgatgctatacagttcgcagaattctgccttgtgccagaattgctggggatcagaggaggctgctatttcaggcatctaagtgctactgctgctgaattcaggcctgagcagcttgtccgagagggcggggcagagatgctcctccaagcttttgaagctccacgaagggttcaaaggagtcttggagaagggattcctgtactgggcgggaagtggaaaggtgacctttgggtcacttctaactcctgagtctgtgattctgaggcaaatggaacttcctctctccctcggttaccaacatgcactccaagatctggctgagttcattggaatcaaaggctggtaccttcaaagggctggtggagagaaaagggcctggggcttgggaaacctgcagctactccgtgacctctggcttatccccttgcccctcctctgttgtggccaagaaaagtggtggggctctgggacccaacagaccagagtccacctcccatcagagtggcagaaagagatggtgggggatggggaggcaccgtagtacaggggtgtcagagagcccaaaggtcattctaaacacacattttttcatctgtgctctgcaaccaactctgcgtgtttgtcagacaaaagagctttaataaatattagtttaatgaataaatgtgtcaccttggcagagctctccctctccctcagtcttcttttttcatcagccagtcttaaagagagcagggtggaagatgtctgaagccctgtcctgaaagctgatgccctcagaagttccctgcactggggcccctggcctttctgaaatgtaggcaagcccttcatcccattatcaagccatgttatttaccctccctgttttccagacagaaagaaggtgcagatggcccatgggattaaaattgggattggaaccaagattttccaagcctacaaaactcctttctcctctccccctcccctccccaggcgtatggctgcagctacgcttgtcaccatccgagactgcattggccacaggagatgtggatgatttttccatttgtcctgatgtttatttcatgcccatcaatatcagcccgtattaggacagatgaggtggctatttacaggctgtgcattttcacacttggtaattataaacccttccctggttcggtcagagtcgtggagatccattttggcaattagcagtttagtatttgtttaatgggaatgtgagagagtgttccggcacatcagtgctcccctaaatgatttgcctctctcctctggagctggcaggcttgggcctttttcatggtaggtgaggcctgatggggagaggctggagagggggagaagggagcattcagcagttcagcagcctgcctgccactcccctcccccagcacatgcacgcacgcactcacaatcagtgctgaacacgggcctggatttccagagcacagcagccgccacttgaaggagcctcacacgagaggccgttaggccagatgccatttccatgtgacagctgtcaagcctgccggatccaactgctgctcctcaaacagctctctctctcagtgtctctctccccttccctcatcgcctcctctctacaccccatctcagatatccccagtgacagcctgctgccccactctccagggtggtgcttgggcccacggctttgcaagctcagccagaatggagctcccacccagtcctacctctcaccgggagactctgccttccctggcttagtcttgagatagggcctcctgggactgctcccccaagggcacactggttctgttagtggccttcccttggcatagtccattcacaataagaaaacccacagcattgggtgtggctcccggcttaactgcatggaccatgtatgggtgtgtgcatgcaggcgaggggattgccaggatggggcagtgaattgagccagtgtctgttatgatgagcattttctgtgtggtaggcgctcactggctaccacatgagccttcctaacaactccaggaagcaagacacactgagtatccttagagtcactgcacggggcggggagactcgcatggctgagcctggactgcgttccagagccctctggcagttccagctctgctagaggcttgctccatgactatggaggagcccggtgatctcgagcttttggaattcacttatctaaaaggaagagacccaatatcctcctctttcctttacctttccaatcattcctcctctcccgagcctaccggggcaatatacctccatttccttgaggttacctaatcacctctattcactttttggtagagttttaaagcagtgtttgttggttcatccagcagacaggggcactgcacaaagctcttagggattcaaaaaacagaacacaagtaagggagaacagaagacttagggactcatctgattttaactactggctccaccatttacttacctgtgtgatcctaggcaagtcacttactgtcggtgaaccacaatttcctcacctgta

SEQ ID NO: 65187 - DNA, 3903 bp, Homo sapiens
ggggagtttggagagctgggtttcttctcttccctttcccctccctccttgcatttgaccagataatttaaggatcatctgaagtgccgtttcctgctttgttcttgatatgtgtggcttgcgggtgtgtatatttatatccccagaggagtaggacatttctcagggcatgcatcggccacagcaaagctctggagcagcctcacagcacagagagtttgcaaaagcccagtggccaagtcaatgcttccagagcatcgtcccagctgcctctggagtccatgttagcattccaggcagagagtctttatgcatggatcttaggggccatctcatagaatttcctcctttcacagaagaaaaactgaggatagaggagggaggtgactggtcctcagtgagatcctggtggggctgggattagaacctggactccctccatgcttggtgcggcactccccaccacacccagctgcctcccaacacctgctgagttacgtaccagcaacactgctctttagctgtctcctgggaacaagttttttgtgtcctcagatcagttcagcttcactcacctactatgtatttggggagccaaaactgtaaaaccttcagcagaagaggcagtggtccaggggacatactgtaggttcccacccattagccagctaactggacaatagcatttttgacctccctccatgtacctttgcattgtgtcctttttttttttttttgaggtggagtctcactctgtcatccaggctggagtgcaatggcgtaatctcagctcactgcaacctccacctcccaggttcaagcaattctcctgcctcagcctcccgcgcagctgggattacaagcacacaccacaacgcccacctaattttttgtatttttagtagagacgggatttcactatgttggccaggctggtctcgaactcctgacctcagtgacctgcccacctctgcctcccaaagtgttgggattacaggcgtgagccaccacgcccggcctgcattgcgtctttaaagttttcctattcagccagcacgtgagctgggctgtctcaagtctaacccctggatgtggtcagtaccatctggctacttctaaaatcacccagcaagaatgcctggctcacaataaatcttttgactcattagaaagagggttcactcattcactaaatgaattaggattagagaggcatcacccactgacttgagtggtaattattgctgattttcacggtgctcatttagtgaggaacatgttgccagtttctcttggcgcttctaggatctctgtctccaaccttgctgatggggtgagatttagaagaggtccgtccacaccttaatgcctgtgttccatgtggaatgttccatgaagagcgtgctccatgtggaatgtggaacctgatagtttaattctctgccacatttagcactttcccttattctgccccttttctttcctttgctttctagtattattttagactgtctatcttctgattacaagctttctttgttgttttgggggatttttttagaatgaggaccacgtatgagttacctatggccacaagaatgctgtgtaactaaccccaaaacttcaggggcaggcagtaactgtttatctcacgtgtttggagtaaacttggagtggttctgctgatcctggctggcctcacttgcatgctttgagggtgactggctgtccacccatctaggctggcctcggcacagggaagttggccctgctccatgtgccacccatcctgcatcaggctagcctgggcatgcccttgtcatggtgatggcagaggtgcaagagagaacaagcaggaacttgcaaatcctcttaaggctaggcccaaaacaggcatactcttccccccaccgcattttattagccctaacaaattaagcccagattcaagggatgaaagtagactccacctctttgggggagaaggaccgcaaactcacagaggaacgggtgtgagaccattcatatcatcagtccaccatagacctgtgtgagttgtcttttatttgtacttaggctgatgttttgcaaatagcgaatgcctcatacatgcatgttgcataaaagtaaataaagttaccatttgctaagttttctattcaagattggattggctgcataatctagacatgagtttatctgttagatagatctagacatgagtttatctgtgaataagagtttatctgttagaaggaaagtttatgtcatcctagtagaatctggatttttctttcatcgggtgcagggcaagttggttgccactaagaaatccctcttcttatcatcttttccatcgtggggtctaccatcatcatttttaggattttagaatataaacatctgagagaaggggaacaaagagagggagaacttgccacactgaagtgtggaacttgctcctagatgggaaattttgtttcatgtattgaccactgagtgtatgttaaagaggaagaagcaacctctgcccagtgtctttaacctttgctcttgcttcttacccttagagtagctcatggaaagaggggtctctgggccagcagctgcatcagcatcacctgggagcttgttagaaatgcaaatactactgaatcagtcactctggctctgaggcccccgggagatctgtggcttaacagtccctctgatgatgattctgatgtggatgatatttgagaatccctgccccaactccagcagccatagaaactaacagattaggtcccctttgttgactctcacatacttctgaggatattacagcatagtctgaaccgtgcagtagtcagaaatatgttcaataccttctggtgtcaggacaaagacagaggcatcccattccccaccagcttacctaaatgttactttactttgcttttttggggggggcaggtgggggaggttgtgttttgagacagggtctcgctctgtagctcaggctggagtgcagtggtgcagtcatggttcactacagcctcaacctcccaggctcaagcaatcttaccatctcagccatctgagtagttggaaccactggtgtgtgccacaatgcctggctaagtttttagtatttttttgtagagatgaggtcttgctatgttgcccaggctggtctcaaactcctggcctcaagcgattttcccacctcagcctcctaaagtgctgggattactagacatgagccagcatatccggcctattttgctttttcattcacaaagatacaccactaaagatgtcagggccatatctcaaacctgccccaagttattacaaggtacatctcaaggttggaataagctccttttcccaaaacagaccagggttctgccaggacatgggacaaatcatgctgaggatcagacacctcttgtccttctgtctccctcaggggagccactaggcctgcaggtgcccatttcaggtacaaagaattttgtaaggcaggtgagcgcgttgtcaacatgaagtaagtaccagagttaatcataaggatgagggtggtgtccctagaaggggtatttcataaggggttagagaaactcctgttcctggccgggcacagtggctcacacctgtaatcccagcactttgggaggccaaggtaggtggatcacaaggtcaggagttcaagaccagcctgaccaatgtggtgaaaccccgtctctactaaaaatacaaaaattagccaggcatggtggtgcatgcctgtaatcccagctactcaggaggctgaggcaggagaatcacttgaacccaggaggcgggggtagcagtgagccaagatcatgccattgcactccagcctgggtgacagaatgagactgtctcaaaggaaaa

SEQ ID NO: 65188 - DNA, 1378 bp, Homo sapiens
ttattcatctgtaggatgggggtaatcatagaacctcctcacaggattgctcggagagtgtaatgccaagcatctagtcaattgtgcgtaaatgttagctcttattattagcgttatcatcacctccgtccggttggaaaaataaccaaggctcagaggaggcaactgagagacccatggctgagcagggtctcaggactattgatttcaaattctgctgtttctctgctgtgtccagatgggaatgcatttgttaaaaagagcactgccagctatttattttcagggtgggtgatgcccatttgagtttggcacctggtgttcagtgttagaattcatagtcctgggagattccagagttgcccccaggtgatactgttgtccttttattttgaaaatcagtgaaagtattttttgatctgctgtgtgtcaagccctgtgctgggggctcacactggtatcgtctcattaactctcagagccgggcagggagagggctggtcatggcagaggtggggttgaaacaccggactttggacttctgggtgaaggcccagaggatgtgccgggaaaagtcctctcttatttttaaccagatccctgttgctgtgggtgaagcctcttccctttttccaaaagggagaaaggaaagtgctgggccgcagagatggggtggcggttcgtctgggacgggcgtgggaagagttttttgcccgttgtgaggtggaggatggtctgttggaaggcccgctgctcagaatggcttcgggacatcattgctggctctccaggagtcctggtgggcactggcaggaaggagcgtgggcagggccttggtgcatgcacactcctgcccccagccaagccagaacctctgctagcaccctcggacctgccagagctgaagatgcctgcagtgggggcaggaccaactctaaaatgtgtggagcccagaactagaggaaaggcagggcctcctattcaaagatgattgagaagctggcctgaggggctgcagcctgtggagggcagagacatgccaggaagcctcagcagggaagagccgccatcccactgccctccctctcatccagggccctcccactctgcaatgtcgtttctgtgtgggtgggagcagcggcccatacacacgttccaacccctcaagataccggaggaggcatttctctttgaactgggtgctaaagttggtgtaatacttcactgcatttagaacattgaagagagtgaaaaaaaatttttgtttttcaaaaagaagaacatatcacagcagaggcacagatcatatatatggagcgagccggccccacatctgtggcctgatggagtgcacatttggagtcaggtgataagcaca

SEQ ID NO: 65189 - DNA, 944 bp, Homo sapiens
ctcattcagtcctcacagcaacttagtgaggtagacgttgttacccttgttttacagataaggaaattgaggttcagacggttcactaactcccctaatgtcaccagacaaagcaacagatcagggtttcaaacccaggtctgttctccaaggcctgggttttttccgctgctctgcctccctgcctgcactgttctctctcccgctgtcctccacagcaaattcgcagatgtgtcattgactggagaaggttaggaaacactgctctgggcagagtctccaggggctcagcgcagtaagctccttcctctccagctcctattatggtgcaaacagtgccgcttccccggcaggcctttgtcatttgtcccgtggcctgtcccctcccatctctaccccatcccagtagcaccccaggacctcagcttcctaaatttcagccacaacattatttttacaaggacactcttcaaccttgaaaggcaaggtaccccgaggcaaggaaacgaaatgactgtagttgaacagcatgagagtccagcgccatctagtggtgctgaaaccgacaagtccctggcggtgacattttcaaataatcaatatctcattattaaccataatcacaacctgatgtttacttttggagaaatgttcagcagcaagggatgcacatgcacttttctgcatgtttcagaggcctgcgatcctaaatgccacaatgactattaaacagtgtcctgcccatgagcaaacaggagagattgattgtatatctttttcatctaagctgctcaccaaaaacaaagctcagttgaagccagtgacctttcactaactgctggaaggaaaatgcttgataaataataaatagaccactactggatcttgcttagaactatcttttaattaaaagaactgaggagctagaaggtccggtgactgac

SEQ ID NO: 65190 - DNA, 1926 bp, Homo sapiens
agtttcactatgaggaaggggtgctgcctccctaatttggctagataagccttctccacagggcaaacccctgactcaatttcatgtttgaattcccagactgctaccgaaaccttcccttctgaagttctgttgcctcctgtccactacagggctgagcactcacgctctaatccgatcctcgtggtaccagatgtcttggatgggagctttggctttgccatatcgcactcgaggcctttggaagacgggctccctcagcgggggaaaggcgtcatatacgtcaaaccacaggggcttctccttcagcaccccggcccgaaccaggtcccgagtccttagggagggaacagaacgaaactgggtcacttgcagtagcctgccaaagcccctgaatcagtctagcacagtttgggacattaaaggtattatgcggtctgcaacacagaacggggaaggactgctccccacctacagagaagatctgtccacatcccaaaccaaacttaacaacgctcaggagagttaaatccctctatcttcttttgtgcgtcccacccacgttcggtcacggaaaaatgcaaagagcggtcttgcatgacctgataaggaaggcccatcaggctcttcctcccttcctcttcctagagacctccactcggggagaggcagctgcaataatctttaacatgacacataaattcaaggagaggcatcctcaggcacaactattcggagccaggagaaaacatgagagggcctcacccagctcagcccccgcaccctgcaatacgcctcgccctgctcaggtccgctccaaggaagagcgtgaccggctgagaaccccagcctgggggaggcaccctcagcccaccacggctgggagcacacaccgagagaagatgctccctacggtttccagccggctgcctgccatgatctgcgcctggtaccgagcgtgactagctgctaccggaaccggaagcggctgctccaggtaaagggcgcataagttgctggccgagccaaggatcgctgggctttcaccgcagcccctgcgggagagcggcgcaggcagaagcaagtgataggccgaacgggcgcgctccgaggttacttgccaggttcaggcaggagcactcgatagccgagccaaaagggcaggagcgagccaaagccggacagaagtaataaatgaccgagctgtgggagggattcatcatgatggttgctttactctctctcgccttgttgagccaactcctctgaaaaggtggggccgcgcggaggagaagtagtggggcagagcaggggtgaagcgcagcctacagtcctaggggagccaacaaaggccgagatttgaggtcaccagctctaggcccaggctgagcctaatgttgtttagagtcacagactacgcagaagaaaaccaaggccggggaggggccgtcacttgcccagcgtcgtgctagatctcgggcctccgcctctggctgtgtagtgctccccactaagcccctcgtccccggagtgccacctgcatccacgctaactaggatgctggctgcaactcgtgtttcccgcggccggtgtcgcgggctacctcctccttggaactcgaaaagtgaaagtgtccggaacaaacagacgccgagagggaaacgaaaaaatctggagaaagtcatctctcagtgttaaactgtaaaaaaatataaactgtgtgtagcataccctttgacccagtaatcatatttcggggaaagaaccccttagaaattaaagcatcaattcatgaggatgtttgtgcaaggatcatcgttgcagcattgtttgtagtgggaaaaaaaatccatcagatgagaaatagctggaaaattattgttcatactttctttggaaccctatgcagctattaaaatgaatgag

SEQ ID NO: 65191 - DNA, 1657 bp, Homo sapiens
ctagatctgacttgaccttccattctgccccccaggaggaccagggcccaaccctgaaaggtgggagttagaacaggaagccacaggtcccaattgccagcaccttcctgtgtcccacccagaggccactcttctggaaggagggtaagactcctcagaccagctctgtctctgtgcaccccaggctccctcctctgaaaatcaccaaggagcagaccctacgtccatctgtgactgccgtgatgcctgcctgcagagggatttgcttcttgcctaagatctggcacagcccagtggcgctgccaagccaggccactaggtggtgtcccagagctcaggccctggcagctcccagggaaagggccagagtggcttttctctcagaacccaagaatgtgccccacccccacccttggcctgattaaaagggagaagaaccacccagttgcctcaggggtcttagcacccaagacccgcagagttgtcaaatcatttaatcctaggcaggaaatctttggcacatgtgccaccaccttctagccctcatccttggcagacatcactaatccacccaggtattactgtcctacagaacacacacaacctcagaaccctttgcaacaccgcctctgtgcaagccacgaccaagtgattagaactggcatgcaagacaagccacttgccagcgctctcatttcccgtatgaggacacgcaggccaggctcactctgtctcattgggaatccaggctgcaaaagccagtggggccagaatgaggtcatatgaccctgggaggcttgtgtaaccatggttgagtcctgcggaaacctcaagtgtgtaatggcagaggctgctgggctggggcagctgcattctcggccaattgtcacctcagagcgggtggggtgcagggaaatctgcctgagcttcttggcttcagagctgaagaggccccaaaagggggtgaaaggaagggaagaggagagcaagagacagaggctctcagggtatgtgtgtgtgtgtgtgtgtgtgtgtttcaggcagccctgacagagacgccttgtcctcctgcccctgcaaaggcttgttttcttcccaagctattaatgtcgctgcagcttcaaaagccgggtgacctttaaacgctgagcctcctgctcctgcccaaggctcggaaaaggcttaatggaaactcgacccaaatggccacagctgccggggctgcaacaaagccagcctcattcccgaggcccccagagctgctgggcagccacacctgtgcccacccccaggcagccaggaagggcaaagaggaccctcgggcacagccattggagaaaagaggccactggaccttaggggaggaggaggaggagcaggggagagacagacaatgctgtcatgcgctgctgtgtgaccttgggtacttctctggaccactcatctcttctacatctgtaaaacacgagaatttggcagggcacagtggctcacgcctgtaatcccagcactttgggaggccaaggcaggtggatcacgagatcaggagttcaagaccagcctggccaaaatggtgaaacaccgtctctactaaaaatacaaaaattagccaggcatggtggtgggtgcctgtaattccagctactcgggaggctga

SEQ ID NO: 65192 - DNA, 1122 bp, Homo sapiens
caggaaaggcaaggatgaaaacccagcttccacaggggaaacatctgtgaattgtagccaggatctgctgatactagtcatttgagaatcccaagatagattatcctctcactctgaccacactgactgtccacaatgattgtgctttacgtgtgcacagcactcaacagcttaagacgttgcgggaaagtccccgaacgctttgcattcagccaggctccaggttgggcacaaaccctatagcagagagctggcccaggtgccatgccatcctcacaacaatcctatgaagtagggactgttattttgcagaggaggggattgaagtacagaggagttaaataccttgccccaagtctcgcagccaggagtaaccaggtcaggattctaccccagagcccacactccaacccctcaccatgttgtcaccccacttacaataatgaatctctgcacctctgcatgggacaaagagggaaactgagtcttccaggagggctgggcacttgaggccatcctggcaatggtcccacctccagccatcctggaggaggagcgaagccactgcgttgagtgcgtgggtgcagtgggccagccagggaacagggaggtaaaaaaccaagggggcacctcagctctgagctgggcaggccaggccccacctcatgcttcctctgccacagcagtcccaggccaggagggcaccttgccaggctccactgccacccagaacatggcctccctgtcctggtctgggttctcctcgagttgtatttccatggcagccacaatgggcagcagccagggtgagtcaggccaggcaagaggaagtggccacacttgaaaattattaacatgcagggctgagcttgagtcctttgttcttgagcaaagactgtagcatttcactttcaggaaggagctaggagggtggggcaggctcagaattgcacaaccaaagcacaggctcaaacacacacaggtcccaggtggaagtcagcttagacaggccacctgcagaaaagtgcaggccaacccacagccccatacagcaggtccacagagaaaatacaggccaactcatctccactgttttttaaatcagaggctgggcacagtata

SEQ ID NO: 65193 - DNA, 618 bp, Homo sapiens
caacacaggagttccctgttcacacaccttgccattggctgacacagccaatggtgaaactcccccagctgaccctccctggagctcactagctctctcccagctgtgggtacagcctgaaaccgaaactaatctcagaccagagcaaagtgaaatcatttcaggagcctgatcaccctacatgaccacagagaggcttccccttaacagagctccaaatccagcttgctggtcaccaggagaaaaaaaaaaaaaaaaagctttgcagtgccctcctaacatcaaatactttcttaatgaatagggaatcatgggattagaggaggaagcaaaagttcttgccgtcgtgtttgctgctgctacttctctcttatttgcacaagtctatttcagttcaccccgtgagctaaagttcaccacccggtattatttttaaactcattgtccagcatccgttcatatttggttcactcttaatcagattatcttccaagagcaagctttgttctcttctgagatccctgtaaccatcttgctgtaatgtggctgagactgttatactacatgtttttcgtaaatttgaaaaacgaagcgttttacttttgtgctcgagccagg

SEQ ID NO: 65194 - DNA, 1083 bp, Homo sapiens
gagctgacatggacctctaggggcctctacttcatcttcctgtctccagatgaaacctcttaaaccacaaagacaaatgaaacttgttcccatttctgaagaccttcaggggaggccattcccctctgtgcctatgagtcacttttcttacatctcacatcctatctggaatgtcttcctcataccttacttgaatcctccctctgtagtttaaattcatttgcctctggttctaagtgcagagagacaagagtgaatcactgtgttctgagcaatgactcttaagggacttttatgtcttcttcaccatgttcactgcaggcattacaagaggtggcagtgtttctcagctgttaaaaaccacaaaggcatcaggaaagctgaccacactgcccagttcctgcctcaccctggcaagggtgctacagaatccagaaaacctgacccttctctgaaacccacaccgctacttagctctactcagagttcaccaagggggagaacaatgtgctcccatgccagatcaaaagcccaggaggcagcagccactttatcttgtcctcactcagctcaagcggcccctcctccaggaagccttccctgccccaactcctcttctggctggcaaagtgcccccttcctcagtgctttgtcttatcgcagcacttgccacagaaactgaaattccaggctaacatgtttgtctcccttactagacaggaggcatcttgaaggcaggggccatggcttgatgacctttgtgctccaggatgggccccagcagagtatctggcacttggccagtggttctcagcagactctgttaagctgaaccctccaggcatgttccaacgatgcctggacattgcactggcagcccttcaagcaggacacaaatcccacaacccccccagctccaccctcccccaccacgaccacccccgagctcagtaggggtgtctctgacatacttttttttttttttttttttttttttgaggtagggtcttgctctgacacccaggctggagtgcagtggtgcaatttcagctcactgcaacctcggcctcccaggctcaagcg

SEQ ID NO: 65195 - DNA, 1461 bp, Homo sapiens
acattccgtctcaggaatttaatttcagtgtacgtttcttagagctaaaactttttttaaggggaaaagaaatgggcagggcagtgctgggtgtaaggcgaccacgcgaccgagaaaaggaagagggaggaatgaataaacgctgacaccagccccccttggagctcagagcctggggcacaggagccggcggggcgggcgagcaggggcggggacagcgcattcccaactttccctggccgagctgacgggagatacagctcccaggggaccgggagggaccaaaaaaggctgagccgacctgtgacatcggcggggggcaggaagcgaagctcccctccccctgaaaggcgctcggctcccagcaggcgcccccgcctgccgtcgccgcccagcctgcgcccccaggcccgggcactgcggggaggggcgcccacacaaaagggggagcggcgggagaggggactcgggcgaagccggctccgggaggcctcgtctcccttccctgcggcgctggcccgcgccccccggtctaatcgcgcgccccgctcccggccccccagatgcccgcacgccccccgcgcccggggcccgggatgaggtgggggctcgggaaggaagggcgggcggggacctgccgcacgcggagctcccggggagccgcgccgacagccccgggaatcaaactcgcgacggcccggccctcccggcggcgcctgggcaacgggtcccgagaaggtggggccgctgggccggggccgcggccgggattgcgcgcggggcgccggcgaggaccgcgcccggggccgggcgggagccgcgggagcgcgggggtcttaccgggcagcgccacgcgcgtccgctccgcgcgggccgcaggggccgggccgcgggccgggcgggggaggggctgcaatccgcagcggtggcggcggggccaggctcggcggcggcggcgcggctggggcgcggggaggcggagaaagtgaggcgaggccggcttcctagcggcgggcggcgagaaatgcagctgtccctgcgcggctgccggcagggccacaagtggggccgcgcggggaggagcggggctgcgggcggggcggggcgggggcccggctgcggcgcccccgggccctttccctatggccgacccctttccagagaggagggaagcggacctgggggtccggaaacctacatggttgccgggggtggagaggggagcacccagtgaaggctggaaaaatgccctccgtgtacctccctccccggccgcagtgactccctagcttgcgggcaggagggcgtgagcggggtgcctcgacctcccgcgcagagcggggtgcggggcatcctgcccctcccagctgcggagagggtgggcggaggagacctgagacctccgagactccgcggggagctaagagcagggctgcccgacaggttccaggtcagtgccag

SEQ ID NO: 65196 - DNA, 660 bp, Homo sapiens
aatttcttttcattaaaaatgtcaaacatttaataaatcaaattccagttttctatcaagcggtcaacagaacagaggatctttctgagcacaagcctgggggccagggatcccagtgtatgaatcaccttctgatgctatacctcctgcaaggacttaagcaacttgtttagccttgcactttaggtttcaagttcagatttacttacctacctcacagtgatgctgagaggatcagttaacttctgcaatgcagggctaagtgttctcactactacttcatgcagttcctctgagttctaaaaactttcttgggaagagccaacctccagcaggccaggctaaagagcttgtttacacagagctgggccaatggttacacaataacagataatcagaaaaatcttctcgtaaggcacactgtaactagcagagagaggtgtgcatactcaataagtatgttaaagcctgagacatgaagccacattctgtgaaggttttaaaaatgcataattggggaatgataaacaagctattttagtatcatgtttgtttcagttttagaaatatgtttcagttaaataatcttattctttctggttatgtttcttaactacattaggaaagaaaaaaatactcctcaataagttcatgttctcc

SEQ ID NO: 65197 - DNA, 2469 bp, Homo sapiens
ttcctgttagtttcaaaaggtatcaagcgccccagctacgcgtttgggatttcacgaagtattcaaaggaaaataactcagagaggcgggaagaacgcacttaaaagtgacgagcttcctaacctcctccagttccgaagtttccccgtgagctcatcgctactgcccactgaatgcttcgttttgcaaacagaaacgaagtaggaaaaaaataagttccagcctagatctgccaaacaggggtcccccatctaaagtgggcgggcaagagaattgccaaaacacatcggctacagtcactttcaagtttcttgcaaaaaagcgaagaccaacatcccagagagtgactcatctgggggctttgtaagcggactttgtttgctctctccacttggttggaggaaacgttcgaggtgggcgagaaagaaaagcgcttcgggagaaggtcgggcctccaggagtcccggcccccaccgctccccgcctgccccgggccggcccggctgggggattccccaggctgaatgggacggcgggagagctggacagagggagaaggtgtcagctgccaaggctcggctgagacttgggaaaaaaaaatgtaaatccagtgaaaaagtttggggaggggatacacactcacaacatccgcccccccaactgggtaaacacgagaggggtggtggcggtgagggggagtggcggggaacctggggatacccgctattcgcggggacacgggagggggtcagaaagtcaacacacgcacgcacacacacaaaaagacgaggaaggtgaaaagagaacaagcgaaagatggatgaagtggcggggaggagactcagggcaggacctggggacctcctcaccccaccgtgggggaccgggccggcacgcaatggcccagcagcccgcgctatccagcggcccggcgccctcctttctctgggccgcggggtggtgacagcgaccggcctcctcccttccccttcagagcgagagggaagggtgtgtgtgagtgtgtgtgtgtgcgtgtgtgtgctggggggcccccgggttcaccccgcggcctgctatctcccccgcaccccgtgaggccgcctcctttcacctcagcagccccgcttcgccggggcgggcgggcggaaaaacaaagggggattaaggccgggccggagagcggagccgggagggaggggaggaggagcgcccgcccgcccgccagcccggggcccggcccccctgtcccccccgtgcccccccgggggggcccccagtacctggaacaggaacgcggtccagttggcctccatggctgcggcggccgacccccctcctccccactccccccgctcggggagcctcctcagccggaggaggcgacaacaaagcggcggcggcggcggcggcaacggcagcggcggctcctcaacatggcagcgccgagcgcggccacttccggtaacctccgggacgcaccaccgcggcggcgagcgcgggcggggggggagccccggcccggccgccgccgcccccagtcgcccggaccccctctgggcgtccccgctgccggctcgccgcctcggagctcagccagtgcccgctggcggtggggtcagggcccccgcgggggggctggggtggggcccggggcggggatggggcgcggcgtccccccccgcgggggtgtgtggtgctgcggtccgtggctcaggcagctggagcagggggagctcaggagagaagatggaggacgccagggtctggcgctggcccgctgggcacagctgggccgtctcccgtgactcagacacggtgtccagcaccgtcgcgtccctgttagaccctcagcggagggcacaggccacggcggacactcggctcttcagtcgctcatgcacagcatggtccccacctccaaactgggggaagccctttcgacttcgagcctctcttccttttggcatttcctccccggccggctaagccctctgcgctctcgctatgatatgcatctcatggcgagatggccttccaactcaagcagggaatcccactggggtgcagcctcagatcctctcagtgtggagggaaacacttcccacgcgtagagatgtcattactgggttattcttgggtgaagggctgagcctccccatcctccccttcactccaagataggatgtgaaattctatcccaacacccctcctctcccgccaaaaataaaaacaagtgagatagtatagacaaattattttagtcctttagtacagtctgtttcctccttcacccccagaacaaaaatcgaacttctggttggacagcgtcagatgtcactgaggtgaccccagcctgtttgcagttccaagtcttccgtgtaggcgtcactgctactggaactttgtagatgaggagcctgtatgatgatgtcctgaacatttctatcctttcctcacacagagggaagc

SEQ ID NO: 65198 - DNA, 2208 bp, Homo sapiens
tccgtacaaactccacgacaccagtgccatctcggtaaacatcagcataacatacatcacctgcttcacgcatgtgatcctttaaatcctgccaacttccacttggaggcagtcctgaaaaagtgattttttttttcttagtaccaattatcttaaatttcacgttaagctggtaaggtacattaggacaaagagtactttaaagtacttaataggtgtacttaagtgataccaggtaaagagagctggtaagattctggaatccagagtccaaaattatttgtaacgatcttcgtatctagtaccgcaacctaatttggtaaatcaccacagcagcaatcctcgtttattaaattcacccaaaaactaaagcaatttaagacctagcatgaaaaatttgcaattattaaacctgtcacgcaagagaaaaattttaggtagttttcgtcccttcacatcaatccacacaaccagtacactcaccagagacaaccactctgttttcagaccgcctggatggggggccatagcgacctcggggagctccgccacctccacccccgccgccgcctcggcctgttccacggccgcttcgaggaaactccacccgcagacggtacccatcgtaatcatagccgtcgcgaccatacaccgcgtcttccgcgtctctgcgggatcgcagaaagtaaaagggatgagaaacaccaggaggagaagctcgctcagttgggaaccagcaaaccccccgcacatgcgcacccaacgtggaagagcccacatgcgccgcataataggaatggcccctcccccacccagaaacacgccaggctcccaaccactacaccagccctcagcgcctcagtttcccgctccagcctgcgaatgggctccggggacgtccaaggcgaggcgccagagaagccacatcaactcagctccttactcgactcctgcatgggcgatacagtctcgccccaacctctctaagagcccccgcttccccgttctctatgttaaggccttggagccttccccaactactcggacctatttcctcaaggctgcaagccccatgccgcctcaccgcgggtcctcgaactcaacgaaggcgaagggcggtcccccgcggcgattcttgaggtcgatgtcgcggatagcgccgtatttgtagaacacgtcctcaatgtccttggttcggatgtctggaggtaagttacccacgtagatgcggcaatcgttgttccctgcggggccacgaatcacaccacctcccgacatggcggtgacgaaaagcgcggactcgagaacaggccttcccaccaagcctagcgcacggcagagcgagcccgcagcggcaccacgtctcccgcggcccctccaaaatggcgcctttatcagctcggcgcacggatatgggggggagacagaggaagagaagcggaaggaaacagcgattcgatcccaacacgcacgcgcgggagcgcaacgggtgctgcgagggctacgttcagcgcacgcgcacgcacgcgcgacgtcaccctccccacgaagggggtaaaaaagtcccccgcgttcccagcttggggtggtttgcgaacagagtgaccagccgtttggtaaaagttaaataacgaactttcgttaaaggagctagtcatccaggtcgggtcttgaaggatggtcgatttctccaggaatgaggatctttgaaagcaactcggcgccttcaaagcacttggtgaaacctagcctaaagcgttgtcccaccatgctctgcggcgataacggcctttggcgggaaagagtctcggaggcggggccaaagggggacggcccgggcggttgctccggaaacccgggtatcttcgtagggtgcgtctaatccagagctgagttgcgggtgattgaacggagagctggggcgttggtttgtcttcccgcccctgctgcgaatagaccgtggctgcttagacagatgtgtctaatttagcgaaaccgatttagattccttaatcctcttcattaagtaccgttccgccttctcgtcagaactttgcatagctcgggtcagcactcctagtgctagtcgcagtgggtccgtatcccgaccggcaacgtggtacccgccaaccagaaggggtaacaccgtaccgcctatgggacccacacctttttatctcttgttagtcgcctgtccgtgggactagc

SEQ ID NO: 65199 - DNA, 2497 bp, Homo sapiens
gacaggcaccacctctgggggcttctattcactctcctccaaccttgtctacctggacaggcagggacagacgacaagaaatcgctcactctcacccccatcccaggaccccaaggccataaatgtgcaaggacagcagaggcctgcgtaccaaagacacatccccatcaattttgcttcggctctgtctccattgctcctgtagacaaataccggctgggggcccagctgggagtttaggtccttcagcctcaaagaacaaaggaggaagaagggaccttcccggaaggtgaggggagggagtcctggggctcctatgcctctccctctccatagggctggctgtccctctctttctcacagatacgggaggagggagtgtcctgtcttttcctctgaggctggtgacttcatctcctcccctctctaaggttggggtctctacctcagccccatctgttccctgggtctgaaatctccatccccctctcccttttttctccttgggactgggggtctccacacccttccctctcctcctctctcaggaccatgtctctttattccttttcaggcctggcctctccagccccggggggaggggtccgcattcctctcctttcttaaggccacggctccctcccccacccgctccagctcctcctccccaccccctccctccgccccgaggcattgtgggaggaaacaagatgtggggcgagagcggcgcggggagaagcccgcagtgcggggccgggcgggctcagccaatggggagcgcggacggcggcgcgcgcggcgggggggcgggggcggggcactatttcagcgggggccgcgcgtcggccgcgctcagcggcagagcggagcggagctgtgaggcgccagtgcggagcgggcgggcgggcgggcggcgtgaggcggagcgcgggcggccggcgaaactccaagggcggaccgcggcagggagcgatcggcctcgggctgcgggagccggagaccgcggcggcggcggctgctgcagctgcaggaggagcccagggaacaccgcccctgcctgtgctctgcctcgggccatcgctcctccccagggcccagtgcggactcgcctccgtgaaggtgagcggtgggtgggggcgtcccccgggtggcgggcctgtgtccgtcgcgtgcgactctacacgacccggccctcgccgcggtggccctgcggcctccttagccggccccaaggcctggaacagggctggccccgcagcccttggcgttgacggtccgggcagcgcagcgcgcccccgccgcccctccctctcggcgcagcccgggctgcgccaccctttgccccggccaccctcgtggcgctgctggaggcccgggctgcggagctgccgctgcccccgcccccgggagtctctctgcgctgcgtggaggcccctgatgtcaggggccggggaagagggggtggagagggctcgggcgtgacgcggctcctcctgccgccaccgccaccctctggggcgtccttcctgcagcgaggacgcccagtcactccggcgctgttccaggccgggtgggggagggcggccgaccggccggggcctgcggacctggccggcggcgcgggcgggaggtcggggggaaggaggatgcttcctcgttccccaggtgctgcccttcgggaccgcagcgctctggaggatgggatagtggagggatacggcccacttggagagcccgaagagggaagtagaagtgtgtgtgtattggcgggtggggatggtggtccgtgtcattcggagatttagcctttttttttggttgcaaaaccaggaatagaggatgggagctgtcctggggtgccctttgtgcttttcacaggagccttggctcgtgactgaggctgctggcctggggccctctggccatcttcctcctatctggaggcccaggtcccttgctttttcccaaggagggaggggctaggctggacaccttcctgtgctttgcttaccggcaccttggacaggggtggtaggggttgggcttcacctctctcagatgcctggggggccattgtagtcgtaagaccaatattatgtaaccgcaggctctttcctggagagtaaggtggcttttaattactgtaacaaagttgctcctttggactttgggaatgaggcagtggagcaggtgagcttgcaggcaaaatggtgccaatttcatactttcactttgctgtctaaccaggccccacccccacccctgggtttgtaaacagtgcccccttctgagtggtaacctggaataggccaccaggtgacactagtttttcttcacttatacagagccttataatgtaagaacctttctccctgtgctgctgttgtacctttgctcagacccatttgagtttaccccatttatctcatttcaaccattagtatttaaaatgaagatgttgatttgcccaaggtcacgtaactagtcattccttgaa

SEQ ID NO: 65200 - DNA, 1713 bp, Homo sapiens
aaaaaaaaaaaaaaaaaaaaaaaaaagccacaaatagaatgtaggttgccgggcaactctataacatatcagaagtatagtatttgttatctcactacatttggccacaattctgattagtatcataattagtattagatggcacatcaccaccgtaacacccactggcagttggctgaggcctaaaagtggccaagtctatgaggtccttcccgagctcggcagcaggctgataatgaagaaagttgcttgatgtgattctttgcaggtggactctgtcaagaaaagcccaaaatattcgttaccagacacgcaaccaggagatgaacacaaagcaaggatgggggaaacaaaacagaggaggtagggttgccaaggtgtgctgggtgcagacaacggagaggaggtgggtgggtgcgccgtcctatggggaagaatgaaggggagagggtgtactgggggcacagggctttgagaaactgggagcaacaaagacgtgaatggacttgggtaggtctgtaaggggttcttagaggctgtgagtggatgggggtacggatagtgaaagaagtggggagcccggagaagtggtcgggattgtaagcagaaagtggggacctcagaacaccgagctcaggttggaatgatctaaggacacaaaagcatggggcctcggggctggggcggtgcgactaccggaggcgcaagttgcgcacggggtcccgggagcgatacactgcctccccggtgtcagtgctccagacggtctccgccatgacagctgcgacgcgccgcgactgcgccggaaagcgcgccgctctgttttcctggcaacggagacgctggatcgggaggcgacggaggtgctgcgcgcgcaacccgccgttcccgtcacggcgccacggtcgcagttggccacacagtgcaagtgcagcccaagccgaacgcccaagagggctccggggtcctaccgatcaccgcttaccatgtatgcgataaaagctcaccgaaagcgggacctcgtgcgctgtgcaaatgaggaaactggcacagccatcagcccacttcatatagacagatagatgcagaaatgatgacggggaccaggtggcctgagtcttcgccctctaccttttccaccatgccacactgccttccacccaacgcgtgaaaactttggcctgaaaatcgggtgatgtgactgtaagaaatgcacccattattcccaaaggagtcagggaaggtgatggcccttagccagacaagaaaatatattcttggaagacaaaaaaagtgtcagaagatttattagtctttgtgttgatattcactgagcaaagaaagaaaaaacaaggaagtcaacagtaaggaaggaaacgatgttattattgaactgattcttaccttgtgtatgttagttttggatcattaagccactttgttactgcactggcttcctgaaaagccaaaaaagtgacattcacaagtcatgcttcgttgtactagcaaaggaaggacatgctgtaacctcacgtctggcgtcccggcactttgggaatgtcaacatttatcagccttgttcacatctagtcctcctccaacaaagtaagcaattgtcccctgaactcgggaatctcatgccagtttgatgatttggcattggaagctctgggtgccatagccactagttgtgtaacaccgactcaccataaa

SEQ ID NO: 65201 - DNA, 2147 bp, Homo sapiens
atgatggaaactgaagcggcttacccatcaaaggaagagctagtgcagtcatataccatctctcggttacccttcatttgtagatatgcatcacaattgtcacaaccatcatattcaaactggtctatagtctgggagtgaaagaaaaataaaggaaaaggagagataagcatgaacaagaccaagagaaaaagtagctttctcaatacttcgacctgctcaatttcttgtttccctatgttgactgtgtatcctaaggttccccacctactactctcaaagcttcattcctaagtcccaccctcccactccttcctctctcgttcccaattccgttttatctattcctttctctagtctactcagggtcaggcatcctttccgactactcactcagcagcggatccccacccgcctctgactcccagtgtctttcggctccaacgtaagttcaccgaacgtctaagagctgaggattcaaaggcatgtaagaccgcccctgccctcagctgcaagacctgtccgcgatcctacgaggtaaacgatggcctccttcggcttctcactccccctgccacctctgagttctgagacttaacttttctctttactgtcccacagccccattccgccctctttccccgaccttggtcccccatgggccctacaaccaggtccccgactgacaccttgaccagcgaacacagcaaacaggcccgcagatgccgcaggtccttcggcaccgtctccagggccatcttcgccgatgggaagaacaacagggagatagacgaccacagcctgtgcacccgcaggaagtaaatagctcgttacccagaatgcccaccacttccggcgcttagacttcctcttccggtgtgggcggacgccagctccgcccctacccccgccagaggagatggtttctcccgccagcaggcggggaggctgggcggccggccgccacctgggccggagcgcgtcgcagccacctgagcccgccgagggcgcggcggaggctgtgtggggtagtcagcgggcccccggggcgggggggcggctgcgcttgcgcgggagtgtgtcgggctgagccgcagcgccgagacgcgggctgtttgatctgggctggtggccctgggcgtcggtcctgttccccgatggtaacccgaagtttgtttttttttgttttgtctccccgttttagaagcattgggggcagtgaatccactgtctccctctggattgtctctgcagagaccgagaagaaatccagggacagccccacccctccttcctaactgcgagagcgctatagggtttccacttgcttcccacaggaatgctggcctgggagctacggcggaaaaaaatgcgtatttatcttttaaaactccgtctgtttgctcgttccggctgataatttatactttgcgcagttcttagcgcttagacacggttcctttactaaagaccatttgtaggagattaggtgtcctttttttccctttcatttcaccgtctaggaagcgaaatgccttgttctataggcactaaaccaccacccctaccaaacctttctcggggaagcagaaggggaacttgtgccttgtgaggaagcgacaaaggccccttctggccctggagacttcacgccaatggagcaccagctctctgtcctcgcaatagcccgagtgcaggcagaacgcagtcatttgtgtttatctgagaggagctttgggatataaatagtttcaggccccgctgcgctgtcattccagcccagcctcctgattgagctgcttccgggcgggctttcttcttgttggcggtcccatgctgtgttcagatgggctctgtgacaggtttggatgttttctatcactgaataaaactttccactttggaacatattttctacactctattatctcatgtaagtcctgcaacaactattaagtaggcccattttatggactgaaaaagcgaggcacagagtatttgcccaaggtctgagtcactgaagtatgataatgtgtgaagtgaacagtataataataatgactgaagcacagtaagaatccagtcatgctttctccttccctgatctcactaagccacacttttaggggcttacaaaccagttctta

SEQ ID NO: 65202 - DNA, 1025 bp, Homo sapiens
gggggtgtgtgtagggaggggagtaaggaaagggagataagagctaaaggtcgggggaggcgggaggcacaacagcaaacaactaacaggcactgtgaggagctgctcctgggcttggcctggggcctcccggcctagcacagccaccctccagccttcctccctagggcaaaggttcatcttctaatggcatcaggctgtgattttacatccctgggcaccgccccccctcacccccaaagtctctggggtcttcccacaggcattgaaggagttaaccctcctgcaagtagtggtggcagcaagaagagccagcgctgggacttactcacaggctcagcactttgatctctgcctgtcttcccagggagagcctgtcagggcaggtctcctgccaggcaggctgggagcagctcctttccttgctccagctctctgttctccactccccagacagcagcaaggcccagggggccactcagaacccactgcctgcaggcagaggagacactcaagcggggccctgttttggtcaggaaggtaactttccttcctcccccaggagctaggcccagcctagggcccaggcttaccaggctaattgactagaaattcacaggaccagtcaattccagaatggaagtgctgaaggagttgagaggttcatggcttccatcttccctactcacttcctcccatctaagctactccaggcaggtagagactttccaatcttcagaaccctcctaacaagggtaagggagaagtaccaggggaaaaggaatccctggtagggaaccctactggtgatctcctattccagggatttggccaaggacaggagaggtcaccccagtagtcacagaattgggactcccaggcctcagttttcacacccctagaacaagaccctggacccaccctggcctggaagagcatgaggaagggcaaagactttcttctttggagattttgttatttcccctcccctctctctttgaagaattggggtaggaacagtggaa

SEQ ID NO: 65203 - DNA, 761 bp, Homo sapiens
ttccacaactggcttgccctggggcttagaagccctttgagggcagatactgtctccaaatgggctggctcaatgaaatcttctatgctcagatttgcattggcacaatgcaagtggggatggaatgaagctatgaagcttgctcggctagtcccagtccccagatcctgggcagtaacacacaatattgtatttacattgcaaagtggcaaaattatggaggatgggtctggggttcaataaagaaaacaataaaggatcataggggtagttgtactcagaaataacatcaggaggaaaaggacaaaattattcaagccaccagccaactcagatgcccagagtctctcctcagaagccattggggggttgacattaggccaagaaggcttctgttcagaagaggcaacagccaggaagggcttgtgttggagatagcccaagggctccagcctgactgctgacagccctttgaccacagctctgaatctttgtccatgcggtggccctagggaagaggcctgctttggggggactgtttaatgatttgccagcaaagaacaaggcaaacagactgctggcagctgcctagatgcaacaggagagtggatttttattcccacccacagtgtagccttccaggcaggggataaaagaaaaagtgagatggctctgggagagcctgggagggattgccatttggggctcagaatttcactgggtctctatggatggtgcctgtatatctcagcattggtgcc

SEQ ID NO: 65204 - DNA, 866 bp, Homo sapiens
cccagctaaagcccaagttttaaagtcttcagttgaagagacatttgattccaccaccctgcctttgcttcagcttcccggcagcttgatcagctctccagcctatcctgcccctgagaatgtatgtaggccacctcatgccaaaggcagttgtatgttcaaatattccagacatcctttgacttgctctttgtgaactatgagctctttgttacttcttaattgttcaaacctctttatttttcttgctaagcgcaaatagtaagagacacaaaaagataatcaaaggctgataaatgagagaggaatcttctcagttatcaagttggctctgatgaataggagttcctgttcgcatttgtcaggagattcagggaggtgccatcaccacactgagtgggtaagggaagtacttagagagttagggaggggagccaaattcctgggttgagagttcacagggcaatgaggatcaatagcagcacttttgatttgtacactgttatcaaggtacaaagcaacactaccctttgtcctttttatttttactctgctaatggaacccttcaccctaaattaagattattattcagctttgatgttgcattttatattagcaaagtgctttataatccttcattagctattttactctccctttattagtaccacccgttccacaaattaggtaactaaggcttgaagagacaatgcaatgcatattgggcttgtgacctggcttctgggcatcggtttcaggtactaaatctaatgaagggagacttgacagaccacaggaagaagcacagagtaaaagggcagaagcacggacataacaagagctttcttgggaactaaacctccaa

SEQ ID NO: 65205 - DNA, 682 bp, Homo sapiens
attccagataattcctttgccattgtttattcctggtcagggatcccacctctccaccactacccccattccacaccgcccaacacatttttttccttccagcatcagccaggtgcagaacaaaaggaaattaacgatttagttattgctccaatgctgaaagtttgaaagtcagtcatttggagcaggttccattgtgtgtccctgcatgtcttgggctttggtggctgtgcacagagtaccatggctccagtcaccacagtgggggccaacgctggacgccctggcttctgagcaagagagatgaaaggcttcttctaatgtaataactgacggcctctcagtgtcgtttgaactgtttacaggctgagttaacgattacaggcaatgtgtatcttggccaggtgcccgaaattcttacccacccgtcagatattatcaaagagcccttccatgcctggctggagtccttccaaagcacctcatagagatgccgacacaaaaggaggagtgttcagaatgtgctctctgtctctccagaggccaagcaagaaagtcagaggatcagcatgaattaggtgctggggacactgagtttccaggaccactcaggactggggagagggtcaaggtcagtactggggccaggagaaccagattccttttgaagcagtttaggagg

SEQ ID NO: 65206 - DNA, 2154 bp, Homo sapiens
tggagacaaataatcttaacaggtaactacaacaattcataggtagaaggattcacagaattatccagaattcctcaaaaccgaagagaagactacttttagatttctgacaccagggtacagctctccattgagaaagctaaagttcagcaaagcacatctctagaagatataaacagaacttcagttaaatggaaggcttggctaaccacagttgagtaaacctgagttgcagtgtaatctgataaggaacaaacagcatggattccagaagtgtaaaccatgtgtccctaacacactagagttctttgaaagaattaatcaaagaatggataaagaaaaccatatatataattcagaagcttgttttttaaaaaagtttctcacaagaggctgttgaaaaactttaataactgttgtagattaaaaattgattaacagacaataaaccgaaaccaatatggaaagtatccagaaatgaatactaagctagtgaaaaaacttatttaaagacctaaacgaagcatatgtggacagaaaggagatgactaaaaattgccaatgacataaaactatccactgtaaaggctgaaagtctttgctaagttatgatgaaattccctcttcacaaagtaaaagcaatacttaatgtataatgataggatcaaagttaatagtttaaaaaacaaaatagattggtaagatttgccagagtgagaaaaacgatagaacaatagaagacatgataaagattgataaaataatgaatggcaaagagaatgccaactggtgctgtttgtttactttttcctttatgaaaacacaaactttatgtagagctttatgataataagattaaaacttaaaagaatacattattttatggaacacataattagcccactgaacatgctatcacaggttatcaataaggcacgtatggctctcaaaaacttcagtgatatcaaaatatgactagcaaaattacttacggtcctaaaatggagcacacaattcatgcttcagggtattaactaggcaaggccaggaaggaagtttcctttccaattgccatagtattcaagatgatttatgagttcagcttttaagtattcctaattccattttagaatccaaattatcttattcaaaaaaatcttatgccatttttccagatatactcttctttcctatttttctaaatagcaaagccttccattttcacctaattctccttcacttcatttatcccagcttcaaaatattgcctaagaagtgataatgaataaccactaaaccatatattaaagaatacatgtttaggaataagttctataatctgttaaattttcctatcttctttaagtagacaaaaattaaaattcatacaataaattggttctgttcatagtctgttcataccacaaaattaaaatttgagtttggatgctaagatggatcacacttaagaatattttaacctgtgtccagtagctacagcaagaagtgttcttttacatgataaatttcaatcaataagcaacatcattttatggagtaagacaatggaatgcccattaaaaaggtatagccctctaggctctgtctttactatggggaatgagcaattggtctatgaaatgctgtgcccccagtcatttcataaattcaccacataaagaataggccatgtatgaatgacttacaggcaaaattcacagcctgaaagcctaagaaactatgtctgaaaaacttggcggatcagtaaaaaacatgttaaatttaaattcctgaaaatgataaaattatgtgtggacaaggccaaagtgatcaggaggcaggtttacaccttgtgtccattttgtaatccagtcctctccattttggggttagcaatagggtgccacacgtggtgtaaggccagccatagcattcaagcttgactgaattttaagtgacacagtaatcaaatatgctccaagggcattccagaatttcaggtgctgctgaccattaaaatcaaccttcttagtgcttacttcaatttaaacaggatgtaaaatacaatcctcgcatcaattaaatataagctcatatatttcatctatcaaaaattagtgcccagaatatatcacttgaaaaaaaggtattatt

SEQ ID NO: 65207 - DNA, 1480 bp, Homo sapiens
acaggctctaggtagaataccctgaaaaaatacaaataatcttgagtagaatagatctgtgctatttctaggcactatgaaaatttgcgtctttgtacaaacacagaataagatttttaaaatgtgcacccttaagtaaatataaatacacctcacccacaaagccctctgtgttccaaggtcaagtttaaaaatattataaagtcttcagaataagtgctgaaaagccaagcaattgaacatgaacctgttatatggattcttttcttttgctgaggcagagggaggggggaaaaaggaatttcaaaagaaatctgcaaacctgttgcgctgtcgggcccactggaatccacgggggtgaaacaaattcaattatgcttttacagatcctgctcaaaaaaggtttcaactgcttaaccaagtacagctcattcttccaccttcttactctgcaaccaaaccaagtgccccatactacaggtaggtgccgagaaattccgcagcctgaaaaaataatccatgcaggtcaaaggcagaaatttactccgggatgagagatgctgtcccctagaactaaattaaacacttacagaaaatccaaaatcatttctgaaacctccttgctaacaaaagttctttttttctccaaacagcatataaaatgatcaagtcttgaaagagaaaagaagcaaagtagcaaatacatcaacaattcactatcagaaacacataaaatcccagagagagagaaggcagtatctctgaatcatggatggacttggaaagttcggaaggattccgagtgcttcctttcagaaagacaattctggatcaactccctagagcaggaagcctgtggtttgtaattggtgttctagctctgactccctcccctgggactgcaatcacgctctctacctgctgacaaagtgagggtggagctgctagaggcaaccactccccaccctgcccccctcctcctggtgctcacacacaacacttacttaaccagacccgttctttcgctctcccccctccctcagctcctctactccctctactgagccacagctaaactgcatccaattcgatcccgagtacctttctctgggtaagcaagctaccacatgcaaatcagggccactcaaagatatctaagcagactctgcacccaacagagcatagatgatggtatgaggaaataaacagaaaaaaataaaggtaatccggaagataaaagaatggacacaaggttttgcaaatataagttcaaaaggatttctgctcattccaagtttgagtgtctataaatggcagaaagccagaataaagtgatcctgtgttttagtacttactgatttattgctgcttatgtctgctaccctgggaagggctctgtccattttatgcttagcttttcttcagctcttactaatttaaattcagtagctctgtctaaactgtgcctatatggaacttt

SEQ ID NO: 65208 - DNA, 2354 bp, Homo sapiens
gatagaggcagggtttcaccatgttgcccaggctggtctcaaactcctgagctcaagccatccgcctgcctctgcctcccaaagtactgggattacaggcatgagccactgggcccagcctacatatgcaacttctaatcatcccaacaattttgcaaagtgtgtaacatccccttcttatagaagagaaaataaagcttggacagattaagcaacttcagcatagtcatagccatagctagtaggtagcaaagttgtgattacaagccaggtttgtttgggctctttccactatacaaatggcccccaaccccctcctcaccaaagccacccagagcacaggctggctgcagacactgggataacagcaataccttcacattcacagcctccacccttggcccggttggccactgctgccgtgtaggatcgcgcatccaggatcagcagcttttgaggagctgctgtgctctccactccagagcacgcagtcagagaagaatctaaacacacagcaggaaggagtccctgagtcagccagccacccaacctcttgctggccctctggcactccctctcagaaggcagaacatgcaactagagacccctcataccccacagcttctgacaaggcagggaccccagcaccccgtgtgttgtcatcttcccagactctcactggggactccctgggagccaatgaagccaaggagggggcctgctccctggggggttagcatcatccacaccttaccaaagtcagcatcacacgcctcgctggtatcattattcccggtgctgagggagcccccagtggcccttgtccccgggtccagggcacaggctttagcaatggacgtgaccaggtactcatcatcagcattgcgccagccccaccagctgatctctggctggctgcagcgggcgatggcagccccattgcgcaagtgtctgacaaaacagaagaaaccgtaatgcccttggcattcgaagcctccagaggcctacctcagggggttagaccaaagtctctagagccagcaggggctaccaactcatccaggccataacagcaaccaaaagccccaacgtcactagcaggcttcaccgtttacaaagcaccatcacacatactttctcaaatgggctctgtatgtccaaggtgaccttgactcatcaaatctgcacagcaactgctccaggtacagacacccagcaggagaacaaggcctggctgagccaagaataggaacaattccaaacttcagggttacttcctgtctcactctattttagctacaatattctagtgcagggatcagcaaacattttcagtaaaaaaccagacaacaatttttggccttgtgggtcacaaccagtttctgtcatgtattcttctttgctttttttaaaaatagccctttaaaaatgtaaaaaccactcacagcttacaagccgttttatataataggctataagccagattttgtctgcaggccagtttgccaacccctgtactaatgtgtgtataaaataatgtactattttatacacacacacacacacacacacacacacacacacactctaaaaaaagggggggaatgaataaactccctaatagccttattcttaggagaaaaaactaagatagtttttgttttaaagttatttcatacttccccatagagtgtcaattctcagtcaaccaggttacccaaaatctccaattttgactctttccttgttgcataagaaatggcctccctacttcccagccccactgcctcacctatacacaaccacgggaatccgcttccaggagcggaaggaagccacgttctccagctctttgtcagtgatccacacaggaaccagcagcttctgggggtaactggggcacaatctgagaagagaccaggtgggggtcactgcactgggtctaaaacatgtgatgacaggatccctggggatggctttgtgggaagagaaaccatgagccttcctccctctcagactcagaagctgtgcccaccacactttatccaaacacggaagtagtttggtgtggaaggtgttttggtccccaaccctctcacttgtagttgctgttgatgtgtgagactctccagacgttctgcaggtcaaagcccatccttgcaagctccgcctcctgtcgacaacgtatgtgctcacctgcaacagagcccccacgatggttagcttcccagagcaccaatgtgcaggagtggaggagggatgagaactaaggggtaagaagcagcctcccaaagaaaatagactggcctcacctggctgacataggtgagtgtgctggtcctcctcggtcagcc

SEQ ID NO: 65209 - DNA, 1682 bp, Homo sapiens
gctggcatgccaggtgagggatggaatggtggaagagggaagggactggagccccaagccagctcaaagacatcccgtgctccccgaccaacctcctaacatcccattcagcctactagccacatcccacatccccaagcaaggattcagcgggtgggaccaagagggagaggcggaggtaaagggatgtacccctgcagggcggggcctagagatctgcagtcaagggcagtggctgcggggccaggatggaccacagaatttccattcctggccttcgaccatctccggcacccaaagattgaagcaagtccaagaaataaaagggttaacccaccttccctgccccccaaacgttcggggccgggccaggggcctcgggaagggggatgggctgaaatcgagggctgaccctgggcggggctgcgggtgcctcctaggcccccaaaggcagggtgggcacttacgaagcagctaagcatggagcaggagacgcgggcggtcaggctcatggtcgcgggcggtctgggccagcgcacatgtccccggagccgctgcgctgcccgccagccccgggcgcccgccgcatcccggctgcggggctcgccaggtgcagccgcggcggccaagaggctagggcgctggtggccgggcctccgcgcggctcccgcgcgcctctcccctcctctccacaatggagcgggcccagctccgccctcccgcacgagtgcagaagggaggggagccaggcgaggggagagcccgggaccgcggcgggaaggcggaggtagaggcggggcggctccgcgggccccgcccacaagcccagcctcctccctccccgcggaccctgggcctcgtaggagggcgtaccctactccagggacctttaggagctttcaggaatctgggctacgggaccgcccacatcttctcatttcccttcttctaaggtgagccaccccatgccctcttacaaacccatccccgcgccccctcccctaagttcccccgacgcctgctctggatcccaaggtggagctcacctacccgcaccccatttgcttcctcctttccctccaaaaccactacccaccatgcccctgcccatcagggtccttcaatcccgtgacttcgttaaacctttctttccccttagaatggtgccaggttagtcattccacgctcctggaaagggaaatgagctttttattccaacgcccctacccaaccctactccttcagctccatctctcccttgtttcacattctgatctctgggtaagaaagcccttcttggaggagaaaggatttcttagtctgggaaagtgaagagctagaagtatcgaccacagaagctatacaaaaaaacgaaacttgaaacccaggagcagcggagtagagagagttgggtagagggccaaggaataaggaccaggaataaggggctcaaaatgtcaccaagagtcacagagggaggtggctggaaccccaaacttcctgcaccttgtaactttcagacaccagggcttttgtcttgtttgggggagaagggagtaataaaagaaaacctgacattttattaagcatctacaatgagccaggcagtttctaacattatctcagtaaaacttttcaagccccaagaagtaaaccttatcctgtcttactcgtgagactca

SEQ ID NO: 65210 - DNA, 3194 bp, Homo sapiens
cagggcatgaagtcagccacgaagttctgaaacaggaatgagtgtcatccaagattattcagcagaattcaggagtcctgatttccagacgcagagggagaacacttctttctcagggagcagaactgccaactatgaagagacacaggctgcccaactggggctcattttaggccctgactcttggggtgaagtggcagtagttgaaggagcatgaatccacaggaatgttttgccagtctctgagtctgggagtagtacccacctgacctgtttactgggggcagagtccagagtgggacaagagggaggggaccacaacctgtgatcagagggcagcagggctgcacaggtcctcctgagtgtatttgacaccaagtggggtggaggttatggagaggaggccacacaacagggacagaatcaggccaatccaggccttggagtcagcatctgtccaatgagcccaagtaacagggatttcaggatagggcctcctaggctcacttagggagccaggcctaggtttcactgacactttccttcatgcctgctttcctcaggcagtgcagcagagccctgcgggaggctgcggggataaaagcctccatctgtggtactgcccacctccctgttcacagtatcctcttccctaggccattctccctcatgggggaaccggcaagaggcaagccagaggtgctgcctcaccgcccactggcagcagccccagggaaggaagggagggaaggagggacaaggatcaggcctgggaggcccagggttttcagacctaggggatctggtcccagggggcgggccaggttggcaggggagcccaggtgcccaggttctaggggcggagcctaaagactgggaggcggagccccaaatgacagaaggcgggactcaggaaagccggtgggggccagggcggagccgggcaagacgcggtcgttgcggttcccaggcttgcagtgcagggggcacggtgactcacccaggcggcgtccgcccgaccctctgaggccgcgctcttgccacttccgtctcccgcagctgctgaggccgcgcagtcccgaccccaccacagtgcccctctcctgaaccaatcatatctctagcctgtacccgccctggccaatggccacgccaagtcccgccctgcccccatcacgcagccaccgccctcactctcgaccccactcattggtcgagtcgggcaaacgccctcccagcctttagccaatcggatgcctaaagacgagactatacctggaggaaggaggcgcggcgccggaggggagacgcgaccaatgggaaatcacagcgcgtccttgcggcagccaataggagagcagtaaagagggggctgctggccactgctctggggaccggaagtggaggcggctcgtcgcctactggtagcgcaattagaggcgggcattgtaggttacatgcctaaagccacttccggtgatggccccgcccaggaggtacttctgaaacaggtccccagtggcacctcagtttatccattcccgttttggtttcgcagctgtcatccggtcccaacgccagaataggagaaaaacctgcaggctaagagagaagggagggctgggcctgaggttcagtcttggtcatctccgactggcggcgctaggatttcccccttcctgtgtcttgatgggttcctccaacactcactttgtatcgataaacgaccctgcagttcttcacgacctgcattgcgctggcagtcctgagtgaagaactctcctctcatcccagagatgggaaacctggatctgagactgccagctagctgcggcctcctagtctgtaaagcgaagggagaccaggacgctcccaaggacccggcttatcgcccctccctttccttcccggggacccagaacagaccacaagacggagggtggccgctggaggtcgccgtggccccgcgataccaccaaccgacagaaatggagaacagttgattcagattcagctgatattctcaggtctggagcgggcctgagcgctttaattagcccggggctaatgtcctcacccatctttgtttatagaacgttgaaactccagtactgttggtaagttccaggaagacaggaactttgcactacttgaactccagggtctagaacagcctgcaatctagcagatgctgtaaattttttaattaaatactgaactcctgtaggacggtgattgtgtttttattcattcccagcacttactatagtgtttggtgattacaatggctgcagcatttgttcaaagctctatcacaggctttctacagtgtagagcttaacctgcctatcccttttcccagatcaggggaaacagaaagtcaggaggttgcacgcagttaataccttgtgttttcccaagggcaggtatcaaatacaaaactgcgtccgccgcagctggaatacgcacaggcatcaaaatggggccttttgggccgggcgcggtggctcatgcctgtaatcccagcaccttggggggccgaggcgggcggatctcaaggtcaggagatcgaggtcatcctggctaacacggtgaaaccccgtctctactaaaaatacaaaaaattagtcgggcgtggtggcgggcgcctgtagtcccagctacggagtcttgtagtcccagctacggagcttgcagtgagccgagatagcgccgttgcactccagcctgggcgacagagcgagactccgcctcaaaaaaaaaaagggcaggggggacttttggacagtcctttaatattggggaagtgccccaaatttctttttctttttatttttcttttttttttttgagacggagtctcgccctgtcacccaggctggagtgcagtggcgccatctcagctcacttcaagctccgcctcccgggttcagccattctcctgcctcagcctcccgagtagctgggactacaggcgcccgccaccacgcccggctattttgtatttttagtagagacagggtttcactttctccttagccaggagaagtgccccaaatttctaatcccttaagccaggaccttggtagccctgaggtgtgatgggagactctggacagaaccacctgttgacctatccaggacccaaatatgcaccacaggtaggaatctttttattaccaaaggtactgtat

SEQ ID NO: 65211 - DNA, 1420 bp, Homo sapiens
ctgggaaactcagctcagccaccatagctctagcctgctgtcttgggctccgttgcttaggtcaggccaacatgatatgtcctggccccctccactaggtctttcctgcccacccataggtgcaggttgtatggcacaggacctaagcaaggaggctgcatgtgggccatcccagggcccaggttcaaagccgataataaagagcaattaccacaggaaatcaggatttcagatctgcatgactagcaatggccacttctgcctttcagtagctaagtttccctaaagtggcgcaagaactaattgtacatcccttccccagtgagatagatgagtcactgacgatacagtcagagagtccttggaccaaaggctatcactgggttgtgtctttcaaggaaacctcagcaagtctgtccaacaaggtctgtggtggacaaaggcaataaaccaaaatacattaagcccaaatcttcccccagctgctgccatgtgtcccatgatcctgggggcaggcataaggtgtgggtggcaaggctggggaacactgtgtttcctggcacctgctgaatggctgcaaagaggggcagttccagagctggcagggtgctagaagccagccactctgatagggcagacagtccttccaacaccctccgtgaacagggcagggccataggagctcagggttggaaaggacttacaaacctcctaatgtgactactcaccagatgtctgaaggctcccctgccttcccagcctctgctcgaatacatacctccgatggccaaaaattcactgattctaacaactgcccttcaacctttgggctgccaagttaccaaagtcttcactatactgagccaaaatctgtctttccctggcttttaccctccatatgcctccatgctggaagctttgctgactcatttcattggactttgctttgtcctttgatgtccacaccctttcaagtgacccatctgtatacttttctctaccaaattcaccacaagctcctcaagggcagggactatgtcttttcttttaacctctgctcacttcaaatcagcaaacatgtgatgtgatgtttttctgggtgtccaggcctctgcccccaggagatggctgatcaatatggattgactaaaaggactcattgattagttttccattctgattttagagcccagacaagccttgaggctctgcgcttcattgacccttcacttgcccttcatcctggctgctcacaagctcacacccacctcccagccccgtggttcacatacaaagacacagatgttactctcactaaaacctttcccttcacaattcttgatatctaaaggtgctgctgaaatattgagaagtattttccagggagacgtggctatagaagaagggtttctataccata

SEQ ID NO: 65212 - DNA, 1332 bp, Homo sapiens
aaagatatttctggtttacagctatgcctgcttccctcctttccccaccccttccttaacccctggcaaccactcatctgttctttatttttataattttgtcatttcaagaatgttatattaatggaatcacacagtaaataactttttgggattgcttttcctactcagcataattctctggaaatttagccaagttgttgcatgtatcaatagtttatttctttttactgctgagtagcaagcactcaatggtatggatgtaccaaagtctgtttaatcatttacttggtgaaggacatccgggtttccagtttggaggtattatggataaatttgttataaacgttcctgtatgtatttctgtgtaaatgtaaattttcatctctctgggataaatgcccaggagttatattattactttaagttcctattgtcaacattctcagtaaggattcttatccctgcttcacagatgggaaaatagaatagaggggttgagaaccttgacaaggtcacatgaacagaaagtcagagtcagatctaagtaaaggtgatgactcaatccctcaaattctactgcacaagtcctaacacagctaagctgcccaaagctaacttttataagatagtagctaatacatctgaagacaagcaatatataaacacggagcattatcaccatttaacattgcatctatgagtttgaaactgcataagataataatagcccataccttcgtacaggttgaaattgagacctgggcaaaatctcagcattctttccaagaatttttctcatttggaacttttcctcacctgaaagaataaagttaaaaatatatatatatatttttttttactgaatctttgtcaacccaaattattgtcaccattccctagaatgtcccttggtctggtccagaattagaaataatctggataaacaaagtgctgccctaattgggtttggattgagtgctgtagaagaggtttttgctctgaaagtttattttccttgctcagagcacagaactatattctgacactcagaatacaatcaagctatttactggcctttcagttataaccacagttatttctgaagacaaatgttgttttgtctttttaagaaggcaaactgacccggttcctgtcaacagacgccagggggcgttgaaaacaagaactgtttgttaactaaacagccccgaactctaactatgccacttggccatcaaacactaggtgtgggcgtgggcgtgggcgtggggtcttgagtactgaggagctaattcaactgtcttctgttcttcttggcatcaagttatc

SEQ ID NO: 65213 - DNA, 2285 bp, Homo sapiens
tgcaaatatcagaaaatttcctgagaaggaactgggtagggggtgggggaattacatatttttatagtgtactttcatatattgctgtgagcttttttttaaaaaaagtacaaagaaggtcttcattagtagcacatagatatactggaaggcaaactcagtgtttattcatcaaaaatatttgcagaaagttgcattgaagcatttagttcaccacactggcatattataaaatggattaaaatggttctcaatcatgggaaaggatgagggagggactaaagatactctgtgtgttgggaggaaggctataacataaaaagagctcaatggaatacaagtcctcacctaaaagatcttactaaagtgtaaagactaattcgacaagggaaaacaaaacacataaaacagaccaatttccagtactatcaaacaatgagtctgtgaataattaaaagggactgaaaaaaaaggccaaagtagtaacatgaccaggaaaataaataaaaaaggaaaatatgccttacctaccaagaaaaaaatttagtcctccagaagaccaaaaaacaccaagaaatacaaaaattgaaatcccacaagcctggaggcgcagtggctcacgcctgtaatgccagctctttgggaagccgaggcgggtagatcacttgaggccaagagctcgagaccaacctggccaacaaggcgaaatctcctctctactaaatatacaaaaactagcggggctggctgcgtacctatagtcccagctacttgagaaactgaagcatgaggactgcttaagtggcagaggctgcaatgagccgaaattgtgccattgcactccaggaccacagaaaaaagccccagctcaaaaataaaaatgcacatatctcacatctctcaaaacacacaaaaagcactctgcacaatcctaagttaaaatatatgcatatatacacaacacatctctcaaaacacacatctggcataaccttatactcaaaaattaaaaacatgaggaaaccaactactattaacatctgaaaaaaaaaaaaacccagaactactcagactgccttctctagagaagaacggtcaccaacagcaaacagcagttagaataacgcaacaccaaacactgctatcccactcgtgagagaacacaaatatctccctctcgcggtttccagcgttctacacgttcagatatactcctcgagaaacacactatagaaattatccctcaaaatatagtcttaatgtccatttatgtgccttccacatgcgaaagaaactcacacatattatgctgatggtgagtatttcgtgagcacattttcctctcgaaaatattactatgtgttttttccaaaaacgatctttccactaccaaagttcgaaaaagcatttaaaataagctcaaaatttcgaagatactttaggcaatcactgtaattaacatatggtagcaaagcatgcaaatcactcagagctcctttctaaccccgccccattttcctccacgcgtaacgctgacgactataaagcgcgccggagcgccagaaaccgtcagggaaactgcccggtttggactgatgatcggaagcaagaaggcccttcgagaataaccaaagagtgaagggaaagcgataattcaaagccaaagattgtgatatttgcatagcgcgccctattatattttatactgtgatcaaaattccacacacttaaatattttgtatttcttccccaaaaaccagggagtttttattctacatggcattgctgtgtttatttttttctggttttcgcactgttgcccagggtggccttgaactcctgggctcaagcgatcttcccacctcagccttccaaaatgctgggattacaggcgtgagccgtcacacccggccattgctgtgtttaaacaagcaggacaacatattcccctggtttaagcttcagtagcttcccatttgttaaggtacagacaaaactctacatacttatgtgagaaaatactttaaatggtccattttcaaggcataataaatctaagtactggcagccggcctgcaaacgtaaccgcacagctcacgcacctaggtcacgataagcgaacagaatgtagaggaggggtcagcccataaaagggaagaaagtttctttactgggaatcgaaaattaaagcagggaaggggagagggtatataaccttataagggggataatgaaacttaggcgacatccggaaagattgtaacctcatagtactcgaccaatga

SEQ ID NO: 65214 - DNA, 1256 bp, Homo sapiens
gaaaccacgtctctactaaaaatacaaaattagccgggcgtggtggcacatacctgtaatcccagctacttgggaggctgaggcaggagaatcgcttgaacccgggaggcggatgttgccgtgagcccctcataagacagtatgagctaggctccacggttctggtaaaggtgcctggtcccagacagtttaaggaaagggtgggcctttgactctgctagaatcaggctggatccggtaattgattaatctcagcagttgctcacaactatcctaagggtttgactttcgaacgctagggtcaggtcaccatgaccgtggcaggaaagggaacagggtgactgagacccagcatttaagaaaaagaactctggttcttatgccacatgtttgcactaccagttcacacttcttaaatttttaagataaagatgtttggtgaatttgacgtcatttcttccctgaacaaatatttgaatgctggtatacataatggtaatagctactggccaatcacggtggctcagtcctgtaatcccagcactttggtaggccaaggtgggtggatcacctgaggtcaggagtttgagaccagcctggccaacatggtgaaaccctgtctctactaaaaatacaaaaattagccaggtgtgatggcacttgcctgtagtcccagctactagggaggctgaggcacgagaaacacttgaacccaggagactgaggttgcaatgagcccagactgagccactccaggctgggtgacacagcgagactctgtcccaaaaaaaaaaaaaaggtattagctactatttactgaggtcttgccatgttcccagcgtcacatgagataagtactattagtaatcatcccagctttatagatggataaactgacacacagaaagattaggtaacttgcctaaggtcacacagttttgaaacagagctggtaggtcaggtgccagagcttattatcttaaccactatccagtttttctacgtgctaagcactatttctaagaattgggcatatagcaacagaataaagtaaataaaggctcctactcacatgcagagcttaccttctagtgtgtgtgtgtgtgtgtgtgtgtgtgtgtgtgagagagagagagagaatgataaataatgaggcatgtagagaattataacattgttgaaacagagagacgtggtggctatttatttacttatttattgagacggtcttgctctgacacccaggctgtacaagt

SEQ ID NO: 65215 - DNA, 1154 bp, Homo sapiens
cagcaattcatcccaccagaacaaaaggctaacatagcaaactggtaaatttatctgcacagaaaaactgaactacaagggatgaggtacttaacttcccacctgaagacccaggaattttttttttttacttttcttcattgagatagggtctctatcgctcagacaggagtgcagtggcacaatattggctcattaagtctccatctgggatcaaatgattttcccacctcagtctcccgagtagctagcacaggtgcgtaccacatcagtctggcttatttttccacccttcctagaaacggtataaaatacttagcgagcatctaattaaaacagaccgtaacctaagaagacgtaaggtcataaccacaactccaaaaccaaacgcgcgccactacaacaactctgaaaataaacacacgcaacaacacacaagccgtcttttaaactagttcaatcacaggacagaaaagcgcaaaagcagtcccccactaccacaagttatgcagccgagttttctcattcggggaaatcgcgggagcaaacacatagtaaaaaccctcccccaagaaaaacactttatcaggaccaacagcgtctctcccccgccacaaagacattatttacttaatattgctaataccttaccatcgtcctcaacacacaacatactcatggcaaattgtattatgagttgtttttaggcatcgcttcgaaactaccgcttcttcgtatgacacatctcagactacaccttctttggtattcgctagaaaatttctcccgcgaagaacgcactagaaccggcaatcactgcgcccctatctacatatgcccgcctcttatagtaacgtcaccacctgcttctgtacgatctgactgaactcccttacggatcggttcgctctagctgccgctcccaaggattcaaaagaaatcgcattgtgtgataagaaattttttttcttttttctgcacaggctcatataatagaagtaacttttgttattttttcagagaattcatacagccattaattatccaaacctatttctcagtgcttttcaatggcgtgatctcggcttactgcaacctccgcctcccaggttcaagcaattcttctgcctcagcctcccgagtagctgggatta

SEQ ID NO: 65216 - DNA, 1963 bp, Homo sapiens
ggtcactaccactgcttgaacaccccttcccaagtctgtaccacaaaaggagctcttgtgtagcccagcccctccttctcaggaccccaggagcccagacacactaatggggacattagttgcttacttttccagctactgcttaagctaggcaggccatgaagaaataacggtctcagtaacctccatgctcgggatacgactcccgggaagacgtgggtgggtgcggggaatgcggactgatccctcccagcggccgttgggggctggcccacaatccctcgcgagggcgggaaaagcaatgtggtcgttgcggggggggggggtcagaaaagggggacggtcagcgggaagagccaagagactgcaactctacaaagagcacgcagattaattctaatgattgttccctgagcttttcacaccaaaataatggtaactggctagtgtgtgcccgttacgctcactactcccactcgagatcattcctattaatgactctgaggcttcacctaacaggccacggtggaggcaaggaaatgtggcgtggagaacccactgggcctggctctccgtcctatggtctccgtccatcgttttacagtcagggtgtacatttgatgaggaatctctaaatgggattttggggaatcaaaacggaatggtgcataagtgtgaaaatttacaagactgcgcaaagctgcaaggcccggagccccgtgcggccaggccgcagagccggccccttccgctttacgtctgacgtcacgccgcacgccccagcgagggcgtgcggagtttggctgctccggggttagcaggtgagcctgcgatgcgcgggaagacgttccgctttgaaatgcagcgggatttggtgagtttcccgctgtctccagcggtgcgggtgaagctggtgtctgcggggttccagactgctgaggaactcctagaggtgaaaccctccgagcttagcaaaggtaacgactcctgatggcaagctgaggcacaccggccgccgtcagcgccgcctcagtcttcgttctctcgcctcggccttcagcccagtctccgttagattctgcttcctcccacgtccatgtttacagcgtgaaagagctcctcgactccacttacaagttgtctgaatggttaggagaactgtggtcgtgaaaacatttactaattgcttttcctctggcaatgcctgctgaatgctttgaggattgtctcatttaaccctcaacccgcttacgtagattattatattcagtatatggatgagagaactgatatcttggggagcttaggtaacttttcatgctaactgggttaggaaatactggagtcagaattggttgtctaatttttgctgttccaagatccaaggggtaagggttaaatttcagaaatgcaggattttgtgtaggactagagacactaagaatgagaaagagagtagaatccccggaatcttgaggaagcatagaaagaatattctcttacgtaattaactgaaacacccaaaacctcatattccagagcattgcagatgggaaccactgcatcctgagacatacaaatatgaggctggcggtggtcacttgttgtgcacatctctctatgacatgtctggacctgtgctattcactgaagaagatggaacagaattttaagttactgcccttactgatggaaaatacagaggtttcaattcgcctctaaagaataagtctcgtggacccagccttaactgtttaagtcataccgcgcgcagactgtgtcccccaagatttgatgggctcttttttcttcaacaagttggcttttcaaagaagaaatgtgagaccctgaataataatgatcactaacaactattgactactttagatggtcttgatattctaccaagctttttacatgtatcgtctcattcccattttatagacgaaaaaaatctgagcaa

SEQ ID NO: 65217 - DNA, 598 bp, Homo sapiens
gaaatttatggcttctctttagcatatcctaatcgccagcatcactactcttgcaatttggcaccattattaagtaaaataaggcctatttaaactgaaacactgctataccaacacctgacagttgatctgataaccgagccaggtattaagtgactaacggagcaggtagcatatacagagggatgattcatgttccaggcaggacagagcaggatagtgcaagatttcatcatgctactcagaatattgcacaatttacaacttacgaattgtttatttctggaattctccattgaatatttttagacatcagttgacctcaggtaactgaaaccatggaaagtgaaatcacgggtaaggagagactactactgtacattttgtttatccattcatctgttaatgcacgtgtccccaacccccagggcacggactgatgctggtctgtggcctattagaaactgggttgcagagcaggaggtgagttctgagggagagagcaaagcttcatcagtatttatagccgcccttcattgctcaagctctgcctcctgtcatattagcagtggcattagattctcatagcccgaaccgt

SEQ ID NO: 65218 - DNA, 793 bp, Homo sapiens
caagtgggaaccaacagctagacttggagatgtcttagctcactcttaaccacgtgagggtagggtatccaaccaataaagacattcagagttggagagcgggcgagtggagtgtcctttagactccgcggactcgacgggagggaccctgcaatgcttaattagaaccggttgccatggcgacagtctctaggcagcgtgggctgagctctccgtaggaataaagggtgggccgccgctggaccctgcgcgcgcccgccaccaactttccctccagatccgagaggggcggcgcgctccgcccccgggccgcgcacgtcggtgctcggcggcgcgcacgcctgcgggagccctctccaggcaacctagtgctgatcgctcgtgccggtgcggccgttaaccgcccttgccggagccctaggctcaaaagcagccccttacccttcctgggcttcccccaacccctttcccggtctgccctggggcatgagcagcgatggccggctgcatccctgaggagaaaacttaccggcgcttcctggagctattcctgggcgagtttcgcggaccgtgcggcggcggcgagccggagccggaacccgaacccgaacccgaacccgaacccgagtccgagcccgagcccgaacctgaactggtagaagctgaggcggccgaggcttcggtagaggaacccggggaggaggcggccacggtagccgcgacggaggagggggaccaggagcaagacccggagcccgaggaggaggcggcggttgagggtgaggaggaggag

SEQ ID NO: 65219 - DNA, 900 bp, Homo sapiens
cacttatagttaagaataggaagcctaaaatgtatgatttgtttcaatatggatccagaccagttctggtaactttttaataggaggttcaggctgttctgctaaaaaaaaaaacaaaaaaaaaaaacaaaaaaaaaacaaaacaaaacaaaacaaaaaaaaaactatatgtagcatttgatacttaattgtagtaagtactgtcaattctctcctccgtgtcctgtctcgtggcacttaacttgaccaatttatataaaaagaagactttcttctgaaagtagggagtatctcagttttacaaataagcaaacaaacatctggaattgaaataacttgcttaaggttgtggagtttatagcagcaaacctaggtcttttgactccaaagtctatgtttttttttccttcttatcaatgcgagagtacaaagtctattattacctatcattttgccgagaaaattagtatgattagaagggtaagctatgtgggaaagggatggatgtaaaaagttagttgtcgacagtatagggattgagttgaaagaataattagatctgttttctaactaataaatggtaaaaaaaaaaatgtgataggaaaaaacttaatgtgtgagagtttccagccttctgctcttcgtctatgtgctaatgatagttctacctttactaattcaattttttccttttctcctgtctccaacaagggctcagcatttgtcaaactagatctttggggatttgtaatatagacttgacttgagagagagggatgaggtggaaggaatatgaaagtggctgccacaggatcacaggataacctaattatcttgttttgttttgttttctttttttttttttttttttgaaatggagtctccctctattgcccaggt

SEQ ID NO: 65220 - DNA, 1440 bp, Homo sapiens
aacatcttatgtcagaaataatgtgttgagtgttgagagtaggaaaagtgtttgatttttcccatgtcctacagttagcaaggtaataagtgagtttataaggatctaggcttgagcagacttaaaaaaaaaactttttaattttggataattttagatgtacaggaaagctgctaagataatatgataattacccaatgggttcttcttgcccactgcacagagagagctgatttactgagacagcagtattgcaatagcgaagtagtgtaataaacgtagagccagctgagcagaagacaggagtttattactcaagtcactccccctgaaaaattcagagattagggtttttaaaggataatttggcagcagggggctaggggactgctgactggttgagttggggatgaactcatagggaatctaagttgtcttcttactgtcttcacttcctgggtaggattgcaagaccagctgagccagctttacctgtctgggtggcaccagctggtccatcaaaatagagagtctgaaaaataccccaaacatgaatcttaggttttataatagtgatgttattcataggagcaactgaagaggttacaaatcttgtgacctctggctacatggcttctgaaccacagttctaacctcctggctaatttgttagttttacaaaggcagttttgtttcctgagcaaggagagtgttatcatctttgttttaaagttaaattaaattcctcctatagttcctcctatagttcattccgcccaggaatgaacaaggacagcttggaggttaaaagcaagatggagtcagttaggttagatttctttcaccatcataatttttccatgtcaaatttttctcactgttataatttatgcaaaggtagtttcaatattaccatctacctcttaccatttcccctaattttaacatcttacattatcatggtgtgtttgacaaaactaagaagccaaccagcatttgttcattactgttaactacattccagacttaccttgtatttcatcagcttttccactaatgtcctttttctgttctaggatccaatccaggatactacattgcatcacgtttatttattcttttgcagtctgtgacagttgctcaatccttccttcttttctatgagcataacagtcttaaggagctccaactggatgctttataggatgtttttcaatttgggcttatctcataatgttttccaaaagactagactggggttatgggcttctggaaagaataccacagaggtaatatacccttctccaggaggtagtgttaacccccatccccagtcttgagtgtgggctgactcactttctaaaaaagaatatggagaaagctgacaaatgctaccttaaccaagtgatcaaagttaatatcaccaccagtgatattatg

SEQ ID NO: 65221 - DNA, 3096 bp, Homo sapiens
ttgcactccagcctgggcaacaagagtgaaactctgtctcaaaaaaaaaaaaaaaaaagaaaaaagtttcctcctagttggttacactggtgaattctactaaacagttaaagaataaggccaggcagggtggctcatgcctgtaatcccagcaatttgggaggcgaaggtgggtggatcacatgaggtcaggagtttgagaccagcctggccaacatggtaaaaccttgtctctactaaaaatacaaaaattagctgcgcgtggtggcaggtgcctgtaatcccagctactcggaaggctgagacaggagaatcgcttcaacctgggaggtggaggttccagtgagccgagataaaaaaaaagtaataataaataaataccaccaattctacaccctcttttccagaaaatagaacactcattttatgaggtcagcattactctgacaccaaatcagatgacgacagaaaatttcagaccaggatcgctctgaatatagatggaaaagttctggcaaaatattagcaaaacaaataccattacacacctattagaatggctaaaaaatggctggttagctcagttggttagaagaaaaaccaaaaagaatggctaaaaaacttctggcagtgccaaatatttgtgagatgccactggaactctcatgtgctactgatgggaatgcagaatggtatgtcactgtggaggttgggcagcgtctcagtaaagactctacttaccatatgactcagtgcaatgagtgctgacaccaaccacccggagttaggtcaaactgtacaggttatgggcaaagtcttccacaagactgccctcattccagacacaagctccaagttccgggatcctgaggccaccctcacttctgatcagctgattacaaatttgggcgtatttgctatcctactcatgtttaataattgactagaacaactcacagaactcagaaatgcacttatgatcagagtttcattatgacaaaaggttacaaataaagccagctaaagggagagatacatagggtgaggcctgggagaggcccaaatgtgaaggccccttgacttcaggacaacttactctccaggcacactgatatatatatatataaatataaatatatatatatttatatttatatatatttatatatatataaatacatatgtaaatatatatatatatatatataaatacagagtactgtcaaccagggaaactcactcaagctttagtgtccagttttgagacggagtttcactctttttgcccaggctggagtgcgatggcacaatcttggttcacggcaacctccacctcccgggttcaagtgattcttctgcctcagtctcccaagtagttgggattacaggcatgcgccaccacgcctggctagttttgtatttttagtaaagatagggtttctccatgttggtcaggctggtctcgaactcccgacctcaggtaatctgccttcctcggcctcccaaagtgctgggattacaggcgtgagccactgtgcccggcaggtgtccagattttttactggaacttccttatgtaggcataacaatcattggcaatgagttgaactgggctatcacatggttcagagctccaactgtctaatgacacccacagcatttctggtgtagccagccccgatcctgagtcatctcattagcatacactagcaaggcccaccataaataactcctaacacttgaggaatgccaaggatttagagggcacttcccaggaactaggacaaaggccagacaaattctctattgcacacccagcaatcctgtccctaggcatatatggtttggctgtgtccccacccaaatctcatcttgaattcccacatatcatgggagggacccagtgggaggtaattgaatcatgggggcaagactttcctgtgctgtttttgtaatactgaataagcctcatgagatctgatggttttataagggggagtttccctgcacaagctctcgtctgccaccacatgagatgtgccttttaccttttgccatgattgtgaggcctccccagccacgtggaactgtaagtccaataaacctctttcttttgtaaaatgcccagtctcgggtatatctttatcagcagcatgaaaacagactaatacagcatgtaacactctagagaataaaagcttacactcacacaaaaatctgtacccaaacgtttacaagagtctaatcaccctaaactagaaataacccaaatgggcaaatgaatgaacagtggtatatccacacagtggactactactgctcagcaataaaaaagaaggaggtgctgattcacacaagatgagtgaaacttaactgcactttgcgaagcgagaggtcaaactgtgatcccgtttacatgactctggaaaagcaaaaactaaaagggcagagaacagatcagatcagatcagatcagcggtagccaggagctgtggggaaggggggtggttacctataaagggccagcacaggggaatcttgggggtgactgaaatgttctgtatagtattgtggtggcggatacaagacatttgttgaaacccacagaactgtatgccagaaagactgaattttaatgtatgtaaatttacaaattaaccaggatatgtgggggaggacagaatgtagaccataacagatgaacctgttacaccaacgaagcacaaaatcacaatgaagggattttgtgaaagaacagaactaatgtaattttgaacctaaatatctttgaaaaaaatgttatgacacaatactgaaaagctaaagactaaaagaactgtatacaagcactgtattttaggtggtaaatctgttttttgtagggcatagcctggaatccacaggaggccaacggttctgaagctacttgtatattagggttgaacaagtacatacatatattgtagctaatgagagctaggcttctgtcagagaaaggcattataaataagagggaaggccagaatgaggcctctggagctgaactgttaccaatatagactcacagtcatagtgacacacacacacagatatgta

SEQ ID NO: 65222 - DNA, 539 bp, Homo sapiens
gtagaagcagaagaagcaaaagcagtagagcggaaaaagtagaagtagcagcagcagaagaagaagaaagagaagcggcagcggtggttttagtaatctgtgtaaaatgacatcatgtgctgcaccttcatccgggggctgtgtcatgaccatgaaggagtcgtgaaacccgcccacactggtatgctcttcctgctcctcattctcagtgtcacattcaatgtcactgtcgctactcattcctggcaggaaggaaggagaacatgtttctgaaaagaaaccactgtaagtaaaaggaaacagaaatctccgtatctgctaaactgagattcctattgaattttacatggaatgccaagaattcaacaaactaaacactaacaaaacaaagacaaaagtaaccgcacaaacctcgattctctttagctatttagagtggttttatttctgttctcaaagtttaaaattgccctttccatagtacctgaaagttattatttgaaaccagcattaattttattatactgataatacttttt

SEQ ID NO: 65223 - DNA, 1273 bp, Homo sapiens
taaagggactggtctaaattgtgtcaaatagaatgccatagagatagcaaaaataacaaaggagagacaatagataaaaggaaaaaagttgaaaattttgtagaattataaaaaacattctgaattaaatacaaataaaacatatcaaaatttgtgggatgtgactatagcagtgcttaaaaggaaaggtatgacattatttatattagaagagaaaatatctcaaatcaataatctaaactactactttaagaaactagaaaaaggaaattaaactcaaagcaagtaaaaggaaggaaataataaaaaacataataaaatcagcagaaaaacaaaaaaaccacaatgaaacaaaatggtgtttctttgaaaagatcgataaagttaaaaaagcctctaggtagattcactaacaaaaagagagcaaacaaaatttccaatatcaggaatgaaagaggacatcaactacaggttctataaacagtaaaatataataaaatgctatcagtaactgtatgctcatgaaaccaaaaacagatgaaatgagcaaattctttcctaggtacaaactaccaaaggttactcaaggaaaaatcgatgggtattttaactcttaaagaaataaaatctgctctagtttaaaaagcttccaacaaaggcaactgtggccccacatggcttcagtggtacactcttccttttctctttttaagaagagtttggttagcattatttcagccttaaatatttagaaatcgtctccatcttcagcaaaacaaaaaaacaaaaaaacaaactttcctgttctaaaagagtgaagagtttacaacaattttatgaagtaggggaaaaagaaaaagagcagagacggttaaagaggccaaaactagctagttctgtgaagcaccacctccaccttgtggcccttcatggaactgttgctgaaaacactaaaacacactgagttgaacttcaaggcacaaatttgacctcttattagtagtgtttctgaattcccgacaaataccaaccttcaggattcaaaaacaatgaattggaattctctggaattccccaaatctacattattcttttaaaaaagttattaaatacatttttcaaactctattcattacatgtgtatcttttttttttgagacggcgtctcactctgtcacccaggttggcgtgccactgcgtgatctcagcctactgcaacctccacctcccaggttcaagcaattctcctgtctcagcctcccaagtagctggg

SEQ ID NO: 65224 - DNA, 392 bp, Homo sapiens
atacagcaagaccaagtctctataaaaaattaaaaataaagaagtccaaatcatttcacctaaccatgcttcttaccaattttcctgcctctagttccacatatgctattcccacccccaaatccattctccagaatgcagctagagtagaaatgttaaagtgtcacttctaacttagatcctattcaaatgacaaagttcaaattctagctgggacattccacgtaactcttcatgatctggcctctggtctgtctcccttctggcctttcaccagtcttcatctggctaactcctactcatcccttaggatgatctttccaagggtggattagggactaggttagcagagagaggcgacagttaagagcactggctctaggttcaaattc

SEQ ID NO: 65225 - DNA, 1253 bp, Homo sapiens
aaaaggatgctgtttgcaaacacccggtggggatgagtacctgtgccaagacatccttgaaaactccaggatacgcaccacctgactgcggaacagtgagcacaagacacccggagcgctgcagaatgggcacggcatccttggtaccgggccagccctctccacagcggcaggggcggggtaggggtgccctactggagggaggacatgggcacgactccccgaataaaaaccgctcatcgggtgggggcggggactaaccaccaccctcacaaccccctcacctccacgctctgttcatccattgcctccggctctcggcggggccgctggcgacccgcaggctccgcagtctgacctcttaggcgccggcccgaggtcgccagatcaaatcgccgataaaagcccggcgcccacgtcagggggctctgacaaccgccccacctgcgcgccccatctcttcaggtccagcgccgcctacccccatttcgccatttttaccggcgcgcccgccccgaggcgcagaagtagggcgaacggtggccgcagctcctttctcccggctcagccgccggccagcagccgcgccggaacctcggcccacgtgacgcgggcgcgcgcctatggaactgacggtggagttcagcgaagaaggtgccgcagagaattcgcaaacaccaaccgtaaccagagcagctgggggcgcggcggcgagagaagctgcgaagcgcatgcgcgcaggacgctgtgggaggggaaaggaggggaggagcgtggagcgatcgcctagttcccgcgttgcggggcgcatacgagacttggcgactcgctgcctcagggttgcgtgcctccggccctagcctgcgcaggcggcctgagcttggggctctgctacgccacccacgcccaccttggcggagggcggggccccacggctctcaaacttgcgcgccaaagacggagccacctggcgtactggtggaaagcgcagacttcagagccacacccgtagttaagtattcggactctgagattccagggtggggcccaggccatccgcgttttcacccagcatcgtgtgattcggcagcaggtggtctgtggcccgcactttgagaaaccctggtgcagaaggttcatggttagtggttctctctggaaggaacagtctaaggtttgtaggacttgcgttccacctaccaaagctaatcgagttagaaggctccaaactgaggtgtcatttctcattacgg

SEQ ID NO: 65226 - DNA, 1146 bp, Homo sapiens
acgatccccttcgctcacacctcttccctcacccacggtttgccacctccggatcaaacagaaacgggttccttggccgttaggaagttgtgcatacaagtctagcatcctttctcagactttctcggcccgccttttagaacgtgagcgggttggccctacagggatttctcctcgcccccgtcagtttattccccaccccaccctccgttcccctttcttggagtgtgaaccacctctcccttcttgggacgcttagggaccgttccattcacatcttttttggtacaaacacagaatgcggtctgcacccggcgcagtttcgtaaggggtgtaaaggtgagggcaaggaacaaggaattccaaaggccccgcaccctcagcatctcccgccatttccctgacgagtttcccggatgtaaccccttacccgaggcggtttagacaccagacggtggcggctccctttggtgcaggaggagggaactcgactctggtccagcctccgccgcccggagtttccggcgactccaaattgtgccccacctccgaggccatgggggaaaaataaactacccagtagatctccttcactttgcactcaccatcagttccagcttatcgacctccgcctccatgttgaatagttgacattccgcagaccgcggcggcgcttaagccgcaagccgtactagcacggagggcctccattggacagctgtcactcaacatctcgcactcattggctcctccgttccaccggctcccgcccattggagactgggtaacgcccctctgcatgagacacattttcctgttgggcaaaggcacaaaacgccgcaggaggattggctgctgtgcaaatttttttttccattggctgccccctcctctctactttcaattttgtagttagggctctgcagagaagagcttgagattggtgcaattggaagaagagccaaccaatcacaccagagcttccaccgacagcagaggggacgtaacacaccttctttcccctccggctttccttccccttctctcccgccttctccttattcataccagaagcgcctcagctctgattggctggagctctgtgctatctcagccaatcacaagccgggctgtgctcctacacca

SEQ ID NO: 65227 - DNA, 1222 bp, Homo sapiens
ggattacaggcgcccgccaccacgcccggctaattttcgtatttttagtagagatggggtttcaccatgttggccagcctggtctcgaactcctgacttcaggtgatccgcccgccttggcctcccaaagtgctaggattacaggcgtgagccaccgcagtagtcccagttttgttttgtttttttgttttttgtttttgatatctcaattcctacagttgaggaaacaaactaggagaggagaagaggaggcggaactcaagtgacgggaaagcaggaactgaagaagcggaggaaggatttcaaaattggacgaaagccggtcggttttactaacggaccggaaggactctagagaacgctctgcactatggctggtcccgtgagcttgcgagaccttctaatgggagcatcagcctggatgggctctgaaagtcccggagggtcccctactgagggcggagggagcgcggctggcggaccggagcctccatggcgggaggatgagatctgcgttgtgggaatcttcggcaagacggctctacgcctgaattccgagaagttctctcttgtgaatacggtgtgcgaccgacaggtctttcctctctttcgccaccaagatcctggggatccaggacctggaatcagaactgaggctggcgccgtgggtgaggccggtggagccgaggaccctggggctgcagccgggggttcagttcggggaagtggagctgtcgcggaaggtaaccgaactgaggcaggctcccaggactacagccttctgcaggcctactacagtcaggaaagcaaagttctgtatcttctcctcacctccatctgtgacaattcacagcttctccgggcttgtcgggctcttcagagcggggaagctggaggtggactctctttacctcatgcagaagcacacgagttctggaagcatcaagagaagctgcagtgcctcagtctcctttacctattctctgtctgtcatatcttgcttctggtccatcccacttgttcctttgatatcacttatgatcgagtattcagagccctggatgggctgagacagaaggtcctgccgctccttaaaacagccattaaggattgtccagttggcaaagactggaagctaaactgccgaccttgcccacctagactccttttcctctttcaactcaatggagccctcaaggtagaacctcctcggaaccaagac

SEQ ID NO: 65228 - DNA, 1226 bp, Homo sapiens
tccaggatctctgcaggttcctacacgggagccggagagcgcctgcgcgtcggagcctctttgttgctggggcgctggggtccagctgcgcgtgcgcagtaggccggcaccgacaagtgcgctgcaccagtggcaccggctgggggcgagccgacctcgagcagccgccgccgccgccgtcgttgctactgccgcagcggagttcagagggcccggaggtgggagacttcccacacggtgactgagatgtcgtccactgcggctttttaccttctctctacgctaggaggatacttggtgacctcattcttgttgcttaaatacccgaccttgctgcaccagagaaagaagcagcgattcctcagtaaacacatctctcaccgcggaggtgagaggggtccccagaacccgatgacggaggtgggggaggctgagggtcctttgcggctccgcaaaaggcagccgggtgccaatccctgagagtttgaggaagaatggggttgtgtgaattgagggctcttccggaggtgaaggctgtgtgaagggaaggtctcctgaggggagggaaggagagggattcccggtcagagccacggcgggggtctctcgagggcagcagtgtgaggggttctctgaaacgggaaagacacggtcgagaatgaagggtaggtggagcgtttctcggcggatggaaggatgatcgcaaggtcccttcctagcagcaagacacaaagggggagcgccgtgcagaaccgagggtaccccgcggggggcaccgggagcacactgctccgagcgagctagtggctgagtggatgggaagagccgaggcgacgaggagggctggggatttgcatgaagctggacgagctgtaaccccttgtctgcggtgctgggggcccgtcccacccccacgttccgagcactcataattgagaagagagggaaaccgagtcccccgagccagggacatttcccaaggtcacaattagagctagggctgaactgagacaggagctacagcgtcctggtcctcagggctggaaaccttgcatctttttttttttttttttgaacactgcaataaataaataaataaataaataaataaataaacacgcaaagacacgtggattttcaacagactaaaaatgatttcgtttaggacaggacagtattgtttaaagaaaacaaaaataagtttcttttggaaaagtgttttgcta

SEQ ID NO: 65229 - DNA, 1063 bp, Homo sapiens
gcgatttctggataatttttttggcatttttggtagagacggggtttcaccatgttggccaggctggtttcgaactcctgacctcaagtgattcgctcgcctcagcctcccaaagtgctaggattacaggcgtgagccaccacaccccgccactggaaagtttttgaattctactttttcagagtagagtaacacaaattgtaacatgctcctcatccccataattagagcagctataggaaaactgactcataagcctttcagataattatccaagaaagtaaaacagtaaatttgttgtgcaaatttaatattcatcttgaacgttttattgaccaagatcatatcattctgtgaatgccctaagcaattccggtagccttgctctgggagcaagaggagtacttttgtttcctgtctggattatttctgagcgcttttgaaagacccggagctctatttaccttaactaagaattgcaagatagctttgtgctgttttcatgtgagaaggttttagcttttctgccctagattctcttgcttctttcacacctcttaattacctgcttttgaaatggctttgtttttgaggtaagtaactggccataggagatttgtgaaatgtgtagagcccttgggggagatttgtaaacacagccactctttgtcacttatcattgtaaactggcattcctccagtagaaatgactttttggttacaggtagaagtaggttaaaggttggcaaagccttgtcacatggaatagttgctaaactggatgttacagaattgaggtttggaggagtgattcctgcttgtttctctgtgttatcaatagtaacaaaaagtttgtacggaagacctgggttcaaaaaaagaaataaaaatttaaaaaggccaagcatgttggctcacatctgtaatcccagcactttgggaggccaaggcaggagaattgcttgaggccaggagttcaaggccaccctgaccgatatagtgagaccccatctctaaaaataaataagtaaataaataaataaaatatcaaaataaggccagg

SEQ ID NO: 65230 - DNA, 7334 bp, Homo sapiens
gctggtttcaaactcctggcctcaagtgatcagcctgcctccgcctccctaagtgctgggattagaggcgtgagccaccttgccaggctgagtttgtactctttcaatcattaatatttctacaagaaacatatggatattctaggtggaattaacaaagactagaaatgtcgtcacgtcagataaattttgccatcgagtgagccacatcaaactaactttggattttcagagctttttggactttggaattatgctttaaaaatgtagacctgtggttcttgtgaatattcgattaaattaaacaatgcatgtaacatgtctataccagtttctaaaacataggaagcaccaaataaatgatttttactgtagttaagagggaggtgctaagccctcaccactcttgcttccagatcttttagattggcgtagggttttgctttgtggagtagtttgatctttgggtattttcttgtaaaggcaattgggatatttcaggataacagaaggtaagcagttttagtctttgacggtgtagaagaaaaagaatgattaggttttgaagccagttggatcagggttcaaatttcatagcatcagttcctttttaaaatgagggaaatatctatcttgctggttgctttgaggattaaatataactagatagaagataaactgctctgcacacaatatgtgctcaataaatggtagcaaatgttttgttaaagcattcaggaagcccaaggtacaaccctctcttgttaacagtctgaaaggcacagaatcagccactttcatgactgaaaataagagacttggacagggttcagagaaagcatttattgtacataaagaaacaaagcactgttaccataatctgcggaaaaatggcatcaggccctcttctgtgatgtaatgttgtgggactttactggagtgaggtttggagggggtatggtgagacctgtgaggagcagctctccctcctacataggcagagctggccattttcccaggtggtatggtagcgtgagagcctgtggcctctagccttcaggaagtttccattgtattgtgatttttaaaatgtaggttgtcccttttatatagaatagcctgaagtttcaagtttaatgttatcatactacaaagtaagacttctatctgttgatcagtatactctgagaacagatcctatcaatttctgcttggattcccactggattcaactcagatataaacccttagggagggcctaccatgtgccaggtgctgaaaatacaaggacgatctgataaggttccagcccaagaaggactggcagagaggacagataactgataactcttaattgggagtgtagagtgtggggtgatgtaatggagctctgagtaaagtgctatgtagggtactaagaaaaggaaaattaatttttctggggaggctacgggaaattcctccacagaagtgatacttgatccaatctttggactgaatcatcaggcaaatggatttgagatgggatgagaggaaagggctgaggggtggggaagggggtaaaggagagaacaatattccaagtgaaagaagccgcagggacaaagatatgaggcagtaggcacattcatgcatttgttcagatagtcactcaaaaatttgttgagtgctagtcactgttcttggcactggggacacaacaggaagcaagacagacaggtccctctgatgtttacacagagtttacacttcagagctggatgggaccaaaaaaaaaaaaaaagcacaaagaaatgaaaaagattatttgagagagtgatatgtattatgaagaaaataaattggggttatgatagaaagggggcatggcatgtatgaatgggtagtcctcctctctggaggaggctttttttttttttttaaacagagtcttgctctgtctcccaggctggagtgcagtggtgtgatcttggctcactgcaacctccgcctcctgttgaaacgattctcttgcctcagcctccctagaagctgggatttcagatgcccgccaccatgcccagctaatttttgtatttttagtagagacggtgtttcaccatgttggctggtctcgaacacctgacctcaggtgatctgcctgctctggccttccaaagtgctgggattacaggcatgagccactgcacctggcatttgacctcagaaccaaatggtgaagaggcagccttctgggggcaaggtattccaggtggaggggatggcaaatacaaacaccctacaacaggacgaggaacagaaaaaaggccagcttgactgcagcagtttgagcaaaggacagatggtggaagaccagagaggttggcaggcctggttactagggcctgtgggccaccagaaggagtttgtttagaagtaccatctggctgctgcacagagaatgggctggaagcagggagatcagttgggaagctgctgcttattctaggcaagagatgttggtggctccaaccagggtgcagcagcaaaggcagatgtgttcacagcaaatacatatttgtgaagtgaaactgacaggacctgttgatgaactgggggatggcgggtgaggggaaggaagatgtaattaattatttcaaattaataatgtgaaggttgagaggttaagtaaggtgaacacataaaagtgactctgttcacagcagcagtagcaccaatatggcaacagcgggaagatgggattagtgagaggttgctggaaaataattccgtgaaggctctgggaatgaatgaatttggcttcacacagaggagacagaggtactgttccattgacaaaggcaggctgataatctgtgaggccaggaatctctcaaacttttaccagcaagggtttttgtttgtttgtttgtttaagccttggctgactctgaacagatctgtttatttctctctctctctccatctctttttgctttccaggataaacatctgtctcatttcaccaactctccattggcctcagcgtctctcctctcagtagattcttcagaatactatcatccaagtcaagcagggaattctgctcatagtaggcactgagaaaatgtattgagggacaattcaagtgccccctctgggttcagagaagttgcatctattactttgtttcacttacttcattgtttcacctctcccttctcctttaccagctcaaaatgcttggctctttttgactgggaggaggcatgatcaggcttaacactttttttgttattggccggctggctggttttattgtctcctgaccctaaggtctggggcctcttccagtcccctgcatacacacagcaggcctgaaggggtcctcagagctccctctgaaaccactgtatcaggctagtcttctttagctaacgttatcttttatttaaacagaaacagtagccaccagtcttgttacataacataccaatatcctagggtgttaaactaattcagcatctactgttaggaagtggtgatgtggcaacacaaatattcgctcacacaatattgcggaaacgttgtaacaaacatgactttctggccctacttagaatttcagagctggaagggacttgagatcatcctatttcaaccctccttgttttaaactgtggaaacctaggcctggagagacaaagaaacttgctcaagaagcagatcagggcgagacggcaagctcttactaatctaaagaatccatcacatcttagattaaggattaaatgctaaacagttcttgtttgtgattcctctcatctgaaagcattccccccccccccccgttttagactctccaaactagtcagttgtgaaccaggacatagcctttgtttacactgaaactgcaaatctgaggctgatatgtcagccccacaatactgaggtatttggggtgttttgttgtttttactaaccttggtgactggattcacatgcaatagatattaactgaatacaatttggttgaccaagcatattttaaaaacagctgggtggagatgcaggtgagccagcattctgggtgtacgtgcaaaccagtgtgtggaaggcggagagtcagctgcacctcctgcagcacctcacatcctgatggctgcacagtaaaacactagtttccttggaggaagagttcccagaggaactgcggaaccccagtgtcttgagcgaaaggcaggacctgctttgttcaccttgtccgtgccaacattctttatcaaactgtcctgttttcctgctgggaaactgccccactccacccacctggtgcctccctggtttcctgactgccacgaggttattttttaacctgctcttccttgaaaagcaccaccccggtgacccagaacgtggactcctcccctctggtcactcggaccatcccactctaattaccgtcatctgcctctgaaagtcatggaaaattagcagcaatggggcggtcttcaattccactaagcccctttcgtacttttaattcgccgaaattactagcagggcagagagaagaggggaaatgcctggcttctgagcaaggcatgggtgggctgggtgcaactagcactatcattttcttttaattttattattattatactttaagttttagggtacatgtgcacaatgtgcaggtttgttacatatgtatacatgtgccatgttggtgtgctgcacccattaactcgtcatttagcattaggtgtatctcctaatgctatccctcccccctcccccctatcattttaaattcaattacccggggcctgagggccacttctggtaacttaggctatggcttagggcgaggtttaaaacgtaagaaaggaatgactatcttgagcctccagggagatgcactgcaaatccccccgccccaaaatacaacccaggttctgggaatcccagccctgccctggggacaaaccccaaactcaaataaacggcctcctcctaggcgctgagagcccacccagctttggcactctgggtccctgccctccggcaagttgccgggacgggcgggaccctaaccagccgctctcccctagcccaggctgggccgggccgaggggtgggggagtgggcggtcggggaagcggggggcggagttccgtcctctgatgattggctctgcgcggatgggctgcggctgcgcccggccaacccgcggcgtgttgctatgtgctgagccgaggggataggtgcgggggcgcgtccatcacggggtagcccccggcccggacccggagggatgcggagtggcggccgcggcggtggcggagactgtggctttaagagcgtgccgggagcccgagccccagccgggccgcgcttcgccgctgcgcaccccagcggagccaagccccacgctggccggacagggccgcctgtcgccgggtaagtgcaccggagtgcggcgcgggccgggcgcgcgtgggcgtggggcgcgctgtcagctcgggctctgggtccccggccccggcctccggactcccccggccgggcctgcgcggggttgggggtgcggcgccctcggttccgcgtggggtccccgtgggcgccggggacggggagcggccgccgggccacgtgaccggtttgtttacaaacactgccgggcccgcggccgctcgcggagggagcccaagggcgcgggacccccggccggggcgggagacgcgcgccaggggctgggcgagtctgcggggccaggtttggggcgggggtgcggagctggaatcgccgcttcctcctccgcgtcgtccccatgggttcggactccatggggtccgggtggggctggggacgccctccgtcctctcgtgacgccgcgtttccctcggagagtcctggggacacttaggtccaggggcgccgccctgggggccttccactgtgggactgggcgccctcgaaatttctcggagcgcgtcgtctgccccgacccgggtcgaggtaaccgcagccgagttcctccctggccgcgtctcggcgcctccccggtgtccttgccaagggggtgggcgcgaggtcctgcccgacggaacgcgggagcctctgccgcgagcgcctccccggagctggcgcttaggggcggccccgacctttcgccacttccagttcaccctgcttggccgccgacctcctctggtgtctttcccggagtggtgggcttttctccggtcttgggggcgtgcgggggtgggggacacctgttcttctggacttcttgtccggaagattgctacctctgccttcagtcttagctgcgagagtttaaaaagccaggtgagcgagtgtcttgttttcctccgcttggagcggagctgcaccctcgcccgccccccagtcccgccgctgtgaaaggccccagagaactgctccgaagctttgctggggtttttgctttctggcctccttgctgatttgctgtccttgcaacttgggaggctcttgagtgagtccttgcctttggtgaatctgaaggctaacgagacagctgtcttttcctccctgcccttccttccttgttcttccttgttccaaagcattgggcaagaagggtagcggtcagcttccctgtgcctcacagagcattaaagatgcaagaagttcagtaaaccgcctcactggctctggggtgggacttgatttcacatggttattgctcccccgtgctttcctgcctctgggggccacagggcctatgaatggctgagtcttgcctccggtgaggaacattttcattcttctaaactgtgttttgagtggctgcaagttcttttccccagaaacaggcccagcctggggagagctgtgcagacttcccccttggcaccatcccctgtccccagctccatgataggatctcaggcaggagtgcagtgggagcctcatccgcttcctcagttgggctttgccgccgcaggttagcattcaatgacagcatttcttggatctgtcttgatatttctgtgcttgaaccaaaatcaagaagcttagagttaggggtggaaaatggaaaataaacaccatgcgcgagaaaactgttttccttcttccctctaggagcatggttttcagactttgagtgggacctgcactgcatacaggtctgtaactgaaataagtttcagagaacaataattacccttactccctgcagtgtgctctgttttaaaggtttttttttctacttcatttaaaaaaatcaactgctggttatgacccattaatttgatttcctgaccaagcaggtcctgacccatagtttgagaagcatcgcttta

SEQ ID NO: 65231 - DNA, 2048 bp, Homo sapiens
tggtagaagggaagggtctctctctgtcctctttataaggacactaatcccattcacaagagctttgccctgatgacctaatcacctcccaaaggcctgatctcctactgccattatctttggggtgaacgtttcaatctatgaatttggggaggcattcagaccatagcagatgtctctagcagccagcacctagtgtatgctcgtgatgtgctatcccagcaacagtcctgtggagtgggcatgcctcactggggagagcaggtttatttcattggattgttatgaggctcagctgagatcatggatgtgtgggtggtttgcaaattacaaacctttatgtaaatataaagtagtctgtttgcttctcttggccttactgtccaaaagaaaagaacaaaaagacaagggggtgggttggaggggattattcctgcctgacaccaactagttttagtttggctaagatggcttcactttggaacctgaggcacaagattggatatgagaaggggtaatagaaagccaagtgtgtctgtagaaaggtaacatggcattttctctgtaaaatggtaaagagggtagggggaaaaactcttgaattgatgacagaactatctagggaatgtgctgaggcatcctacaatttttttcttagggggtgttgtggtctaaatgctggagtgtttgcacacagaggtattttgagttggcatgaggaattgctcacattgttgtttcttccctaatggtacaagccctagtataaaaatatactttgcttataaaataataatagcttcaattggaacagttagtagccagccctagtgagaataatctaaacactcattttagtggacataatctattatggaaacctgggtcttcacaaagcttttgtatgaaaattttctgtctgtcatcctccctttgcctccctcctgccaaccccttgatggcattgtggagtaggccatttaggaaggataaattggattaatctatcacagacccacttcggggccctgtgacttcatgccaacacacggttgctttagtgctctgggtcctggaggaaaggagtggtagggtgctgtagaggggtagtccagtggaggtgggatgaggaaaccttttgctcagtctccaaaactatttacgctattgttatgtcagatctataggtcagattatcttctggtgacaaataaggaatttctagaattatgggtcatctcattcaagcctctcttcatgaggagacaggccatgggtgactcagtgatcagaatgagatcacacagcctcagagccagggccatccacctcatacccctccacagtgttctgtgtgaggagccctggcctgacttgttttcaagctctgggcagtccttctgaggttgggagcatttagaaggcaggtggtttttattccctatggggttccattgggcttacagtggtgacattttggttttcccttcctgtctagagattagatgcagcatttctttgagaagagtcagggagtgagatgttctgaatccttgtattgatctagtggctgccaagaggtagactctgcccttggtttcccacctctggctctgagccctggtgttgtacaccagtgtagtgtagtgtagtacccccatgcagtggcgtaggggcagtgctaaggaagtaccgagatctgacccatcctgtccactctacctgtcagggcaggtagagtttctcagttcccacggctcatcagtttgtggttttttttttggttgttgtttgtttttctatttttttgagacggggtttcattcttgttgtccaggctggagtacagtggcacaatcttgacttaccgcaacctctgcctcccaggttcaagcgattctcctgcctcagcctcctgcgtagctgggattataggcgcccgcctccacgcccagctaattttgtatttttactgaagatggggtttctcattttggccaggctgatctcgaactcctgacctcaggtgatccgcccacctcggcctc

SEQ ID NO: 65232 - DNA, 4198 bp, Homo sapiens
ggtatgagccactgcgcccatccgcctttgcgtcttaatggcctcactggcaaatgggaataatagtaatattagatacctgataggatttttgtggaaattaaatgaggttattgatgtgaagttcttaccacagggcctggcacgtgataagtgctcaataaatgttggaagctagtgttattctatgaatagtcactaaagaaaaccaaatggaaagtgacagaactagggcctggcaccccaacaagcctggcactcttgcttgttgcccttgtttttggagagtctcagcagttgcccttgagccctacagttgtcatctgtcgtcttttgaggcctctcctcatggaatcgcttgttccttatcccagggggaccagcaggtctcaggaggtgatgaaatagcagcagcaccttccaccacagctttctggggccttacctgcaggcagcagcgaagcctctctagaatgtaaatggaaaagcctgtccctgcctccttcccttttagtctgtcaggtggttactgtgcctctgacccacccgaggacctcagttggctgtgacacagcagcccaggcggctggaagagaagtccctggcctggagagtgaagctggagctgagagttgcttgtcagtttgattccttctgtgacacttcgggtgggggggaatcttttgaaagaaaccactttctttatcttgaaagaacaaaaccaaaagagaatctctgataacctttgtttccaaagcactcagcaaagctgctgagaggagggtttgacctggtgacccagagtattatctctggggtaagggctgcccagccaaggggagctttagctgtttccctcctctccctggcttattgctggtggctggacagtgagttggaggaggagggggagaggaagagaggaggagatggctctgccagctgccgctagaaacaacaacatctaatcagtccataaactccctcccctccagactacagtgatgtcaagaggtggagcaggtggcactagttctcccctcccctttagcccctgacacctttgggtctttgaaggggtaaattatgatcatcaaaaggaaaattctctatctttgggggcccaggagctccttttccttcttgttagggttggctccaccaagagcaattttctgtttcctcatttatctgttgggaagctaactgtgaccttagcgtcccagcagataaatgaggaaacagaaaagtgtttcctcaccaaaacaaaaaatccctgagcaaaccctcctgcagagggccctgtcatttattccacattgtgtgagctcctcttacgtgttagaccctgggaattacagtggcaaacagatgcaagctttgccttcactgagcctgtcacacggtaccctttggttcctggaagacccagcacctgaaaaagcggttggtggcagcagcaacaaggatctccttcctgagcctggcccctaaggttatccggggcagctgaaaaaccagcatttccatagtgctttccattcagtttgcctaattttcatgagaggctgaagtgccttttgtttccctgatggtccctgtcctcccctgcagagtcggcctgagctagcccagccgagtcgggcagccccttgttctctgatgcatctttggaggaatgtctgtattctcaggaccaggcctctccccactgggtgggggctgctttgtttacattcctgaccttctgaaagctgccagctttatccacagctggcctttccccttcagatgccaaatgttccaaacgacaggtacaactctgagagggccgttaaggttcatgccagaaacattcacctaggaagcctgaggagagaggaagccagtgaaactagacttcatggagctttttgaagctcgaagcccccatatttcttgattcttcccgcagcgggagaaaaaaagaaaaaacacaaagtgtgtctgtgtgggaggagagttcctccctgtccatctctttctctataaaaacaagaggccaacctgctctgagcatcgtgggggcaggtgctgggtaaatacacgagaaaggaaagccaataagataaggtctgacaaatctaggtcacccggctgctgccaggtacctgtgtgactggccaccttgaaactgacaggaggagtatggacttttgttcgaggctcagcctggctgatttctcatgtctttgtttatttattcagtaaacattaattgagtgccattatgtgccaggccatgtgctaggtgttgcaggtccctgtgtgcctctgacaggcaaaatctcctcctggatcccaggcctgtaaccagggctaaaaaaagaaatgacttcattcaaaagccagttggttcactaacttccagagtaggggcagccagtcccttggtagaagggaggggctgtttgcagtcttgattccctgttttttgggctagatccaaaggtctgcaaaactttttctataaaggccagatagtattttacgctttgctggacatagggtctccactcaaatctgcagccacagagaatatataaacaaatgagcatggatgttttccagaaaaactttatttgcaaaacaggtgaaaggcccaattaggcccttggactggtttacttaaccctaggtaagatgattagaatgactgttgtgaaatgggtgttggagaaataggtttctgtgatttcaagaggaatctcaaaccagcatggtggcttgtatgaagagtgtaggggttgaggcactgtgctaattgacaaggtcttaattgacaccctggtgagaattctattccataggccagacttcagccccagccgtctagcacccacaggttcccaccataggttacaaggtgatcaagccagatagggcacatagtttcctacagtgtcatcactgtaatgggaagacagtgtggggccctgctgaggagagtctgtggcaccatttgaaaagccttgaatgagggtcaagccacctctgctccagacctggctttgtgctaaattttcagtgtggcattgagcaagtcacttaacctccctcatcaccctgcatatattaaatcctactgtatgaagcactggggatacagaaatggatacaaatacagaaatggatgaaattctcttttttttttgagacagagtctcactctgttgcccaggctagagtacagaggcatgatcacaactcactgcagccacaacttcccaggctcagatgatcttttcaccttagtctcctgagtagctgggactacagacatgcgccaccatgtccggctaatttttctattttttgtagagatgaggtttctccatattgcccagggtggtctaaaattcctgggctcaagtgatcagcccgccttggcctgccaaagtgctgggattgcaggcgtgaaccgtgcacttgcctggaattcttgcccttaagtagcttatgatctaatggggaaggcaaatagataaacagtgataaaatgtagtgaaacacagtcattgtttcactgtaagtgattgttccagatgttatgagggtaaagagcaggatgaatgtttactaagatgagtgtttagaagcatttactaagtggacaagaagacgaagacaagaggagtccattctgagcagagacagagaaacatgacacgaggccaagtccagggaccacagggaagacagatggggagtctgtgctttagggaagcaggtcagggtggatcatgcaaggcctagaaggccaaactaaggagtttagacagagttctggatgctgtgaggagctgctaaaaggttttaagcaaaggagtgataggattttattgagattggatgagaataaaacatagcctattttggaaaatcaacttctttagcttctgtaaaccatgtatccttgagctttgtgtgattatacaatgttgatgttgtggagtagtgggcattgataacatgccatagctgtttaaaaatagtcaggctgggtccctccttggtggtgccttcagctaaatagcaagcaggtagatcactggcaaacagcaggcagtcataactctaagaagagggcctttgttagttcatggaggtctgggggtttgcaggtcctgggccctctgtctcatctgacactcctggc

SEQ ID NO: 65233 - DNA, 964 bp, Homo sapiens
ttggggtggaaattggaggctgaaagtttgtaagtgttgagaggcaagcaaactctgtgtttgtgtgagctggagaatgcaggggctgcctgagccaggctctgtctctgcagagtctgccctggctgtgccagactccctgtccagacctctcagagatgtttcattccttgggctgggttgaactgagacatagccctgccgcgagacaggagggagaaggagccagtggacagaatgttctcatgcctggatgcaccagccacagcacagactggggccttgggaattaagatgaaacctctcctgtttctttagccagtcaatatctttagtaacaaatgagattactgcctggatgaactggttttaatttacctttctaaagtgataaatgtgcttaaaatgaatatgggagtgacgaggaagtttgcacagttcacttcactggtctcacttctttggggaatgaacatgaactcttggacctgaattcccacctcctcctctcttcctgtcacttgtaaccaagtatctgaaacctgctggctataggaattattacattatgtggagtacttgatatcccagacagtccccaaggagaggtcccccatcatggcttccaaagataaccttggatgtaggtaccagagtgacagaacccagaaactgggcctctgtgtataagttggtcttgagtgtccagaggctgttttaaaatgtgtacagaaaggtagcaattaaatgtttgtcttggaataaccctggcctctgaattttcccagaagccctagcctggggaagatgattaaaaatagatctgagtagcacttcctgcttggcagatggctgatagcaaatgctaggcttgtggctgacctttcctttctgaaatctcctctgtttccatgatgctaattgagtccctctctaggcccaatcaaagactccttagctggtt

SEQ ID NO: 65234 - DNA, 5580 bp, Homo sapiens
ctgtagactcagctactcaggaggctgaggtgggaggaccacctgagcccagggaggtcaaggctgcagtgagctgtgtttgcaccactgcactccagcctgggtgacagaatgagaccctatctcaaaaaaaaaaaaaaaaaaagacagcgttctcatccccctcaacatctgcctgtaggtagaacccaggttagagttaacacaaaggacacaaggaccactcttttgcctactgaggtgaggggaattctgggctgcctctatggcaatgagcccaagtcaattcagtgcccgctctctcctctgccacagaagcccctagtcagctgggggcaatgttgggtgagggtaggtcatgggggggctggccccactttgtgctgccagcagtgctggctggctcccatcagatatatgtgagctcttggcaagcaagagggaagagagctgtggcaagaacaaagtccgaccccacccccacccaccccagacttgcaggctgctgagggacgccaactgggactgggctaaagagaccattatttgtcatctaataatcaggtgtctgggggcaggttatttctcagcaggttgaaaaacagggcacccatgatattttgtttctcctttggccttcctgatagcagggttcacccaaaggcctggctgacctgtttcttttaagggggaccttgaaatatagataaacacccagcctcatggaagcccttctgtaccctcggcttgcctgtgtttttcatggtgccatcctttgtttatgaactgtgggacttttttgttttttgttttttgtttttttgagatagagtccccttttgtcacccaggctggagtgcagtggtgcgatcttggctcacggcaacctccacctcccgggttcaagtgattctcctgcctcagcctccccagtagctgggactacaggtgcctgctaccatacccggctaatttttgtatttttagtagagacgatgttttgccacgttggccaagctggtcttgaactcctgacctcaggtgatctgcccacctcggcctcccaaagtgctgagattacaggcatgacccaccacgcccagcctatgaactatgagacttctgagaactgttaacagggaggataaatggagccaggagacgcctcactttggcttcagtggaacctgtcacggtccagattgtgccactctttggaatttctgaatggtatgaatccagaggagagaaacaacgttctgtttgttctcatgggccctcataccacagacgtttacatcatgggcctgcacactgagaggtgctggtcatgttttcccaccagtgtgaggggtttggatgatcttggcttgtcctcacatttccccattttttattttttgaaaagagaaattaagacagtttattgatcacttactatactccaggcacagtacttggcatactttttaaagttgtctcatttcatttgcattaaaatcatttcaggatatattattatcccttttatatacataagaagatggaggttcagaaaagtggagtaaatttactaagccctctcagctcagaggctaagtgagaatttgaacccaggatgtctggctcctaaacctgtatgttttgcccattcagggcccacaagggatgggaagtctggaacaaattaccgggtggcctgacttcattgcttctcagtatgatctaatgctaaagcacgtttagcttgtttgcctttcctggggagaaacagagaaagggaagaggggtgaagtgaaaaaaaattatttattttttgctggggttcaatctggtctcagcatcccatcccatctggacaatctgatccttttttttttttttgagacagagtctcactgtattgcccaggctggagtgcagtggctcgatcttggctcattgcaacctctgcctcctgggttcaagtgattctcccacctcagcctcccgagtagctgggattacaggcacccgccatcatgcccagctaatttttgtatttttgtaatgatggggtttcaccatgttggccaggctggtcctgaactcctgacctcaggtgatccgtgatccgcccaccttggcctcccaaagtgctgggattacaggtgtgagccactgcacctggccctgagcctctttaagtaggccacagtgttactgtcgtgacagggaaaaggtgacactggaaggggctaaccccaggttggcctagaactggccgttccagtgagctgaggggtctgcataattggataagatagccacactttttcagtcctgcccaagaatatctgtgagaataaaatgaaagttagcctgtgtccatgtctcctgccctaaacaaaaggaagctcagtgagacagaacccccaaagcagtgacttgtcttgcaggccaattacgttgtctccccagcctctctgcagctgttctggcctctgctttctgggatggagcctctgctctgggggccctccacagcccagctccaggaaggtgactgcttcctggtttgagacgtattattaaactgtaatcatactgtgcatggagtcagccaaagcagtggctattaatagggaggtgaagaatgctgactcagaaggaagctgacttaggctggaagggagagcccggccaccttggcctacaattctcagcaggaggtcagtgagagagacctgagctcacttcgttcctgggcaggagtcagcattatctggatttctcaactttggaaatagaaacccgaagcagtcctgatcaaagggatattgagctgtctttcccaggtccttggggagtctccgagcccggagtactgatagcttaaatagctatgactcagcagagcagcaactcttccctcccgatgtcatgagtagatgagacttggaaaggggcactgggactccatttccgtgacctccctcagctgagaagcctgtgctgagccagcccttagctggccggacaacccccattggcagagacacccaattagggagattctgtttctggctccttggaggtgaccattttcatttcaggtgaagggccacggtaaatgaagggcagggtgcaggagggcctcacactgtggagaaaggacatttttagcaatttctgtcaatgccatgcatttctcagagagttcagactttagccgtctggtagactccccatcgtcaggtagctggaagtaagacagatccccgaatctggcccaggatatgccccggagaaacaggactgcccctggatgcacaatagccctcactctgcagcagccaccaaacagccttcacacgtgctgcttcagctcgttctcaccaaccccagcaggtgggtggtatcagccctcttagcgaggaaaacagatttcaaaaaggtgaagtgagttggtcatacagctagcaggtgacaatgacgagactaaaacctcagtctgtctgccgccggaggagaagccaggcatgagctgcccttgtgcccctggcacatgcccatctgtgccacttctacctagacccaggtgtccccgactttgttgctaccccaaagctcacactgaggccagggtagtgaagatctggtgtgttgggtagggggtgctgagaggttgggggagcgctatgtcattctctcgcctttctatcaggtgggtggggatgccgaggtatgtcttctcaaactggaagattcattttggttcctggatctccgtagaaggaggtttggatggaggtaggatgtgggaggtgttttctcttcctccctaaaaatacttattaagcacctcttggtttcagctctgggcagcctgggtgctttcagattatagaacaatttcatgacaccatggatctggtatttttctctgctgtttttcacatagtcttaatatagttttacctgataagaactatccacatgtgtatatctttttagagttctaagatagcataatccacatacttagatgtacctataaaatatctttttacagaataaagggcatgctattaaggaatgacttttcttccactgattgtcatgtggatcacttcctgaacctgaaggaggttctggaactccagacaccgggtcctgagctctagcaagtagctgagggaagaattttcagcccccagctgccaggggttctcaacacagaagcaggaccagaccaagcttttgggaatttgttcatcattgtacagccgtatcacggcctatccggagtgggagggctggagagtaatttcctgaccctcaggctctgagctattgttttggggtcttgcgtactcttttgatcaattattttttctgcctttagccataacaagcaacaggatggtgcagcatccaggttcagaaagctgcctcctctcacttagtcaaagttaattaattctcactgtaccttgaactaggtcagctgcagggctgtgctgggcctgacctgctgtcaggggagggcatttcttgtctgtctcttgatgtgctgtcctgggcagggaaagtgggaagggggtaggtttcacctttgcgtgggatcatctctccccctttcttccggggaggtgaccattttcagatctgtgggtggggaggaaaatcttctcttccaaaaataatctctctgcagtggggtttgaagctggaccaagctgctagcgctatttttacccagcttgcagttcagggtgtaaatagcaactctggctgttttttcccacagctgacaacagagtcaacctcttcgaggcaggagcattctggcatttcgcacagagaaaacagaacacaatttgccctcgggcccagttgatgattcctggaccgtggggtcgatatccagggctggcatctccacggttcttttatctcagtctccactataaacaccaggccccatgagagctgctgggctgaggctcatttaaagaagcttcctgcggaatgatgagggaaaaggcaggtccgtaaatccccgcctgcgcccgccgaggattccaagcgcatgagcagctccaggctccagcttgctgtcccccttgccctccttcttgcattagcaggcacttcctctaaggctgctgccctgggagggtttcttgcaaacccactagatctgaggaaagacagagaaaacatctacttaaggctgcccagatgacagcatgtgtctaaaaatatatgtctcctagttttcgagtgatcgaaggccccacagccttcagcactggagtcatttagaggtcatggtgaaaggactggctccctccttgcctccatttaagcagaagctgcgagaaagcccccaaagccttgggtcatgtctccaacaggctcgggtgagtgggaagttcggcctcatagaaggccccttgctggtgcggttcatgaggacgataaattagcaaagctgaggtgcgcccatcacggtgagcagttctctattgcttctcttctggggaatgaacaggcttcatttgcttttccctgaggccaggtttctaacccaaa

SEQ ID NO: 65235 - DNA, 9765 bp, Homo sapiens
ttcccccgggcacacatcaatcaatcgaagtatttctcaaatatctaccccatacccagaactgggcatttaggtacgtggttcaagtttcagattcttccagcaaatggtttgtatggggtaagaaaaaggattggaggtcaggtaggcagctgagtaatccccaactctgcctttttaaaagtggtttcagttgcgcatccttggaattgattctgggcagctgttaattgcaaaactcactgccaattatcgatagctaaagtggcattggagagcttctcatggtaaaaataggggcaggtaatagatgagaaaatagctttacatttgagaagagaggatgggaacatattgtctcaatcttgctgtgttcgaggtttcctttgtcagcctgggttctctcccaagactggccagcaaagtctacttagtgacctccagcaaatagtccaccagcaagctacttaagattagagcaggctgggcgtggtggctcacgcctgtaatcccaggactttgggaggctgaggcgggtggatcacgaggtcaggagatcgagaccatcctggctaacatggagaaaccccgtctctactaaaaatacaaaaaattagctgggcgtggtggtgggcgcctgtagtcccagctgctcgggaggctgaggcaggagaatggcatgaacccgggaggcggatgttgcagtgagctgagatcgtgccactgcactccagcctgggcaacagagcaagactccgtatcaaaaaaaaaaaaaaaaagattagagcaaaactttatcttggcagcaagaacagaggggatctctgctgagttcagggcatcctgtttctcaccgggctcagtcacattaaacagccaataccagttttaggaaaatccatgttgaattttaaatgtattttggctcatttggggggttatgattgtccaattcagctggtagtttgtgtatcaaacttcaaatcgacaaacgatgtttattcaaggaagtttcttgaagcctagatggtacatgtttaccttaaaaagcaaaaccaaaaaattccaaaaaacagaaacaggaaaaagtgccctggtgagtaaaaccaaaagcatgtggcagacagacacaatgcaggcctgagtattttgaacaatgctcatggccccagccttgacactggggaaactgggaatgtggtcgcagacttcctatgtcaagtgtttccctggatttcctggaatccaacttgaagtgccatttcccctggtgccaccaaggagttaagctttggttctgttctcccagtgactaagaatgctctgtgtggctctgagatcatccagaaagaaactgacagtcggcgtgggaagagtgtgagctttcagtgctcttgaaatgcctttgatgggcatggtgagagagcaaaaggcttattgccacctagtgcccctgattgtgtaatttcgtcgtgaattcttgtttcttcttttgaattttgcataattttaaatgaagatctctaactccttggggagcttgatattgtgatgtgtgagttattctatggagctattctatgtgagctattctatattttagacagcaaacgtatcccaccacttggaaatatcacccattttgattgaaaacaaagtagaatcaatgacctgaccaaatcacacgtgtgtgtgtgagggagactgggtctttccactcctgatgttttctttcttctgaaaggagtccaaacactccttgcttctctccacccgccccctcttccctgagaaggaggagtggtttaatatgactggtgagtttggaaggaggaactgtgccttatatcatcctctcttttcttcttgggagcaagcttcgctcccgtggggtgggaagagtaggcccattccagctcagctgcctgtcatcgagccgccaagtctgcctaactctgaagttgagtatcgggaagctcgattgtctgatgatataagccacgttctctaatatcagctttatcagtagaaaaggttatttttggtcctcatctagcttgctgctatcttctgattcaattcaaaattcacagagaagggagcagactgctattttggggcctcctcaaagaccccaacatatttactggaagatttcctgtgattagaaaaatcccagtgttggggtaaggtccaacttatagatccacatcatcactttcttatataacaccagattccttagctgtcagctgagtaaaagagagtttatgggtgttccttgcagctaaaatgcatccattcaaaagttatttattgaatccttaccacgtgccaggggacacataagtgatcaagagaaacagtcttgggccgggcgcaatggctcacgcctgtaatcccagcatgttgggaggccaagttggttggtcatttgaggtcaggagtttgagaccagcctagccaacatggtgaaaccccatctctaccaaaaatacaaaaaattagccaggcatggtggcagacacctgtggtcccagctacttgggaggccgaggcacaagaatcacttgaacccaggaggcggaggttgcagtaagccaagatcacaccactgcactccagcctgggtgacggtagtgaaactctgtttcaaaacaaaaaaaaaagaaagaaaaaaaagagagagacacagtccctgctgtcacacagtttataatttaactagggtgtatcaatttaaaagtttaatgtttcaagtgaaagaaaacaatctcaaataggcttgagtaatacaggaatttattgtctcactggagatccaggcacaatttgatccaagattcaaacagcatggatccatttcttggctctgcttcctttgagttggattcattctttagccaccacatgttggaacccctctctcctggcagcttcaagttttccacgacggctgcagcagatctaagacataccatttaccaggctgacaagagtccaagttccagcaatccctggaggtccatcctgagaaggccatctcaggttatagaccagcataaatcgggagctcacaggacagaagacactgattggctcacgcccagtggggcccaccccctgatatgggaaagttgggccctttccacttccagaaatttgggcacctatttggaagggagaaagggccacaactaataactgtttatgatagaaggaaaaacaataaatatgcttatacttctgctctgagggaatcattcagcctgcagaaaatggagacatctcattactacctggcgagtcaaacacaggcctggggatccagagatgtatttggattccaaattctgtgtgggcccctatacacagctgacccttggggacactgtaaaggttgatacatgatagactttgctccttgatctggcccttcagtagttacccttggactgtattctgctgtgtgatagcttttcccttattgattgattgattgattgattgattgattgatttgagatggggtctcacccaggctgaagtgcaatggtgcagtctaggctcactgcaacctctgcctcctgggttcaaatgattctcctgcctcagcctctcgagcagctgggattacaggcgcatgccaccatagccggctaatttttgtatttttagtagagatggggtttcaccgtgttggccaggctggtctcgaactccttgcctcaagtgatctgcccgcctcggcctcccaaagggctgggattaccggcatgagccaccacagaggagagtatgtgcctgagagagatgctaaaaggatgactgagatgatattcgcaaagtatgtggcgcaagtcaccaaataaacctaagctatctgttggcgtgtgttcattattctttcagatttaaggacattcagctggtggtttaggggctaaacattaaccacagtggggcaggtcaacacaacatgagctgtgagccatgaaaatacacaggccttcggtgttctaagttcaacagacctgtgtgaaaaaacgtataaccaaaacggattgaaaatggacagaaatgcagtcaaacatgcagggtagagagagtgctccagctaagacctcggccagttctttttttttttttttttttttttctttcaggacagagtcttgccctgttgcccaggctggagtgcaatggcgcgatctcggcttactgcaagctcctcctcgtgggttcaagcaattcttgtgcctcagcctcccgagtagctgggactacaggcgcaggccaccacacccggctaagtttttgtatttttagtagagatggggtttcaccacgttggccacgctggtctcgaactcctgacttcgtgatctgcccgcctcggcgtcccaaaatgctgggattacaggcatgaaccaccacgcccggcccttggccagttcttaagaggcacgagtacttgctgaacaacttaaagtgccagtggtgcctgagcaatcctttatttcttcattcagcaaacactttttaggtatcttctatacaagaagctataataaaaacacacaatcagtttatgaggcaggcacttaaatcctttttagaataaagaagggacctccctttataaataggtaaatgattataaaaattatatgcaaagctaaaatgaactaaagatctactattacacaggagacagaaaagagaaaactagtttcagtatttgggtggaggctggagaagaagtgggctatatctgggatggaatgaaccgactttgtgttaagtcataaacaaatatatagggctaagtggagagatggcaatcaattatacaaagtcttttttggttgctcaaagaaatgtgacccagtcctctgaacgccctacagcagcagtttatttgcaccttgcctactgctcttattctaacttgtatcacagtcggttatttattcattcaattatttggttactccttgaacactgatgcaaggcttgatatgtgctaaatattgtgtcaagggccaggatacaaaatagagtgagacatggtttctgtagctcagtctaggaggggaggaggcataaaaaacataattatagcctgagcacagtgccttccacatgtaattccagcactttgggaggtcaaggagggaggattacttgaggacaggagttggaagtcatggtacgctatgattgtgccactgcattctagcctgacagagcaagacctggtctctaaaagaaaaaaaaaaattattatctaacatgagaggtgctataatagaaatatgccctgagtgcttggaggtgaagtcttcacaaaagaagtgatatttgagtggatcttgacaataacaggagtttcctaggctggatttccaaagtagctggaaagcccctgaaagaggagccagaatggtgtgtgaggaaatgctgagtggtttggtatgtggggatctttgggtatgtggggagagtgtcagcagaggaggctgaaaacataagtgggctaaaaggtaagtcacacagagcttcatagatcttgctatgggctttgaactgtgtagacagaaggatttgttgaagaattttaagtaaatgattgagaagatcaagtttgggctttagaaagacgttctggaagcagtctgaaggaagagtagtagtggggaaggactggaggccaagaaatcaacaggaacgctatttcactaatctaggtgagaagtgataacatcttgatgactgaaaaagagggaacagaatgggttcaagaaagaactgagagattaaatcaacaaagcttggttattgtttggaaggaagattatgtagggaaagaaggcattaagaatgacttggagctgggtgtggtggctcacacctataatcctaacactttgggaggctgtggtgggtgggtcctttgagcccaggagttcaagaccaacctgggaaacatggcttaaacctcatttctacaaaaaaaaaaaaaaaaagcaaaaaagtagccaggcttagtggcacgtgcctggagtcccagctacacaggaggctgaggtgggaggattacctgagcccaggacattgatgctgcggtgcacaatgaccaagccactgcactctagcctgggtggcagagtgagaccctgtctcaaataaataaatataaataaataaataaaagaatgatttagaagtcactagtccatgcagctgaggaaacaaaggtgccattaaccacagtagggaatagaagaacaggaggaaagataaagacaggataatgacatgctgtgtttaagatgcctgcacgacattcaagtggacaagccccactggcagttggaaatctctgcctagagttaatgagagagctggaggctagtgattgagctgggaataaataggtgccaaggctatggacataaagggcacacacccaccaagtacagctggaaagtgagaagataagagacaccagcacagaccctatagagcactaacataaatgaattgatcaaagaggagccagaaaaggaaagtaaaaagaggtgtccagagaacagctaggagaactggcagagaccaacatcttagaaggcataggagacaagaagaggaggcagtcaagtaggtcagagctgctgagaattctagtgtagcatttgtgacatttccccattaaagagcaaagcctgtgacagtaggaactcctggcacagtactttgtataaagcaggcagtatctgtgccaggatctatagatagacatatagatgtaccaatttggaaactgctagtaactgctagatgcccagagacctcaaatctggaaacactgcaattttaaagtgttatttaaaggtcaaattagcaataaaaacagtactatatatatatatatatttttaatttttaaaaatttttttttcaagatggagtctcgctctgtcacccaggctggagtgcagtggcacaatcttggctcactgcaacctctgccccgcaggttcaagtgattctcctgcctcagcctcccaagtagctgggattacaggcgtgctgtaatttttgtacttttagtagagatggggtttcaccatcttggccacgctggtcttgaactctgaccttgtgagccacccgcctcggcctcccgaagtgctgggattacaggcttgagccacggcatccagccaaaaacagtacaatattaaaagagattctagctttcctcaaattccattaaaaattattactaccaccttgtgtatttcttcgtatttggtcttcaggagaagatacatggtcagcaatataaaatgaggaagctggggcaatataatttatcagaacagaggagttcagttgcagttgctggaacacagaaattggtgtcaatgtgtttggcctttacaaaagtcattctgagggcaacatcatggtgttttaggaactaagcaatttcttcctcccctttctcccctccgcctcccccctccctcctcctttcccctctcctccttcttcttcttctccttcctcctcctcctcctcctcctctttcttactccttccattctgttgcccagactggagtgcagtgaccttggctcactgcaacctctgcctcccaggttcaagcaataattttctgtatttttagtagacacgggtttttgctatgttggccaggctagtctcaaactcctgacctcaagtgatccacctgcctcagcctcccaaagtgctgggattacaggcgtgagccactgcgccgggccagcaatgtcttcttcaaatgtcacacaatgttacagttctttttcatttgcccattctttcaacgttgagcacctcatatgttcgagacactgagtttgtcagccttttgacatctttccatccctcaaggagctcacagttcaggggggacatagacaggggaatacaatggaaatatactgagaagtgctgtgccagaggtaagcacagtgtgcaaatgaagacagagaaagacaacccaactcaaagggcagcaaaagagggcagtggcgtaaagtctttccagaagagacaatgcctgccaggtgttacaaggagggacaagcttccagatcaaggagacagcaactgtaaaaaaaaaaaaaaaaaaaaaagaaaagaaaagaattcaatatggctgaacacagagtacaagcaggggaagagtgagagatgagctgggtgggcagggacctcatcagaccccagaagcccttctaaggattcggagcttgagcctaaaagcaatgaggagatgctgaatgattatgttagagcacttcaaaggaagtcgtttgcttctcatatttttcttatttcccattctctctctctcttttccttccttcctttctttttctttttttctctctctccccctttctttttctttcttcctttctttctgaaattgcagctgatccttcctcccctccctccctccctctctctctctccctctctctctctctctttctttctgaaattgcagctgatctggtctatacccaaagagaataagtgcaagggatttatttacagtatgtccatggttgggtggagaaaaagatggagttgatccctgaaacctgacttttgatggcagtaagtagcaaaatgagaggatcccaggaataattcctatctcccacagacttttcttccatctaaatctggagatgcctgtgttcgattttcatgaggaggctgttacctccaaggtgtggacaggaaccttttttttcttgccaaatgagcaaagaaaggaatcttaattacagagaggtctacactcttgctacttgaaactgggtccctggaccaatagaatcagcatcccctgggaactggttgtacagacagaaatctgaagctccaccccaaacatactgaatccaaatctgcattttaaacaagatgcctgggtgattcccatgcacattcaagtctgaaaagtcctgatctacaagataggaaaactgcctagttggtaaaacttagggtactgtgttgcaatctgtgttttgttttgcgtgactgatttatgagtaatcagtttgtcagcctctatgattactaatttatgtccaaaagcaaactcaatcaggggctaaaccctttctactctactgaacatttctaagaaatctccacagagcccacgatgttgtgatccatttaaatacaggacttgctctctggctgatgagtaaaagattcgttcttttttttttttcctattgtggcaaaatgtgcataacatacatttaccattttaaccatttttaagcgtgcagttcagtggcattaaagacattcacactgttgtgcattcatcactacatcacctctagtgttttcatcttcccaaacggaaactctgtacccgttaaacaataactccccatcaccccctacctccagaccctggcaacaaccattcgactttttttttttttttttttttgagacggagtctcactctgtcacccaagctggagtgcagtggcgcgatcttggcttgctgcaagctcctcctcccgggttcacgccattctcctgcctcagcctcccaagtagctgggactataggtgtgcgccaccacgcccagctaatttttttgtatttttagtagagatggggtttcaccatgttagccaggatggtctccatctcctgacctcatg

SEQ ID NO: 65236 - DNA, 2916 bp, Homo sapiens
ttttttttttctaaatggagttttgctctgttgcccaggctggagtgcagtggtgcagtcacagctcactgcaatctcaaactcctgggctcaagcaaccctcccacctcagcttctcaaaggagctgagactataggcgtctatcaccatgcctggctagattctgcattgccaacctaagtgcggctattggttggaggaccacacttttgagtggcaaggctttgtaattcccagaatagtgcttcaacataaacaagcaagacttttggtagtattctaggaaaattcccttctgaggcccaagcccttcaagcaaattctaccttgcaataaggcgtttcctctttgatcactagactgccccctaaattaactgcagcctgaggacatgcttttgttatagtgcagttgtttgaatttgtgtttaaatctaggaatacagatagttttactaatgtaatttgagaagattggtgagttattttgggtatgcatggcctagccctgcaatcctaggattctcttgataagcgccacaattataccagctgatcccataaaaaggcaaaacagtctagcccgcatagagtgctgacagctgtaacacccccttctggacgaggggtcttcgcttttcccccaggtgggttaggtagctggaagcagacataaagcttttattttcctgtgcctggtaagtctctgtttcctgtggaaagtcccacttcatcagaggcaaagaattctctcttagtttcacctctgaagctaggaaaattagcctttaaccatactaaatagacttcaataaacgtttttctattttctttttaaatagagacagggtgtccctatgttacccaggcttgtctcaaacacctgggctcaagtgatcctcccacctcagcctcccgaagtgtcggaattacaggcatgatcctagccaataaatgttttttaactgggagggacagaccagaaggataagccggcactaatgaaaccagaaagacacttggctggactcctagcatgacaccagcaagaggaaagtcaaggccagatgccatcgctcacacctgtaattctaacacctcggaggctgagctgggaagatctcttgaggccaagagtttgagaccagcctgagcaacatggcaagaccacccccctccccatctctacaaaaagagtaaaaaattagccagatctggtggtgcatacctgtagtcccagctacttaggaggctgaggtgcttgggcctgggagttcaaggctgcagtgagctatgattgccccactgcaccccagcctgggtgacagagcaaaaccctgtctcaaaaaaaaaaaaataaataaataaaggagagtcaagtctctcagggccttggtttacttatctgtaaaatgaaggtattgggctagaagattcctagcagccctaacaggttaactaacagccaacttgggagaaaggcaaagagacaagaattccaacgctggctacttgacagcacaatgtgactggagtctcttggctgacttgtattctctcactggtctcagcccaaatgcttgccctgatatggtactaagttatcccttcctagaaaagttggtgcctcacatccgcctgcctgttgtagaaagacgtgaaaagacacgccctgtgctgccacctagtggttcctcttctatcaaggcagggtagactcttcctttctgttctccatccaccggctatgagggtctaacaggagagactaaaaataatgcacttccaggtgccaccgctttaagggaatcagggactatgactaagaactacaaggtcttctaaactttataatttcctccgtattgttatttcctgtctgtttcgctgcagcgattagcagtaaaactctaaaaacaaaaatgaccaaggttgtttttaaggtcagcaaggaagcagggaactggggagagacagcaccccagggtttgaggtaaacaacaccaggagatggagtgggtggaaggagctgaatagcggaaaggaaagagggtgaagtcctctggcttgtttgaaaaaggaaagagggggtgggaggatgaagttgccttttagctggaatgaaagtcatcatcttaatagcattgtcattctttcctgttttgtctttagatgcacaaatctgttttcaagcctggaaaatgaagcaaatgtgtggttttcagctactgttgcagttcaggggcctttgtagcaaatgatactcccctagactaaggatccgaaatacaaatgtctatagaaaggccacgcagatatcgtacttggatggaggcagccagaggtaaggctgttgggagtggtggggactgtggtaaacaggagagtactcactccatctaaggaagcagaaacaaccagtcccaggtgattatgggcctaaccaaaccgtgtacccacattgctagatctttcacattttcaggagaagctggaaacttggattattatgtgaagtcaccttatttttaaatgttggcggctaatgttgcttaaaaacaaacaacagtactctgagccaaataaaacatatcaatgagacatatttagctcaaaggccaactctttgaaaacatgaatacagagcattttgcaatctggaacgctaaagcactaatatgattttttcaaggcatgtggtcttcttctgaataacaaatgacaaggcaacaagcaaataccaggtaaactggggaactgcaaaatgctttgtgttacgatttgttaaaattgactattgtgcctagaaatttatataaagagctagtttgttaatttttcatgtccaactggaaagctctgatatattctttcaataaatcatgaaacatttattgagcacctaatatatgcaaa

SEQ ID NO: 65237 - DNA, 1326 bp, Homo sapiens
caaatttttaaaaaagaaaaaaaaggctatatattcattactcatttaatcctcacaaaaatcccatcagatgagttttgttaaaggtcttattttatggatgcagaaattgaggcttagtgagcaaagtttatgcttctaaccacccccagactgttcctgctttactctgggcaagactcatctgcagaccttcgtatggccatgtccagccttgtgggcccggatcatccatacaaggggcagtagaaataaagccaagagtaaacacccttagatccactaggctgcactctagccctgcccctgtgccatgctgcagcatgcttccacccagctctgaaccctgcccgtctggctctaaatacctgcttattgtccctacttccatgcacttcaaaccctgcacttcaaaccctgctggtttgccttagggtgcagctgggtttggccccaccacctgcaaaggttggggcagagctaaacaaacaaggacttggattagctgcaccctgtgagtcaaggccagttttttttttttttttttgtcgcccaggctggagtgcagtggcgcgatctcgactcaccccaacctccgcctcctgggttccagcgattctcctgcctcagcctcctgagtagctgggattataggcacccgccaccatgctcagctaatttttgtatttttagtacagacggggtttcgccatgttggccaggctggtctcaaactcctgacttcaggtgatccacccgtcttggcctcacaaagtgctaggattacaggcatgagccactgtgccagccgaaggcaaggccagttctaagaggaacgtgctcaactcggaggaagtctcctatggctggcagaacaaatactggcagaaaagggatactgaaatgcctgcccagcagtgagggctggaactagatagaattagattgccaaagtggacaggtagagggccaggactagatgtcatagggcaaaaggcacaacgtagaatatcagaggctttctgataacaaggtagccctgggttgagaaattcaagaagggtcaatatttaagaaccaggatagatgtcatagggtagactttctcctctttttccccgttacgggttgaattgtgtcttccccaaattcttatgttgaagtcctaaggcgcagtacctcagaatgtgatctcatttgcaaacagggttgttacagatgtaagcagttaagatgacgtcattcaggtggctttaatcctatataatttgtgtacctataggaagggaaatttgggccaggcgcagggactcacacttgtaatcc

SEQ ID NO: 65238 - DNA, 714 bp, Homo sapiens
cttggcagtttaaagtaggtaaagatattttcaaggagatcggcctttagcaggggaaaattatgctgagtgaggaggttaaaagggggtgggataaccagttagagttgagagctattctgcattagcacttaagcagcctgggcatgcggccaaatctcttgggttaatgtttcttctcctttgttgtccaggattaggcaacaatgtggccttctgtcattttgcatttctttgtctgttaaaaagagtcaataacctgcattctctttggacccagaatatttggccatcatctttcccctagcacagaaacaatgacattctggtattgatgtattggtaccggacattgtggggagatgtcaagatggtgattaaagttctgatcctttggaaatcagtgtttatgggaaggtactaaacattacaagaagctaagaatgcgaaggacaaatatttagagaaaatctccaagaacaaactcttccagatagcgacaaagtttgtattcgtgtgccaacaattcttgtctctcttgataatactattttttgccatgaaatgtgggttattacagtgatggggaagagaggctgaatcagaaaggatgttgacatttggcaacagaagaaagggtttgtatttttatttatttattttttgagacagggtctcattctttcactgaggctggagtgcagtgatgccatc

SEQ ID NO: 65239 - DNA, 797 bp, Homo sapiens
ccttagaggtggggttttgctttgttgcccaggctggtctgaaactcccagcctcaagcgatcctcccaccttggactccagaagtgctgggattacaggcatgggcctccgtgcctggccacaaatatttaagttcttattcttctatcttcaacagataccttctttgattataaaagcaacacaatatataattatcaaaaacctacaagtcacataatctccatttttccaggcttcaccaagttgagagtactcatggggccatattaacagtaatacccaaaagttgctggcttttactcccaggcgaatcttctttccttctgctctgccttgccacgttcggggaagttcccagaaaatctaagcatgatttgggggaagagtcactgatgtaatttcctagacagccactggagggcagcagctccctctcacccccgaccccagccctgaagaggatgctgccatcaggcccagagcattcctgaagcagcaaactctcagtcattgcatggaaactctacagaaacagggggactatccctcttcccaactcttggtcacacgttgtgacctgggtttcgtaaagtcctatgtggaaacaagcacatgtcagagtccaagcttaatagcgggttgagaatgtgatacacaacaggatgaccctgacagcctgcagctggcggctatctagcgttccctcacgcaagataagcagttttcacagaataacaacaataatcagacaaggtccctccgtaaccatggtggaacaagacaataacaagat

SEQ ID NO: 65240 - DNA, 1210 bp, Homo sapiens
cctaagttttgataataacataactaaaagttcggctccacaactcagtagctgtgtgccttggacaggtcatatcagattaggaaaggtgagaatgagttgaggaacgcagcactctgggatcatggttccagctccgggcagagggttacatcgtgtcaagtgtgtgaaggcagaatagcctgcagagaccactgtggcgttgaaaagaggtgtcgtcgcgaccttcggcgccggagaggcgaaacaagagggggtcttcgggccctcaggtatggctcagccgcccaaggcgaagcgcacgtggcagttggcgggaaatccctggggggtggagcctcggctcgaggtccggccgccccgtaccacgtcatcgagcagctccccctccccttgctacaagtcgcacgcgcggaagtaaacacctctacgtcatcagggcgcgtcctcgtctttcccctcccatctcctcagatcggtggacgtgctcgcctccactcggggccaggtctatgtcccggtttcccgcagtcgcgggcagggcgccaaggcggcaggaggagggtgagcggtcaagagacctccaggaagagcggctctcggctgtttgcatcgccgatagaggtgcggtccgcgggacggtacggaagccagcgggagttacggcgtgggggttttggtggggggatgaaagtacgcctttggcaggctgagaagagtagtgaggaagccgtggcgttctcctggctttccaagcccgaggcgaactttgcgtccaatgagcactttgccttagaggggggcggtcccagattcaagttaggcgaaaaccttactggggggcgaaaaagtgaaccccaacgcccgaaatgcattctgttcttaaacaggctcatagaccctttgttctctacccattcatcccccccacccttcgtcgggccgccagcctgcctttgggtacagtatgaagggagccagtttccaggagccagtttccatggttacccaccacttggccttctgggatatcagtcgctctgaacagggacctaacttgaaccatgaatcagaagcaaacacaggtggcttctaatccagctgagaattttctgctgtgttccagtttttggtctattgttaaataaaattgagttttgtgcttctgtgtaagtatgcatgtgtatacgttgccttgagctatacttgc

SEQ ID NO: 65241 - DNA, 4211 bp, Homo sapiens
atctccatcctaattgttggcataacattaaaattagtgacacaacacaggtttcttgtataggttttcagaaactagcagtcctcaaaataacagaccaagcaatgtagtttttgctaatggcacttgctgtgactcatgatagtctactgttgatgagcattccaactaaaatagctttcacttcaccattgattaacatggctaccttgctaaaacattttctgaaaccaaaagctagagtgatcattcatagcattgtcttattaaaagactatgtcatactgtatcgtagaaaaagccattctgggtagtaggatttgcttcctggtctattaggttatctgttctcccttctaacttgaggtaatgtctgaaaacagtgccattcaggtattgcttaggtaactaaaccagtgaaaccagtgaaactgcctttatactgttaccaagaacagcagactcccattaaaaaaaaaaaaaaactcttattaccctactcaaattattcatctttaaaaaggcatagggtttttttttaatgtttatcatcttgactttttttttctcttgaaaatttttggattaatttgaagatcatttcaaaatgacccaggatatcacgatctatttttcctcttcctaaattatttctcaaaacagtgtaatttctatgtgtgatgacgtagcagtcactaacaacctcagcgcactttttggttagatattccactccaaatagctaaaatcaactgcttttgggattctaaatgtacttaaagttacagggtctgtatgaaaatgccagacactaattaaattttggtggcccattcatgatacggctcttttatctccggattctgagattgaaaaggtgacttgatcaagctattgaattactgtaataaaacaattactcccttagaattttaatttagaatttgtctacttccaaaaagggtttaaagcagttattactagactggcattaggttatttcaaatgttgcggaacagaggatcttcgtgtatttagcttaacaatacaaaaagaaattttgcaagcataaatattcactcttacaacatggtggcaaggcttttctttgcagaacaatctttgccctcttacctgccagactcttctctcatgctcagtatgtgagacagttaagtaaagggaaaaacactaaaagcaactaaaatgattggcaaacttctcactgtaacctaaactgcttagcatacaaaactatcgtctacccaatagggttttatgtcctttaactgaaaaggacactaaaaataattattgtggacttgagcttttctctttcggcggggcggggggtggggggggagaatcacctctcttacaaagataaaaggcacagaactaacgtctttcatcctttattgtattggtgcgattatgaaatattattatggcttatactttagcaagaaagtaccagaaaggttattattaatcgacaatgaatgccgttgataccttcatgctctttgaagacaggatgctccggctttgaagcgctacatttctacattgctaacctacaggaacctatgttgaggtggtcccaccgaaatacacggctaatagttcatctctttcctccaggaaccttcaggtttttttttgtttgttttttttttgagacggagtctcgctctgtcgcccaggttggagtgcagtggcgcgatggaaccttcgggttttactaagcatccttaccctaattatctaaatctttgagacgtaaattatttgatgtggctaaaaatcctcctgctagaatttaggtccaatcctttaatgttcggatactcaaattctttaacgaaactgatcactgagctaggccgacacaagtccgccaaaatgtccgcagaaacgttaagaaaagctgtcataaggccagcttgaaagacatcataaaaggccttcgctgtcctttgagttaattatctaacacccgaagagagtgccagttctagttagaatccgcgcgtcaggttctccaacagtcagaagggcttgtgtgagggcagggaagattttaaaccccgtttcaggccccctccctaggctgtaggaaaccacccactctgaagcccggcgggggaggagtgctgcagccagctgccgagggagcgctctgcggcgaggccgtttccctgagtcacggagagggcgggaggctgcgcccgtctgcccccgccacgtcctcctgtgaggggctcagtcgaaacaggcagcggtcgcagggaaacgaagcggcacccgtcatgcctcaaggtggcccaaaagcctcttcactcccaggagacgccgcatttccttaaaacgagctctccatttctggcagcaatcagccgacccttccccatcagtatcacgtgcacctggaagtacgtgggtgggacctaaagcgcccacggaagtgacgtcggtcgccccgagtcgcatgatgtggcaaaatgaaaaaaaaaaagtggggggagaaagagaagactggcgaaagtgatgagtctaaaaaagtagtccctccggttcctctgtttccccccatgtggcgtcaggaagcgaggcaccgggcgcactgcgccccgaattcctgcgcccgccgcgcgcggcgctccgtggaggggtacataaggcggagggggtgaggcgactgggcggagttctgtcgccgggatccttccgctgggctcagccgtttccggagtctgcgctgcgcccggttccgccattgcggctctcctggcccctggagcctccgcccccgacccgagctctttcgtctgcctgccagtttcctgcgtccccggagaggatcctgctgagcccagcctcccccctccccttctcctcctctcccttggagagcccgggcagccactgccccgcagccccagtgacaggaggagaccataacccccgacagcgccatggcccagattctgccaattcgttttcaggagcatctccaggtgcggccgggcccgggctggtgagggctgtggagaaggtggtaggaaggatggaagacgctggagtctgggcccgagcagtatcggagctggaggggcgggggggttgtcggtgattggggtaggtggaggagggggcactatcttggaaagcttaaaatattaaatgatgtggggcttggatggaaaggacaggagttggggtgcaaagagctgcaaggaccaggcctggatccaaaggcctctcgatcttgcttcctggatggccagaactgcgcgtacaaactctctccccattttattcatttcattcatttgggtaggggagtgggagggggattctcccttgtttctaccagagcaaggattcttatcccctgggccagtgcggggctgtcaccttccattgctctcctctttccctcatcgtgtctgcacccaggagttgtggggcgggtgggttggggaggagcaaccttttttttccctccctctgcggctctcaactgagaaaggcaccttctccggtggtgggggttgggggtggtggtgaggcggtggcttttctcttgccttccctgaggcagtagggacagaaggtcactgaaagaacggaacgagggtagaatgggagaacgcatttcttagagctatgtcaatctcagagtgtgtgcggtcaaactccctaaggaaactcgcctccccttccccctttttttatttctctggggatgttgtggctcttaacccctctttggttctggaaggtaggaaagagtgatacagaggttatcttttagtcttctcgagtagtagcaggtagttttgaatatcttcttcaggatcgcatggaattgaacagagccctggggacagcacagctgctctgagacctgcagggctatttggtctgtgactggcttccctttagtaagttctagagttcttccccatggttccttatcctggaggcaacatattgttatctggcaacatgccagtggcgggcctaggcaggtgaccattggaaggcttcactgaattaaacctcttcagagcttttgattttcctgtgtcaccaatcctgttttttactgtagcttaaataatttattcctattaatttgctttcttcccaaatatccccttaaagaaacctgcctcagctcagtcgtctgaagggctaattcc

SEQ ID NO: 65242 - DNA, 2731 bp, Homo sapiens
gctgagccaccgcgccgggtctgcagtttacaaccgaaaaaaacaaacaaacctttcccaaatcttctctgacccttaagccactgccccactttccctgtataacatattcccagagtctagtatggtgcctggggtatgtcagtaaggattaatacctctctagttaatctctttgtgtgaaaaaggggggaaattttttctttcttttttttttttttctgagacgaagtctcactctgtcgcccaggctggagagcaatggagcgatatcggctcactgcaacctccgcctcccgagttcaagtcattctcctgcctcagcctcccgagtagctgggattacaggcacgcgccaccacgccggctaatttttgtatttttagtatagatgggttttcgccatgttggccaggatggtctcgaacttctgacctcaggtgatccgcccacatcagcctcccaaagtgctgggattacaggcgtcagccaccgcgcccggccccaaattttcgactatattcttagaaaccaattctttccacgcagagctcgacagctcgaaacgctggggatattcataagtgcccagctgagggtatgaggcctgctcgctattttatcaatttcggagagagcgcatcgatactgcctgcctggaggctttgctgggaactagaaattctgagtcttcccctccccagcagcctgttcctttcctccaaaggacggttcgcagaacaggaacagagggctcagcggcccctgggcggaagacagtttataaaggagaaaatgaagaaggtgggtaatgcaacgaggtgaaaagaaacgttcctactggcgagaaaatgaataatgatattggtctccttcgccctgtaaggagccaaccaacctacctacagtacctcctttcctcactcgcgccttcccttcttctgggcagcgaacacgtttctatcgcgtgagctacctcttccggggttcctgggtgacaagttccggatcaagaatcacaaagcgagcagtcattcttcctcttgccacacccacagggcccgcactaagagcctaactgaaatcccgcgaggatcaaccgagctcgccgaaaggagggaggaacgtatcccttctggaggctgtctcagggggcagagggaccggaccggaagtgacgtgagcgggttccggttgtctggagcccagcggcgggtgtgagagtccgtaaggagcagcttccaggatcctgagatccggagcagccggggtcggagcgggtaggtaaactaactcagggaattggggaccgaagcctgaggctgtcctcagagcttggcgtcttccggagctctcccacttaggcattgcggatctggggcactgtgattccgacttccagcagtgttttaggacgctgctgactggatgtctcaccctggatgtctcacgctggcggtagccaggttatttgggacaccttctcatggttggtcacccggacattgaacccagacaccgggctgttcgttctcctctccgcgtacttggaagccttgctaggcttctttagagaacctcttagtcccgggatgtccaggaccttggagtaagtggagaaggtcttccctgctgatgactgagctatttctcaggatctgtcagtttggtttttgctctcccgaacctctggcgcatgatgctagatgtattcgctcctaaacgaaatccaggcgtgcaagtgccatctaaagctctggtggtacagggtagccaagggaatgggccttcgctccgcagagcccttggagaggaacttctcagatttttcactgctttaatgaaaaagagttgtctgcctttccaaacccctgaaccccgacctctatatcttattacagtggaggtatttgcagtaaaacgtgaaggtcgacttaatctctaaaattccagaaaccatatgtggccctgtgtcacactgctagattacttatgacctccagaagattttacacaatcatcttttatttacctgcaactccatgtaaaaatctaataatacacgtagactggccactgttgatgtgttttggcagcatcgctccttatcctaatgttaacgtctttcatttctactttggggcttgtcagagatttttgtggacagattacattgatcatttgaagaagcttgtacaagtgtttctggtgttgtcatgatagaatttaatattccagttgctactacctagtaattgtattgtcattagctctgattttagttgtgtattcttagcatagatgatgaaaggaagaaacttacttactaggcatcattgtatgcattgtagcttatgtttttactgtggaagagggatggtggtacctagacaaatgtgactgatttgtgtaggtatgaagtgactctctcgagtagaaattttatattttactactttgcctacattatcttaaggcactgaaggttacttttttcctttgagggatatatcctacttgattacaattgattaatacagtttaatttctatgagtcacattccagaagaaaatatacatagaaccatgatgccttttaccagtttacctatagctagttaaatcagtttgtcagtttacatatttttcttattttgagtttgaaaatttgttcacgcttggctttgaaacaaggtgacaaaatttgagatatggaattatgatagatgta

SEQ ID NO: 65243 - DNA, 468 bp, Homo sapiens
gttttgaaaagttgttttttaaactgcaaatttattttgtttatgaagaaatagactgatgaaaataacttagttccctgggttatttcttacaaaacaaaatttcagactattatgttttccagagagaattttggagaaggaaatgtcagtatgctgttcttttttagcacgttgtgtaagagcacattatttgctcaaatgaaaacccctgttgcaatagcttaaaaacaaaaccttcaaataattgtgcaataccattgttataagtacgcactcatagacccaaaatgttttgggtaaaacaatgacactatgggaaagagtaaataggggcaaatgagttcaattatcagtgttttgtaggagaaaggttttagaatgttatttataaggcaaacctttttgtgccctgtttatcttttcatcacaaattaaataaattttacttactgtgatagagatgaa

SEQ ID NO: 65244 - DNA, 421 bp, Homo sapiens
ccgtctctactaaaaatacaaaaattagccaggcatggtggcgggcacctgtaatcccagttacctgggaggctgaggcaggagaaccacttgaactcgggaggcagaggttgcagtgagccaagatcatgccactgcactccagcctgagcgacagagactccatctcaaaaaaaaaaaaaaaaaaacctttggtctgttaacagtgtcactatgaacattcctgaattgctgagtcatatggtaactgtattttaccttttgaggaactgacagattgttttccaaagcagctgaactcttttgcattcccaccagcagttccgatttctccacatcctcactaacacttgttattattatcttttttttgtttcttttttttttttttttgagacagagtcttgttcctgtcacccag

SEQ ID NO: 65245 - DNA, 8336 bp, Homo sapiens
cctcagcctcccaaagtgctgcgattacaggcatgagctaccatgccctgcctcaagttaaaataatcttattatcttcttagaactgtgagtggcccagcccgtctacccactagaagcaaactagtctggaggaaagtaaaatcatcctaggttttacatgatctctacttaacttactgttgtattccaactgtctagaacagagcctagtactcaataggtgctcaacaaatatatgttgaatatattaatgtaaaatagaatctttgcaaagcctatgagagataaaataattcgacttcttttattggcaaaacagtctgttcctaacatctgagtcttatttgtgacagttgatgaaaaatgacctaatctatatatagctttttcttaatttgcataacagttttatattaaatattagtaaatcgttttatttctccagcaaataagtgcatgtacttcttgctgtgtaaacattttattatgctctttgcattcaatttacttaaatttagacaaaaaataggcacaatgaataattttttttttttttttgagatagagttttgctcttgttgcccaggctgtagtgcagtggtgcgaactcggctcactgcaacctctgcctcctgggttcaggtgattctcctgcctcacactcccaagtagctgagattataggtgtccaccaccacacccggctaatttttgtatttttagtagaaatggggtttcaccatgttggccaggctggcctcgacctcctgacctcaggtgatccacccacctcggcctcccaaagtgctgggattacaggcatgagccaccacgcccagcccacaatgagtgatttttaaaataattttattcaacatatgctaatatgcttgtctctggtttatctttatagtgaggtatattgtactttgaaataaagaatattaaataaattagaaattaatagcatttgtaaactgcatttcctctgtttttagttcttatgcaggcatatttttgttcattcatttgatatctaccttgaacaaattttgcctagcaagtagtgcaagttacaaatttcattcatttaccttatttgagtttgtatgtagattaggtgcaaagaagcttctggggctggcagatttttccaagatagcacctttttttttttttttttttttttggagacagagtctagctctgtcacccaggctggagtacagtggtgcaatcttagctcactgcaaaccccgcctcctgggttcacgccattcccctgcctcagcctcccgagtagctgggactacaggcgcccaccaccatgcctggctaattttttgtattttcagtagagacagggtttcaccgtgttagccaggatggtcttgatctcctgacctcgtgatcggccaggtagcaccttttaagcactcttttattgcatattaattccccaaaatccattgacagatttattttagtcttagcaagcattcaggttaccttttagaagatccagtacatgagcgatcaggaatgcttatttattctctcatgtagcggaaattatatccagagtaagaatagtaagtcaatgtttgcataaagagaacatagctgctgttgacctctttggttcatctctatgcagccagtttttgtgagtcaaaatttctatcttaataatggtctagaccgggctcggtggctcatgcctgtgatcccagcactttgggaggctgcggtgggtggatcacctgaggtcaggagtttgagaccagcctggccaacatggtgaaaccctgtctctgctaaaaatacaaaaattagctgggcgtggtggggggggcgcctgtaatcccagctacttgggaggctgaggtgagataattgtttgaacgggggaggcagaggttgcagtgagccgagattgcgccattgcactccagcctgggcaacaagagcaaaactccgtctcaaaaaaaaaaaaaaaaaaaaaaaagtctaacctagggctacagagcataccttctctttttcattttcttttatcttcgtttcttttttgagacagggtttctctctgttgccaggctggagtacagtggcatgaatatggcccgctgtagcctcagcctcctgggctcaagagatcttcccacctcagcctcccaggtagctgggactacaggtgtgcaccactacaccagctgggttttttttaggggtagaaacggggtctctccatgttgcccaggctggtctcaaactcctcggttcaagagatcctctcgcctcagcctcctaaagtgccgggattacaggcatgagccactgtatccggcctcactttttctgtaaaggatcagatccgtagctatttacacatcgtgggctatccagtctctgtgcaactactcagatctgtcactgtaacgagaaagcaattatagacagtacataaatgagtgaatgcggccgttttctggtaaaactttattcataaaaacaggtagcaggctggatttggtctgcagtttgtagtttgttaacccctgctccaactcattgaatgacagtagtacaccggaagagacatagtgagcctgggagccttaatgagagagctagctgtcttctaaggatttttgtatgacatctgtgtatttggttcacccatttgccaaataagtactatcatttctctcttcttgatcaagaaataacaggtttcacatgatgctttagaaaagaatatagttgtgcatatatgagttgtataaaaaaaattaagagtaaaaagaaaaagcttttttgaagggaaaagcagaagaatttcttctaaatgagctgtctgatgacaggaagatttggttccagtttcatgtaaccactggtatgttcaattcctcttaaataccagattttacaagattgcaaccattttgaggaataaataacttatggattaagtttagatgtcatgtgtaggatgaacaggtctaaagatctaaggtaccactgttgtaaaattacaatggattagggatttttgttaagtagatttttagctgttcttatttttaaaaagtaactatgtaagatgataaacatgttaatttgctttactatagtataaccattttgttatctgtatgtatactataacaacatattgtaagcctcaattatgcacaataaaatttatttctaaaaagcttaggccaggtgcagtggctcgcacctgtattcccagcactttgggaggccaaggcaggaggatcacttgaggccgggagttcaagaccataccagcctgggcaacctagtgggaccccgtctctacgaaaaaaattttttaattagccaggtgtagtggcatgctcctgtagtcccagctactcaggtggaggttgaggccaaggttggaaaatcacttgagcccagggaggttatgatcgcgccactgcactctagcctgggcgacagaatgagaccctgtctcaagaaaaaaaaaaaagtttagatgttgtacacaattaggagaagtgatggggttatttcattagccaccttgtaattatttcccactaatagaaatatgattcataattctgtaattaaccaggttaacaaaaacaggaactttggtacttgattatgagaaatgtattctggacatgctccttatatgcatgtacattatgattcatcaagttacaagacaaaaagatgattaaagaaccatttgtaaactgtatgtaacattaaggatttataaagcctgttcttaatagcaaaggagtccatgggctacaatttactctcctatataatgtgatgtatgtacaatttttgacactaggtggagcagtttcctggcaaaagacttcacaaagccccatatccctttcagttaagcccagcttctagacaaagaactgtaaagagaagaaaaacgatcgacaatcattttataatttaaaaacatacccaaatatttagctataagtagaaggctgaatatattttacaatttttctgtttgccatatattttaaccattggattttctcatgtttaaagtgttagttttactttctagaagcagtttggaagtagaaaagttgggaactattcagttacattgtagaatagatcaggttttattagaagctgtaacatcaaggtgttatcctttgaatgatatctgtgagccattttgtttcatatgaccatttttatagaaaaaaagtactttttgttataaattagatacaaagaaaattgtgagatacgtgcccctgtgtaagattcagagcctgtttctgctttaaagtttgggattatttcattattaaaatatgtgttaaaaattgtacatttaccctgaagtacaggtcaattgatgactaaaaagaaaacaaaaaaaattatacatttaaaaaatctgacatcttaattgctttttcatatttatgacctcctctgtatatggcaccctaaggaggaagtactgtatagtattctgcactttttaaaagctgttttttccttagtatagacatttctgatactttttgactcttggctattgctaaaagtaaatattatttggaaaactgcattcatatgggttgaaataaaatagtgaaatagtttcagtaagtgaaatattgtagtagttaataccataaagtggaatcattctttttttaaaaaattgttagccagcttcttccctatcaattcagcttgacttctgactattgctttattgctcatttgtctatcctccttttaagacaaaaaagaaattaccaaaagttaaggctgtggtgtgacttgataccagatgcttataactatggctataagcatgcagtgactcagtgctgtttcaggaagaccaacagacccttcttagaaaaaaatctatttgccttttgtttgatgaaggcatgaaagctcttctccctgtctttccctaaggaatgactcatatattaactctgctgagcatcaccacatcaaaagaagaaaccaaggtcttcaggacatcaggctgggtttttgccaaggaaaaggggtatgcacagactgggtaacttcctgcccttaagtttattaatgtatgcttaaatgaaagccaagaaaatttagtttagcttaaatttgttgttgagcatacattttaaacaatttatactagccccccccgcccttttttaacagctctcataaatatgtagttcatttctcttgaatacttaagtcaactgtatgatcaaaagttgcttgggtctagagaacaaaggtgaaacatgccttctttttctttttctttttcttttttttttagacggagactcactctgtctcccaggctggagtgcaatggcgcgatcttggctcacggcaaactccatctcccacgttcaagcgattctcctgcctcaccctcccgaatagttgggactacaagcatgcgccaccacacccggctaattttttgtatttttagtagagacaggagtttcacaatgttggccaggctggtctcgaactcctgacctcaagtgatctgcccgcctcagcctcccaaactgctgggattacaggcgtgagccaccacacctggccaaacatgccttttaatatggattaattcaatataataaaaatagcttcaaagacagtaccttataacttggagcatgaactaatactatagagttcatatttcttttgttttggccagcaattttatatttgcacttttatagtataatctcatatttctaccctgtgacctaggtaacaagcattattaggctttttgttaaacaaaggaagagatagaagttaccaacagtaatttaccaacagatttagaaaactgaaatccacattaatgcatgccccggttactgctttttgacagtttgtttctttgttttttgttttggtttttggttttttttttttttgagacagggtcttgctctgtcgctcaggctggagtgcagtggcatgatcatagctcactgcaaccttgaactcctgggctcgagtggtcctcccatctcagcctcccaagtagctgggactacaggcatatgccaccacactgggctaatattttttcttagtagagacggaatctcactgtgttgtccgagctagtctcgaactcctgggctcaagtgatcctgctgcctcggcctctcaaagtgttaggatttcaagcatgagacactgttcccagcctgtactgcattttgtagagaccagaggcataacttgggaccttcttcacaaaaagaatataaacactggttaaacttgtcagtgcccattgggaatcgatattttacactctagccttctagaattatttgctgtagaccataaccttgttttctgactctaatgagaaaaacaatgattaaaaaaattctgaagagaattcctgtgtttgcaaaagggtttctgaagtcccctgaaagaaaacaaaggttttgcaagtcatacaaacaaccatttttcatctttttttgtttatttatcacccagatattcctaatgaatcacattccagactaaccactgactgcttttgttccttagtgaagaagtatggcaaataaatgttttcccagtgaatcagcacaggattcttgattttattacctttgccctaaactttccagacaaaactaattggaaattttgcctttgggatctcacttgacttctgtgtatagatgatggattaggctatgaattgacattacagatgttgtccaaacaactccagtctttaggaatgttttatcagttctgagggagccgtctagagtggaagaatgtctgtctgtctgttttgtctgcttgccttccttaaaaatactcatacacacacaacacacattctgcactcttaatgtgatgttgtagtcttcatctcggttgataagtatacttgcctgaattaggctaataattaatatgaacattttaggtctttcgtttttaaaagatatctctgtaagacaggaccctaaagtaaacccaacagtattctgtctctggtcttttggatggtatactgtttttcttgatgaaacatagacatgagtataaccttttcagtcctttaaatgctacaaagtgtgtgaagaaggtacaattatagtaaatcatgagccgctgtagtataaatccagaaaacttgaaaagttcaaaatccagaaaatgttttacttaatattaagcagcagtgtacatactgatttatcattttactaatatgattttttcacaaattcaagtatgaatatattcacccctttcttactatgaccctaattagtgtttgtggcacaaggatttctttctctgggcttaacatagatactatattattatcagaaaactacttaaaactcttcactaccagattaggatggagatagatagatagatagatagatagatagatagatagatagatagatagatagatgtggttttgtataattttacccttctaggacaattttttttgaattctaagtttctcttaattagaagaactagtagtgtattgttattcttaaagctagagtaaaaattgattacatagaattagtttggtttttttctaatcactaaaacttttctaatcactaaaactcatgaaagaatgtaaatcatggaaatgtaactttttaaacttatgtaaaaagagtttttaaaagataaaatatctttttccacagacaagtacctacatctgctcttactagaaatcttaccctttcatctaagtatagtttgctctcacccagacatactcctgcctggccaagcactacatcttttatcctggacaaggcaaaattattccattaccaatctttggaaaatataatgtaatacagctcatgagactagatatatggaactctgaaatgaagcaaatccagatgtccaatatgttgcaaataaccaagctatcttgttgatttaacttcgtctagaataactatactgagttaccaaaaataaaacagacctttatttgccactttttttttttttttttttttttttaagacagggtctcattctgtcacagtggcgtgatctcagctcacagcaaccttgaactcccaggctcaagcaatccttccacttcactgggactacaggtgcacaccaccatacccagctaattttttgttttgttttgagagagagggtctctccatgttacccaggctggtctcaaaactcctgggctccagtgagtgtcccgcctc

SEQ ID NO: 65246 - DNA, 5702 bp, Homo sapiens
atgatttacaaattcttatagtaatcagtttagcaaagattcaaagtttatctgactttgttgctgggatctgctcgtagataacatgtatttggtaaaacctccaatttgatagaagcaataaaatacggaaaagttgaatcaactgtagctaaaacggcaaattaagtaaaatcaatccgtaactatgagtggaaatttaaattttaagattgcatgagaatgagttagaaaatatgggtttttatttttgaaggtaaagccctgtagtagagtaagtttatcagccaaaaaagtaaaaacaaacaaacaaaaaaaaccacttggctttcattgctttgccatgtgctttccaactaggttaaatggtgtatgtgattttactaagaaattgttgtggccgggcgcgatggctcacacctgtaatcccaacacgcccaaggcaggcggatcacgaggtcaggacatcgagaccatcctggctgacatggtgaaaccccgtctccactaaaaaatacaaaaagttagccgggcgtggtggcgggcgcctctagtcccagctactccggaggctgaggcaggagaatggcatgaacctgggaggtggagctagcagtgagtcaagatcgcgccactgcaatccagcctgggcgacagagcgagactctgtctcaaaaaaacaaaaagaaattgttgttatgaaacaattttatttacttaaattccattcttgactaatggttggatgtcgtactatagatgttttaagggggaaaaaagatgattaaagcatttatttgtattctgatttattatgatacctgctgtatttttgtgagtacaatgttgagattaggcagtatttttccactaagctgacttccttttgctcttggctttctatcgtgtttccactagatgtctgtgagaggtacacatgaatgaatgtagcttcctctgaccttgagcaattttagcatcattaataaaagttaggtctagatagctgtttatgtgctttgtggactgttttatgcaaggtttaattattctctttatgatcttcttttccttctttgttcctgtgttctgttaatgctatcaccatcctaacaatcgctttgggtcaaaatctgagtcatctgactccctcctttcctcccatccccagtaattaattctttaaggcctgttgattctatctccatagtatcttacatgccctctcttctcccttcccgctactgtttcaggcctttatcaacccttacctaaatattgccagcagcttgctagtaggtctactctttactagttttttatcccaatcttttcccacacaaagtaacaaaaataattttctgaaaaatatctctacttatgaaacattgctgctcaaaaatctgtgatgcctcccactgtgtatagagtgaaatctaaactatttaacccagttttcttcattacttggccccaacctacgactacttctgatttccctttaacagttttttatcctctgtattgatggttttcaagttgaactttaaaaaactgccagaatacccatcaaaaagagtgtgtgtgtgtgtgtgtgtgtgtgtgtgtgtgtgtgtgtgtgagagagagagagagattggagggaggaagggagagggagagagatttcttttaattaaagaactctgaagtttttaagtttaaaaattactagcctgatcatttggaataatttaactttttcctccaccactatgcggtattgttctttttcgtaactttgcctagtgtgtcatttcttcccatctgcatgtctactttttcagttttcttacctttcaatttatgtgctgctggcttctttgtgaactattttatgattcccttcctacccctacctcacccccttcactcctctcaaattgtctctgaattcctatctcagcccagctatgtctttcttgtgtcacttatcacattctaccttcttttaaaactatttatagacttttcttatctctccaggagtctaaactccttaagaagggggcttaaaaatgtttgtattttcaacaatgcctgcctactgttacacatactactcatgcagtggatactttgaatagatgatgaaataacagtaagaaaaagtgtagcattacatgaaacatgtccattaatattcagtcttattttgctgtaaaatgtaattgaacaacagtaattttacaaagaaaggaagatttaactgtattgcatctttgagtttaatagtcatctgagagcaattgtcatctgaagataatataaaagacaccaagttaaatgacttgcaaatttttttactttttaaaatttttttatttttttagacttgcaaattttaattcacattgagtaaaacaacttttgtaaaattatatactttagaaacaaatgaagattcttgtgacttgtttattctataagctgtataaccaaaaagaaaaattaaagatactttaggaataaaataatttgaaaaataaaagaacttatttgcatgatgtatcctgaaaaattagggcagccagtattactgaaataatggaggagtccgggagtggttgtggtatttttgtatttaaagcttacacaatagagtagaaacgttgtggtacatatttacttacaagaatatgttttgaataagtttactttcctaaatgtcatctgttttaatgacctgctacttggattctttctcacagtgttaggttgctgactatgtgaaatttcctacttcttattattgctatcagaataggaaatttaaaattaaatcagaaatgtaaaagtcttaaaacttcaccttttcaaagaatatcggggcctggcatgatgactcatgcctgtaatcccagcactttgggaggccaaggcaggtggatcatttgaggtcaggggctaaagaccagcctgaccaacatggtgaaaccttgtaaaaatacaaaattttttgtactaaaaatacaaaaattagctgggcatgatggcaggcatgtgtaatcccagctacttgggaggctgaggaacgagaatcgcttgaacccgagaggcagaggttgcagtgagctgagatcacaccactgcactccagcctaggtgacagagtgagattccatctcaaaaaaaaaaaaaaaaaagataaaaaagaatatcagtttttttcctctattttcatatcaattagcttgtctttctgttgagtatcgttcatgagtctgccgaccattttaggttgaatatttcctcaaaggctattttatagtttctgaatttaatctttttttaagggaacatttttaggttctatttaggactatagtaattaatgtaattaataatcaataattgctacctactctgtatgttgaagctaaatccccaaattaagttttaatactagtatcttttaccttactaatttctattaaatttaaggctgaaaaaaatcttattttttagcttaataggatctttgtcctattcagaagttttgagttatttacattattttactagtgaaaatataaaaccaaaaaacagtttattagttgtaatggtagttctcattcttatggccaatgccttttttttaatgcagtaaaacaaaatagacatttatctagcgaacatcccttttcaaactatagggtcaaagtgaaggattcttttgataatgatagaatatgtgtttgatcatttgagtttaaagactatgggaaaggaattgataagattatttaaatactcacgaaagtgctttggcattccactaatgctattctcttttaagcacattttcctatgaagtgtgtgcggttgcagttgcctacaccatgtcaatgcctgctggtttttcctgctgtgaagtttttcctttacatacacagattcatgaaagagtttatggtgtagatgatctgaaactaaacaggacacattttcatacactttagtaccatttgaagactctgggtgtcagttgttgctgggacctgtttttgactctgatgaacctttactggttgtggtttgtctggccatcacatgacttctctgaaaattccccctccccttcatttccagtaaactgtttgagcaggagtgagtcacagtgaaaccagcttccctgtaaccacagggcttgttaaagaatttgtcagcgtggactctagagggtttgcattaagctttgcagtaactgttatggtttgtgttgcgtcaggagttccacagaaaagcttcctgcttgcaggatctcttgcttgtttgcaaagagttaaactgatcaactttaccatagtgaacatgagagacacatgttaaacacacttctttatcattaaaggcgttgtcaaaactaccaagaattagtgtagtttctcttttcataatcaaccaaccacacccaataatgtttagtttttgaaaaggcgggcctggtagatagtctttcacagttggctcatgattttatcacaaagtaccatcaaaattaagcaattttaagtggtcttgatggattctgttacaggatattttgactattcgcacagttaggtgtcggtaccaaaggtcacttacttgcactttgttcatcaagaaaaggtagcacttagagtaattctggagttgtgatgtctaagcacacttagcatgatttatagtggaattcttcgtgcccccttttacttgctttctctagaagcatttactttattttgaactcttttgccacctcactcgcagactttaatctttctcccttttaatttcttctatttctttaactcattcccatattatcaacaaggaaagatagttgcaatgtgatgcaagctgttaaatgaatggccagtgggaaacttgtcttctcaacatacattcccaagtgcatttctttttacatgcgcatttctgtatttagccttgtcacctttagctagacttacttatctaaaaaataaatttaggctgggcacaatggctcacgactgtaatcccagcattttgggaggctgaggcgggtggatcacctgaggtcaggagtttgagaccagcttggccaacatggtgaaaccccatctctactaaaaatacaaaaattagtggggcatggtggcaggtgcctgtaatcctgctactcaggaggctgaggcaagagaattgcttgaaccagggaggcagaggatgcagtgagccgagatcgtgccactacactccagcctgggtgacagagtgaactttgtctcaaaaataattaattaattagttaattaattaatttagtgaaaacttttaaactcgacctcctaaaaatttcttttattcggcttacacttttgtaacaaaataagaaaaacattctaaaaaatgtggaagctagttattcctcacaggaaaaaatatacaataatgaagtttgaaattgtttatgttttagccatgctgtcagtcatcaaactaaatttaaaaaaattatttgttttgatgacaaagcaattatcattgaaacaagatgattttcaaatgaaaatacgaggttaatgcagtccagtcattagcagggaaaaaaagaataaatatttaaggtttttcttgttaggttgctttgcacattggagtagaaaatagttttgggcttggcgcgttggctc

SEQ ID NO: 65247 - DNA, 4584 bp, Homo sapiens
tgggattacaggcatgagccgctgtgctggcctgatttttaagttttagaactcagtgagtcttcaaaccagtgcagatctgtcactataaaaagctgccaccaggcccactcacacctgtaatcttagaactttgggaggctgaggcgggattgcttgagcccagaagtttgagaccagcctggacaacatggtgagaccccatctcttgaaaaaaatttaaaaattagctactgtggccccagctactcggaaggttgaggcaggaagattgcttgagcccgggaggtcaaggctgcagtgagtcgtgtttgtgccattgcactcttgagtgggcaacagagcaagatcctgttcccaaaaaaaagctgccactggggccaggtgcagtgccactcgcctgtagttccagctacttgggaggctgaggcaagagacacaacctctttaaaaaaaaaaaaaaaagctgccaccagtctgtcattttctataaatgcaatcagttgatttttaacagagttttgttttggcaaccaatcagttttacctagtccttatagaccactcctttagctctggccacattcatcagcacaaatgcctgcttttctcctgctgctcaagtctgccttctgaaatgaggttttgttctctagagcttctctttaatgttagcttatttcaaagagtagctgctaatgataaggaagtctaacctccaatctgattcttacagaaaataatgctaaatctccaaaagctagggcaattgcagattattttgtgataaaatatgctgtaaggcagtagaaacaatgtacctgataaaatacacctggagaaagcatggtcttccttctacacagccagaaagaaacccatggtgtcatgtgttcataataccactctgcgtacaatggactaacttaagtacaaaagaagttttaatcatttgaaagggcacagatgtgaatgaaattcaagatgttttaatcccagatcctggggtcaaatcacaacgaattttagaaggtgccagggactgtcagtccaaacttgtatatatgagaaagccctagattttctagtatagtgtgtgattttcatcctgaatttattttatgttggggtgccattccaagatcctggatgtaaagaaacatgattagggggctaccacatttcagatccaaagcaagtagaatacatcagttaccagttttttcttatagtatcagcttcaaagattcatatactgagccaggcacagaggcttatgcctgtaatcccagcattttgggaggtcaaggcaggcggatcacttaaggtcaggagtttgagaccagcctgaccaacatggtgaaaccctgtctctactaaaaatacaaaaactagcagggtgtagtggtgcctacctgtaatcccagctactcagggggttgaggcaggagaatcgcttgaagccgggaggtgaaggttgcagtgagccgagattgcgccactgcactccatcgtgggtgatagagccagactccgtctccaaaaacaaaacaaaacaaaacaaaaagattcatgtgttctattcagttaaatggtaaagataataacactttcattccagtcacacaggataactagatccttttttactaggttaaatatgtgtttattttcagttagcacctgttcatttacttattctggattaataaagggctgaaaggctgtagatattaatgagtcagcatgatggcctttggcttcttcagaaagattgcatgataaactcccccacccttttccgagcagtctaccttactaggaaaggcagtttcatgtggagggcaatctgtcatttttgaataagggcaagagtctgaggtccattctgagtcactatgaatagagctctagtattggttggtccccagggaaactggtggttaaatactgtgagaatctttatcagacaggaaatgacaactcattaaaatactagccgttaagcctgtttagatcactgcctagggggtaggaaggaaaatttaactctataatgtttgactaaaatgtgcacatttctgaagatggagaattatttacaagactgttaccgagaaagggaattgctaggctgtcttgttgctgatcttctcccacaccctcttttcctcttttgtacatataacagatcagcttgtaatgggagtaggatagggaagggctttaatttcattcctgaaagtgtatcctactattgccttaaatgtaaaattcagtctcttcagcagaagaggcggttgttggcttcagttagaacaggatcattttctatataggagtctactcctgtgctcctgggccaaatctcaattgatagaactctctggggtcagaggataaatttgatgtattgatttacatacagtggtcctcattcaatcaagaaaattctaaagatcctgatattcatttagaacataattaaattttataactctgggcacaggttttcagtctcctgaagttgggctatccagatttggtgggggcggggacaggggctagctctgttgcccaggctggagcaacatctgcctcccaggcccaagtgatcctcccacctcctgtcgcatgccagcatgctcagccaatttttaaattttttgtagagaggaggtctcactatattgcccaggctggtcttgaactcataggctcaagtgatcctcccaccttggcctcccaaagtgctgggattacagtgagccaccaagctgagcactcttttctttttataagtaccctgacctgaatcttctcctgaaaaattttttttttcatttataagctttcagggatctgacttatgacaccctgagattctttagactttgtgattaatcatcagagggaatactaacccagcacaaacaatgaaataaaggtaaaaaactgttgtgcccagacttttttctaagacaaaaggcttattactctttgtaaagaggctatcgcctccttactagaatttatgtcagaatgtttttcaggagggtaaatataacctatatgctcacattaatgctgagatcctcaaaaaagtatttgagaaaggagcagagcctatattaaataaaaaatttactttattaatgctggtaaaatattcttaggcttagagacttcaactgcttagactttaagtatacactctgtaaatagggctaaacaaggtgaatcaatcttttttgttggtgttttaagaaacaggttctccctctgtagcccaggctggagtgtagtggtgtgattttagatcactacagcctcaacctcctaggagggctcaagcagtcctccccactcagcctcttgagtaactaggactacaggtgtgcaccacacctggttaattttctgtgtgggtgtagagacaggagtcttactgtgttgcccaagctgatcttgaactcttagactcaagcagtcctcccacctcagcctcccaaagtgctcggattactggcatgagccaccctatcctgcctggccagatttcagatcttacttatttattatctatctatctaatctattgatttattgagagagagacagggtcttgctctttcaccaagggtggagtgcagtggttcaatcctagcttactttaaccttgaactcctaggctcacaggatcctcccatctcagcctcttgaatagctaggactacaggcacttgccatcacacccagctacttttttaaacttttgtagagacagggttctcactatgttgcccaggctgatctcaaactcttggcctcaagtcctcctgcctcagtctcccaaagtgctgggattacaagcatgacccatcacacccagcctaaaatacagatttcttgtcacataagtgatttccagaagcagagtaacatatatattaaaaaccatagaaaaataatagattttgtttgcaatttggcaagggctcttggcagaattttgcccaaatgttattttgaatggattttttttttttttttttttacaatatttaagcttgccaagaagtttgtcttaggtctgtttaacagattctaggtatgtaagcatgggaaaatattgttcccatgaaaccaattttgagctctgagtaggtttcaagtctgtgtttttttctttaaataaaaaaaaaaattttatttgcattcctgagttttttttttaacagaagttaacaataacaaaagtgtaaaaattgccactagcatcatttgttggaaatgtgtttgtttgtttcggagacaggatctcactattttacccaggctggaatgcagtggctattcacaggcgtgattatagctcactaagcctccatcccaactcctgggctcaagagagcctcctgctcagcctccagattagctgggactacaggcatgcgccaccatgcctggtggaaaaattttttttaatcttacatttgctgttatgtttgtgccaggaataaaaatatgaagatactactacccactaagatttttctacccactgtgttcaaggttcacagc

SEQ ID NO: 65248 - DNA, 600 bp, Homo sapiens
aggcatgaaccaccatgcccggccgaaatggtaattctttgaatttaatcagagcttaagggcaaattggaggacttccccaacttaactatgggatgagattagcatctttagcaaggtgcacagggttgcaagaatgtaatggcttagggagaatggcatttagggtatttcctaaaccaactatagaaagcctttgaactgtgttgcaaattattactcccaccgtgtgtgcactttaaattaatcttaagtgtcagaatggactcttgcttctggtctgctgcttgagaataacttgacacatgagatttagagctggcattattgtttgccttaaatgcatgttaagagtgagagctgtaatttctatttttatctagtccgttactaaaatagctttagtgataattaagcaaactatagtataagagtactttgttgaagctgaggcatcagtagcctaagtcattgtagaggtagagaaatgaaaaacagaagtaactaaaattttgatgacagtttgggaaaccaaggtgggaggatcttttgaggccaggaatttgagacccacctgggcaacatagtgagactccatct

SEQ ID NO: 65249 - DNA, 6210 bp, Homo sapiens
tcggcctcccaaagtgctgggattacaggcatgagccactgctcccggccacataaatttgcagttttcaaagtcaacctttttgtgcatatatttatatacacaaaaatacatatatttaattatatatatttaatatattaaatatttaaaatattttatatatttgttatattcatgtcatttatttctagtctaaatggatgagctatttgcattcccacctgtaatatataaggaaagattactagtctgcctccctaatataagtctgcttaaaagtcagggccaggagcggtggctcagtgagaggctagtctgaaggtaatgagttttctcgattgttcacagcatcttttatgtctgtcacaggtcttctagtctgatcagtgcagtattcacatttattatatatgtctgttcaggccttttgtacctccttcagtattcattaaagaatcttttttttatttttttatttttatttttatttatttatttatttttttgaggcagggtctctgtcaccgaggctggagtacagtgcagccctgagcttcctgggctctcactgtagcctcctgagtagcagggactacaggcacatgccaccattctcagctcatttttgtattttttgtagagacagggtttcaccatgtttcccaggatggtattgaactcctgggctcaagccatcctcccatcttggcctcccaaagtgctgggattacaagcgtgagccaccacacatggcctagaggacctttttaacaacttcacccctcactgatctctcttttctccctccaattccttcggtatatatcttctgtaccaaaaactttaatattgaattgtaaattattttgttcacagatcagttcgtgtgtgtgtgtgcgcacacatgtgtgcgcatctgcctatgttttgaatccaaatccccataaatgattttaagttccttgtgggcagtttggttttttttttttttggcttttttcccagcaaaaggaatcaattaagtatttggtgactgatagataaaaaggattaaagaaaagaatcagccagaagttagggatatgttagcatctgataaaatataatagcaaaaactcttctattcctgctttttgttataaaaagcagcaaggaattgttctagaaaagaagtgaaggccagtcgcggtggctcacacctgtaatcccagcactttgggaggccgaggaagggggatcacgaggtcaggagttcaagaccagcctggcaaagatggtgaaaccccatctctactaaaaatacaaaaaaaaatagccaggcatggtgacaagcgcctgtaatcccagctacttgggaggctgaggcaggagaatcacttgaaccctggaggtagaggttgcagtgagccgagatcaggccattgcactccagcctgggggacagagtgagactctgtctcaaaaaaaaaaaagtgaagtgaagtgaatttgagtcagtgtacttaataggacaagcattaggcagtgttgcaagtacatatcggaatctctttggctggctctaagaaagagtttgaacttatttacctccttagccctatgtaacaggtaagaaactaaaaggtacagaaaatagagatgtttgatttttctaagttgccccaagctaccgtttttaaaaacgcctgcaagcatgtctaaaacaggagcctgttagctacagttgccaaaccggtttaacagcactgcctccatgtattctgggtaagaaggagctccgagtacataaatttatcaaagatcactatcccaatcatctcagaacaagctgttactaatgtactggagtttctgtgcaaactgtctaccataaaccatgaaaggattcaaagttcatagttccttctttgttcctttgttaatcactgacttctgactagtgggaggtgcctcccaagtttgctaatgcattctttttggataaggatgacgcacagattgtcctaataaggacttagattgagaaagaccgccccctctgagaagaggggacaagtcagagagagggcgggcagtttcttttttaactagggatgacacaagcataagtcatttccttattaattggttcaaaccagttcttacaggaactagtggtgataaatgtgggacttctgagaagtcattcattttattctttgtgccataccagagtacagtatcagctgagctgaccttactctgaggactaactcttttgctggaagcggtttctgatttacagctcttggtttctcccagacatgttggtgggagagattttggtttttaaggggttgttagatggagtaaattttctttttttttttttttttttttaactaaaaaggggtcacagaatttcagcagttctctgatttttatattttattcctcttcctatccaatccctgccttttgagtccaggtggtaagtacattttctttaacgtttttcctgcttttcttcccaaatgtgtctttttctttgggctactgtaccctgcttccagtgctgtccccggcataggtccatctctgcagaagccatttcaggagtacctggaggctcaacggcagaagcttcaccacaaaagcgaaatgggcacaccacaggtaagactttaatccggtttcttctcccctctgggaagtttcgggctgaaattacattcacagctctcactcacatttttaggcaaataagtgaagttggtttgccagtgttccttgacagaagttgagcgtctgtgtatgctctactgggaaatttgtctttgtcttagactagaaagtgtaacttctgtacatcttctcctaaaaacaagggtagagccaatggaaagtaatggttctgttacatagaatgagttgttgccttgatcttaaatgatgtattggtagatatacttcccaagtggattaaaaagttaaaacttacagcataacaaagtattagacttactgaggtgacttgaatatctccttttgattttcactctatttttcttttcacccatgggaaaatgataattttttaataaaccaaggctcttaccatagctgaactttaaaacttagactgtcttttctgtaaacgattctgaggcaaagggaaatgactagaagaggatgagtaaacaataacctgaaatgggaaactcgagggaagcacaggttttttttgttttgttttgtttggttcgttttttgttctttggggtttttttgagacagaatttcgctctcgttgcccaagttggagtgcaatggcgcgatcttggctcactgcaacctccgcctcccgggttcaagcgattctcctgcctcagcctcccaagtagctgtgattccaggcacgtgccaccacaccagctaattttttgtattttaatagaaacagggtttcaccgtgttagccaggctggtctcaaactgacctcagatgatccgcccgccttggcctcccaaagtgctgggattacagatgtgagccaccgcgcccggccagagcactgttttttttaatggccttgcactcttcttatggacctttgctgccctcagttgaccaaacatgacatcagaaacagatacatttgtgtgttttaaaaacagctcctaatactggaacaaaaatatttaactgtcttgacaatactcatgagtatctgcatggcgacttcagagttgagtttaatcaaagagtttattcttaggtcctagtagaagagctaacctcacactcatcccattctaaactatgtgattcaacactgattttacatccaacaaagtgaaatcttgatagttgggtgtaaaaaggagagtaatggagatttcagagtagttggggttgcttacttttcatttttaattctttaggttttgtaagttacacacttcaagcattatagatgatcctctttttactactgaactaatgaagcctttttcattgcattgttctgcatttatttctacagggagaaaactggttgtcctggatgtttgaaaagttggtcgttgtcatggtgtgttacttcatcctatctatcattaactccatggcacaaagttatgccaaacgaatccagcagcggttgaactcagaggagaaaactaaataagtagagaaagttttaaactgcagaaattggagtggatgggttctgccttaaattgggaggactccaagccgggaaggaaaattcccttttccaacctgtatcaatttttacaacttttttcctgaaagcagtttagtccatactttgcactgacatactttttccttctgtgctaaggtaaggtatccaccctcgatgcaatccaccttgtgttttcttagggtggaatgtgatgttcagcagcaaacttgcaacagactggccttctgtttgttactttcaaaaggcccacatgatacaattagagaattcccaccgcacaaaaaaagttcctaagtatgttaaatatgtcaagctttttaggcttgtcacaaatgattgctttgttttcctaagtcatcaaaatgtatataaattatctagattggataacagtcttgcatgtttatcatgttacaatttaatattccatcctgcccaacccttcctctcccatcctcaaaaaagggccattttatgatgcattgcacaccctctggggaaattgatctttaaattttgagacagtataaggaaaatctggttggtgtcttacaagtgagctgacaccattttttattctgtgtatttagaatgaagtcttgaaaaaaactttataaagacatctttaatcattccaaaattgtgtccgttttcttgagcgttttgattttttacttttagcttataccagctgaatggcagccttgcctaatccacctacaacaagaatttcttaagctttcttttatttgcatgagagagccactaccaaggcatgttttgttatgctgaaactgggctgctgcatactgctaaatggcacctctgggattggcctacctggggatttcttggtttgtgaaaacaggagaggagaaatatctcatacaagtgaaaggatactggagagagaaattacccatttctaaaaaaaaaccacactctgtcgtatctgtgttaatgttttctagcatgtactctggtttcaacagacacaaatttatatgttaacccagttttcttgccgttctgtaagtgttttattcttagtgtgatttttttccattgggatgtttttgattgaacttgttcattttgttttgcttgggaggaaaataaacaattttacttttttcctttaggagcattatgagcattatgtcagaatagaatagaattggggttcgatcttaacaggccagaaatgcctgggtttttttggtttgtttttgtttttgtttttttatcaaatcctgcctgactgtctgcttgttttgcctaccatcgtgacatctccatggctgtaccaccttgtcgggtagcttatcagactgatgttgactgttgaatctcatggcaacaccagtcgatgggctgtctgacattttggtatctttcatctgaccatccatatccaatgttctcatttaaacattacccagcatcattgtttataatcagaaactctggtccttctgtctggtggcacttagagtcttttgtgccataatgcagcagtatggagggaggattttatggagaaatggggatagtcttcatgaccacaaataaataaaggaaaactaagctgcattgtgggttttgaaaaggttattatacttcttaacaattctttttttcagggacttttctagctgtatgactgttacttgaccttctttgaaaagcattcccaaaatgctctattttagatagattaacattaaccaacataattttttttagatcgagtcagcataaatttctaagtcagcctctagtcgtggttcatctctttcacctgcattttatttggtgtttgtctgaagaaaggaaagaggaaagcaaatacgaattgtactatttgtaccaaatctttgggattcattggcaaataatttcagtgtggtgtattattaaatagaaaaaaaaaattttgtttcctaggttgaaggtctaattgatacgtttgacttatgatgaccatttatgcact

SEQ ID NO: 65250 - DNA, 8061 bp, Homo sapiens
tcctcttttaagtgttcagctgtggcatgctcagaggttcctgctggattccagctggagcggtgtgatacccttctttttcagctgttcgtgccttcctttcttgtatccaccaaagtggagacaaatacatgatctcaaagatacacagtacctacttaattccagctgatgggagaccaaagaatttgcaagtggatggtttggtatcactgtaaataaaaagagggcctgggaattcttgcgattccatctctactttgtataagtctcattttgtgccttacacatctgcagtatttatcatgttccaacttggtgactgtcaggcagtgcaatacatcagcagtttatcaccgaagagctgaggaatacctcccttaaaacagacaatgtcggccgggcgcggtggctcacacctgtaatcccagcactttgggaggccaaggcgggcagatcacctgaggtcaggagtttgagaccagcctggccaacatggcgaaaccccatctctactaaaaatataaaaaattagccgggcgtggtggtgcacgcctgtaatcccagctattcaggaggctgaggcaggagaatcccttgaacgcaggaagcagagtttgcagtgagccgagatggcgccactgcactccagcctgggtgacagagcaagacaaaaaaaataacagatgatgtcatatgaaaatgtgcaatgtccagttttcccatagttttctgtattctctgtgtgcataatctggagtatgagtctgggaagaaaaaggtttttagtttcatttggatagtggccacctctccattccctacgaatgctagaatgaagttactttttttttttttttttttttttttgagacagagtcttgctccgtcgcccaggctagagtgcaatggtacaatctcggctcactgccacttccgcctcccaggttcaagcgattgtcctgcctcagcctctggagtagttgggattccaggcgcccaccaccacaccaggctagtttttgtatttttagtagagacggggtttggccatgttggtcaggctggtctcgaactcctgacctgaggtgatccacctgcctcggtctcccaaagttctgggttcacagacgtgagccaccatgcccacgtagaatgaagtttcttaaatacactagttaattattgaaacatatgcagtattgagtgctcctacacaaacacgctcagcctctgcccccagtgtgctctgtgctatccacagccttagtagaacatgaggctttttgtcatttcaccagtcattcaataatgactcatttgagtatggatcatgcactagctaaataaccagttgcgctcatgtaccctgaagcaaattgtttagcctgacccatgtgtaagaagatcacagagattcccaacctttcagtgtcaaaaagcctttccatatatattactttaaaacccattttcccccatgtgtaatagtctatgttaatgacggttcgggtttcttctacattgtttgtgacctgagaaagtttaaaagagcctcagtttctttcatctataaaaataaaagagatagaaggacagtttacctaaggaataaatctggtaacatgtaaagtactgaaataggctgggtgcagtggctcatgcttataatcctaatactttgggaggccaaggcaggaggatcccttttaggccaagagttcaataaatagggccgggcatggtggctcacgcctgtaatcccagcactttgggaggccaaggtgggcagatcacctgagttcgagaccagcctaaccaacatggcgaaatcacatctctactaaaaatacaaaaatgtagcaggcacggtggcacatgcctgtaatcccagctactcgggaggctgaggcaggaatcgcttgaacccaggaggcagaggttgcagtgagccgagatcttgccattgcactccagcctgggcaacaagagtgaaactccgtctcaaaacaaacaaacaaaaaagagttcagtaaaagtacagcaataaaagttatccacctccaccaccccagcttttttttttttttttttttttttttgagagtgaggttttactgtgtcacccaggctggagtgtggtggcacagtcatggctctttacagccttgacctcccaggctcaagaaattctcctacctcagcctccctggcaaggaccagcatgaaccaccatacctgggtaattttttaattttttgtaaagacagggtctcaatattttgcccaggccagtcttgaattcccaggctcgagcgatcctgccgtggcctcccaaagtgctgggatgacaggtgtgagccaccatgctgggcattcccaatgaaagactgaggccaggcacagtggctcacgcctgtcatcccagccttttgggaggccaagacaggatcacttgaggtcaggagttcaagaccagcctggccagcatggtgaaaccctatctctactaaaaatacaaaaattagccaggcgtggtggcgtatgcctgtaatctcagctactcgggaaacaggcaggagagtcacttgaacccggaaggcagacgttgcagtgacctgagatcgtgccactgcactccagcctgggcaacagagcaagacaccatctcgcaaaaaaaaaaaaaaaaaaaaaaaaaaagtgagcatctgatacacatgcaagaatttcacaacattgcattcactcctccagaaacaaagatatattttaaaatgctttcttagcatatgtgctctggttttctagcagatactctgtcaaacttttgataagtgaaaaatttaccgaagaatttaaaaccaaaaacagttttttaactttcccacctgaaaatattgaccattttctaatttattttcattataaagaatattggttatcatggttgctcatgcctgtaattctagcactttggtaggccaaggcaggcaaatcactcctgagcccaggagttcgagaccagcctggacaacataatgagacctccctacaaaatatttaaaagttagccaagtgtgacagtatgtgcctatagtcccaggctgaggtggatcacctcattagtgagccgtgattgtgtcactgcactccagcctgagtgacacagaccctgcctcaaaaaatatatatataaatactaaaacatctggaaggaaagaggagaaaagggagtatcagcttttaatacttgttacaaggtcagtctagaaaatacagtgagatttgctgggtaaataggttttgaaccatgaaaaaattgatggcatgcaagatcttcctcaatagacctaagagtctcatttctattaaaaaatacaaacaactgcttcattttattcataaataattttttgaggtgctacaaaaaattaaaactaagcaggagtttaaagtttttgaaaagccaagtaacattttatctctaacatttattgaatcctctccagtatttacacaacgtaaatgagatactacacacaaaacccttgtgtctgaaggtaaatttatttattctcaaagacaacaagaagagaaagcacatcatgtattttaaactttagaagcaactgagtcattagtgtctggtggacaggagctagggatcctatcccttcccaacaaggccaagagttcacctgaggtaatgcatttgccttgggggcgaggccttgaattgcagcaaataacctgtgtgtatttgcatatttaaccagtactcttaagaaggattatacaaaaacctgttccagacagctgcttactcattgcctttaaaattgcgtggtgctgggattggcaggtgccaactgtttgctcattctctttgacccactagccttgcagtttgctgtgtgggtgttgatactcctaaattaaagcagggaaggggtggttttagatggcttttaacacctgctctccacccaagcaccctggattcatttgatatctggattctaattctgtagtcaggagactggcccaaactgtggcccagagagaagtgagtcagttgcaagtggctagctgactctatgggaacagaaataaaatgcagcttagagagtttgtcagccaaatccacaaatgtgtggctttttgaaacattggacatctgttcctcttaatttaaaataaactttttttttttttttttttaagcacaaagttgcttggctccttgtttctttgtgtcagcagcagttgctgctctaatttaggaaccctaggatctgatttaggacatttggaatctttaaggcacattcgatctagaaagtggaactgaattgctttgggaaggcaagaggatgattttacagtatagggtttgtgtggaaatccccttcagcagtaatcaacccaggtgtccaacctgtttgttaaccatttccaaatgactcagaggacctagagggagggcttgaacacactccagcactgtttctacaatttagcctttatttgcattggaaaccacattcctgaattcttgagggggcaggctctggcttattctgggcaactgacttcaagtgggacccctgagctacctatgtaagcaaagagtcagccatctctggagagttaccagggaggaggatctttctgtgaacttgctttgatgacctccacccaaagccctttgaggaacagttttgtttattcaaggagcccttggcaggtcactcctcccctaccacaaatctaatccaaatgcgacattttcctttgaggccatctatcccttttgggggacaaaacacatcagcttttcccttcagaccacttttgactgaagcagtgatcaacattgcttaattgtgttccagtctgtttccagcggggaaaaaatgctttaggggagtgaggcagttagggatttgaaaacagggatggtgccgcctgaaggtggggaatgacttagatcactgtcttcctttggctcctcaccatgttgtgtggaggaaacgaaaagcagctcaagttcactcctcttggcagtagtgcagaagcctggcttgccacggccctggagaaccatgtttttcccaacttttttttttttcttttgagacggagtttcactcttgttgccgaggctggagtgcagtggcgcaatctcggctcactgcagcctccgccttccaggttcaaagcgattctcctgcctcagcctctcaagtagctgggattacaggtgcatgccaccacactcggctaattttttgtatttttttcagtagatacggggtttcatcatgttggccaggctggtctcgaactcctaacctcaggtgatccacccgcctcggcctcccaaagtgctgggattacaagcatgaaccaccatgcccagccttttttttttttttttttttttttaatacagaacacaaatttgagtgtcattcttgtgcaggggccatgctaatcttctgtatattgttccaattttggtgtatgtgctgccaaagcaagcacccagcttcttttcattagttaagaagatgaaggccaagactaaggcagggaggcctttctctgcctttcactctttagtgcacctcacagtcagttgcacttgagtaaggactgctaaacctctctgagagctgccagatgttcctgcctagcctcaggttgttggttcttcagacacctcttcattctgcccattgcaccagccctttcccatctccatgttccctccatggtaatttctttgtacacaacaaccacacggagcaccagcaatcaagattagctcccgggaactctggcgtgccctgtaccaggaagcacagtggattactacaacttttgataatgattgtttgctttgtaccaggcattattttcagggctgtttcacatgtgttgtacttaacaaccccatgaggaaattaaggcagggtggttcagtaatttgtcaagggaaacaaggaagtagagcaggcagcagaggcgttctggctctgaactactctgttctgtagaaatcagtgcaaaagtccaagcttcagcatacttgtttcatcttgtgatcacaggtagttttttttgttttttttttgttgttgttgttgttgtttatttgtttgttttgagatggagtctcgctgtcgcccaggctggagtgcagtggggcgatctccgctcactgcaggctccgcctcccgggttcaagccattctcctgcctcagcctcccgagtagctgggactacaggcgcccgccacctcgcccagctaattttttgtatttttagtagagacggggtttcaccgtgttagccaggatggtctcaatcgcctgacctcgtgatccgcccgcctcggcctcccaaagtgctgagattacaggtgtgagccaccgcgcccggccctgatcacaggtagttgatggagaaaggaagataacagaaaatcaaggccacaacctcaaattttgctatttaaatagataagcagactttactcttccctgtatcacagggttggaaaagcaagctccattcttagccatccatgtgggcagattcccagagtggtgtttgctataattatgatttaaaagcaaggttttttgtttgtttgttttaaggagatggggtctcccatgttacccaggccgaactccaactcctgggctcaagtcatcctcccgcctcagcctcccgagtagctgggactacaggcactcaccaccacacttgggtaaaagtaatttctatttctacagcctttttttatttttcaaagtattttaatgtcttgagtttgggttttgttttgagacagggtttcactctgttgcccaagctgaagtacagtggcgcaatcacagccacagctgactgcaacctccacctcccaggctcaagcaatcctcccgccacagccgccccactccccaccagtagctgggactacagagctgcaccaccacacccagctaatttctgtagtttttttttttagtagagacagggtttcaccacgttgaccacgctggttttaaactcctgagctcaatcaatccacctgcctcggcctcccaaagtgctggaattacaggtgtgagccactgcactcggctaggaaacccttttctgatctttccttgtcagcaatgatctcttcacacttcctttcttacggccctcacctcactctgtattatagttatctgcatatatgaataaaatccctaagaagactgcagggtcctggagggaggagatctgtatcgacaactttgtctcttcttcacagcaccttacaccagtggggatttaaaaagtgaatacagggctgggcaccgtggcttatgcctataatcctagcactttaagaggatgaggtgggaggatcacctgtcgccaggagttcaagaccagcctggcccaacatggcaaaaccctgtctctactaaaaatacaaaagttcgctgggcgtagtgatgcatgtctgtaatcccagctacttgggaggctgaggcatgaggattgcttgaacccgggaggcagaggttgcagtgagccaaggttgcaccactgcactccagcctggttgaccaggtgacaaagtgagaccctgtctcaaaaaaacaaaacaaaagtttcctgaggggagtagtatttgaattgacaaggtagagggagtgaaacgaaaggtattctaaccagaaaaaaactcagacaccaggaaagaacaaataaggggctatgtgtagggtggggagaaagacagcatcaggttttccactcgagtcctctgtagctctgccttagctcgctgtttagtttccttaaagtaccgaccaaattcacaactagtttgtctattttcttgctagtgcttgcgacactagaacataagcccggtgaaaggaaaataaatcttgggaccccaaaatcactaagccaaagaaaagtcaagctgggaactgcttagggcaaacctgccccccattctattccttaaaaagatagct

SEQ ID NO: 65251 - DNA, 3993 bp, Homo sapiens
ggcaggttgaaactctactgtaggtccagctacttggggggttgagatgggaggatcatttgaaccccgggaggcagaggttgcagtgagccgagattgcgccactgcactccagcctgggcaacagagagagacgccatctaaaaaaaaaaaaaaaagaaagaaaatggcgaggaaggacccaaagaacccctgaaaagacagcaatgcccatccccaagccaggaatataaaggaggcaagtctgaggaagacagactattctgttttgaatatgtggaggggcgataatgaccaataggatggtggggcctgtaatattctctatcttaggcttcctaactcctaaactcctagtgaatatgccgttctttacaccacactgtaacttctgtcagtgaataagctggacttcttcagagaattctccagggtaacaggtccttaagccgtgttatgtggtggtgctgttaaagagatggcactgtgactggaccttaaggccacagtaaacttttaaaattcctctccccagtatcccgctggcttaaccaacggcccctccctttgagaactgagaggatggtagttcctggagagatcatctgtctttataaggagaaaagtttggcaatgtgatttcctgtatgtttctaccggagtccaagattccagcagtgctagcctagacagcagcggctgcatcctagaacccagaggtcaggagtgctcccaagtcagtgtgagggcatcttcccaactgcctttgccaagccaaaaggcagaatcacgactttgttacaccttctggagcatgtggtcgaggcggctttccatgtggctgctttggtgctgagcctgtttacatgtttcagtaaatgagttattgcttattgaagttggctggctaggagctcggaataaacaacatataaccacaatgacaccactctccagaagtaccagagttcagagggaaagatctgcttgtatgttccactcccacgtggatgcgtagttctcaaagcctgggaggactggggtgtcactgttcccggctttctgatggaatcagacataatgagatgtcttcctggtagaaagtgtatatgaaagtactttgcacaatctcagaaggaaaagggagggcactgcttttagaaaaatgtatgagatcaaagaagttttcagatgttctgcattttcttcttcaattataaagaattcatctgagcataaaagactccctggtctctgtaagaagtaaaaacttctttcatacacaaaagttttcctactttatatacttctttttagactgtttcatttattttttgtggtatatttattagtcttccctgaagtaggcagtgttcattagaagaacatgttgagacaattaagaccccaaagttaatctttaatttctcccttcttcctgtgccacctggatgaccttggagtgtccaggagttcctacaccccatctatgtgacaatttacagaataattttttttttaagacagagtctcactctgttgcccaggctggagttcactggcacgatcttggctcactgcaacctctgcctaccccaggctcaagcaattctcatgcctccacctccagagtagctgggattacagatgcattacacttggctaatttttgtatttttagtagagacagcgtttcgctatattggccaggctggtctcaaactcctgacctcaagttatctgccaacctcagactcccgaagtgctgggactacaggcgcatgcgccaccatgcccagctaatttttgtatttttcatagagacgggtttcaccatgttggccaggctggtttcaaactccttgcctcaagtgatctgcccacctcaacctctcaaagtgctgggattacaggcatgagccaccgtgactagcccaaagatgtttcttactactacttattaccatcttctgatttaccagacattcctccactcttcaaattgtctcataatgggggctttaacgggcttcattcactgtgtgactgtagtgttgcagctttacctgtcttccagagttttagacattgatatgaatctgttcagtaaacatggagtctttaccatgagtcaggcgtatgctctgcagcaaacaatatgccaagcggtggcctcctagtggccggaggccaggtctaactcattattaccccgccctagcacagtgtccttccttgcaggtgttcagtcgatgtttgttgaattaagctcacatcctgcctctttcatactcatcgcatgagtcgagcttaagcaaaggcctttttttcatcaaaaaggaaactcccatcttttgccttttgtcatgtttcttaccatcatgttcccatgacctctcacctagtaaggacaaattctgttcaactccagtttctacaattcccagcagtttgctcctggaatgtttagaacagcctgtctcatagaaataacactgcaacccatatacctcattttaaaacaatgtactgccaggcacggtggctcatgcctgtaatcccagcgctttgggaggccgaggcaggtggattacctgaggttgggagtttgagaccagcctgaccaacatggagaaaccccgtctctactaaaaatacaaaattagctgggcgtggtggcgcatgcctgtaatcccagctacttaggaggctgaggcgggagaatcttttgaacctaggaggcagaggttgcagtgagcctagactgcaccattgcactccagtctggacaacaagagcaaaactgtctcaaaaatgacaataacaataaacaatttacttgctatgtttcaaaaagtataaaaaagggctggacacagtggctcacgcctgtcatcccagcagtttaggaggctgaggtgggaagatcacttgagcccaggaatttgagaccagcccggacaatataatgaaacctcgtctctacaaaatatttaaaaattagccaagcatggtggcgcctgctttcccagctactcaggaggctgaggtgggaggattgcttgagctcaggaggtggaggttgcagtgagccaagattgtgccactgcattctagtctgggtgacagactgagactctgtctcaaaaaaaaaaaaaaaaaaggaaagaaaaagtgatgtcaggcacagtggctcatgtctgttatcccagcactttgggaggctgaggccggtggattgcttgagctcaggagtttgaaaccagcctggtaaaaatgaagaaaaccctgtctgtgcaaaaaatacaaacattagcagggcgttgtggcacacagctgtggtcccagctactcaggagatagaggtgggaggatggctggagccagaggaggtcaaggctgcagtgggccatgattgcaccactgcactccagcctgggcgacaaagtgagactctgtctcaaaaataataataatcaaggccaggcacggtggctcacgcctataatcccagtgctttaggaggccccgtctctactaaaccccatctctactaaaaaaaaaaagtacaaaaattagccgggtgttttggcataggcctgtaaccccagctacttgggaggctgaggcaggagaatcgcttgaacctgagaggcagaggttgccatgacccaagattgcaccactgcgtaccagcctaggtgacagagcaagactctgtgtcaaaagaaaaaaatttttttttaattggctgaaagagttacgttatcgtctaaaaactttggaacatctgggttgagataaggggttgtggagaccaaggttttatgcaggtgaagcctccaggtaacaggctttggagggagagaacaatgagtgtaaatgtttgttaccagacgtaaaagagtctgttctggctgggtgcggtggctgacgcctgtaatcccagctctttgggaggctgaggcgggcggatcacgaggtcaggagatc

SEQ ID NO: 65252 - DNA, 1926 bp, Homo sapiens
gcaggagaatggcatgaacccaggaggtggagcttgcagtgagctgagatcgcgccactgcactccagcctgggagacacagcgagactcagtctcaaaaaacaaacaaaaaaaagagtctgttctatcaggaattccaaaagggaacagggtataaatctgtccgaccctaccccctttccatcatggcctgaaacagtttctcaggttagctttggaatgcccttgccgataggagggatccattcagatgttcgaaggcttagaattttatttttggcttatattaggtaaagtttataattcaaaacccatcaagtttcttttttagcagttctttgggggcatgatcaattcccctgacctttcttttcatctcttcctgtttcactggctccctagagtcaaatgattaggactttgtatcttttccccttttccacagctggaatgccatacactgacctgacattgtttcccagaaacttgaaatatttacgttgtttatcttaactccttgtgcaagcattcctgcttgcggaaatggttttccatctattaataagattgacattgcatcatctgagacatttcagggtgtaggagtaggaagttatttaaaaatataaagccagttttttgctttttttttttttttcttgacatggagtcttgctctgtcgcccaggctagaatgtagtggcatgatctcagctcactgcaaccttggcctcccggattcaagcgattctcctgcctcagcctcccaagtagctgggattacagacgtgcatcaccacacccagctaattttttgtatttttaatagagacggggtttcaccatgttggtcaggctggtcttgaactcctaacctcaggtgatccacccgcctcagccttccaaagtgctgggattacagtcgtaagccaccgtgcctggctaaagccagtttttttagctcacattcctcaaacccataggaaacaatatgattgatacagttgaggaaatatctcttaacataaatgactgttggttggccaggtgcagtggctcacacctgtaatccaaggagggagggccattgggaggctgaggtaggaggattacttgagcctcagagtctgagaccagcctgggcaacatagtcagaccttgtctctactaaaaataaaaaaaattagccgagtgtagtggtgtaccactgcagccccagctactcaggaggttgaggcaggaggatcacttgagcttgggaggttgaggctgcagtgagccatgattacaccactgcactccagcttgggcaagagagtgagaccctatcatctcaaaaataaaataaaataaaataaatgattgttggcccaaaatgacaagctagtggttaaagccatatttggtgggtaggtggcagaacaagaaaggggtatctgctaaactttgggctcatgagagaagatagtgggttagggacatatgcagtatgttttaaaagaaaattttggacaggaattcaagtgtgatacacatggtggtcaggagaatcactagtatgtatactgcaaagtagagtttatagagcctacagagccagtgaagagacatttcaacacttaagcctagcccagaccagagctctgagttcattgttctttctttctttcttggaccacattctttcctggaaaaaaggtgaatatgcacacaggcaagataacaagcaataattaggaagctagaattgtagcactaaacatcccaaaaagcttcttcagacaaggtagcattgatccctgtatccttaacatcttcctcagtgcctggcactgaatagatgatactggttgaatggatgaattggctgataatagtgaattgttggcatacttagtgagttctaagtgatgggtaaaatatagg

SEQ ID NO: 65253 - DNA, 2202 bp, Homo sapiens
gtgacaaagtgacatcctcctgtctccagaaaaaaaaaaaattaaaattaaaaaaataaaaacaagacaaaacaaatgctgattgaagaaattagtagtaccacccttcacaccacatgaacatgtagaacacagaagtgtgctcaacattgtacattcaattaacattaattttctctcttctaaataatagcttacgctttctccactagtctagcctggtaactttagtaagacctgtaagaaagattttgtgtttagctcaggtaggacagcaagaaagatgcagcttggagaaagaaaaccagatgaaatattaaccgggcgcaatggctcatgcctgtaatcccagtactttgggaggccgaggcgggaggatcacctgagcccagggattccagaccagcctgggcaacacagcgagaccctgtctccatttgaaaaagaaagaaagcaaaagaaacattagagcagttcctcattatttttacctaggaaaagacaagttttgataaagacttcacatcaggtctatgcagcactggaaatgagccgtgggttgtgagacagactctgtgcttaaaatgtcaaaccggcaaagtaggtttattattatcctcattttacagataaggaaactgaggctctgaaaggttattgacttttccaaggccacagaactagtaaagagcaaagccaaaaggtcccccgttccccacgggccccaggagttctccacacgtaacccgactcaccgccagacgccgaccagcgcttctgtccggttcaaacttcggaccaacctactcaccatgcgcatgctcactttcaaaacgaaaaacttactgagaacaaatgcgcatgttccataaacggagagttttgttgtgtatatattttttcctattcagaaagattaattacgcatgttcaatttcaatttacgaacttcagatatggtacgcatgctcactgtccaccgaacgctccagctgacaatgcgcatgctctagtcctccaagcgcgacttcggctggtgttttgcgcatgtttctgccagcgcctggatcctgccgatagttctgcgcatgtccactgcccactgtttggcttcacggaaccctgtacgcatgctcctacgctgaactttaggagccagtctaaggcctaggcgcagacgcactgagcctaagcagccggtgatggcggcagcggctgtggtggctgcggcgggtccgggcccatgaggcgacgaaggaggcgggacggcttttacccagccccggacttccgagacagggaagctgaggacatggcaggagtgtttgacatagacctggaccagccagaggacgcgggctctgaggatgagctggaggagggggtgaggcccggggtccccgggggcccgaggtgacagggccggggcggcggcgcgggctcaggaagcgcggtgtgtcctagagcgtggagacccaggggggctcctgaggagctgagggtcgcgcggcctgagacaggggagcgggcggggcggtcatggccctaggtgtgaggcctctgcggggctcgcaggtgcaggtcgcacccttagccccaggtcagcgcagccccgagcgatctgaagagggaaagagaacgggcgcgtggtcgattcctcgagctgttggacttgagtgtggcggggagcgggtggcgtgagcgtgtgttggggagacgggggctgctcttgctgggtgtcccgtaagtgcaggcgaagtgtggagggtttcccttcgagtctagaatttcaagtattgaatcttcagacctcccacaaccacctctcttctcggcctgtcgcttctctcctaggaagcgctcagctgttagaagtgacagctgaaaacttctgtcgggagtagcactgccgctgctgttacagccaccaggagttttatttcgggagcaagggggctctgctgcatcttccaatcttccagggtttgtttgtttgcttttttttttttacccccttccgtgtgactttttaaaataagcatttataaggacacacggcacttgtaacctttccccaagttgaagatgtctgtatttttttcagaataattaatgtaattttgaggtggaaaaaaaaaccaaaaaccagttgacagccttgatttagcttgccagaaataagttgcctgaacagagacttgt

SEQ ID NO: 65254 - DNA, 1926 bp, Homo sapiens
agattctacatcaaagaagtttcataaggaagagtgagccagtattttttaatggttggaaatgttaggaaaaaaaacaacattaaatcttaatgccttattatcatcataggtaactaataataaacactgcacttaggtgacctacaaattagattttctgctcaagcagctttcccaaagctcataaagtttccaataattaatggtgccaccaataatattacctccccgcgcaaaagaatgttacctaaatacatttaaagcatagatactttggagagtcaccacgtaattgctaggtaactctttagtctgaataagcagttacacagtccgcccaataaaatgccaccgtcggtggtgtgtgtattacggagggaggggtgtgaggaaagaggactctagcagagaaagatctctctaataaatgatccagtgtggacctcctagaaacagaagaacagagtcggaatcccagctgacaaaacgcagaggctatcccacactgccgtgcttttcccgtttgtctaggaggaggctagagttaacgtcagggaatgttctgtgtcattctatttcactcccaggactgaacagtggtgcagtcaccgtgtctggcggtttgggtttcagtgcttttcactaaaggctttcaccgaggccccgacgccacgggtgttatttcgtcaaaactgaagagcgacgttggacagcaggctttcagtgtcttttctataaataacatagaaccctcccactttccttcatgcacagacaagaaagaggagaaaaaagggaagaaaattcaacacaactcttccggaatctccgagggcagagttctccacccacgtccgagcctcgagtgcctattctccccagagccccctgcgccgcggcccctcgccgcctcctcctctgcccgcttcccccaggcctaacctctcatgaccagaagcggacggaggtgtcgggagcgacagcaagaacagcggcatacaccgcctccagcccttcagtcggggccatcaaccgcaaaccccgcaagctcttctctcagcccggcggcaacggcggcggcgcgcgcgctccccggacgttctcacgcgcgcgcgcgcgccctgccccggctccacctcctagccccgcccccgcaccgcgccgagtggagagctcacggctgccggggtgttttggcagcgagaacaagcgagctgcgcctgagaacggccttcaggcctggcgctaaataataagtcgttgttatgtgttatgtatttatgtggcatccaccacacgcctccgagatcctgggcgttttgaggttaaaaatgttcaggcttggagaacctacccctggaggagtgttagggtttccgggctcggatgtccgcgagcttgacgcctgacctagttgtgtctgtctgggcggtgacgtttggtctgagctgacctttcctcacaatcgtgaatttgggctgtgaggatcaggccttgtcagaacccgagatgagaggagagaggtgcggagagtctgcgtggggtggaagtagaagttagagttgaaaaacctgtcttgcgtggggtatagaggaccctactgccctcaaaataattatgttaatctaaaactgttctaaaattaaaaggttattaagaaaacgaagtttaggtcgggcgcagtggctcacacctgtaatcccagtattttgggaggccgaggcgggcgggtcacttgagctcaggaggtagagaccagcctggccaacatggtgaaacccgtctctattaaaactacaaaaattagccgggggcgttggctcacacttgtaatccccgctacagatactcgggaagctgaggcatacgagaatcacttgaacccgggaggtggagtttgtagtgagccaagatcgtgccact

SEQ ID NO: 65255 - DNA, 660 bp, Homo sapiens
tggcacgcacctgtaatcccagctactcgggaggctgaggtgggaagattcccttgagcccaggagtgtcttcaggaaattaaggttctctctgttctctacaggtcaagtagttatggacggtatcctgaacattctaattttgtgttatgagaatctgggccatgttggaatcctgtgtttttgctttggcaggcaatcgtcctggttaggttcagtcacaagttcccacctgcctcctgcgggttgtggttcaatatcaattaagcttcagagcctttgccgcgctgttcagatccgccccgtgtgtgcgccacccagtggcgggtacgagactggacagtgccttgtcccaccgttcagttctcaaagcctttgttcagatccacacatggaatgcctgggcatgagcccaggagttcacatacaactttagggtattgccttcttgcgttccctcctctctgaaatctcaacactttacagtctcaggggtccctctttccggtcctctggctagaaagtcagggttttaactgtactgctctgccctacagtttctgtgactgtctgcctccacggccaagcatggaaggttgtgtaaagagaaaaaagccatgggcatgactcccttgctgttgggaccattcttcctctggc

SEQ ID NO: 65256 - DNA, 1166 bp, Homo sapiens
tgtgcaagcaggcaacttgcaccacttccctctttcctacgtagggccagaaggccatggtgtcaacagttcagagaattcattaatttaaggcctgatgtgtgtaagattactcagaaagacggcagaggggaggagctagtgtgtaggaacagaaaacataggggctttgtggcagagttttgtatactgtatttttacgagcttcagtattttcattagcaaacaagccctaatactacgcaagttctaagattcccacgtggtccgtgtaccatgtacgcaataaacagtagtaatgcattttgtcaaccaagtgttctgggtgcacagagagggagtgaaggagggtgcgggcggatggaaagttggtatcagagaggaaacccgaggcattatcagagcaggagtcgtcaagttgggttttgaatgactcgagcgtgccaagcactgcagggtcttccaaatggagaactaagaatgtgccaaggttggagggggcacgccatcctgaaactaaatcatcaggcgcgagagtgggaagatcagggaaaggcaggcagaggccaccagctgggttcccggaggggtggggccggggccggggccagcagggcgcgccgcctacctccggggccacgccactgccctcgctgtagttctcggagatgagctgatcgaagagcaggtggatctcggtgcgggcggagctgctgtcatccgggcgcagggcgcagagcctggcagacaagaggcgaaacccattgcctcgctcagggattgcttcccgcggtgcctcccgcggctgcacggaaggccacgaaccgacaacttgcacagcagccatcttttctacgggcggggggggtgggtggggtgatcccagggaaatacttccgggacatcctcccgttccgcgcgctctagttccgaaagtaccttttttagaccggactggggctcagaggggtttccatgactacgggactcctccgaccggtaccctgcagatgcttgtcagaaattggcttggaggccgggctcggtggctgacgcctgtaatcccagcactttgggaggccgaggcgggcggatcacgaggtcagaagatcgagaccatcctagctaacacggtgaaaccccgtctctactaaaaatacaaaaaa

SEQ ID NO: 65257 - DNA, 1029 bp, Homo sapiens
agacccatctaaccaccccacgtgtacccatgtgtcacccttatcagatgcaggaggtgagctgagctgccaaatgcttggcttctttctggggctgtaatacagccatccctccccagggccacacctggagaagggagtggctaggacagggtcttcagggaaactgctgccttattctcaactgcttgtctcagtccccatccccccaacccccaactcaatatctaagagagagagagagtagttccaatagggaagtctcctgaaggaggctaaagttctgggtactgggtttggggtggacctaaagagttttttttcaattctctgaatgctatttcattgctgttaaatgatactcttcccctaaatggaaaggagacaggaaggacagactggtctacagttacacagaaagaacttccaaagtattagacgagcagggacagcagagggcgccaatgtggtgcaagggcactcagggaggagtcgcccacaagcacatttttttctcacacgctgcaaatctattcagaaccacctcacccccaacctcacacatatttcccatctcacaggcacatcagaggtcagagtgaggactccaggctctgattctcccactggccgccaagggaccttcaccagcccccaccgcactcctcaactattttcatgaacttagttagggcagctcccctcagtagggagctgggtagaggagctgagactcccaggttccctgcccatccagcggccctgtccatctagcgggaaggcgtttgctgcaatgttctttataatggggagtgagctgatgatacaacctgggtgtactgtggagccacaaaatgaaagttgcaaaggctgcccagtaacacggactcaggtttacactgaaatgtggacattaaaaagcaggaccctccattgttcactatgtcaatagcgcgcttgcatatagataaaggctgcaggggacacagaaaaattaaacacggattgaggtgaggtgttttttcttaa

SEQ ID NO: 65258 - DNA, 870 bp, Homo sapiens
tctcccaagtagctgggattacaggccacttgggattacatgtgccaccatgccaggctaactttgtatttttagtagagatggcatttcaccatgttggccaggctggtctcgaactcctggcctcaaatgatctgcccaccttggcctcccaaagtgccggcattataggcatgagccaccgcgcctggcctgagcacatttaaaacagtctaggctaagctctgatgtttggtaggttaggtgtatgaaatgccttttcaactcacaatattcccaacttacaatgggtttatcgggctgtaatcccaggtaagtagaggagtatctgcatattacagacccacacaactgaattatttattctttctcttgggagtccttatcaaggtccaagagtacaaaggtcctccaatagccacaataatgtgataagaattttgtgcaattacacaacttccttcaaacctgggaaaacttacgcacattactttgattggaaaaaaagatactctctaactgaatgttcagaaattcaaagagactcaaaaaaatattttttaacactctcagaaataagtattatagtaatcagaaataaagaagaaaaactatgcataggaaagggacaacagaaatcacaataaattcactcattcaacagttctttgttgagtgcctactatctgccaggcaaagtttttgtcaataaaaatgcatgattaaacaataattcgagaagttagtcaatatgaaaactgaaaatatatattagtcaccaaattatatttataaatatatttaataacacctgacaactgatgtcaaaaactatctatctctagtgccagtgataactcaacccagcaa

SEQ ID NO: 65259 - DNA, 1130 bp, Homo sapiens
caaaatacaaaaaaaagagaaaaagaaagaaaactatatcatagtacactatgttgcaaggaatatttacatagtcataatattgtaaataacactgatttaaccaaaaattgtgatataatttcactggattttgtcagggagggatgtaagaaagttaaatacgtatctcttctacaaatgcaaagcaaaagataagtttaaaattattttaaaataacagtaaagggccaggcgcggtggctcacacctataaccccagcacttttggaagttgaggctggcagatcgcttgagcccagcagttcaacaccagcctgggcaacacagcaaaaccctgtctctacaaaaaaatacaaaaattagccaggcatttgtggcacatgtctgtagtcccagctacttgggaggctgaggcaggaagattgcttgagcccaggaggcagaagttgcagtgagttgagatcccaccattgcactccagcctaggtgattgcagtgagttgagattaagtcattggactttagcctgggtgacagagtaagactctgtctcaaaaaaaaaaaaaaaaaaaaagtaaaaatatttagaactaaatggtggtatgtaccagaagcaactactagaaactggttgcttctggaaccctgataaaattgagctaggtaaggataggaactcttgttttcactaactctttttttattctattttaactatgtgcatatgtcactttgataaaataagtaaataagtaagatttacttgcaaaacaggtgatgcatttcctactgatacatagattcatcataaatcaaagattgcatttcatcacaccctctgccctagtaacctgatttcgggtccttatttgacaccatggtttgttttcttttttttttttccttttgagacagagtttcgctctcgtcgccccggctcgagtggaatggcgcaatctcggctcactgcaacctccgcctcctaggttcaagcgattctcctgcctcagcctcgcaagtagctgggattacaggcaccgacaaccatgctcggctaatttttgtatttttggtagggactgttggccaggctggtcttgaactcctaaccttgggtgatccaccca

SEQ ID NO: 65260 - DNA, 790 bp, Homo sapiens
ggagactaaggtgggaggatcactagcgcctgggaggtcaaggctgcagtcagccatgatcatgccactgcactccaggctgagtgacagctcactctctcaaaaaaaaaaaaaaaagagagagaaagaaaaaaaaaaaagaatggctgaacctctgtaaaaaaaaaaaaaaaaaaaaaaaagcagtatttgtggtgttttaacatgttctattcccatcaccttctccccagctatgcaatagctttgaaaaccaaaaatctccctaagctgtaaaaaccaacagtcaaacagccactgaaggaggcagaatgggtttagagcttctcaaaagaagtgtcaatatttgacctatctggtagctcattaaaaagttccattctcaagctttgtctttatttgatctggctttgagttcactctacaaataaaactttttcccctggcattcttcaaaaacaatcagtggcaactatataacttcacagctgcctgagaaagcagtggcagatggggctaacaagaggttaaccaaaaaacatgaaaggaaaacctggaaaacagcaagcccacaagggctttgaaaggctctgacatattcctggaaatccaaaaggccacctgcatatggagagctgtgcatgtgccccaaaattcccatatctctcactttggctgaccttaaacctccacacaagcaggaagtgaaggctaaagcagagttgcaaactgactgtacaacatttgaacacacacccgagtagtatagaacccctccgccaaggctgaa

SEQ ID NO: 65261 - DNA, 802 bp, Homo sapiens
ccgttctctacattaaaaaaaaaaaaagaaaaatttcccaggcttggtggcatgtgcctccaagctactgaagacattgaggcaggaggataacttgagcccttgagcccaagaggtccaggctgcagtgagctatgatcatgccactccagcctgggtgacagagtgagaccctgtctaaaaaaaaaaaaaaaaaaaagacaaaaaaatggttcacctaggctgggcttggtgactcacatctgtaatctcagagctctgggaggccaaggcaggagacttgagcccaggagttcaagaatagcctggctaacatagcgaggtctctacaaaacataaaaaacaaaaaaatcagccaggtatggtggcatgcacccatagtcgcagctactctataggctaaggtgggaggatagctagaggctaaagtgggagacaatctcttgagcccaggagctcgaggctacagtaagccatgatcacgccacttcaatctaccctgggtgactgaacaagaccctgtctcgagacaaaactaaaaatctttttttaaaaaaggtacacctatatagggcacttaccatgaatagagcttgcaggatgagaagttgttctgggtgagtcagtgagagacttaggggtgagtcaatgttgaagtcctagccctaggacattaccatggagtactgcagtagattttataaacactgtgcaattcggttacaccaaatttactaattttttcttcaataataaattaattttagcttactgtaattttttttttttttttttgagacca

SEQ ID NO: 65262 - DNA, 3283 bp, Homo sapiens
tttgtatttacaaacgtaccatcttagtttgataggagattaagcaggctagagctgaatacaagtttaattttggaatttctcaatgccaggtacatcactagtattcacaccctcaaacttaagaaacacttctgaaccttgaagctgtaaatcagtttgactaatgtcctctttcatgccatgtaagccattgcctaattgaggccagacctgtcaggctcaacagcatcccggaaatgactagcctactagggctggaaacacatcaagaatttggaatatttctcatattggggcagacaaaaaaagttcaaatgagattgtccataaaaacaattattatactgttccacaagggaaaaagaaagaaagacataaaaggcatatctgtgttattctggtaaatccaccaccaccaatacatctcaattctgtatcttactgtcaggtgatggtcaactgaacttacccacttacccctcttcttcctatatacgaacaagagttcacttctcaagcctcattttgaatacccgtcttttaatctaattaccattttatatccttagctactaaaaccacctggagcatggctgatttcttgacttggaaacctgttaacaataatgcctagctcctaatcttcttaatgttttttcacttcttaccaagaatatccattaaatgtctaaaagaaatacaagcatacacagatctacacacactgaaatcccagtcatgaaaaattaagacattccggccataaactgtgcaacaagacacttccagttagtgtgtgctttagtgatcatggacagcggtatcagagtgagtggtagggggttggggctgccaacaatatactgtgcctcagagccaataagcagcaggccgggactggcagccaggccagtctctaaagggagatttaacacaatatctgaatgctggacttcccaatgccatttcatggagagggatggagcgagaactgggcatcaagtgcagtcaaaggctttggtcaacgtcggaggagatgaaacctaagacaaggtctggtgccaacgccagctgtccagtctcatctcacctcaaacacaacttcatttcagatcgttcttatcaaagtcagccgctcaaacggtgaagggtggcagaagcggatggccacagccctcaagagacaggcataggctctgggaaaaggcagggactccccagatacgaaggggcttccagtagcagagaggagcgctttgcagccgcctcctcgtccccttccagctaaggctgttaggaacgaggttaggatgttatttgaggtttttatgaaggaatgataggagaaaatggcaatgaaggatgaggggggctggatgggctggagccgcccaagaaaacggggagaggacttccctggacacatccaggatcacaacgccaccagcgagcacgggcactgccctgccagcgccgatccccctctctcaggacaagcccctttccaaacggccctaattcccaaacgctgcttcccacccgacctctctcctccaccacactccccaaggccggccgcctttcccttccgcctcaggcgccccacgccctcaatctcccctctccctcccggttacccaccctccaggctgcccgtcgcgggcctcccaggcagctcgcccagacccctcccccctcacctctcctcagcgcctcctcgtagctgaggaatccgatccgtgactccttggcacccatgctcccctcatcccctcggcggggggtcggagcctgatctcgcccccacccccctcccgccttctcctcggcgtccctgggtgacggtgacggtgtcggcgtcccccgcccccacctccccccacactaacaagtgcggcttctgccccggcggctcctcccggtcgccgccaccgcctccatgccggatcacgtgactcttccgccccgcccccttcccctgcctcctactccgcccttctctctcctctctctcctccctctccttccctcctcacgccctcttgccacttccgccccctcccgccagctccgccgagggtcacgggacccgaggccagacactgttcccggtaacggccgcccagggccgcacgctccgcccctccccaagctaaccgcgcgcaggagcgccggggagggggacgcatctccgcacgtaacgcatcgtcccatcttcccgccaatcgcagccgcgcgccccgcccgggcgcctccgctggcgacggggggtggtgacttccggggcgcttgaggacgaccccccccgcccccgcgcccacatgttctggcgttcggcgggtggggtccgagcagctgacggttagtgtggcagttgccgggacctaacatggaagaccgcagaatcttagggaatggggttctgagggatgcggcatatggctcagaagagaaaggagtgggtaggcagggagctcccaaccttagggacgtctttgactgggagggcgttgtgaaaggaaaggagaatctcaaggctttcctgtgacaaaagaatgctcacacctagcgggagatccctgaggaaagtggaccttgttaacgaagtggatctgccttttcgggtcatctcgcctgcccggcccaccttctcctcctgaccatgcctcttgtacacattctctggaaagcgctgtgcaaaaggcttatcctctctcccagagtttctccccgagaaacatgagggctacaaggcttagcgtggagtcgttttaatctgtggtaaaatatacgtaacaaaatgtaccattttcacaatttctaagtgagttcagtggcgttaagaacattgatattgttttgcatccattgccacgtcccatttcccaccgtttttcatcttgcaaaagggaaactctgtgcctattaaacggtaactccccaatccccctcccactggtccgtggcaaccgctgtcctactatcaatttcactactcttaagtatttcctctgagtggaactctgcagactttctcttttgtgactggcttatttcacttggcatcgtgccttccaggttcatggtgtggcagcatgtgactgactctcccactccacctctccatttcccaaagaatgaaaagcagggatgtgaacaggtatttgtgcccccgtgtttatagcagcattattcacgagagccaaaaggtgaacacaacctataggaaaccataaatggagaaaccaaatggggtgtatatgtacagtggaattattat

SEQ ID NO: 65263 - DNA, 1108 bp, Homo sapiens
ttcctttccccttgctcttgccaatataattatccttcttaatactcgcaaaataatctggaattaatgatcagaaaacagaccttccatcttggaggcggataagtggaaggtttattcctccccttacaacaacaacaacgacaacaataacaacaagacgtttgctgaacatgctggcatagaggacaagttaaaaagtttctggactcaaagggtgctcctccaaagctccgggcctccgggctacccctacttgaagccgctatgcccctctcctgtgcccgaggtggccgctgggtggcaggggaggcccgggccgacggcggtcccaccgcactgtcgcgaaggcaggcgaagaacagggccacactgagtggggacaactgggcccgggcccagaggacacgaaggaaggtccgggagaaggaattcctagtttcagggaagaaaaggtggctcgagtgaggaaactgcgggggcaacggtctctcgtcgccgggaccccgccgtgtgccgcccagggacgcgagggggcgctgctgccgcgccaggggcgagggtcccggggcctcctgagcacctcccggccctgcccggccaactcagactacacccggactctgcccaccgcgtttccgccctcggcctcgggtccctggagggctcgcgggtaggaagagtcggggtggcgggactttcgccgacacccggctccccgcctggtggctgcgcacacgaggccggcgacgggacttgcccgcgtctcagcgcctcctgtgtgaagcgggaccgctgcggtacctgccccagggaaggccgcggggagggttacagagcccgtaggcactggcggggatctttatacacccccaaaacacacacatcccacccagtacccagcacccagcacccagcacggagggcttattattaacaacttcctggaggccgcaggggcagtgctggctcactgtgtcccttctccctttcagctctccctagacctctgtcccaaatcagaaaagaattttacaaactgtgctttcctctcggggagcccccaccacggcgtaacccagcaggcaggaatggcacacgtgcagga

SEQ ID NO: 65264 - DNA, 2175 bp, Homo sapiens
ccttggagagtggcttgggagacttgctgttcagatttttgagggggagtgatttaagaatgctgcaagattgcaactttcaaacacaggaacataatctaaagtgtttttttctttcagtaaagatctctccctgtcctcttcaaacagttgatcagcactcccattttcacaaaatccctaattcaagtatagagcccctcctctcccacaaaaaaatcaaagctttaaagaatatgcaaataaaacacacagattatttccaataatccctaactccttcccaattgggaaaagaaaggagaaacgaaggaacacgaagcaaaaacaccaaaacactcggggaaggaaggcggcgagatgagaaagtaggaatgggtggggggaggagcacggaaaaaagtccagctgatgctgacacttaattggaaggagaggatggaaaatatcctgaagatacgggctagaaggaaaggactaggtgggacaggggcgcgatagagtaagtccacgcaaaaggcctacccaagagggccactgtgtagaagggaacaccaacagggagcaagactccccaagattacttcaaggccccaaagcttaagagacagggcatagggagatggggtgcttctccactggcaatgcagacaccgcaccagacgtttcgggaggcaagtctgccggaaggggtgaggggttaactgcgggggttcgcagacgtggaagggggtgcggcccccggggttgctggaggagagcagagaggaggcccacggcgcataccttgtagtaaacatcaaactggatgttctcgggcaaggagcggatgtctcggcgggagcggatgtagttgtccacgacagcggagatggcggtgttatagagagtctctgggatccactctagttccacggccgccatcttccttccctcctcctccgcctcctccgcctcctcctcccgaaggcccccacctccctccgtagcgaacccctctgcggccccggaggattcggaggggcggtggcagccacgcgggcgcacggcagaaggcacggccgccctgcctcctccgggggcaaactgagggacggcggcagcggacgcaggcccgagtaaaaagtgggacagaaaacagcggccagccaggccaaaagcgtcacaatcccggttcgagaggaacccgggttccgtcccagcgctgatctctgcaggggcggggctgcgtgtgcggcgtcatgacgtaagcgcacgccggcgcgccggaggggaggaatgcggcaggcggaaaacttaggaagagctggatgcctcccacggagagcgtcccttccaagcggccccggagtggagtggagtggagtggataggggtagacttttcacacggggacaaattattacaggatatctgcgccccctgttccgagtcactcggggccatcggttacttcagcaggttctctgcatcacggacccttttgaggctcaggtaaaagtttggatcctctccccacaaacgagcaaaattatctgtacattgaaaattatgcattgagaaaattcacattactctagaaacccttagactgcagttcctaacccaagttaagaacccgcggtccaggaactaggggtaacgatagaagagagacttgtttttctttgtataaccatttgcaccgttgtaactttttgaccatgtttctttatccaaatgaaatttccgaaaaaagaaaactcctgccccagaacttcgtaggaaaactagcttgattatggaattacaaataatagtaagagaaaaaaggctaagtggtggccgtgataggacttaatggtatttcaattcccagagttacagtggcggcttcaagggattgttgaataattgggagtacttgtttcagcttctttccttcctcagcctgaacatctgctgtttatgtaacttaatttcctaagtctgcgatttcaagaatttgatgcaacatctttctgttctaggaatttaccatggaaattattggccataattgttggtgacactatcaaactcatagtcactctataacgatgtaagtccagaaaacagccataataataatgtcctgattgatatttagagctaaaagaagtggaaagagttatttcaatttacccttcacctggt

SEQ ID NO: 65265 - DNA, 607 bp, Homo sapiens
tccacccccagaatgtcttcaggtatgtgagacacatacacagtgcataagtggagagccaagcagcggatgccaagatgcaaagacacaggttttactttcactgaccaactttcatagctgttcatgcggctctgcccggaaacttatccgggttcagagaccagtggattgccaaatccacatgtggctctggttttccagtgccccgcaagccggcaccttggccagttctcttatcaagcagaaaaggctttacacttccgccaactgcagcaggtactctttgaactggaatgctcgagtaggactaggttgcgcagcaatgtccttctcccgaatgacttgcactaagtctgtacacaactggcgacattagttgcttaactccctcaattcagcggggacacaggcaccataggaaatgtgttccaccacgatggggggtctctgggcctcctcttggggcccaacagctgttcatgctctattttctgacggactaccgggcaagcctgcaacggaggttcctcctccctgcgctgcatcctgcagggattgggcattcatttccctcagcatagtcgcaaatgcccatctgactctg

SEQ ID NO: 65266 - DNA, 3124 bp, Homo sapiens
ctgcggcttaactccatgaaaatccgtgcaaaggttttagcgttgggattgtgaccgactcggtgaagagaggggacgatcaccaaaccgttagagcactggggctcttggcagtgtttgtcagttattttcaagtgataacttgaagtgataccgcaggaataaaatgctgtatccagagctggtcggaacgagcactacctttaacaaaagctgaaaagatctgcctaggaattcgttagaatacagccctcttacgtctctgacatacctagttatgtgaaccgagactgtgcagctgacggtggaaatttcctaagtgctttttaaacaacagaactggactccctccctcctccattcccagtcgaatacgtcccacccagatccagctcaagggtgcagcacttgttccggccagctcacaatcgccctttggaagggaggtttcccgccatttcgcttaggaggagggtgaactcttctcccttcattctccactcgctgggggcccgagcccacaccaccttcctagcaaagcaagcagcgggacgccaaggccagcaggccgcattaagaacgctggactgagccaaaagcctacacagaccaagccgctcgggaaaggatcaacaactgccgacaacccggagggcgaaaacgcccgcggcgtaggggaagcaaactaggagatgcgcgggcccagcgccagcggcgggaggaggcagcgcggccgtcgcaggcgggagcgaaggcggggacggagggcgggctcgctccactcgactccggattggtcgagcttagagagccgagtgacgtcagcgggggagaacgcctgatttgtgtggtgggcgcgggcggtggggggaagcgcagtgcgcaggcgcaactgcctggctctgctcgctccggcgctccggcccagctctcgcggacaagtccagacatcgcgcgcccccccttctccgggtccgccccctcccccttctcggcgtcgtcgaagataaacaatagttggccggcgagcgcctagtgtgtctcccgccgccggattcggcgggctgcgtgggaccggcgggatcccggccagccggccatggcggggctgtactcgctgggagtgagcgtcttctccgaccagggcgggaggaagtacatggaggacgttactcaaatcgttgtggagcccgaaccgacggctgaagaaaagccctcgccgcggcggtcgctgtctcagccgttgcctccgcggccgtcgccggccgcccttcccggcggcgaagtctcggggaaaggcccagcggtggcagcccgagaggctcgcgaccctctcccggacgccggggcctcgccggcacctagccgctgctgccgccgccgttcctccgtggcctttttcgccgtgtgcgacgggcacggcgggcgggaggcggcacagtttgcccgggagcacttgtggggtttcatcaagaagcagaagggtttcacctcgtccgagccggctaaggtttgcgctgccatccgcaaaggctttctcgcttgtcaccttgccatgtggaagaaactgggtaagttccctggcttgtttggcgcccgcccctttttcaggcagttcagggcttttatggcaccagccccgcgtgggcccccggcacccagagcgcaaccaaagtatacactgatggaagtgactaaaagctgtaatagcgctttgctgggtggaggtccgggcaaaccaagcggccttggggaagataggattgccgtctccctgcagcctattcttgctttatttccatcctccaaggatcaatgggaagcagtccactcccttccctgcttcactttggtggcaaccagaggaaacgtgtttgaaacctggcgccagattttggccaaaagataaatcgatgttgcacctgggccaggcgaaggaaaaactgtagtgtttccttagagaatctgtcataattctgctcctgaaagtcttatccctctcggttgcctcctaccggtggtgtcagttctccagattgacccgggattgctggggttggttgctggagtaaagcgtaagctaatttagaagggctgaaacgtaaccatccggcaacttaaagttttggaaggaattccgttgtaatgatggtgagatgtttttaggatcataaacctgtactgcttatgaaaactaaaaacgcggaacgtgttgttacctcttaaaaactggccccgtgttaagggtgtgcgttagattctgcttgggttttctttttggaaattgccttagctgattgctttcagatagttcccaaccggttgttcctagtttaaaaagtacttataaattgtaactgcccatcaaaataagaaaaggcaaggaattactgtatgctagaaggaaataaaggtcttaaatgtctaaaaatttcggtgtagttgtagtttcatctaagtttttttaaatgtttgtaaagcaggcaggatttctgtgcccaacatttacagaatcatcttacagcattataattgcttatctattgcagtgaataaatggcatgcatctttgttagagcaaagaagacaatacttccagtggtgggaaaaaaccttgtttatggcagcataataacgttgctttattttcagcagagggatagagacatagagaaaagagttagatttagcaaatacagaacatttttagaaaggtattgtcatagagttgtagattagccggtttcaaagtctgttttccatttgcttggctttctgccaagagttagttgattgactcaaaaaccagccactaggcttgttggaggcgtttcccatccatcccaggggcccctctttatggatttattttgtttttgtgtaggcaccgtagagctgaaagcactgtagtgtattgtagaaatatgtgatatcattgactgcagggcaacgagaagtcgacagcagcacaagagaggaagactaggcacagaactatttagagtgctgtttattttgcagtatacttggagtaacatgaatttgccatatgtttgaactttaaggataaaaaatctttaaggtataaactccgttacattagtattaaattttttttttttta

SEQ ID NO: 65267 - DNA, 660 bp, Homo sapiens
ttattgtgtcatcaaggatattctttttttaattttagtttttgttttttgagacggagtctcactgtattgcccaggctggagtgctgtggcacaatttcagctcactgcaacctcctcctctcaggttcaagcgattctcgtgcctcagccttctgagtagctgggactacaggcatgtgccatcatacccagctaatttttgtattttttttagcagagatggggtttcgccatgttggccaggctggtcttgaactcttgacctcaagtgatccatctgcctcggcctcccacaggcatgagccaccactcctggccaggaatattcttaagtgaaactagcttgctttttttggactgtaattaggtagctgtgaagaatgcagtgactaatggctcaatctggtgccactgccttgactcctgccaaggtaccagtagtttaccagccattgctttctaccatcagtacaaatgtcagcacagtgaaaagggcaaataaactcttagaattattatgaaaatagttttggccttgtagaatccctataaagattacacagaccactgggagatgctagtctgctatagtatctgcctgtcagctaaatcttgaggtctttggggccagagatactgccttactcatctttaatt

SEQ ID NO: 65268 - DNA, 457 bp, Homo sapiens
ggggtgctgaaatttgataggtgtaaggaccactgagtgtcttgtggactgctggctgccaagtgccacaggagcaagcagaaaatatactggaaccagaaagcaggcctcctctcttctggtgtcccttcagcaccctctactgaggaaaaaagggaattggctgtctgccagtttccaaggcacctcctttcaggacctacagaaatgatgttctatgatcgtactttggtgtacaaacactagaccagtaataaaaacccttagttaaaggcccaattctgatccttaccagttatttgatattagatagaatcatatagactctttgaactggtaaaacaagggaaagtgtctatgagtatgaatcatctggtgagtttgttgaaaggtcagattctagggacttttactagcaaatttgaagcaacttgagcatcaaaacaaattataacag

SEQ ID NO: 65269 - DNA, 1466 bp, Homo sapiens
atgaactgatgaaatgacaatggcgagatctcgatcttcaacaataagggagatggaaactgaagcaagaagtggtctacaaacctagctcaaattgttgagattaccggccgtgccccttattcagatcaacccctcctcggctgatcgccggcgcgagccagcctaggctcccggaaggtaaacacatcgccaagggctgggcagaaggcgggtgtgggacgggtgagtggccagctaaaagtgattggcagctgccatgtccacgtgctccgagcttggaaccagctgtcgcgagaattcgatgtaaacagaccagtctccctgtcctccggctccaacctgaaacgctcacgtgagcgggacaggagtctggatcatgttgcttttcttttcaaagccacgaaggttctgtcttccaaaaaaaatgtacatgttcgtaattattccccagctgcctgcgtttgcaaccgaacctgacacctcggcttcacccgaacttacatgctgttgtgttttccctccagccccagcggattggacacattcagaaggcgggtccgcctctttcctacttgctggttggcgaagctgacctccaagggcggtgcccggccatagccggtttgcttctgggattggctagagggggtggttccgctgaggcgtggtaggaagtggctgccgtcaatcactcggggagactccaaacagtgagcctagagctggagactagcgttaaccggcggggcggccggtgagagggctggcagggctttggctttggggaggcttggggaggacgagggactggcggcgtgaggggactgggtcgggctggcaggaattcgacaggagagaggtgtcgatactggagggggaggggaacagtgcaaggggccggagggcggccgggggcagcggtggctccgtgttggaggttaagtgggcagcgccgtacgagtgtctttcaggagactggggcctgagtggctggcgagggtcgtccccaggagacagggcccttaaagggcagggcttgggagactgtggttcgagaaagcaagaatgggatgagaatgagagggctgaggggctggaggtgcaggtatcctctgaggaggtggtggctctgctccttggggcagagggtgttttggttgtaggaggtggggcgcacaggtttagagttttcacatcaggtgtgaatgctccctacttaaaaatggttttcggtgccttcaagatgagttccaggttgtgggcttccctgagccctgtaagagatctttgatattgctgtcagtcctcttttaaccttaaccaagccgactccatgctcttaaaatctcagtgattcagagggtcatgaaacattctaggatcaggatttactgatgtgacgggaaagggtaaagggctgtaacaacgtattagtttatgttagttatttgactacttgctac

SEQ ID NO: 65270 - DNA, 894 bp, Homo sapiens
cctccaggcgtgtgtgtcactgtagtctgagtggttttacattaacatctaccctgagtaagatcttttgactaccaaagtgttagttgcaaatggaagataccattaaggcggcttcaaaggactggaatgatatttggattggtgcatgctgaagtaatggctagagttttgaagtgtaatatctaaatcagtgttgcataactgaaggaacatgtgagttcaaacggcttttgtttgatcttcctttagaaaatcaggctgaaggggaaaggttaaagttgccttaaaacactcctttctatgtgtgcaaaaatctggaagtatgaaaatatgattacaagttccattcattatttgtgttctgtggttttcgtattgttcttgaaatttacttcctgcctgcctgaagttttgtattatgaatttagtgtcaagaccaaaatacagaccgggttgctgttttctttatgtggtcagcaaatatctgttctataagttgttactcctcacaaatatgcattttaggcgatttttatggcttgcattttttttcttgatggtatacacagtaggttacagagatactgacactctgatattaactgaatcatttgtggttaggcaggcaaaaaacaaaacaaaacaaaaaacttgttcccctcttcctcctaattttaggagctttcaaaaggactgctctttactattaggaaaactttcctcaaagtatgctatcttaagtttttaaaattgtggaggcagagctgtaaaaaataaaataatacactaacagtgacttgttagagaaaaaaaggcctgagtttaagaactattttgaatatagtgtatttataggagattctgatgcctctttgggctggttatttttgg

SEQ ID NO: 65271 - DNA, 1153 bp, Homo sapiens
ctctacatttaaattgtcacatttataaatcagtgtgaatttaatactacccattttcaagtagttatgtgtgttatttttaatctgaaagggttctccctttttttagtcatttaaaaaatcacactttaatttttgccactttgatatgtatgcaatgataacttgaatcattaaatctccaattactacgatttaaatatgtttgttggatattataattcctcctctgtgaattgcttgttcattgggaactgcctttgttcattttgcttttggattatttgtcttctgaacctttgttttaaaatggcaaattttagtttctatactaagaaactacattcccaagcagaatttcatccttatatcctgagtgctttctgatcagaaacagagtttggtaaatagcccttgcttattgtatggctgctatataaatgctgtttttaataagcaccaaaaatatattgaggtttgtccttgggagagagtttatcactgttggcctttgggtgaactttgagcctgagctgtttcattcaaggcagcatgatgtcatttaactgcaaatttctctgttgctagaaaaaggaatgttgttcctctaaataacctaaacgactgaaaaatgctggcacaacattattcatctctcaggtctccactaaaaactttcacgtgctaagggttttattgtttgtggaggaagggtggggatatggtaaagagtaggagaaaacaaaaactgtgtctggtcctgaatctgaagaattccactgcccatataaaactcagctgccagtaggacccagtaaactcacttgtccagataagagcttttgggtccatctttgatttttcacttataaatcagtgtgagttttaaatttataattaaacttacaaatgcatttaatcttcatttatagatcagtgtgaatttttgaattaagagactctaaatttctatttctatatattcagcctattatcatattttaagtttccaacaaaatcttaaagcaggtaactatatgattatctcacatataaaactaggtaccattagggtcagcatttttatccttaatttgagaagcagatttctctgatagtgatagcattgcaattaatttcaaggagtagaaca

SEQ ID NO: 65272 - DNA, 1086 bp, Homo sapiens
atgacctatctcaggttaccaatctgacagcttttcatcggacaggtgcctcaaaaatgtggaggccatttgtagtttcatttctttctcaaggagggtagcctgaaaactaaagtctggaaaatcaaaagtaaagtaaactggaaaatcaagcagtgtctaggtaacatgtatttatttcatcacaccaaaaatattcacaggaagttccttgaaggaagttgattcttcagttcctggcatgtggcggtccatcctttcttaatgttaggaagataaagtaaaccccaaatgtgtgttttttccaaaatcaaaatgttgtccaaggaatgctggcagagaaaccactgtccttcacttcaacttttcaattagaaaaaggggtaatgtgtgctgtcagtgtgaaagtatatacaatgtgtttgtccggcacacaacaggagagtgaataggaacatctggccatcgcctcggtgaaattgaacaggcatctgtttacctctgggctctgtgacactgatggttttgagcttaaagtacacagaatgctttatctgtggcctaatttacattgctgaatacaactacttgaatcagaaatcactgtcctcaatctgagcatttttctccctgtgattagtaggaatgtgaatattgttccaaagaccatgatgcttttgcccttttggactcacacagggctacactctgtgaaccttttcagttatgttttgttaagaattaatcaccacaatcagagaaatgtgattaaatataaaagaactcaggacaaaaataaggcatgtgggaagtcaattacataaagtatttgcacaggcatgaatgtaccattgacaagacatttaaactagtttgtatatttagtctctcattcgagttgattatttgtaaaaaaaaaaaaaaatcatgtaatatatatattttcaggtttttccaagtgtcttctacccacttctttgactttataatgtttaataaagtattggcggccgggcgcagtggctcacgcctgtaatcccagcactttgggaggccgaggcaggcggatcaccaggtcaggagacc

SEQ ID NO: 65273 - DNA, 643 bp, Homo sapiens
ttaacccgaacctaaaaccaaacaatgacaggaatatttctccttaaatgcagactacctggcattcgcaggtatctgctagaggcaaagtcagaacgaatgaggaggcctgcagacagtaatcatacttccatctcatggaaatcacccacttgcctgactcacaagagcactgaagtgtgtgtgtttatgtgtgtatttgttgtgaatttgttttgattttatcaggcttgccagctgcataagcgggcaaagaatgtaatgtggaaaccatccattgccactggaaaaaggatccaagaggaattccttaagctgggaacatgagctgtgagcaacatgtttaaatagctaaatatccaaagtttgagtcatgttcatttattttgggggatacactctcttctttgaggctgaaagagtccttctggcttagactataacaaatgtggtgctggaggaggtgagagactggaagccctagcgagtttgctcaggttgtggttaatggtgagagagggtaccatgacccccttcgtgaagtacgttccacgttcaatctgaaaaatccatgggcttttaaaaaagccttttctgtactttccagtgagggagaaaggtaagggaaaggaaactaactttt

SEQ ID NO: 65274 - DNA, 996 bp, Homo sapiens
ccaaaaacgcaaagcaccagagtctgagctggagagtgggcacctgagagggtaccgcccagcctagcagctgtggctgcctgccagattgacagctgtctttagacctcaccccaaggggctgccagccccccacctcggggagccctcgctcccagccccctttccatacttttcagatacagggcgtgtcggctttcctttcgcgcctccagctccagaggccctggcccagtggtgctgctctggatcaaggcctcgctaaactcccagctccctggtttgcaaagcaaacttcagccttttactatttaccttggcaagtccaggaccggattgatgatctgtaaagtggatttgttatttggctgtttgctttggcagctcttgaaagcactttgctgattacagtcccagatgtcattgcatacattaccctgctctataacggggctttgaacactttaatttgaactacaaatactattaagctttttgcacctcttctgcctttagttcttggatattaaatatcggaacagacagcctgcattctcttaggcttctttcccctggtctttgtcagcgtcctcccacggagagcttcaagctttcttcctgttctctgtgggtctttctagaaaccttacccacctatgcccacctctagcccagctacgctggcagcagccttgccagttttcacataacaggctttctagtttggaaggtgcactgtgttcatgccaagcctggcttccccgcagtcacaatcctttgtactttgtactggggcttcatttcattcatccacaggggtgctgtatccattttttgtttgtttgtcttaatgttactgacaactttgtttggggaaagctagatttgggggcatgaatgtgtcatgtcattttgcccagagaggaaaagtcttgcccaaggttacacagaaaaggcagcagcagaactttatcctttctggccaggcgtggtggc

SEQ ID NO: 65275 - DNA, 2749 bp, Homo sapiens
ccccaggccacgccgaatgcggctggagcagggaggggactcagccagtgcacgagtgggaggttgcagtagaacgtatcccaaccccagagggtgggttctggcttccctgcctcagacctgcgggcaggtccgggaacccgacagggacagagaagcccgttttccagcctaaatagaagctcgtgggcagcgcgtttgctggaggtcgctttgggctgaaacgcctctcatactcctagaggagcggcgcgtttgcgtcccgcggcttctcactttcagcaggacattaggagggagacgagagtcggctgcgcgcccgcggcggcctacgtacagggctgcggacaccagggggcagcaccgacttagggtcgcgggaggggtgcgggtgcgggcatgggcgcgggggaggcgggtgcctgcgaaggccgggcggggcggcctagtcgcggccgtttttaggccgcgtcgttgctgcagcaacccgggtggggtggggtgggactccagggcctcgagatcccccacaccactttcgccgccacctcccgccgcacatgtcccctccgagtcgcccacccggcgctccgcggggccccagctggtagcctgagtgcgactgcgggaacccgcggccggcggctgggccttgtcccagacaaaggctaggccactcccatgtccaattaagccaccctcctccccggcctcccagccctcattgtccccggggtcgccaattagcctaggcgcccggcgtacccgccgctccggtgccgcaaggcctccttaacccttcagggcctggcccggggtccttggacggcagagccgccggcacacgcgtggcaggagggccagtgctgggacgatggcgatacctgctggcggcctagcctgtcgcctcgggctctcgcgtgtggggcgtgtgaggtctaagagggaattgtgcgtgtcggtgtggggtggcgcgtgcgattcccggaggaactcggagatggagggtgtgagtgcaggggctccgagagacccctagcggctaagccgcccggatcccaaggcccaggggacctcatttcctctcgggttaatcggaatcttccgagccctcaagcccttcctcctccactcccccgccgctgctgtggagaaccggagccaccggtatggcctggccctgccctcccgaaggccgcagctcccgggcccgcctccccagctgaccgcgaactcctgcgtggggtgctcctggggcgggaggggcgcgctcagcctcgctctccccgggactctcacgctcaagcgccccggcttgaggccgggaccccctatttcccggttatgggacggccccttgagggacagcctctacgagccctggatttataccccgagcctgccttcctccgctctgggaaggacccaaaatccagtcccgcttcctccccctccttcgctgtccttggccccgaggtgcggagcaccggcggtcaggcgggatcccgcaggaggccgagcgctccctgctcgcaggacagggcggcagcggagggagcccccgccctcttgggaggaagcccgagctccgggtctcctgggcaccctcccgggagcgccttcggggtggaggctggttgccgggcgctgaacgtgtccgagcacgcccggggcggttttgcacttggacttccttttgggctctccggaggcgcatatctgttcctcctattggatggggccggggaccccaaacccactccggaagcaccgatttccagcgctgacggccgcgcctggtttcccagcgagtcctcttggcagctcccgcagctccccgccgggagcacgagtgggagcgaacccagagcccgcccaggcctcgggcctcggcaactcctcacaggtccacgagatggcgctgcaggccagggcccgggccgcggcctcacagcccgcctcgggcgagagcgggagatagactgcggaccccggcaagcggggcacggaggcacagccaccgacacaggcagagccgggtccggagcccggcacaggccgccgagggaccgagggactccggggctgcggacacactgagcggagggcttgaggctcggggtggggccttctcccctgctgccagaaccgcccggcagcgccagctcggcgaccttccaggctgctgcagaccccagcttgtcctcttctgcgcgcccgcggggctgggccctcgcgttctctctgcgggaagtgagccgccggcctccggcctcctgggcccctccgaagggggctgtggctggcatccgcagcgcgcggggcgcacggccctaggagcgcggggcccactcgacggtgaggacttacgggcgggataggggaaggatcggcggggatccagcgctcctccagcggagagggccccctcggctccgacccgccctcctcaccaccctcatccggctcttcagggcggggtcttcagggtcgagggcaggatgtgccctgtggagctgctcacctaagttcctgcctccataggggaggctttgggctgcgttattccagcgggaggtggtggggactggggagggcccaggggtcagcctgagaatctcgcccttggattaaaagccaccaatgctctgggtcaagtctcaatgggaggctggggatgtaagacccgttggctggggaatgccagagttggagggggtggggcttagaagcctgtttccagctgacc

SEQ ID NO: 65276 - DNA, 810 bp, Homo sapiens
cccaacatcgattaagcagaaatgtccaggagatggggtgcatttatgtgtatatgatgtatgcatgtatgatgtatgtgtatgacgtgtatttgtgtgtgtgtgttagggacacagacatgatttagaagaaactgcttatgatgattccctcatatatctctgtttcgtttaacttattacaatgggcacgtattatttctgcaattaaaagatttaattaaattaaaaaaaaacttgtgattgtagaagtacccaaagaaaagaaaaagaagaaaggctaaaagaaactgtgcccagtgctaacggcagtaacgtcaggaagtgctggatctgctgaatcgctgcccgggtggacaaaggttgacttctgggcctcctccccgtgtttgttttcctcccctccctggctgtccgcctcagacaccctgctcctgcccaggcctgcaatgctgctgttgttcaggctggggctttagcattttccactcctccctaggtcctctccctgggtgacggcatctgttcccacggcttctctcaccaacatatgccaacgaacctcaagtccgatctcatttcggtctcctgataccatcttctggacatctctgccagaaagagatgttaagtcctccaattcagactggaacccagactctccctccaggcctccctcacatcctccgttttggtaatggcaccaccagccagcatccagttgctcaagtcagaagcctgggcttcagcgccaactccctcctctccctacctgcccaccccaaatgctcaccaaactgcagattctac

SEQ ID NO: 65277 - DNA, 1609 bp, Homo sapiens
ttattctagggtattttccagctctaacattttgcgattctatctgtaaagctctgagaatgaggtatggtggaatctaacctcttaatatgaatcaacaactcaacgctggcctagttactcagatataatctagaaatcagcccgtcctgtaccccggctgtggcaacaatagtgtcaaaatggggtagcttcccccaaacattgcataaaggataaacacacccctctgcctcccgccaagaattaacgcagcgcccgggctaagaacaggcctgcgctcaaaggaggtaaggataggctccctcctcaggttttctgccccgtatctccctcctcccccagccagttgagatccccgagaccctggtgatccagtcaccacccatgggcccgcaggctgtgcagaagaactcaagccctttccgtggacttccctccgacttgcctgtctggagggaaaccgaagcaacgctctgagctccgattcactgaagaaaaggaaaggaaaccgacttctgagagcaaataaagcggagccctggaagagaagaaagggcacgagcccttcctcctccctcttcctgggggtgctgctacttccccggccttgtgtgcaggactggggccgccgttacctttcctcgacccaccagacccctcaaccacacaacccgagacgaattcccgcctcccgccccctcgactcccagcgcccaatagcccagcgagctcgaccaatcacccgccaaggccaggaatcaaccagtcccggtgcgaggtgagggggcgagaacttcggcatccaatggaagtctccgaaaaaaaaaaaaaaaaacaagggctcaaggtacgcggcggaaggttgtcgccactccagcaaatccctagtgtttgtttaaagtagaaagtcgtctcagtttgacttttgaaaccggcgatagagtctatgcagcaaattccttggaaactggaagtctcattcttcacgtccgtagaccagcggaaaggaagtatctttaagctttgccaagttctttgagcatttatcagtgccactcaatttaaattacccagctttgcagtagccaggatagcgaagactcaggcgggaattgccagactgctgagccaaacttaagtaagaaggctctgtgacatcgggctacaatctatctttcataatattcaaggctttcccggatgctaaaataagccagagacaagctctcagggtctccagtatcagatcacttctacttccattaaggcttatccgccttccatccctcctaagaccagtttattatttgccagtagtactttaatttactcaaagaaaaggaggttcatcatgatcttgccaaatcatgttatttttttaaaaaatctgtataacctaaacttggctcaaataataatgtctccaaaaggcaaaacctcatactgtttctcaaattcaagtaactagtttggggaaggagtttgctgggaagaaagagcaggagggggctagttgatttgtttgcctcattgtcaattgtgatatatcttaccaaaaatgacaaaacttgtagtcataaaaataaactctaccctttgacctagt

SEQ ID NO: 65278 - DNA, 1453 bp, Homo sapiens
ttttacaaagaaggaatatgaagcccagagagatgaagtaacacgcccaaaatagtattactagttagaggcacaatccaaggctgaatcctcatctactaaaatcccagtccaagactttctccactatatcagtcacatgagctccacaaaatgtaaacaaaagtgaatggtcatagttaagtgctttctttcataccccgatagtttcacatgcctaccccgatatacatcaagaactattgggcttctctttctcaccctccatgagtcggtggaaaaactagcaaatcactgggcagaaccaatgccagattcaaggctctggaggccacaacactatcctatgtcccctgtgttaccgggtaaaaagcagatgtgtgggtgctatgtgagaaagacgcgtctcattagcgcacttctctgtctccaggaatcatccaaggcacaaaaagtaaacaaaaaggcagtgagctggcagccaaagcagtcccctctcaaggccgaccgactagcagcagcgtgggtaaaagtcgtgggtaaaaactgctttgctttcagggaggggctgctcttttaacagaggggcgggctgactggagcagaggagccaagacctgcgtgctcctccgtctcgccccgggcgcaactagaaccaataagtccctcaggctgagcaaagtctggccaggctccgacacggacctaggaacgcgctgaggccagagaagcggacgcttcataccttaagatctaccctccagcctcacggaaccgcacacggactccgcgtcctagaggcgggacgcggcagaaatcgagagcgcggtccgatgttgggcctaggcgatatccggaaccccaaaccctagttgtgcctcgagtcgactcggacaccaagaactcagacgccgggaccaaccgggttgtcgatacaaagtgggaaggatgggggcaccacacaaaggcagaaccgggactgtaggaacggaaaagcgggagactttttcaacctgcacccagcaccttcattcatccccagcgtctgactcccgtcggccaccgtactggtctgagaggaagggtggctgcgagaggaaaggcagagacgtcggcgccaatgcaactgtgcgcgtgcgcggccccgcccctttctccactttatttgccctgccctacttgttcgccaaaaatttagaaatgtgattctggtaggctctgatttccagagcctaccagctccttccttttagacaagcaagccactgagcccctcagaacttaaatttcatcatcacaggattgccatggcattcaaatggcataacgtgtgttaaaatcgttcccactattctttgacactagtggtaccaaactgtactctttaaatctttgcctgtgccttcccagaaccaaaattctagaatcccaggatttgtgggagaattttaaa

SEQ ID NO: 65279 - DNA, 409 bp, Homo sapiens
accactctcagtaccaagagtggggttctcaggagccaggcagggccagcacacggtggcgtgtcgggggaggtgggctgagggcaaggaaggaggtgtcccatggatcatgctgtataagcaaaccagactatcctgatgcccagagtgacatcatcaaggtcagaggctggccagaggtggggagactggaaggacttcggagtagtgcgaaggggccctggacaccagccatggagctgctgcacagagcctggcttccacatcaaggtggggtttggaggccaggatgagcccctgcagcggcagcactctggcccttctgtccctgccagcctctgacctgggtcagtcaatcattgctggattttagccaaacactttagtgttctcatttagttggaaatta

SEQ ID NO: 65280 - DNA, 2332 bp, Homo sapiens
gatgaagctcagctactgtcccatacaggacaagttatttgcaacagttggtacttctgaaagccttaactgttggatgttaccagacctgggctaacctacacaatgatcatccctacatcccgcttctctcgactttccatttcaatcaaacaagggagcagcctgctcaaaacattctgaaaaagcaaccaaaacacaataaatatagaaacagtgcaaaaccacagcacctcgtccactagcccccttcactctcacaaaaacatcatgttctaataaaagcaagatggctagaaattgtcaaaaatggcaaactgttttcaaagtttaaaaagaaaacatatgaaatggcacctactggcttttacagagagatcttaagtcacccaagaaagaaactaacctggcgttagtttgactcatacaaaaaaaatgtaaaaccaagacaggtttctagggcttaagttctggggtcctgtttacatggggaaaccaaattaaaagggtaagacataaaggcggtggggagcaggggcaataatgtaaagtgtgaagcagggatacagggccaataaggagaaaagcaacagttaagcaagacaagagggaaaggttactgtcctgccagataaggagctcaagttgaggacgagactacggtgagaaggagagtccgaaacaagacgagaaaaaatgccaacactcccctaaacagagcccgggaccgtaggagagcgaacgccgcctcccggggctggccgcggagcttcgcagggcgccggctccggctgggcctcgcccgggaactcgggcatctggaccagacccggccccctcccccacggcccaagggcgcacctcgcggcccccctccctcggcgcccgccggccccggcactcaccaggcagaagaggttacagtgacaatcttccaggctggccccgttcggcacgaaggaggcactcatcgtccctcacagcagccgccgccggcgccacaacccaccatccgccattaccgccgcctccgaccagagagagaaacacagacaccggggagggccggggggggggtagtggttgggggggcggtggaagaggaggccgccgggcgcccgccctccccacccacccccccgccgccgccgccgccgccgccgccgcgagcagcccccgccgcccggccggcacccagccgcccggggccgagggccggaggcgggagggccgcgccgcgctcgcctggcgggccggactgcggatcccgcagacgctcgtccctctctgggggacggaggggatgtgtgcccctaccacaagaaaaataataaattacacaataaataatcaaaatcaagtccgagacggcagagcccaagcccaggacggttctcccgggcggagaggcgcccgcacaggagcgggaagggcgagaaccgggagagaagcccaggcccccggcgcggcagcggcgatgtccttaagcccagagtctcctcagcggcggaggtggtggcggcgtctgcgggctcagaccattctctggctctgtcttcgtgtcgttcctgggccaagccggcctaaagtttgccctcctgtggcctcaccggctggacgccgtagtctcccccattttgtgggcccagcgggcggtgtttttccccctttaatccgaattcacgggttttcccttcgctttaatggcggccacagggaccagctcgccctctctgctcacccattggccgccttgaggtcacgtgggcccgggctcggttgggagggggagagagaagtgagcgagggagggccgggaagctttcggcggaggcggtgagctcgggggacggggcagccagctggtggccactaacatagcgccatctgctgggtgccccggccagtataaaacgacccggggccctggccctctctttgcggggaaatttacagtccaggaaggttcatttcacaaatcagtgagaattacgtggaaatcagtttgagttctttggaagagaaagtattggcaaaaattccaagacattctcatttatttcgcgaggccgctggggtgcaggtgcaaacctctggatttgggagtcagatgatctggatggggataagactcctcaacctaaaagttgtgatatgaagatataaatttaagaaacaaaatattgccctgtagttaatagactgggaattagagccacactgcctgggttccaagcttgagcaaatcacttcctgctctgtgtctttactcatctgtaaaatggggaaaacatatcccttaccccacaagcttattgtaatgagttaatac

SEQ ID NO: 65281 - DNA, 708 bp, Homo sapiens
attaagaaattgaaataataaaaagaaagtcacagtcctagagtattgctggtctcaataaacagctttggattgtagtaggccctaagagaagctagttccaagtagtatatgttggatctgcctatatagaattctagaaggagatggtagttatgttgaatgtggcagcaggctgagggtctgagagcacaaggcctcaaaaagaaacgcaagggtttaagcagcaataacacaaaggccaattaatcaacagaaagcaggagtaaataaatatcagagggcagaacaagatagtgtgaccaaagtacatgcaaacagtctgcagggagcagagctattgatccgtcaaagagctggcctcagagagggtcacagaaaatgtggaaggagaggtagaattggagggagagcagcaaggtacccagagccaggagaggagagctcgcagtgcagaagcaatatcctctctcagcttcaatagctatttatttctctcacttggtaagaatgcatctgtagcgagcccggtctataatcttgcaggcaatagtaattggatggataggagtggggctgagacattgcaagggtctcaggaaaaatatttcaggacagtcttcacaggcttcttggatccaggtttacctgtgtgtcgttgatagaaagagaggacttgatcggagcatggatctgatgagtaaatcc

SEQ ID NO: 65282 - DNA, 2167 bp, Homo sapiens
ctagactagcctggccaacatggtgaaaccccatctctactaaaaaaaaaaaaaatacaaaaattagctgggcatggtggcaggctcctgtaatcccagctactcaggggggccgaggcaggagaatcgcttgaacccaggaggcagaggttgcagtgagccgagatcgcgccatcgcactccagcctgaaggacaagagtgagacttcatctcaaaaaaaaaaaaaaaaaaaaaagtctaggaaataggttctctagagcttctgcaaaggaatgaaaccttgctaataccttgatcttagcccagtgaggtttgtgtcggacttccaacctacagaacaccaagataatatgtttgtgttatttaggccactaaatgtgtgacaatttgttttagcagcaacagaaaactaacatatacaggcactgaaaagggctcaaggccatgagggtaattgacagtatgactagatgattcataaccaagcaatacgtgtggatgatgatttgataaaaaatgatctatcttcctaactcctcttaagtattattccaaaataatatttattttttattcatgatattcaatttaaaaatacagatttggccaaacaaacctatttgctcttgctcaagagtgataagagcattttcttaaaatgtgtggtgataaaacacggtatgtgtggcaggggttctgggttgagcctaagctgtgtctgcacactgaattcaaatatgtcgggccatctcatgagctggccatgattctagccacagaaacggataatgtgcttcatgggatatataataattggattcctcagggctcatgtgctgtgcctaggggtgcctaaaactgagactcccaggaaatggcaattcattcaagtcacctttagtaataaatggttgattgtaaaggtacatattcatggaaacccagaaaaggctgagcaatcagggtcaggaagaaagggctaagaaggtggctatcaattcaaggcagttccaagaccttagctgtgggattttgtgaatctttactcttatgtgactcagacactccctttgtgtctgccacactctgtgctcacaacagactggcgttcataccatctcatctgtgtcttttctgcatcataggttctgcttactcataactaggcttactcataacctgactttagccaaacctttgattcattcaagtcctctcttgacttccccagcttctcttgaccccatagcctttcaactttatttatgcatttatttgttaatttgaaaatatgcagcacctataatgcgcccccatgcacttgattatctagtcagagaggcaacaatcaaataattacaaaagtgttgcaggtacattctggggtactcagcccatttgtttaaacaaagccctaggatgtgctgctgcatgctctgtgaactcgctgccttcaggagcagcagcaatgaactggccatcctgtttaataccacatgacctttccctccccgcaaagtccagatacagctaatgaaactacagattggcatttgaccaaggacaattaatacattggctggccagcaaccagcagtttaattcaaattaataagcttcccttagaaggaaaaaattacagcataacagacattatacagaatggacctgtttatcacagggggataaattttatattccagagccataatctaaatgtagaaggaattcatccatggagaactttctcgttgtgaaagagaaagttagagggcacttgtttgattcaggaacttgaagcagggagaagggcagagagcagggttggttttgcgtagagcacagggctgtgtttatcactcaaatgatggccagagtgaggcttagggaaactgtgccactttctttgcaggaaagtatcatagctctagttaggattaaatcagttatagttttcatgcagtttgcttctcagggattctctgggacagtccttggtctgggcccaagtgcatatgtttcaacacagcactgactcttatgccagactccaggttgtcatgtttatcttaagcaattttctttacaaaaaaattgaattaggctgggtgcggtggctcacacctgtaatcccagcactttgggaggccgaggcaggtggatcac

SEQ ID NO: 65283 - DNA, 954 bp, Homo sapiens
ctggcataaatgttttgtaatcctgaaacatttcaatgacaaagcttagaatgagaggtactcagcttttgccttagcagaatgcctgcaggtggacctggggatagagacagtagtggttaatggactctaggggtttaggggaattaaatcaaagtgttcagcagagagaggacaaaggggcagtagagggcttctgggctcagggccaacatcttggaccacaagtctataagctgagtttgactgactgtaaaagcctgtgaatctattgtattcactggcaaaaatcttcaaaataggcaatccccagcttattagtttatttattggtctgttgtctggaactgggaacaagttttcctatagaaacaatattacaaatggtggctctgccccaaggccagcccacaaaagctcacagaaccgtaatgtacctgaaatattgtactcataatactaaagatcctgaccactatttataaaagtgtttctgtgggaaagtgcatttcgagttttaatgccggtaacacatattcctcagccctgtgagtcctctggactcttgaccttactcccactgtgctgattcttatcagaatggcaccataagcgctggcaccataagcagcaggaaggcaagttagttgctttctgttgctacagaattcaagctgaagtttcaagcaattcatcttcactgagctgaccccaacccctaccatgtaccctggcctgtgatctaagtttagccttttaaacacaacaaagagcctcttatgcaaaacatgctttgtgcaccctatcccaagctgatacataaactctgtcacattagggactcaatttggatgtttctggaatgccaaagatgagcgggagtcttcgtttcatgaggaaaatggtctggaaaattttgggactagtaaaatccctgagacactggaaagggac

SEQ ID NO: 65284 - DNA, 544 bp, Homo sapiens
aggaagggggcctaggacttcattttcccacatcaaccagccattggatggaggctgcctcatatcagggaacatgatcttgggtgagatagctctcttcctagaggtattcagctgagggctttcatctgccaacacccccagcagactggggaatgattgcctcagtgccaatatggggaaatcccgatctgaccattgcatcagtacacctactgaaccagaatctgcactttaacaacatctccacgtgatgtttatgcacattaaagtttcagaagcattggtttaaggctggttctccaacttttgtgtgcatcagaatcgcctggagggcttaagcctcagctttctgggccccacccctggagttactgattctgtaagtctaaagtccaaggatttgcattttaaaaaaaattcccggctgggcttggtgattcacgctttaatcccagcactttgagaggctgaggcaggtggatcacttgagatcaggagtttgagacagcctggccaacatggtgaaacatctctactaaaa

SEQ ID NO: 65285 - DNA, 677 bp, Homo sapiens
ccctgggaaaagccgccgcacttctcacccaaactcgcggagccgaggggctgggcaggggttgggcgggcgcgggggccggcgaggcggatccgggaacgggtggacccgggcggccaagccccttcagcgccggcccaaccgccccggcccgggccagtccagcggggcgggggccggcgacacaaaggcggcggcgggtcctccgggcctccggcctcgggcagtcgcagggcgccccgggccgccggacctcccctcgcgttgcggcccgtcagccggcgccgcccgtcgcccgccctcagccgtccggcgaggcgcggcttcctccgccggcgcggggtcccctggttaacccctgcccggcagcgcggccgctgattggagaaggcggggcgccggggcagcggggacccccccccaccttcctcgtcccctccccctgctcccccactgtcggcgcttcccccacccccccaggaccccccccgcctcccagccgtgcaaatctcgcgaggaaacacgcggtttcactagtgtgtttacaccgatcactactaatccggaccgaaccgatccggattaaggggccggaggcgggtcctgggcaccagcggttccgacccccccgccctccgcgccgcacccgagtggcccccagccgagcgggcccccac

SEQ ID NO: 65286 - DNA, 1314 bp, Homo sapiens
actacattttaaaaaaatgctttcccccaaattcgtatggatgtctcctaataaagtcacgcagtcactcactggttcgtcctcaatcaaccaggcgtggagtcctaacctgtccatgattttaagaaagggcaggcgcacaacacccccgcacggagaaatgaacaggtgtggctcggcagaggccttccgcacctgcgttatggagtggtggccgctgtcggcgatggggtccccgcgagggcacaagtgatcgcgtggccacggcgaggctctgcctccgcccccgcgctccgggtcccattcccgaattctgccctcagcggcctggtcaatgaggttggatcgttggcccagaaagccacttcctgccgcgactggagccagccgtcgttgtgaaaattccccccacggggaaggaagtggctcttgggctgtttattttggctgcgggctagcagacggcgccaggggcagcggccacgcagaccgggcatttgtctagctgggcgggaggcggcggagcgggaagtgccacagattgaggggcgcacggcggtggagggaggggcgcccagtggagagggggctcacggtgacagaggaagtggcgccgcttgggggggtgcacgatggcagggggaggggtgctcggtggagggaggggcacacggtggcggggggaggggcgtgccgcagattgagggcgaacggtggcttggggaggggcgctccttggagttgggggcgcacgatggcgggggcaggggtgccccttgggagcagaagcagagaagactcggaactccaagagcaggtggatctgggagccccagatcctgggcactgggttgggggagaaaggggtcaaggtgtgcccgcccccgggatgctcggactctggggatccaggcctggtgacccccggtgaggaagagccagtgggaggaaagggccgggcgctgcccggagcagaggctggaggcgagagcgattgctgcttgctgtagcgcggccgctctccagttcctccggcaaggggggcctgggggaggactggccgaaaatactgtgatgctttggtctaagacaaaagccagcaggggatgagatcaaacaccatgacactgcgaaggggaaggccagcgcgggtgaggatttgccttcccagagaaccccaggggcggggctagcttccactcagcccgcattacccccacccccgcccccacccccggggcggggtctggaggatcagcaaaaccgcgggaaaggtgacagtcgccttccccaccaccgcctgcatttagtagg

SEQ ID NO: 65287 - DNA, 1521 bp, Homo sapiens
ccctaacctcggtttcacttgtggcatttgtgtgaggctttggttctcacgtgcaagggaggggggcctggtcagcaggctggcatgggcaccacagagtcacaaagaggctggcacctctctgtgctacctggtgtgccctgatgttttgcctcttttcctcctgtgtacctcaaccgagctagggcagcaggtcacagctgtgactcacctccggcaacccatattaacaaagtgctgccaaccaggcgagtcatgccaggatgccaggggaccaagggagtgtggcctatgggggaggctgggtgcccatggctctgccaatggctaccctggctcttgtcttgagaacggctctggcgggaagccaggccaaggctgcgactggtcagcaccccaggatggtccctctgtgctgggttctcctcggcctcggctgtgcccacccgtgtctggggtgtgtgctgagctgggggcaggtggagatggcctgggcctccaggggagaactggctgtctccaccttggggccgagagcggcaggggagggttggtgatggggtggatcctccagcgggtcccagttcccggaggaaggatgacaaatgagtgtgggtcgctccctctgtgggaccatttgcctcggagcagcagggaagggcggcaggttccctgcctcccgtggcgactcttttcggagcaccaccctagggatgttcttctgccctccggagacgtcggtcttccctggggccggggctcaaggccagggtgccccaagcccaggctccagggtgtgcggggaaaggctcggtcctgctcggcgcggctcgccctgggcactaggggtcgcccctgcccagcggaagccacgcgggcgcgcccggtcgccgcaggtttccccggaccgggaaaagcgaggcgtctccggggcggggctggggagggggcgcctgggcgcggcgccgggaccctgctgccctgtcctcccggccgcggctggacggagcgcggggccgcagcaaccaggccgggctccccgtcgcgccccttccggagcgggaggccctcgccgaggcggaggctgggacgcgcggggcgggcggcggcggggagccgcggggccgaggcgcagggcgttttccccggaggtgcggcgtgcgcccgcgacacaaaggtcttttaaagacctcgcagcgcccttcccggctgcggaggctggaggcccgggggggcgaggccggggtcgggggtggccgcgcgagggggcgctgggatcggccagaccccgcggttgcgcccgggctggggctcccgggctccttttgtggaaaagagcggaaagcagggccctctccgggtctctgaaaatggtcagttcggcttcgcagggctgcgtgcccggaataataaattggcttctctagggtcgtaatctgggccccaccccgagcagctttgagctggttcgcgccttccaggcaggactactgggagttctcaaaagcacccccgcagtcg

SEQ ID NO: 65288 - DNA, 895 bp, Homo sapiens
cctcataatgtcccttactgatgtccctctttgttgcatcctgggtcttgctccttttactcccctctcttttctttctcttttgatctccgcctgtccttcctcttctctcctttcccctcccctctccatccttcctctccttctcttctctctgcctttctcattaagagtcaaagttccttgccaaaccacagctcttaggtttctattttcccgaacagatttcttggctggttttacagacttttcaattggttctctcttctgcttccatgtagtctcttctctgtttccagtcactgctcctagacactctcctcccctcccttaacaagcctaacccctaggttacaaagtttgaaaaatgtcaacaggaaaaagggctcttcctgtagccctgtaaaaaagaagacgtgaaggagttaacctcgagcgacatcagtctccagccatcagtacagtgaggcagttcttgaaaaccagacagaacagaaggtatcactgtgcaacgtcccttctgtggctcacggcgccctctgagtcaggataatgagagaacattcttaaaacatgacctaaccacgctctgtcctcaaacaaattcctggatgtgtgtggagtaagctctcccagcaagcctgagcacagacgtgcggggcgggcttgttagcactcttctgagttgctccctttacaaagccaccttcccagccagttcatttgtattaaagtaaacttttaaaaataaccagtcagtctgtccagcaaacatgctatgggcctcttatggctgtactttcataattttatattgtggcgactgggtctctgtcttggggggtatttgggggcctttgacttcacactgtagcaggaagaagttatgcaaaat

SEQ ID NO: 65289 - DNA, 1515 bp, Homo sapiens
ctttctcattctgattctccccacagccaaccgtggccttttgaagtcgtctacaaactaccactgagaatccgggaaagaataactgacacttgtaggcttcgaggactctcagagtgatatgtgcctgaggtgaccgaagtgggggagatctaggagagcattccggtcatcaaagcaggaggacaggccctgaaatgggcgcacgtgacagcagcagccacctcgagagtgacatcacccctgagggcggagcccaactatgtagggccttgtcagttaccgagcgtcctccctgctgcccctccaaatgccacccacaagtccgagccccccggggatacgagaaatgccaggacatcccagagcgccagagccagggccccgtctctccgcgcggaggagggctgcgtccccactccctcttccagccgttccccacccccaaactgtggaaggggcgggggcgcgcgcgctccaccacgcacgcgcccccacgcacgcgcgctccctccgcgctcgcgcccctccccaccccagcccggagggggcggggctgcgggcggcctcagagggtgcgacgcccccagcgcggcggcggcgctagcgagcggccggcggggcgcgggttgctgggcgcgctgctccggcggggcccgctggcacagccgcctcgcgcgagccgcccgcccggcgggggaagctgcgagcgctccgagcgcccggcctagggccgctggcgctgccctcccgccgccaccgccctccgcgcctccttcgggcggccccgcccccattcccatccccctcgcgctcacctcccggctgtgccgcgcgctaggcggagcgaggcgcccgccgccgccgagccgagccgaggggcgagagctggcccccgagccgccgctgacaggagcaccgccgcgggctgcgctcgccggctgcgaggccccgccgcgccgttccggggtgcagactcgccgcggggcgttggaggactgcgaggtgctccgggaatcgcgggcggcgccggcgggcggcgcggtcctcacaggagaccccggggactggggcttgacccggaggtgcagagagcccctcagagcggcaggtaaggggcccggggagcagggcgaggaaaggtcgcttcagtgacagggtcgttcgcctccacagcctcggctccggggagaggggcgggggcgagcggggagacggcgaaatgggcagcgaagtgcctcggtgtccaaggcgtggggaaggctggctccgaatatgacaccaaggcgggcttcagaggcgtgtggggtcgccacttggctgtcaccgaagatgtcatggaatttggtacctagagcgtctctggatgacggggaccaaggataagatgcgaggcggattgctaaacgtggcagggaatgtggtgcagaacgagttgcaaaatgtgcccccagaatgcagcataaaagtagttgcgaaatgtgccaggtaaggcacaggatgggctggcctctg

SEQ ID NO: 65290 - DNA, 1935 bp, Homo sapiens
ggtggcaaagctttttttttttttttttcattagctattaaaccaaaggggcagaatctaggcgccctagatgtaacttcatttacggagtcagaaaatccacaaaggctgccaaggtggaatgaatgagaggaggacgaccagaaaggagaagtctgggaaggggaccccagatccacacggatgatcctcgctccgtgatacagtcggggacagggcagggagggagggagggagggtggccctgccatctcccaggtgtcaaggtggcggcagctccgccctcagcgcagttggcaccggcctgacccaccacagggccaccgaggccaccgaagccatggggctttcccactcgggaaactcccaccctcgcgctcagaagctgggggcgtcgggagacacaggcggggacctgcggctccacgttgcagcccgggccctgctcggggcaagaggcggtggctccggtttcagatttcaagagggcagccgtggcaaaggctggttggtccatttgcaccctaccttgctctagaacgcggcgcaggagcaaagatccaaactcggggtcaccagcaagcgggggtctcggttctaacttcagcagagacccggcacccgggcaggccagggcaggggccgcctggaccgggagaggctcggctccgagagggcgggcgagccctgcagccctcgggcccagggtgcgggtcggcgccgcagtccagtgcgcggccgcaaggggcaggtgcgaggccggctgctactcgggagccccgcgctgtccctccctgcgcagtcagggctcacctgggccgcccccgccccgcacccctgcgcgctccgctcccacccccagcccggcctcctaccttgcctacccgagcgtcccttcagcctccccgcgccgcgcccgggtcgcttggccggttctgcgggccgtggcgcgacggcgtcgccatggcaaccgggcggcgggctgggcggtgtctccgggaccggaagtggcgtacgcggcccccggggctgccccgcacgtgccaggtccccgcggttgcggccacgctcgggaccgggccctgccagctccgggcccgcacgtgggcgaaccgcggccaccgtgagcccggcctcgcgacctccctccggggcccccatgatcgggggtgcgtgggatctgcggcctgcgggggtggagggccgggagctcccccgggcctgcctcgagggccgcgggattcgtccttgcgagccccgactgcgcacggaaggacctggggtcggccaggcctgggggatgggacgggccccgaggagagcgggtgccaggggcgagacccgccgcccttccccggcttggtcccgcgcttcctgattttctcgctccacgcctcccattctgccctccaccttcttccctgccccgccctcgccctgcccgggcccaggaggccactagatgtcagacccggttcgggccttggccacgccgccgctccgggagccctgggggcacctccccagcccccacgggggagacgatactgccgggaaggcccggactagcccccgcccccgcagagtagccttcggggaacaccgattccaccaggctctcacgaaagccgagagcttgccgtccgcagcttcccctgcccaaagcgcagagaaacgagggcgccgaggccaagaccaagaccgggagccagccccttcggagcccggtccaggcccccggtccaggaagtgctgtgggtagataaggggcccagctcagacttcctacaagctgggaagaaagggttctttcctgtctgatgccgggccagatgtagcaagcgcctaggggtaggagggaaatggggtttcctccccgcagagggaaaccggcctccattcaggaacgccctcccccacctgccctccaggcac

SEQ ID NO: 65291 - DNA, 2190 bp, Homo sapiens
aaaatagctaggtgtggtggcaaatgtctgtggttccagctactccagaggctaaagtgggggaatcgtttgaacctaggcagtccaggctacagtgagcccttatcacaccagtgcactccagcctgggtgacagggcaagaccctgtctttaaaaaaaaaaaaaaaaagtatttaatgttatcatccaacaattcaatacaaacctccttcaattttgatgaaagctgagaattggaaataatttatataaaggtgtcatttggtctctggcccttccccttttccaactcacaggcacagatacctttggggctggattagcatttgcgttgggatccacggcgggaagggtacaggatgggaactgacaaaaacagagccaagctggtcgggtcggtgcctaccccagaattcggggacatttctagatcctgcaggaaagcgcgggagggcctgactcaagctggcctggccctgagcgcatctgcgcgcccgaagcctgtccctgaggcacggagagagcagctttcgggttaaaagggccctgggaagagatggggcgggaaggtggtacccgttgggcgcaggccaggctgccaggccgcagggctctgtcccgcgaaagtcagtaggtcttccactaaggcagaattgtacttttactcgacagcgtggagaggccgctcagaacagcagcagcggaggggaagtcagcgcaggtcacagacggtttcactctcagagacttggcctagaacttggaggcccgctgctacagcacgctcgcctccaggccacccacgcccccaccacccgcactgagccgttatctgcctgactgacatcttggccaaccaatgacctttggggctgccaaagcgcctgcctccgagagttgggcggggcgagtagttgcaatgacaaacatttaacccaatagcgaggagatttcagacgctacggccgcaataaccaatgacaagaaagaatcctttcgaaaggacgtgtcaggcaaccaacggccggtgccgctgcgggggtccggcggcttccgttccgagagggcggggcggcgtcccaaaacggaaggtggttgtcgtccgttcccaagctggtttgaaactaggggtcgggctcggccgtcgtcgttgtttgtcgccgcatccccgcttccgggttaggccgttcctgcccgccccctcctctcctcccttcggacccatagatctcaggctcggctccccgcccgccgcagcccactgttgacccggcccgtactgcggccccgtggccaccatgtccctgcacggcaaacggaaggagatctacaagtatgaagcgccctggacagtctacgcgatgaactggagtgtgcggcccgataagcgctttcgcttggcgctgggcagcttcgtggaggagtacaacaacaaggtgggccgggcaggggctcggaacccagctggcggggagcgggccccgggagcgccctttccgggccggagcccaggcctcagaaccctcttgcggactcgccctagggccacggagcggttcctctgtctggccctgtgctgaaggtttcgtactcgttgtctgtctcctttaatccaggcagcattcttgtgtagtcggcagtgtagtggggaaactgaggcacggttttgtgacttgcctgggtcaggcagctatttcggggtggaaacaggtcttaaaaccgggtttacgccccaaagatactccatttattcatcccgtgctctccactcctgccgcattgctttcgttggtgggcggggaagggaagagagagtgatagctgtgaaggaaaatgcaggcgcttctattggtggtcgtgcactcctggccacactagatttctattaagacgatctattgtacaagcttccccgccccctactcccaccccccccgggtactcatggatcctagcccttctgccagaattactgttgctcttgcttcctgatatccattctctctaaagcaatctctttggaaatcttggcctgtggcatgatcccgccgttgtttcctgaacacagaaggatgacagggccttatctcttggcttgtttcgtgctagtacagttgtgtgacctttagtagtaagtcttgctggacatacatcaatttgagaatcctttatagaagcacggtgtagta

SEQ ID NO: 65292 - DNA, 2499 bp, Homo sapiens
ggccggctaatttttttgtatttttagtagagacggggtttcaccatgttggtcagactggtctggcactcctgacctagcgatccgtctgcctcagcctcccaaagtgctgggattacaggcgtgagccaccgcgcccggctgtcctgcttctctacctgatatgtcatgccctttggacttaatctcaccagcatgggagtcactacaaagcttttcagcagctgccgctttgtttctctccatcttctaacggattcggttttctctttcgagacagcagagagaaaatgaagaggggagtttagctccaaagggcttgtctgatcattctccctctcccaaaggcctgtgactcatctgagtctgtcccaaaccatctcttgcatctaggggcttaagtgcactgtggctatttacataaaactttattactttaaagctctaagggctcattttgtgtttctaactttcctatgttgataaagcaaatattagatccttatttataaatagggaagacgttcagagagattaaacatttgggcaattcacttctctggcagcagtttctttcccagtacaatgaggcaacaacaaaatatcattctggacttgctcagatttaggcagcaatttggaagcaaagtcagtttcataactcagatgtgtctccactaaaacattatgagaaacaaagtccggcgctctctaggcaaccgtgagggcttgagcactaactagatctgctcaagggcaagagaggagcgagtaccgtgcagccacggaacggactttgcgggcagtggggacgtgtttttggagcgaacccggtaaaggaagtgtgctacgccatcaagggcccccagtcccgggtgccgcggggacagtgtagggtcattagctgttgagccgccccgggcgggcccaagcctttggatctcaggtgaccggcacaggcggccgcggggtccggaactgcttgttccggcagtggaagagacgcgccggcgttggccgctgctgctagcagcttgaaccccagggtcgggaccgatgtcggcttgggctgctgccagcctaagcagggccgctgcccgatgcttgctggcacgaggccccggggtcagggcggctcctccgcgcgacccccggccctcccaccccgagccccggggctgcggtgccgctccgggcaggacgctgcactttaccgcggctgtccccgccgggcacaacaagtggtccaaagtcaggcacatcaagggtccgaaggacgtcgaaaggagtcgcatcttctccaaactctgtttgaacatccgcctggcagtgaaaggtgagaccctgacggtcacccagcactggctgccgctgccctctcagtgcccgcagcctcgcttgcctctcggaattgggcccacctagatctccggcccttcactttgttttccttccccagtacccaccattgcccacctcataaatcctcaaaacacctaccctacgttggaggttctcactcacttttccagacgctgagcatctggccagtttgtcagagagggagctgctcttaagaagataagccggtaaggtagaagtgacttcatcctaatctagctgggtacttaatagaaacaagccctaagagtcagggcagatgtgtgtctctcctgaagagacaaatcaacccctctgaagtcgcctcaagtaccttattggttgtggcaggggcactgagtaaagctattacttaagtgcttaggccttagcttaggccttagtttgcttcattaatgtttccccaagacacatttccttggaaggtagatttgcagccatgtcttttctcccttaggtcgccacactgaaaaggctttttttctgtttagggccagacatctgtaggagcaaaggaaaagtcctgtagaaagcatggactttggactgggcgcagtggcacagcctgtaatcccaggccagaggcaggcagatcacttgaggtcaggagttcaggactagcctggccaacatggggaaaccctgtgtctactaaaaataacaaaaaaaaaaaaaaaaaaaaaacagctgggcatggtggtgcatgcctgtaatgctggctactcgggaggctgaagcaggagaattgcttgaacccaggagttgaaggctgcagtaagcgagattgctctactgtactccatccagcctgggtgacagagcaagactccatctcaaaaaaaaaaaaaaaaaaagagagagaaactgtggactttggagtcaggaagactggtttctgtcactgactaaccttgaacaagtagcttaacttgagtttctctgaaacaaggataatacccaccttgaggtagtttatggtttatggcacatcataggcattcagttaatgttaatttaccccctcagctcatgcctggtatttgtttgcttccttttcttcaaaattcttgatattaagttcaagcaacttttatttat

SEQ ID NO: 65293 - DNA, 2315 bp, Homo sapiens
atctctggggtgggatcttttctttttcatagttttctgcatttttcaattttcctacaaaaagctcgtgttgcttttataagaaaaaagttattttctgaaagaacctctggcggaactcagatttccagggacccacatgccagcactatcccagcctcgggtgtctgaggtacctagaccagagggtgtggccctggaggtgtgagacagggaaagctgggctgggccggccgcccctgcccggggcaagagcagcgtcgggaccggaggaccagtcgggggatggggccgcagaggtggccgcgcgccgggaagtgctcaggccagaccctccccactcgttacacgccctgtgctgggcacggggaggagcaggacgccaccctctggaaccacccagatcgctggggcctccgagaacccggagggcggaaggcctgagggccccctgcagccgcctactcctcaccccagccctaaagtagccggcggggaactgcgccagcccgcgcgcccgccgagccttcggtgactgacgggaggtgggaatgtgggcggagcctcacgccggagctgtgattggaacaaccaacacctcccaatctctcccaagagagggagacagcaccagagagggatgcgcagaggcgggggcttagaggcctctacgtgattggctaacagcgcagggagccgggcgctgtcccgatgattggcaggcgctagacagccctcggaaaccgccttggcttcgcccattggcatcctgtgagagtaggcgggattggttcatcgtgtggtgctgatgattagctggccgctgagagttagggtgttgggagagagttggagggggacggcgggggctgccgacttccttcttgttattggctggtgaggtgggtgggggtggtgcgacggcccagcggctgcctgggattggtgggggccggcgtgagtgacagacaggggggcgagctgcgcgaccagcggtttgtttttcggagcgttcctgaggtggagaacggtggccggacggagagactgcgggtctgagggactggcgggcgggcgggccgagcggcgccgccgaggccgggctgggccgagcccaggagcgcccgggatgtagcgggccaccctgccgatgccacagcgcccggccgcgggcggagccggagccggagcctggggaggcggcgggggcccagagcgcagcccgcgccccccgcgcggagccaggcccgctgccgtccccgccgcccgggcccccggcatgcagccccggctgcggaggtgacactcacggaccttagccaccgccgccgccatcgccaccatgggtaagtgtcgccaccgccccggcctgtgcccgcgctgcttcgcgacgccccgccccaggctgagggaggaggaccctgggccaccgcctgacaggcatggacagcccgcccggcccggggctgcggaccgccggccggccggccgcccgccccgctcgcgcgccgcggcccgggcgggggttctggctccgcggggcggcccggccggcagagcccgctcggcagccctccttctgggcggcgcggcgggcgcatcccggggaagcggcggcgggaccgagggcccgtgctccgcggggcagcctggtccgaacgagccggaccgcgagcccgagggcgggggagcaagagcgcagtgtggggcccgggctggaggctgccgcaggcccagctgctgttgtgtcttttccttgatttgcttttttttcctgcctgtgtcatttccttccctttgctcacacaggccggcctgtgagagttcccggggcttgctctccagccctgtgcgcgccccagcgcaggggggagggcgtgcggggctcggctaggaggcgattaaactggagctgtgatcaagcgcgcggttgacaaatgcgtgctgcacgcagattgctgggggtcaggagttggtcggatgctgccagttagaattcacatcctactttttgaaaaatcccgttgcaggggtttaatccattatttttttcttgcggtatccctgaaattatgtaacttttgaaagaaacatttgctacacaaaagaatttctctgaaatcacttcctttttgtcagtatttacaatttctactgtgaagatgtaatctaaggaaagcttttaatgtcttccgcacgtagcatttgagttgaattatattccatatcctttttggtagtttagcaaatgactactggactagactaagaaataacattttaaacgttctttacttctcctgcccagacaggtg

SEQ ID NO: 65294 - DNA, 493 bp, Homo sapiens
agaggactaagctgatgtattgagctgatgggaggaaatggcattagtgctctagaggaagagagaaggtgacattatgaaggagtaattatatataagaatttttttaaaagctagtctgattgccagctaaaatggtctcctaggggttattctggtttctgttttgtgtcaaggtttttttggtcggatatgccgtagtgcctgctccatctctggagtttgtttcctattaggaagggactttgtttgcctgagggagctggcacatgctggacgttggtgccatgacccatctgagtcacattcctgacctctagggcctaatagttggccccatgcctgctcctcttgggccacacaccctgggctctgttgttgaaagcctcctttatgtgctctaggctcccagaaccctggccgaagctcacctccccctggctatgttcctgagcggcagcagcacattgcccggcaggggtcctacaccagc

SEQ ID NO: 65295 - DNA, 2290 bp, Homo sapiens
gtgcagggaggttaaatgcccaaagtcacacagataagtggtaggggactaattaaatctgttccaaagcctgcgctctaaaaaccagagtaaacttcctccatttctggggccacaactataaacactgcattccagccaaaacacctctaagaaatctgattaaaaagtaggggacagatttgaccagttcagcactgtaactaaaggctgaattcacaggcttttggcaggtgatcaaatttggtttcttccttaactctcagggacaagaaacagtcctgggtgtcttcaggaaggtatgagtgtcaatgaagaattgtcttaacgtcgcatatacgtattggaacatgcttctacttgaacagatattacaataagaaaagggcaaattccaacggctctttctccgggaaagtcaagttaaagtatgttaggatacaggagaaggctgggcagagaggttagttccctatttcctgagaactatgaacaattttacctacccactgcccctccctcgagctctcttccttatccccaacccccatctccggcgcccaaatcccctgcaggcacccaaaaaacatttctggaaaacaaaaagacaatgagctcttcgtttaggccgattctgggagtcatctggatcttgtgtccttacgaggacttgacccgctgcctgtcagcccaaagtgcgcggcggctggggacagcggggagcccaggaccggggtcggccgccactctgcctgaacaggacaaaccggcacccagccctaggttccccacctggaagtcctagggggtggggaggaaggggaaagcaggagcccgcctctctcgcccggcaactccgcttcagcgtctccccgccaggcccaagcctattctgctctcgggctgcggcgcctcattgcgggagtcgaggacgcgggttaaaaagggggcccgtggagggtgaggtgagcccaggatggccgctccgacgaaggcccgggcctggggagatggaatcggtggcagagccaggagggactggccccggcagcgtaccaggcaccccgccaggcaggtacctgttcctggagttagcaagcagccccgaccgtcttggctccgcctcctcagttttactgccgcgccgccgccagaccggttgctgggaggggagtacgcaacgtgccatgcgcagtggggcgaccgggaggactgatagagcgctccgccccaccccgccctgcggggaagtcccgccctttccgagtggccgcggctgcggcaggccctagcagccgccgccgcgccgagagcggttctcagttcccgttgtctttcccgccgcgcagcgcttccgcctacagcctccgcccccgcagcaggagggggaagcaggtggcttcaacaatgaaggaccagagaaaggcaaacttggctgttcctgagaattgtgtttttctcatttcatgtggtaggacttctaatggaaaacccgcctcgcacttttcttggacgacatctcaaatgcccctcactttggcctctcgggcaccagacaacaagctgcaaaggggaagcccatcctttctttgctccccactatttgtaaaacaaggaaaatagctcaactaatgaaaacgatcttgtcccctcagtatctttttttttcccccgaagccttcctcatccacagctgaagccgtttgtggaaacctatcaggtttgtccaagccaggttatgcagagcttgagaaatgaggaagcgatgaactaagcctcactcctgtgagactaggtttttcagtgacttatcccccgcgtgcgcaggagggggtatccaaaacgcggatatataccatcaggtaatgaacactcgctcttgccagctctgagctttgacacagatttagaccgtcctaacttccaagactgggggaggagtttagctacatccaagtagggacttatagaaatatgcccctggaaggccgggcgcggtggctcacgcctgtaatcccagcactttgggaggccgacgcgggtggttcactaggtcaggagatcgagaccatcctggttaatacggcgaaaccccgtctctactaaaagtacaaaaaaattagccgggcgtggtgacaggcgcccgtaatcccagctactatggaggctgaggcagcagaatggcctgaacccgggaggcggagcttgcagtgtgcagagatcgcgtcactgcacttccagcctgggcgacagagcgagactccgtctcaaaaaaaaaaaaaaaaaaaaa

SEQ ID NO: 65296 - DNA, 2984 bp, Homo sapiens
tctcctgacctcgtgatccacccgtctcggcctcccaaagtgctgggattacagacgtgggccaccgcgcccagcctccttttcaaatcctactcttaaaacttttttttcatatagaagcaactaaaagttaacaccggaacagtcaactcgattaacagcctgccaaaagatccgatcatttcaaattgaatttccaattagaatattcacaccatagaaacacttctgagataactcagcactataatggagatccttcaaggttatttaggttacaatcatccaagccatttttaccttggttttccctcttagaagtctccgctgcacctgtcagttctcaaatgcacaagtccttgccagaccacccagcctctatgactcctgaagcaagcaacacaggaccaaggaaaattcacacaagcgctaacaagtctggtttgattattttctgcaagctcatccaatagttcctcagcgactgagtctagacttgaggaaagaggactgagtgaggccatcattccttgttgtcattttagattaggtcttcctgacaacggccaaaacgagtattctggaaatcatgcagactttcctctgtctctttatatgtgttggatacaaacacgtttcattttagaaacctccagaagagactggccacagaggtttttgcttctattaaacccctttgcctagtttctccccacccaagagaatcaatacatcctaatgtcatcctccggcacacactgtacatttcctctaactctgcccttttggctatcatttgctcacagctccgtgggaaagttcccccaaaccattacaattatctcaaccggaccgggctacaggccaagcaactcggagtcaccgctcggcctggcccggccacgccgacgagcgcgtcctggcccgctccttacctgtggccgaagccgaaacccggcccagcgccctgcgtccgacacccctgcccggcctgcctctcggcctggccgccgcctccgcgatcgcagcggttttactgccccggatgcctctaggacgcagccagaaccgtagctcagtcacgccgcgcctctcttcacgtagcctccgccgtccgttacgtagaatgcgagcggctcgtcagcgcctgcgcgcagcctgcggggcgggacgcaaccccggggaaagcgcgagacctccctctctcccgcccggctgaggcgaggtggggcttttgggaaaattacataatccccgcccctgggccggaactgccctcgcctatcccaatcctcctacctaggattccgtcaagttgacgtcacacggaaccggtgctccggaagctaaaggtggccatgctgtgtgggaccacgtggccagaggcaagagtgtcgctctagtagtatatgcaacagtttaaactataggcatgttcatgtaaatatggtttctgtccaacccgttttctcttgggatttttggctagccccttgacgccactttttcttcattcgcagacccactttctagatgggtcatgaacactgtccacccaactgcagtttcccgtcagagtatctgaggagcctgtgaggcgttctggagctttaaggtcaggcgccttccgggagccgtagccccggccccgcccttctgcccgcgcgttcctcactgcgcatgtcgcgtttttgttcccctccccccttcagcaacgggccgtgaggcggtggcggtggtggcggtggcggcggcggtggtggtggtggcggcggcggcggcgaagggggcggagaggaaggagcgcggcgggaccgggccgggacagcgcgtactttgggctccgggattcgctccgcgcccgcggttgtagcagctgccgctgcagccatagcagcaggtttgtgcgtggggtttctggacgcaaggccgccagtccttgggggcactggaggcaactgctgggcctagcgagggcggaggaaccgcggcctcgcttaacaaagagtcggcagagcctcggggcaccggcggccggggtgccgggaaggggtgggagtgggggctgaggcctctagggttccttcctagccgcgtcgccctcccacagctcccgcttccctcacaagtcttaccgaggcccagttggcggctttccggaggcggcgccccctcgcctaggaaaaggatttgcagggtgcccggctccagggcaggaatagcgcggggagaattctgacccaaggaggcagcgcttgggagatgcaggcctccgaatttggggtcctgagaggcaaaagctgccaaatgagaggagtgaaaagatataggcgatgatctttgtgcagcgttgagtaggtcgattattagcatcactgtagtcacacaaacttttttgcggcctacttgagagcgtatctgatgtgaataaataatttacatggaattgcaaacatatgcatcaaaaacaggagaagctgtcgagagttttggggaattacattctcatcactgagaatttccctcttgcccccactcctataggcagttatccaatttcttgtggcttccctgtgttttctttttgtcaatgatgtttctatgtctgtcctctctcgtatacacacccaggacttcctcaagcgcagggactatgtcttaaggcgctttgcagagccaagctcatttctggcacataagaggtgagcaatgagtgtttcgtacaaaaattaatgtttatattttgacagctgggaaaagaaaatatatcttcctgtacctggaagaagcattgtgtagcctaatgtgcaattcgttcattcaaggggtatttttattggtgcctattctctagcgccgttctaggtgatagggataggtgttagacccctgcctttggggaacttaactttctagtagcgggaggagaggcaaacagatacatatattatactgaatgttagaagatgatcagtatcttaggg

SEQ ID NO: 65297 - DNA, 2469 bp, Homo sapiens
ggacaaaataccttatacacccaccccttaaaacaccaaggagagctgtccgttactcacccacaataaggctggatacaggcataaacttggcagctacctgcagcctataaaaggaacagaaatttaaaaacctagagccatccttttccccctcttggcaactgatctctcatccctggtgttacgtgtactggccaaagcatatcataggcacgtattccaagccctttctctgcaatcaagaaaggaaacggcccccaagaggaccgggattcgggttcccctcccgcagtgaaactggaagccatcccagctcagaacccagaaagcggccaccaggagcaacctgtggcgagtgttacgaaccatccccctggcgcagcacacaggtccagcaaggctcgggctttctgcaggaactgaaagcggcgattgagctggatcagcttgaaagcagatcgggaacggtaacctggacaaaacaaccaagtgcgcaaactgcttcactagtaggatttctccggcctcgcaaccgaccaccccttctgcaggagaggtacataatggtcgcaaagagcaggcgaaccgggcagagatcgctcgctcgctcgcagactgagcgaatccggactcacccgtctccttcgccaagtgataaaacttgtctcgtcggctcttgccaactttgcccttcttgcccatggtggaaagggggagtatccctcaatctggggagaaagtagaagttgggaacgtctctttccggagcaccagattccacttccagtttcccacttccagtttcccacttcccgcagcaattccaccccgcgcccctctccgcacactacctagacccagagccgctttctccacacttggaaccgcacaagtatgcagctaactacttccgcttccgcttgcgtcccctgcgtccctggctcgaggttttccgccattttgagtgtggccctagattgttctcaatactctgtccttgggttttgtaagttgaaagttgagactaggaaggcatatcacaagaactataaacagagtttcaatgaggcaacactgaggaggagttctactccttcctcatccccttccaaagcccctgaactcgagtagccgcccctcccatcatggttcccttagtgtggtctcgccgcacaccccgcccattgacccggaattcttctctgcctggtcttcaggtcccaatcctccgcttccgcgcttgcgcgccaagacggctcggatgccggcggtctctgctgaagagagaagatggcgcttgacggaccagagcaggtatggcgggtgcagtggcggcccggcaggttacggggctgggtgcggagcgagcgtgatctgagtggagagcgggccggggcaggagcgtcgggtgggtcggaggtgcctggaccagtccatgctggacgctgcctgcgaccggatctgctgtgtcagcgccgccctcggtgagtcagggcaaggctgggagaggaagacgcggtagaagcggagtgagtgagggaagcgatgggcgcgggaatggccggcccacgggtcgcaggagacgggacgccagtcctttggctccgttccgctggctccttcgtcagtactgacacctcgggcttgtagagcacttcacgcagtgcaaagcgccccccgtctatatcatatcgcctctcggtcctcctaaaagtcgtatgaggtaggcggcgttcccattcttttattttagtcctgggaaaatggagggttccaagggagggagggattagaacccagatcctgagcctccgaagtccaaactttttctactacgcaaagctacctggtgtcaagccttattcaaagtgccctgcaagtggctttaccccctcggatgtttaacctgtcgtttaagactcactctgtgtcttcagatggagctggaggaggggaaggcaggcagcggactccgccaatattatctgtccaagattgaagaactccaggtgaggacggactccagagggagctaggaagggtgatgatgggggatggaaacggacttccacaaatccatctaattcctttgggagtgcagtggaagaagctgctgcttctcctttcttgtttgtttcttagctagtagggtgtatgtatcagaagtaagcaatctcttgttctcctccagtcccatctctttgagggtcttagtgttcacagtttgttacacatcttcgagtcaaatcttaatagtaaaggtacctctagccaaaggtcaacccttttggaagaagcccgaatgaaaaggattcttataaaagggaaacataagctcaggagttgaaatttatcaccaagaggttgggtgagggtgaagtgagaatgtgaggaagggcatcattgagggatctggacaatgctaattccatagagactgaatgaaagaaattgggcaacccagag

SEQ ID NO: 65298 - DNA, 417 bp, Homo sapiens
tcctgggaggcaaggatagaggcccaggctgagcagcaggaaagtgggagacagaaatagcttctttagatgcctgcagaaggatttcccacctgaggccttgctccctgacatttctgtggagcccatctgggagtcacctccacccccacccgcctccccatggctgctgcctgcaaggcctgtttggcagctctgccttgcacacactgtccctggcagcttcacagggctggccccagggcccagattatgcaacgagcacaaccagccaaccaagcccggcagggtggagacttgtaccaaatcaaaggaccctcccccaccccagcatcatggagatgagattcttccccaacctcttcatcccgcactaaacccatgttcccaacacagagggtcagattcttgaccaga

SEQ ID NO: 65299 - DNA, 2472 bp, Homo sapiens
agcaaacccgtagatgagcaagaagccagtgtcaaatgcttgggcacatggcttcggacgtggtggagttagaacctgaaggccaaataaaaatgcagagagggtgacaaggcagatgggcacagtttccaagccctctggggcaacctgaacagcagactagagcactggcagggtcaggctgaggtcctcacacactgagcagaagtcgctgctttgcaagggcttttgaagctgcaatctgagcagctctcaaaaccccaaaggggtcaggacagcactctttgaagcaactctcgcagactcctccggccccagaccagcagggctccactctgcacgtccagactaatcaactcccggacacgatgacaggaggcagaaagcccagaagagagccggcctgtgactgggctgggcctcccctcaggccaggccaccaccgtctctggtctaagctggagtcctcccagcgaaggcgcctggccctgcctcaggagtaaagtccgcccgtgcacaagctggaatcccctggccctagcctcagcgtcccgtgcccgtgggaagccaggctccttcctccttattagcagccgggagccatctcagacacgctagagctccgccagttcccaatcagaaaaaacagggcagacttggactgggaccaaggccgatgcagggtaaccccggtttctcagcgagggccctttcccaaactttctcatcactttccagccctcctaccctagacttctcaacccacccgccacaattcactggctccccaaactcctccatctcccagtcactcggaatccctgtgccgcggaagcccccaggcctcccagctgcttccagccctccgctgcagaacctgcttccccttcccacttctccaccgcgacccgccgcagcccgagggtcccggcccgccctccaccgtctcccggagttcctcatgcattccccagggccctcactcgaggccccttcagccgccggcccgggcgccctcgcagcgcctctcgcccccgtccgctcgcgtcctccttgctcacctggtactgcgccgcggggcccgcggggcccatggggcggaaggcggcggccccggggccccccacgcctcctgccggacccggtccccggagcgccggtccgggcagcatgccgggtcccgcggggggaggcggcgctcccagggccgcagccacggcgccgccgccagggcttagcgggggcagcgggaacccgcccgcgcctcggcccgacatcgctccgtcccgtcccgcggtgccgcgatccggactccgggctccgcgtcgagtccactccgtgctctgtgctccgcgatccgggacttggcgatcttaattccgggttccgggatttgtcgatccgggctccgggatttcctaatccaagttcgcgagttcctcacagacccggttcgggacagattccgctcctgcccgggagattccggatccaggatctgctgcgggcccgccttccgtccccggcctccggaggtttggccgcccgagtcgagttacccagaggcggctacgaactccctgccccgcccaacccagcccagcactaggccccgcctctacctggtgcccaatgctcgagtgcctcctcgaatcctgcccctcgcgagacccgcccccagcgggcaccgcccctaactgccgacctcagagccccacccccccacctttggcccagcctttcgtcggaggggcgggagcggaagctgcgcgcggaagcgccgagtgaggcgcggggtcagaggtctaaggtcacttaggggcttcacagtgaatgagccgttgctactactctctcccggtatagcaccctcaccgaattccgcggccacactccccgaaaatagttttgtcaagtctcctttctgcatcttcggcgttaaagactcaactcagagtcggtagctgtggctcacgcctgtaatcccagcgctttgggaggctgaggcgggcggatcccctgaggtcagaagttcgagaccagcctggccaacatggtgaaaaccccgtctctactaaaaatacaaaaattagccgagtgtggtgacgggcgcctgtaatccaagctactcggcaggctgaggcaggagaatcgcttgaaccttggaggcagaggttgcaatgagccgagatcgccccactgcactccagcctgggcggcaagagtgaaactcatcaaaaaaaaaaaaaaaaaaaaaaaagactcagctgctctgtggggcagaacagcagccaactcaacttcctgtaaaagctcatgctggtagctcggaactgccaagggacctaggaggctccagacttgacccagctggtgaacggtcgacttggccaaggctgagttctaccgcacatttttaacgtggctccgcctcactttaaggaagcctggtactttactccccagaaaatg

SEQ ID NO: 65300 - DNA, 611 bp, Homo sapiens
cgcgggccggctcacgtgtccgggccgcaccacgaaaacaacagccacaggggagaacaacctcttgttttcctcatacagccgagctttgctgcaaacgatccctttccttttgtttccacattgcgttattcagaagtggttatgcggcgccaaacacgcgctttctgccccacaggtttcagccttccccaccctcatcttccccgcgctcccctcccgtcgttgtagcttcctgctcgcccctctcatctcagccaaccctgctgagctttcgcgtgggcgtcacgagtttctaggcagatcaggaaaaccgctctccggccgcaccctcgcgcgcccccgcctggcggtgtagaacaaacggtctgagcgcttggcgggcgactgagagcggagcgggcgaggccgaggagcggaggctgaagccgtgaggagcggcccggcgagggcgaggggcgtgcgagcgggcggccgcggctcggtgaggatttcggtcgtgttttccttggccgtcgccggaagcccggagaagccgggtggaactgccttttgaacgcgttctcacgtgtgttagggatcgtcctcctggaagagccttgatggccacg

SEQ ID NO: 65301 - DNA, 770 bp, Homo sapiens
tgagccagtggtgggtgagagcaagccccaggttcgccacccaccgtgtctgtgtgttggctagaggctagcgcacagacactcagtaatccagaggggcaggtgaggaagctctagtattctaggtatgcagagtacatctgcatacacatagccaggaggtggcagtggggctgacacatggtgagcctggctgaggtcctgcttccgcctttcatcccactgccttccccgaggccacatgcctctcaaatactctgaaggattcattctgtcattatctgaagtagcagcgatctgtgatcatccctacccatgtgcaggaggtggactgaagggacttctgtgagccaccaacccaccagggagtcgtctcttcttctctccaccatggggtggagtcctagaaatgccgtctactagctgggtacccgtggggaaagttacttagcttctcagggtctacttccttcttttgtggacaagggatcaataataatgacctcataggactgagtgaggtgaaaagtgaaactatcaggtgcagacgtgccagtggggagtgccataaagagtctgtcattcccattcctgggcgggtcattagcttcctgagctctcaggtaacagcatctcgatgctctgagcaacctgctgaaggaccatgcccctcacatatttcatcccacccatggcctgttctgctacagaacttgctcatttccaactaggaagtaaagggatggccacactgcctttttcacacaagc

SEQ ID NO: 65302 - DNA, 1572 bp, Homo sapiens
gctggagtgcagtggtgtgatctcagctcactataagctccgcctcacgggttcacgccattctcctgcctcagcctccagagtggctgggactacaggcccctgccaccatgcccggctaattttttgtatttttagtagagacagggtttcactgtgttagccaggatggtcttgatctcctgaccttgtgatccacccgcctcggcctcccaaagtgctgggattacaggcgtgagccactgtgcccgcccggccaacaaacactgacttttaaatggggaaagaaatgtgctggttgtttttgtctggatctcactgacatgaggcgacaggcagagaagccccagaaataggtggatggcaaaggggaattgttgagctttaccaggggataggtgatgatgaaggccacccagccaatcagcaggaaggtgctcaggatgatggtagccatgtccttaagcatggagtccacgggggcctcgggccgggcaggggcatgggcgggcttctcctccacatcccgagacacggtggtaggtgcgttttctgaagtctggtcaaccaggttgataaccttgcatgggagagagttgcgacatcactgcaaaatttctagccagatacagatgaggccagcaatcaagagaagcaatcactgtttacaaggatatgactgtactgcagggggttttatttgttttaagctcaccaaagatcatgtagccagataactgttgcctctttcaaagcaattgctttgagaggccatgcatctttgcagtgaggttatcattattcaaaaatagtttttggagcaatacttttggcaggtgtcttcagaccctacatatttttttcaaaaatcctcaaaaaggcaaacacttcctcctttgatggtaggttcagtatccaggaaaacactgaagtcatctgtaacaaagtctggtgaaaaattggtatttgatttaataataccatttcacattaaaaggaaatccgcacgtatacagaggcacatggctagaaagcaataaagcagttttctcgtgttgcctgtaaactgtcagtgcaatcccaaaattataatttattccagtagtccactatttcttcaaagtttttaagaagcatcagaagcgtttgttaaagaaaatttagaagcccaaaattaaatcagataaaaatggagcttccctagagttcctcagaatctctaagacttcacggaacaggcatttagaaaaatgcattgactcactttcaaatatctagtattctaggtatgccgttatcatttgcccaacaaaactaacacagcctccctggcacatgctgaatttcccacatgctaaacctcccacacgctcacgccatttcacccctccccccagatggctgcctagaatgttcttctctcccctccaggtgtacccctcttattcatgcctctcccacagtgcctcccacatttttgggggtttgtagcctgcagagtatataggaagcacctgggcatgtggccagggacatctgtatgtctcatcaccatacagatgcacctgagag

SEQ ID NO: 65303 - DNA, 2430 bp, Homo sapiens
gggtctcactatgttgaccaggctagtttcaaactcctggcctcaagcaaacctcctgcctcaccctcccaaggtactgggattacagttgtgagccactgcacctggcctgtaatttgctaatgctatacctctaaagttctaacagatgttgcatacatgcctgctccacatgtgtgcaacttacccatggatcgcaactctgttctcactgacaaaatcataatatgaatatgatctgaaggtagaggagaacagagctaggaccacgaaccttttccatctagcatgacatagctggttacttcaagaaccactagagtttacataactcagttattactttaatgggtagattgggcaactaccatgctcttaaatatgtttaatgaactcgcctaagaggccacagcacaaagatgataagaagacaatatcctaagcagactataagtgatgaattgctggcaaaagctggaagaccagataggacacagtgacatggatggtcagaagattatcagatgttcccaggtcacggcccacagagagaaaaatctgtgccgatcgtttcctccaaattcctaggctgggagttcctcattctgaaggtgtggaaggaagcaagagtctcagtgtcctgagcaaaaccttaaaagtctggcctgcacttgagacccagaaatacacataaagctcctcgaggcatgaataggcaataagcactttcagttcctcaaaaagaaagctgctgtataaatacgggctattattgctactatgatttcaagataaatacagctctcctttgtgttgcaaatgcttttttattgacattttggcagcaacatagtaaaagaaaagcaggtgatctgatgctttgaaagctgtgaccccataggtatgaaggcagtttatctaggcaagctattaagtgctgttctatcaaacattctgatagcaggaaatactaagaaagcgctataattaacaggcagagcctggctttccttccttggcttagatgattgtactcactttaaatttcatccatttgccactgggtatgttgcaatcttggaatctcaggactaagtcaacacagcaactaaaagcttgttaaatgagtaaccatattaatgatgtcaattcttctcccaagttgggggagccctttcttaattggtcagctgatcctggggagaacagcacctgaagcacaacccaggaaagaaagggttggcaaggcggtgactgcgccctctctctccgcatgccactttcccagattccgggacttacatcaaagagacacaagtttctggagacaggaactcttacccatgtagaggattccatctgaacttcggcatggggatgcctgcaccaattctgggatggtaaaaggaagtttctttaaaaaaaaaaaaaaagaaaaaaaaaagttaaccaagtcttgtgcaattattacaattttaccaggcagtttgtttctattacctaattctgctaaaaagagagaagcactttgcagatgagagttttcctaactgaatacaaaggagaagggggcaccctatgcttccacatctactgtgtttttattttcatttttttgagacagggtctcattctgtcgcccaggctggagtgcagtggcaccatcttggctcactgcaacctctgcctcctgggttcaagtgattctctcacctcagcctcccaagtagctgggattacaggcatgttgccactacacccagctaattttccacatctattttgacaagctcccaggtccctgagctctgtaaacatccactcctttacttgacaccatgtgcagaggcccctcaaggtctcctgtccagggtgcttcccaggggtgacacaaaccttttctgaaaagatttacacaaatatggagagttatatattctttgaaatgctaagaaagaattgtcctggcttggaatacagagccagagctggctagactgagtaaaatgacagtgctttgtagagccccatgggagggagccaggacattgatgctgaagggatgcaaccttggtgccaagctcaagcttcgagggaaaggagaagtcgccattacaggggcaacacaagagtttgaggtggaaaagagttttgatgttttcttcagtaaataattcactattgaaaaacaagaaaaattgagacttttggttttaaagaggaagttaagataggtgccaggaaaagaaactcaaaggaatccaaatgtttcaactgcatttcatcataaaactgattcttctgagtctacagctgacatctgacgagctcttttggttaatgcttgtttcagtatactttatttttagaacattctgtgtttttgaaattgttctatagatacctgcttttatagaaatgcctctactg

SEQ ID NO: 65304 - DNA, 5124 bp, Homo sapiens
tttcaagaaacttgcatataacttgggggatggatgcagaacgaagaaccagtcaccacacaccgtggacaaggggtcagagcatcactatctgacacctcaaagacttctaaaaccttaatcattaccttgtccgatgcctggagtagctctacatattcccattaggaaaagtaaaatgggtttaagaactaactttgattggccagtaaatggacacacctctttggagcggcaattctagagcctccaagtgttcattccctttggcccccccattgcatttttataaaatctaatttaaagacaatataaactatagaaaatggtttttgtacaaagatgtgtacgtagcagcattacaaatgacctacccaataatatggttaagttatagaatgtccacttggcaaaaaattaaggcttctaagagggctaataaaattttaagacatatacaaacctatgctattatgttcaggagaaaagataacattgtacatagagtattaatgcaactatggggaaaggcttcaatgtacctaattagatggaaagatcaaaaatgctaattgtaagttatccttgttggaaatgcaactccccccaaccttttctatatcttaaaatttctgcaagagcaggcattactttttaaattgagaacacgtttttttctctaagtcaattttacatttgcagcaattaatggcagaattcttccctccctagattttcctgggcacaaagcaagaggaagctcctgattccaggggcagatggtggtggcagtgagagagcatgaacactggcacagcagcactgtgtagtgacagatccaaaagtccgcaggcaggagactcacagcgatgaggtatttccagcaaccaaaaccccacagccatgctatacacaacttaatctctggggggcaagaacagcaagtattcttacatgattttgtatgcagaattccagactctgtaggctctgcttatggtgacagacggctgtccaatccatccaattattggatgaaggaaaatcttttaagccttatcatatgttgactttgcttaaaagcccagctcctatacaaaggcatatggtgttcacaacaacagaggtgtacacacaccatatgcggtctgtgggcagcaaacaaacaactcactaaaccaaaaacactctaggaaacaggaagaactttcagtcagtaagcacatgtttatctttcccattaatcacctctcggtacactctcacaaacagactgatgcaagagacaggaaataaaggcacaccacactcatcctactgaaacaagctagtcaaggtgcaataacccagttattttaacaccggcctgaaggcatgcaagccaagaagagcaagaatatcatattccgaagaaaacacagcagtaaaatggcatcttttttgtttgtttcagccacttaaaggtatcacagataaacacagattaagaggacatggccaaattccaggaattcaccagaaacaagacatgcagaccaacatgatttaaattcctgttcataacctgatctttgctgtacagtgtttgctcagtcacacagactcgtcttcagatgcagattttcctggttttctatagcttatccactggtcacctgacactgaggcctcaggtcccaagatatgccctgtatcaggaaggttccagttaagattcaggacattggcaggagacaggggaagattcccgggacaactacattggtgtttaagaactgtgattttttttttctaggcttaggagaagataaactccagtaggagggccttatggttatcttagcatttcccatccactcagtaaaataagcacctggaataagcctcttcaaagctgcagcccaggtaaagacacaattattaagacagttctgacagaggcagacacactgctgcttggcttctgaaatgtaacaatgacctaattctgtaaatgtttttctttaagaatcatctgaattcaagatttgctttaaaatactacagaaaataattatacggggggcggggaggacagataaaacaagaagtggcaggctgttgataacagttaaagatgagacacgggaacactggagtgttattttactactctctgtacatatggttaaattttttcatattaaaaaaggttaaagagaaaattatctttggaaagtcagcaaaaataaaaagagcattatctgaaaatgtgcactaaaagagtaacatgaaaaagtggttttgatttaataatgagaactgatatcaggtaagattcttgctttaaaaaaaaaagttttcagccatgtgaaaagaaacactgtcctacctgtagggatgtaaacaaatactgctgtaaaataagccactatctatatggggcccgataagaataaaagccaatgtcaccaagttgttttactttcagaaaaaaaaagttgtgggggagttacttcacaaatataaaaagtggctgttatgtaaggtaaaggtaaggttatctggtaaaggtagagggaaaatatagctgaaatcaaggtttggtctcccaggattaacacgggaaagaaacaaacctgctcactgatcccctgggagcagccactggcctcaactccactccccggcccccatcgtgtgtccagctgaggcctggaatggcacaagttttacacctgcaggaactgacatcctgggtgaggtcacaagatgctcattgctaggctaatctaaatcacttctttaagctcaaataacaaaacagacgtccacatctttcctttgtccaagttcataagggtaaagttttaaacatttctgtccccaaaagcagtgaatttttgtccccactccctcctccacacagggaggaacattgccagcttctcccttcagcctttcttctcactcagagagcacatgcctctctataacttccaccctaaccacagtggggttctaggctcccctctcccgggtcctttctctggatcaactggacacgcccactacttcccaccaacgcctcagcctctgcttgcccaagtcacgccctctgtcttttgcctgagactggcttctactcctgactaccgtattttattaacagtaccaccattctcctagaagaaagccatgactcaaacgacactgttgatgtctatttctccctaacacatgctatcagttgccaaactctgtggtctgtttcgatgccaaccataattctgtgtcctgttcccattcccttcaacaccataggaaccctttgtctctcaagccttccctcctctcttaatctgtgtggactttggaatcagacaaaccaaggcataaatcctggctctgccaatcaccagctgagtgaccttggcaaagttacttaagctcgtggagcctcaatttcctcatcagtaaggaaaaaaaaaatagagataacatcaacctcatggggcatctctatgtggattaaatgtttgtcaagactataagtcaatgccttgacactgagaagagtgatccttttaaaggcataaatcagattaagcttctctgtgactcaaaatcctttggtggttccccatctcactcagtgaaggccagtgtttacacagtggttcataaatcccaagcagtccctccctttcaacctgtcaccctttaacaatctcccactatttcccacacactccattccagccatgccggcctccaagtattcaacaagcactgccaggcctgcccatgcctcaggacctttgcactggctgttcctctgcctaggtctttgatcaactgttgccacctcagagcggtcttccatgatcacctcctactgcccaggatttccaacccttcttccctgcttaatttttctccatgtcacttaccacctctgtagttctgtatattttattgcttacttaatgcccaactctggccacggagggttgggatttattttttgttgtctgcatcttcccaaggatctaaaacaatacctgacacacaggtggtaaccaacgtatttgctgaatggagtaattaagtgtcatttcctgtcttagtctgtttgtgttcctataaaggaatacctgaggctgggtaatttataaagaaaagaggtttatttggctcacgtttctgcaggctgtacaagaagcatggcattagcatttgcctctgatgagggcttctggctgcttccactagtggcagaaggcaaaggggaaccggagtgtacagagctcacagggcgagagaagcagcgagaggggagaaggtgccaggctctttttaagaaccatctctcacaggaattaatagggtgaggattcactcactacaatgaggacagcgccaagccattcatgagggatccacccccaagacccaaacacttcccattaggctccacctccatcactgggaatcaaatttcaacatgaggtttggagggtcaaatattcaaactagcgcagtttctttcctacttccactcttggccagcctggaaatccattgttgatcacttttaataatccagcagataagctctactcaccctgaacccaggatctgcatagcagtccctgttcctccacccagccttctgagcacagctgtagaaaacactgcgatcattagtggagataccatgatacgtggtatctccatggtgtggccagctaggcccctgccactaggagatcctggctggcttctgttctcacccctgtagctgatatttcaaactactccttgcctcaaggtccctgtctctccacaaatgactctgccttctgtgtcataggggatattaagggagactgagtgagcttgctgaaacttcctaccctttgtcttctacatttgcccagctccacccttcccttcacatctctataaagggacaatgcttttgtcttcacactcatagatttttcacactcacatctagatcctgtctccaaggatcttcaactcctcctttgcctataaacacaaaaacctcttggctctgcctgctcttctgcacactctccttttcctccaaagtgcaaccattttaagtttacagtt

SEQ ID NO: 65305 - DNA, 2467 bp, Homo sapiens
cgtgtcttatttgttatctatgcagctgaaggaaagaacaggaaggttgctgttcacatcgttgtaaagccacctggaagaaaaaaaagcactctccctaaggtgaggcgtgtaatacaccaaccacaatctgttcacactctcggtgagtctcctccagtgttttaatttatactaacattcgactgatgttgcctagctggtttacagctgaatattagcagaacacatcagaacttcgtaggagagcgtagtaaatatggctgtttttgtgatgaaatgtggccttcagaacaaaccccaaggcaggttttcttgcttcctaagactcctcatttgagggggagccatttctctgactagccatcatgcatggaatcagaaagctccctctgaagggttgaggagttaaacctgcaccttcccgtctttttaatcttccaggcgccccatctccacagtacctgcagtcagtgccaggactattttcattacaagaggcagaaatcttggggatactaaacttacaggacaaggtaagtcattggctcatggtctcacattactcaagtaggctggcaaggacttcaggatttgccaatctcttccaggcactccctgcctcatacttcttcctgttggctgactcttctatttcaactcctgtgtgctagttcacttactccaaccctgcccctaagctggactcttatcctacatatatgcagaaagaagggtcctgttacacacaaggcaatgccgccccaaggcctgtaaaactcctggcttcaaggggtttgccgtctagcaggagagtcgtgtaatgcagaaaaaaagacggcaagttccatggccgaacttcccgaaagctgacttggcagcatatccaggtcctgcccagagcagttccaagagtctggtcccaccctaccctgctcagctgtcttctcactccttgccctagcctgtgtccatatagcttcaaaacctgttattttatcctctcaaaactctttggtttaaaaacaaaaccaaagttcctcaggtatcctcatgagtctggaacatatagatgcttttggggtgaatgaagctgacagaagatgaggtgggcacacagatgcatggtctggtttgagctctgggcaagtcattagatttttccaggcatgggtttccaagaaagtaagaagcctgaggtggatggtggctgcagctctgaagcatgatgatccatgacttaccagaccctcatctctcctcaggctttgctgcagcttcttctagccccaaccaatcaaaacatgcccaaaatccgcataacaatttgacagagtttagaagtcctaatgcctttgaacatagtcatttccaatcctggtcttgcaacatctaagtgtctccgcttatctcaaaatattgcaacattagaaattagtaataatctgactcactttaaggttcaggatggggaaaagaaataccatgaaaatcaactaatgttacatgggaccaggtggctgattcccaggcacacctacctactatagactctaaaagcaaccatctcctaaactgaaagggtgataccttttcttctgccaaccacaaatcagataagtgattgaacttttaccaggcaccgaaagccccagagatttccaagcactgaaccatcaagatcaagataacttagggtccgttttacaagcaactgtggcttggttcccagttagtcgagcaccaaaactacagataaacttgttcttaatctccacatataaaggaaaccgttttcttctttgcaaaaccagctcatggcaagtggaaaacgaaccctaacagaattctagaataaggtcactggattgctcataatgaggtagtacctttaaaggtcagagattccccaaatttgttcttagaactttcttaccgcatttcaatttatcgggagatgttacaaatactcctacaatggaaaaaaaatgtaatcttatttaatgtaaaaaaaaaataacacacacacacacacacacaaacacacccatttgtgtatttgggtgcacagccatcacaaaaatcaaagaatggctggttctgacccctctgagttgtgggggttttctgaggtttccctgacaggatttaatgtcttatcatgttatccttaaaaatcaacaacgtggccgggagcggtggctcatgcctgtaatcccagcactttgggaggccgaggtgggcggatcacaaggtccggagattgagaccatcctggctaacacggtgaaaccctgtctttactaaaaatacaaaaaaaaaaaaaaaaagccaggtgttgtggcgtgtgcctgtattcccagctacttgggaggctgaggcaggagaatggtgtgaacccgggaggcggagcttgcagtgagcagagatcatgccactgccctcactccagcctcaacgacagagt

SEQ ID NO: 65306 - DNA, 2563 bp, Homo sapiens
atgagtttcatttacaattttaaaataataattcttactatgtttgggggtaaaaacccttgggagaaaattctaggagtgaaattctgacctttcttttttttttttgagacagagtcttgctctgtcacccaggctggagcacagtgactccatctctgcaacctctgcctcccaggttcgggtgattctcctgcctcagcctccccagtagctgggattacaggcctgcgctaccacgcccggctaatttttttttttttttttttttgtatgtttagtagagacaaggtttcaccatgttggccaggctggtctcaaactcctgacctcaagtgatccacccacctcagcctcccaaagtgctgggattacaggcatgagccaccgggcccggcctgacctttcacctaaatatagttacgctaaactataaccttttgataagggtctggaatattttatcatgaactctgagaagtttggatttctaaatacaaattggaaatatttacacgaactgaaactatagttccaactacagctaaatcgttatttttggctctttagcctaagttattcaataaccaaacactagaatccagtgacaaagtagcaaaaggaaagatgtggcaaaggaaaccattatacacctatcccttgacgttatgaaatgatcgaattcatgtcaaacatttggtcattctgcttataccttcgtttgtgaacagatgccaggcagtagttaccaatccaaggtgaggtgctcaagttcaaaacctgaccttagttgtaaaagtggggtttttatttgaaagaaaaacttaacttccacaagttctattataaagagtctacaaattttcctttatttaaaaaaaaaaaccctgaatttgaaaaaggcaaccttatttatttacttctcctgtttccaaattcttgttactccaagagtacagacagttatttacctaaaatgcaaaacctccaaagagttcacacggtggctggcactcaggcacacacatgtcagtgctctactgggacacctggtacatgatatccctattaaagagtacacagtacctttaaagaggtcattaaacagaacacggacaaatttgccacgctcacatcctgaacaatacattttgtgaaaaacattcgctaatttaggttcttccaaccagaagaaaaaaaaaagccaagtctcccacaaagtgcccccaaatccacagctgagtgaaggtcataaagagttaaatgaatgtaaaccaggccctatcattcgtctcctccagaaaaagatgaaaagacatttctgatggccccaggtgctctcccacgaggagacagtctttcatttgaggttctgaagcggcctcacctcgaacccatgcgggatcttccaagagtgcaattcccacagctccacttgctcaaggaagtctcggtgcacagaaggaagcctgcagcctcccagtaccaagaaaccggcagggcaagtggcagaagccagctctcgggtgagagtccttactccctgttgcattcgttccccaaagttttcgaatttttaaaaagttcaaacaaggattcgaagcgcaggacagacccttcccctggatcccaacgccctttcggctcctccgcggcccccgccaggcagcgccggcgcccgcccgcgaggaggagggtcccgcaggtgggcggcctcctcaggccggggccttctgggacccccaagtgccgtgcaggacgccacgaagttgcgcccgagcccgcggggtccggggagccgctgcccgtgacagccgcgctggcttgggaggctcttcgggcggccgacgcctcggtggggccgcgactcccgtcagggaagctctcccggcccggtgccgcctcctacgcccggcccgagcctcccacggctgggctcacggggcatctggccgccgccgtcgcgctcccagctcggactccagccccggcgccgcgacgctgccccggccccgacccggccgtcgcgagctgtcctccaccccacgctccccggtcactcaccccgaggccgggcagcagcagcgtcagcagcagcagcagccgccgggccggcatggcgaggactcggccctggctccgggggcggtacggacagaggacggggcgggggcgccgcgacgacagcgaggcggtgaccgagcctcagcggacgcagaactgactaggcagcggcggcacccccattcccggccctataagcgctgggtgccgcggcttcttccggtcggggcggagttgcgggcggggacggggcggggccaatctaggggcgtgttcggggcggagatgggggcgggccgagggcgtgccccgggcggggatgtgggaggggctggctcggggcggggccgaaggcggtgctggcatctggctggcttcgctcatgaggcgtcggcggctgtaaaggaccaggcctcggcatccagcgtctgggggcgctgggggatcgaggcgcgaagcttgtctgtggctgggaaagaccggcaatgccccaccaggc

SEQ ID NO: 65307 - DNA, 4633 bp, Homo sapiens
agagactactaaacacttgtcaaagtcattattgctttggattaaagaggtttttttttttttttttgagatggagtctcgctctgttgctcaggttagagtgtaatggcgcgatctcagctcattgcaacctccgcctcccgggttcaagcgattctcctgcctcaacctcctgagtagctgggattacaggggcctgccaccacgcccggctaatttttgtatttttagtagagacagggtttcgccatgttggccaggctgttcttgaactcctgacctgatccatccgcctccgtctcccagagtgctgggattacaggcgtgagccaccgcgcccggccaaagaggaattttttgaatttaaagtctatatagaaaataaggaaaataagagcccattcaactacaaacccatagggtgaaatgatttcactgtcacatacacacacacacacaaaacaataaattttccgtattaagaggaaaaaaaggaaaagaattcccaaggaaaacagggaggcaataaagataaccggcgactgtgactgctggtgtactgtgtcctcccccagttaagcaaactatcattcatccacctgtatgtccggggaacaggctcaatcaactctgcgaagctttcccaaagtcaggctttctgtcctttgggcttctacagtaggctgttcatagcgctatgttagtatttattaaagttttgcaatcccaggaagtttttcacatcactctgccctttaaatacctttgtttaccacttagaatgtgccaggcaattggcattaattcaccgaatccttacaatttttttttttcgcggtgtgtgtgtgttgggggggggcggcgggggggtattcctaatttccagaaactgaatctcagaaaggttaactgagcaaggtcacagagcgaacgcatcacaaagtcaggatgtggtgcagatcggtccattttcaatacaagctctttctaccacgacaggttattttgcacttggggacagtttttaactttccattctcaactcctatcctagctcctggcacagaacatgtcatccaagttaggcatcatcgtcgcctgctcttggtgaagttttcttttgcgtactgcggagagatgcgctcattaccagctggcggtggagtcgctgaaacgcaaatggatttgagactgagcgactcccatctctatggttggtatgtgacccatctatcctctggaggactcagcaaggactaccagtcaccagacaactttacgcgcacgtggtcgcaaggtgaacttgctattggttaatggcagtaaagcccgcccatcagcgctggtctgctcctttaaaagaacgccatcgacgctcccctgtctttcagcgcctgcaggttccgggaggtcaggttgtattcctggcgggtcgtctggctgggtgggccccggaggtcgtggctcgggagcagggaggcgtaggggggccggcctgctgtgatgacattccaattaaagcacgtgttagactgctgacgcgggtgatgcgaactggagtctgagcctgcccgagcggagctgggagggggctggcgggcgggcgcgcgcacacccgctgatctatcactctcgttcttgtagctcccagccgaggacgtcggatgtcatcgtccttgctgctttgccaccccattcccgtcaataaagtggtttgaacccaaccctggtgtcggtgtgtgtcgttggcgacgcgctgtctttgagcccccgccgagcttcctcgtggcgccgggggtcaatctgcagcgctagagcatgtgcttgcgcataactggggccgcctggcctcccgcgggcggcctttttaaccgcgagcgacaagaagtaacctgactgtccggctgctaggctgggcaattttccagctgttttgccacgacaggcctcaatccgtaataccaaggctggaatggcgtgttaggggggcggtggctgacggggatacgcggactcttgatgcgtaaggagtgcccctctgctcccatacgttccccagcccagccttccctgagtgtatcgcgcgcgctgtgccttcgccgtgagttcgacataagtcccaggctgtcgcgtctgccatcagacgcgcagatttagttgaaggcagcgtggaatggcgtctgcagggctgttgtgtacttgacataaacagattcggtgtggaactgcattgagttaactcctgactaaagggtaatcgacctgtttacaaataaccatgcaggagtactgacaagcatgggactaaagctttgggcaggttaatctgtcactcctaaacagttcaaaattatagggcggttgtgaaggtgaattagattttatatatggttggggacaacatagacacctagttacacagtccagattcagtgattggtaaaagatcttccacaagggctccagtgaaaggtgcatcagttctgagtacagggcagcaatggtgggcaaggatgcacgtatgcgttcactacatggacattcgatgaatgaaggtgtcccgaattaacattatactagacaatgaagggtgtaaactgcagcccaggagcaccactgccctaccccctcagttacgaactttcactggattctttaaatgtgggctgaagataatggcacatagtttgaaggatgtagtgaggatggctttgtagccttaggactgggcagtgatcaacgcagtaaatgaaagctgcgattgccaggtgagggccccggtgctctgtactcattttattgtgcccctatctgaacaggattccgtagaaatgacttagatgcttatctagtatttgacattgagatatttattttgtgaaacaatgcaagcgattttaaatccccacatactatttgattaagtgcaacatggtacagtcatgtgtaatctctttacacgatagtgcatctagtccttagcctttagttattgcacaacaattataaagaccagtgaccaggacacgtggactctgacaggcagatcggcctacacaacgaaaaatcagaacagtacaccaactggaatggtcaaacaatttaagtcaaatgttttaatggtgcaattaaaataagggttcaaacatgttttcaatatattaatttctttaaagtcatgttcaggcaaggtgctgtttaaaaaaccactattagctttgtccacacatgtaagttatcaaaagttacccaaggtaattttgacgttgaatgcagctttaaacaataaaaaaatggtattaggtttacttctcgaagcaaagagagcccccaaccttgtaaactaaacattctgacacaaatgcacaaaattaagttggcaacattaattttgagatgtagtgtgatgctgagcaaacttttggtcttgactcttgaaataattaaagagagcagttctccgttttggccttcaggaagggaaatctgcccatggaactctcccaatcagattaacaaactgtttcgattcccatataaacctggaggacacaggaaacgccagatggaaaaactggctctggctttctaaccccatcccatctgtatgagaggacccatcctgtcatgtgcagtgtttgatgttttcacatacgctcctgtctcaggaaaacattcaagattagctagcccccaggtggttgtacctcattggtgaaaggcttgggatggtttgatctcatggctttgcctgatgttcacataaatcccactgtccttacccaagctgatagcgtgttgtgtgtgtactatggctacttgcttcccaaatgcacaatttaatgtggaaaataagttgctctgcccatctcttctgtcaccgaaatgaaaaggctcacagaattcctctccccaccctccagacacattgcacactgacattctctggaagtgtggaaggccgcatacaaagtatagaagtgaaaaagtccactgtgcaccggctgcctgaagaaaagctttggaggagtagaggaggcaagttgttcagctttgctcttactgtgctcatttgctgccacaaacatgggtagacttttaaaagccatggtgtgggtcacgtataacttctggatccaccatgattcttccatggtctcctttgccaaatcaaagctttgcagcaggcaatccagacagttgtcactagatgcagggaatgacacctcacagtggaatgggcactggcaggcagagggcagaagcagtcctttaagaaacagtagctgtggcacagaggccagtgctacagtacagatggcggccaagaaccccacacatccagctcgatgtcacaatatggggaacatctgacatcacccatcatggctgatcagcagcctccacaggtgggtctttcaggaggcaggaagtagagcgagggtccatggctgagtgcattatagtgatataaacatcatccatgtttggcatgacaaaaactttctgtaggaagatattaaagaacagctatgtggaagaatgccttgccaggctgtcaccctcctttgttctgataattttagggcttagactgatttttaaaagtacatataaaaacttgctatgcatt

SEQ ID NO: 65308 - DNA, 987 bp, Homo sapiens
gaaaaataaaaggcatgatgttctttcccctcagtaggttcaaagtacttttctatttggtgatgacattaagctttttcagaaattggttatcagttatgtttaatctctagtttttaaataagaggatttttttaaggcagtaactcaaaatataccactgcaaaaagaatgtaggtcttcttcaaaaggtgaatttcattaaaagtaaatagtttgctaatccataaaaccccgacagacaactgtgcttcaaatatctgataaaagtttgatggaaatagctcatcctagggcctcagctatactgctattacctttggtggccaaatgcagaaagaaaagctgagagagtaagctctggcttaatgaactcccagactacactagaagctacccaggggagggagaggccagattcatctttggactcccagggcaggtggtacctggcacacagaagggtttccaggaatgtttgttgaactgaacaaactgagcaaggtgaacagcacacaagaacagggggcagcctccctgcccacaggccgggtgctaagagttgggcaaggccaggccttgcataagagaaaacaaagcctgacagtcctggcaggcttgctgggaaaagacatcatcattttgctctgacccaaatcttttgggtttcctctgaagatgacttagtaatgttctgtggataagtttcagggctttgatactgtacctgaagttttattcccatatttgatcaaatgtaatactcttccgggatgaaggtcaccatcagattttcaaaagaggatcctgacccagctgaagttcagaacctcggctaaacccagagcttctatacttggtgtgaaatactagataacactagaggtttacctgaaactcttgctccagtttcttctctatccagtctgtcacatgaactaaagtcacttctctctctccaagttttggccgagctttcagctccac

SEQ ID NO: 65309 - DNA, 767 bp, Homo sapiens
cttcagaaagtactggcagggctgtgtctgagcccagagacttaaatgggacaaaatgaacaagggacagagtagtctctgaacactattacacaaccaaatggtcaccaagcagaggctggtcattgtatttttgacaaggacacagttacatggacaagggaaggcagtggggctcagggcctatctccctgcagctgcagtcctttggttttcctgatgctgtccttgggccaccagaggcccacggggacagttatcgcctgaccaacaggagccaaaggcacccaagggcacagcacacatgccagtgtggaactgaaggcccggcagtggccccagccctgtgcactgggagggtaggactgaaacctctacactggaaacaggagccggctgtaagaggacccggactgtgtcctccctggcaggacacacagctcctccctacccccactctgaaacattagagccagtgctccagccaacaggctggacttccacattaaagggaaactccctctgcagaaacaaaagcctcttgtccctggccatgggacagcacgtaactgagtcttcctccttccaccagaggcctggctggtccaggaaatgcttatgtgtatccactggctgcagagccatatcagagtgtgctgtggttaggcagccctcacaggaatcttatatttaaaatgtatatagcaaaattcaattcctatgaaagcctaaaccgggtcttgggtgaggaaagtcagagatgtaaa

SEQ ID NO: 65310 - DNA, 889 bp, Homo sapiens
ataaaatgcctgcccatctttcttcaagctaaggcttggacgtgtaattgtcaagctggtgctcatccgggcagacgccacagttccccaatggccaggactcaagttcagcctgaaccctgtgaggtcaaaatattcccgggatgcttaaaaatactgatgcctggatcctacccccagagtcactgatttcagtgggcatcaggagtttcagatgctcccctggtaatgtaatgaacaggcaagacgatgaatcacagatctggattagagagagctgctctcagggcttccatgaaacatctacagctgttctcaccaatctcggcccagcgaaataccctgatccttacttccatttgatacaatccatctgaagcatctgctgtggccaatgtgtgaggtgggggagaaagtaaacccaagtctccgatttccttggctaatcattagactgtgcactctggcctggagggggtcagggatggagataaagaagggtaaacagcagcacccacagacggtgttgtaaggtttatgtggttggtgcaggcacgggctgagagctcagtaatgtagcagctgtccactgaccacatgccagccctatgggcacattcctgtctcaggtccactcatgtctcacaataccctggaaagacaggaactttacttccattttagaaatgagtgcagcgcctgacacacagtcctgttctcccatcctctatctgctctgtcctgtgtgtggcggtgggggtgggggaaggggagctggccccctgatatggcagacattttcctgtgctgaggtctctaattagactgtagccttgcagaaacaatgagctttggaaagcaaagatgaaaagatttagaaatgcagaat

SEQ ID NO: 65311 - DNA, 1507 bp, Homo sapiens
tcaacggatcaagagcaatggcttgcttctcattaagaacagaaatacacatggtcattgtaagaggtcaaacacagccaagggcggtggctcacgcctgtaatctcagcactttgggaggccgaggcaggtgcatctcttgagctcaggagttcaagaccagactgggcaacatggtgaaaccccatctctacaaaaaatacaaaaattagctgggcatggtggcacacacctgtagctccagctacttgggaggctgagcccaggagggtgagaggatcacttgagcccaggaggtcgaggttgcaatgagccatgttcacgacactgcactccagcctgggtgacactgcgagaccttgtctcaaaaaaaaagaggtcaaacacctggatatgaaagagaggttaagtgtcccccaggcagagactgtgactctgaagagtgtgcaaagtagaggcaggaggcctcaggccaagcaggctttcagaataacccagcaaaatagtctcagcgagccaaggggcccctgggttctcaggtgaggtttgcacactccatcacttagcaactgtgtgactaggctacctaacttcatcaagcctcagtttctccgcttacaaaatggagacaatcctgtctagtttgcaggactgttcaagagagcagagtaattctattaaagtgcctaacagagcctggcatctggcagcttacaggagttatcttatcagagatgatcctaagtccgtgtccggttacactttgtaaagaatgttcatggtaaatcttcaaaagcactgggcatagccgaggagactgagaatttgaaaatacaatggttttggaggaatgagacctgaatcaccagtgattctgcaacaacccctagtgatcatccagttgctcaggtcaaagtgcaaatcttggcctctgcgttctctcacgtcagcaaatccagccagcgcctcctgccaagcacaccccagccgagcctctcctcaccacctactgtcactaccttcacattgatccagccttcactatgacagtcacctcccactccttttttccctctacagccagttctccaccaagagccacttatctttttatacttagatcagtcaacatcataccctgctcaaaaccctcccatggcctcccatcctgatcctccagcctccctacctccccatttcccttgctcactgtccggccaggcctccttgctgttcctcgaatattccaagcacatgcctacagcgggcccttgggttgctgcttttcccacctggagtgctcctcccacacccatcaccatggctcactcccccgtgaccaacaggtctgtgcccaaaagtcacctcctcaaagaggcccttcctgaccacccatccaaaatagcagagaaaaacagtacaaactttttaaaattaaaaataaataaatacataaataaataaaatagcagttctggccacttcccctcctcccttgtctgacttt

SEQ ID NO: 65312 - DNA, 372 bp, Homo sapiens
ttacaagatgctttttttccccaggaatgttaacattacataaattacactgtcttagcattgttgaaatgggaatattttcccactttacaaagaaactgaggtacacagaaagagaagtaatttacccttaaggtcacagagctggtaagcagagcacaaggatacagacccagtcagtccagtcaccttttcatggcagtaaaagatttcccaatagcctcgtgaattactcaaaactgcacttggcagagagacagacatcggcatctaactctggctccagcaggagcacaggagctcattagtgcagcaattctctgaacatctctgaacctgaccactctgaacatgtccactcaagaggacact

SEQ ID NO: 65313 - DNA, 2185 bp, Homo sapiens
taggtaagagctaacagaaatggcagtttcattcttccaatatgagacaagcgtctctgtgtgacccagccctaaaactcacaaacctagactcctcaaactccccatactccagagttcaaggataacctgccctccatttttccttattgttttccatataaaagtcactcgttgtttcccctccagcttacacctggctcctgaaatgactcctctgaatcctctgagaatcctcaaaacatgtaaaagcctcattccttttaatgcatgtgcagagcggtgatggtgtgaagacgctggcacttcaaacgtgaacgtggcacgagccctgccctcaaggagcccacaattttccctcaactctaaaaaaggatgtcctccctggacagtgtctgtaaaacacagtgacaaagtacttcatagctctggagaaagagcgagggtggaaacagactttgcccttacatttgacgcccagtaaccataacaaccgatggtttaagtaactatcaacccactgaggggctaagttttccaaaaatcgttttcaaaaggggaagactcccctgcaccaactcccatggcagccgtacgctctaggcagcgtgtggtgcaatgtggccagccgttccccgccttctccggttccaccgtatggtttccgtgctcagcagccagcagcgacggcgtccacggccacaccgcctccccgcaaggcacctggcgctaggcctcagcccaatgtcacttgttaaccttccgatcccccggatttcggcacgccgccgcctccctgctaaagcacacaaaccaccccaccgccacccgcgttctccaggagttggagaaaaaccaccggggcgcatacaacctctgacagattcgagtaaaagtaactgcggttctcgactttcaagcatttcgcgtcgccggtgaggggggcggcaggaacccggggccccattcataaaattgcaagccgttttcctctagtttgcgcgtgacggtgcctccctgcccggggccggggaccgcaggctgaggggacggggccggcagctcctcccgccggagtcgagcccgagccatccggcggggccccgaaggaagggattgcccgggggtgtcgcgggtgggcgtccccttcaatacctgaaccatgacagcggggtggggggccgagccccgccacgccaagggccgccggacccgaccggtactttgaagcccgcggggtcgatccgcgcccagcccgggccttatccgcggggcgctccctccaccgcccccgcctggccctgagactgctcacccaagatccgctggctgcctcattgtactatgccggcgcccgtgctcccggccgcgcgactccggcttcggctggggcaccggccgcggtcctgctgccctgccgcccgcccgcccccgggcacacgccgccccgccccgccggcggacccgccccgcgcccgcggccgccgccgccaaccagagggcgcgggggcggagcaaacggcacgccaggcccaaccaatccagttctaccgcgcgccgaggtgaggccgcggaaatgggggagcgatttgtcaggtctgttaaaggggccaccgcccttggagctagggagaggagtggtggggagggttacctggaagagccccaggtgagggggacaaaagcttcactctcccaacggggctgcacactgtccccagctctttgcacttcttaatttcctcttcctgcagtctagcagcaacaagtgcccttgagacgagggctgggggttgaggtggggtgactgaggcgcggagaaccaggggtatccccctgggcaaattcactcgatttgcattttagagggccatcagacgtatctatccccatccaactgcagacattgatttaaaaaggcaaattcccagtttcccgcattatgtacttcccccacctgactaccacactaccacatcctatcctgaactaactctgttactagtttttttgtttgagacggagtctcgctctgtcgccaggctggagtgcagtgccgtcatctgggctcactgcaacctccgcctcctgggttaaagcgattctcctgcctcagccttccgagtagctgggattacaggcgcgtgccaccatgcccagctaatttttgtatttttagtagaga

SEQ ID NO: 65314 - DNA, 2204 bp, Homo sapiens
ttgcatgggaatacagggccagttgcaatccccaagatccagcaagactgcctcgcctttccacccgacacctgttttgaagcatgaaatcgtgaagcataccgtgaagaaggttctcccgtagtttcccagaagtttttaatacgttctcaagaaatgctactagctgttccttactcagctctttgtcttgcaagatttcgcgtagagtttctgcagaaactaacctgaaggcactgtccccgggtagcaaagggcctggtttgtggtggagggcgtccaccgggaatacctgctccctgaacaccaccaccgaggtccaccattctgcggccaggttcttccgcaactctacgcccaagggtccgaagccggggtggcacccactcagaagagaatcccggctaagctgctgcttgcttccacttaggaaatgccttctctgacagatctctaacagcgcctcgcttccctctccagacccgggggcttctgggtgctcgccgttcccctcgagctccgcgtgcgacttcacatgccctcctttggggctactcctttccgtcaacagctccggctgccccgcatctactcgacccccaaacccagacaacaggcacctgcagaccttatggcaggccctgacggctacacgagagcgcatctctctccgaagttaaagagcacactctcccatcactcaacggatcccaacaagccaccactaccgttaacagaatccggagaggccacggcgcaggcgcaacggaggtgagcgtgcttgcgggcggcaggccccaccccggaagcgcatgtctgcgttccggccgcagccgtcccccgcccaccatggcggacgccggctcggatggttctctgctagcttgccgttcgcgtcgcgcccctcccttcagattgacttttttctttcctcgtaagcaccagtaaaggttattcccacctatttataaccgtggtgtagccacttgagtcacttccttctgccactgttttgcagtccagaaaattaaaatacttcagtattatccaaatcaccttctatatacacctcaatcaagcacttggactaaatttggcatttggtttccctttaaacagttttagtcctttacggtgatttgtaagcccaggccttcttaactaggcaaatgctgccgccaggtggcctaggcctaaccccagagccgttgtcttgacgcttaagcttccggggaggggggcgataggcttcgtgactagggtagtggtatggtcactttaaatattgcagtggcttccaaagggcagtccccagccagcagcatctgcctcacctgggaatgcactagaaataaaccaaggggccctgacatgtcttaaaccctcctggtgtcagagaaaaccacgtacgtgcaatttcttccaggggccccttctatgggttcatcaaaacaatgagacttgtgactgttattattaagagactcatgattaaattgcaggtttctgattttgcagtttctatttaaataggtcgagaccttaagacctacccagaaagtggaaaagtggtatacccagactgaggaagtttgattccaaagtccatgatttcttataccagcctcagttacgaaaacctttaaagaggttcagggaaaaaggaacaatctacatttcactgtgagactaccaaactactacctgattaagaggggtaacagcttagcaattgagttaatgtaattcaggagtaaagttttatcattagtaaagtgctgtaccaggttcaggaaatagttcttctttacaagtgtatacaagggtttaaaaaaaggccagctagatagtaattaactgcaaagctgggtactactgccaggtgttttccacattcaggaactcacaccaggtaaaaggcctatacgcaaataaataaaaagagagaatggggagaaaaatcacatttattagttaagacgaccacaggctggacacaacacacatgctaaaaagtggactgtcttttaaaacttccaaggtaaataggtaaatgttttccacagcccaacaatcatttcagtgtttacaaattaaaaggcccacggttaagacattaaacagtaaaatatgtaataaatgctccaacctaccctctcccccgaaagctgcttctaagtttaaaaccatgaatttgactaacc

SEQ ID NO: 65315 - DNA, 2897 bp, Homo sapiens
acaagctaaaaaccactgaaaacagacttcgagaggtaaacctagcactgtccttcgtgaaaatctctctctctctcaacagccacagttaacatttcccgtagtcccaagtacacattacttaggtcatgtaaacagcctgggatttatcatgtcggaagccggggatttatcatgtcggaaacttgtcacccacatgccagaatttgggattctggcacacaccacttcttgtggttactgtaatcttccccaccagcctagcaattcactatcagcaataacaaggctacatgaaccgaagagcatcacgacgatgttactcatatggccgttttggaaccaaacagctttagtggtaagaacctaaacagtacagtcagcgataacagaacaagggttttctcagaaacacttctgctagcaaacccagctgggggaacgccgcggtagagctccggatcaacgaatcaaaattatataacgcaggaaaaaagaaaaggaggagccggcgactaccgggggaggagtcccggcccgggcggagtcggccgggcggcgttcccgctggggcggcgcttccccctttgtctcgcatttctctctgcgccacattttctcgacgctgccattttgagctcctccgccgggcggggtaacaaaggcgccgccgccatgtccgaggccggcattttgtactcgcgactcagccacatggctgatgccggccgccctcctaccccaacagcaccagggctttggaagtggtcccctcgctcccacagaatgcccggccaccccaaaaacacctcccgaaacgccgcacctaacagatgttccttcgtctgcctcgaagcgtcccgctttcatccgcacaatacgctccctctcaactccctcaacagctaccaaatggcagccgccccgacagctccccaatccccacacaaaaagcaagcttgaagacactacaccgtcaaatctcttccaatcactgtgacgtgaatatcaaaatggcgcaagccttcgggaaaggaagtcccaagatagcccggaaaggccaagtccaagccgcaaagcccccgccggccgccaccctgacccgccctcccatccccccacccgccaggcctgacagctcggctcccaaactcaccctcggtcccggccgcggtctcggtcactcgaataacccgacatggcgtcaatggttgcggttggcggggaacgaagtatatagaaaagcgtgcgacaagtcgctggaaatggcctcgatgacggcgaagccttgcgggggcggcagcggaggaaggacaccgatgacaccagccgaagctgcactactagagaccggtagaaatgaatgaggtgccggccgctttccggcagccgcttttatagtctggaccgcctcctacgccgcagggaacgctgggagccgctctatgacctaatcgccccgcccctcgcgcataggccgcaacgcccgctggcgttccaggatcgccgcgctttcacccctccccgcgccactctctcaggtcagggcccacccaccattggaatgcctcattctgcactctcttgacctcaccttcttctggtctttccacacctcaagcaagccaccccgccctttcccaagcccagccccgcccaccctcgccactcggagatgtttacgtctccaaagagccctcacgtctgtaaccaaaagagggggaaggcggggcctggcgttgtcacgtggctgtaccaccccggaccaccgagagagcggtccgcactactttcccgttgacgtcggcggagggatacaaaacgaaatagctcaccggaagtgcgctgctcgcaccccgggacccgcccgggctgccggctgatgtggaccgtccgacccgcgtgtctgataatcctttgacgggttttggtcggcggagaatggtctctaaacttcccaaaccgcccccgtttcacgtcctgtgaaaggaagtgctcctctgatgaccaatcagcggcgagaagctcttttaacgtccgtccttctttcacgcctccttccccgcgctttggttcgtgcgtccgcgccccagtgtcgggtctgcgtggatcggtccttccaggacaccgtcgccttcccggccgcgtcggagtccggcggcgacctgcctctgaaacatggcaggctcggatgctggtgagtgtctccctggggtcccagtatgtgtggactgaaaccgtccacctccagggaggcctcgggctagcccggactgggtctgggctgtcggcggggctcgtgaccttcagacgccgcgtcgcgctggcgggttccctggatagggtctctcagcttcaccacctcttcgcttcgaggccgtggaacagcagtatgctgtgggagagagagaggcactggggcgaggccggtaggacacttgggtcctggctgtaaaaagagcggtcagaagggtcgtccccggacttgtctttctgtggggcgtctagccgctgtccgtgtgccctccgcccttgcactatgggccctgaggtcgtacctgcttttgtattggtctttaaaggaacagcattcttaagatttattatgcccctgcagaatagtagaatatgcccctgtagaatagttgtgcttttttctcttcagtgccctctagagtcatgggctttgtctagcaccgcttttgaagagcgaattaatttggttgtctaggacgctttcatccttttcacaaggactgcgtacaaaccagttgtcatggtttggccagctgtgagaaatgggcgtggggagggggattatgtgcatggaaaatacactctcattcgtttccagaacgttacgtgtccagaacatagtggagatgtttgtttctaat

SEQ ID NO: 65316 - DNA, 579 bp, Homo sapiens
gactcttgtccaaatttgaatccaaaatctaaactgaagtcctatagtgctggccctgagttctgcttggccacacttcattttcttactccattgtgcattcccgtccattctcagtctccgtgtccctcatcttaatgtgaagtcttacttcctccctgcctcctacacataacaggtacttctccagtaaaactactttagaggtttgggaacatgtgagagacaaatttagtgtgataacatgaccttgcattccacataaaatcaggactagtgtccagctgtgctgtgaggggttttccacaaggatgacatttgctatgtcatcctaatcaggctgtgaaatgattaaccttttgagatcccaagctagcaataaatttcatctgtaaaatattttagtaattatagtttactaaagacttggacatatttctagaggaaggctttgaggagagcgtaagtaacttgtctgtagctcatgaatgcgtcgccgtcagaaccagtttttctatccagaatttacactgatgaagggaggacaagtgcgcatatccaagccctttgagcagtgtg

SEQ ID NO: 65317 - DNA, 1233 bp, Homo sapiens
cctgggcggtagcccaggggctgttccccgagccccgggaggcagcgtctggctccttgaccaagactttccgacctgaaatccgcctgcgatgcgaaccggtgtattctcccctccacaaaacaccaccccccgccccgagtcatcctcggctttttaaacaatgtccaaaccagagcaagtggttttccaattactctccctgaactaggccttcccattcctccgacccccaactcatcattgatcgcgaccctggcccttcccaaggccacaggcaccccccgccagctcgcccaccccgcggctgcccagcccggcccgccgccccccctcacctgtcaggcgcagcttgacgggcccgttcctccggcctccggggttagacatgtccccggcggcgggggcggcgggggcggcgggcggcacgggggcgacggcgaggcgcggcggagtcaccacagcggccggggctggggcccgagcagccggcgcctcggccgccacggccggagggtcccggatgtgccgagagtcgtcgccatgagccgcggagggagcgggacgccgagctcccccctcctcccacttctccttcctcggcccgggccgcacaacaaagcggcagccgcggccgcccgcgccgcctccgcccgcgcccccgccgcctcctcgcggccgccgaggcctttccctcctctcgtctcggcgaggcccagtagccgacggggctggtcggctgaagcgggcggtgctcgggggcgccggagcagaactctgggctcggccgcttcctcctccacccgccctcttgtctgagggacccgggacctggggccgccgccgccactcgtcggctccggggggcggggaggagacgggaggcggggccggcggggcggggcggggccggggcggggccggcgggcgcgcgcagggtgccctggcgggcaccggcagtcagggagggtgtgagctgccgccgagggtcccacgcggaacgctgggagggagcaggcagggagcaaagcggcggcgggcgcggcagctctgtggcacctggaggggtttactgtccgggccacttaagggagaacttttgtccaagcagggccaactgcattttattagacgcccactgcgtgcagggcgctccgagaggctggggcgaggaaggttagaaccgagtccgctgcctgccgggaacttggcgtctttcgggcgagggaagag

SEQ ID NO: 65318 - DNA, 1161 bp, Homo sapiens
ctgaggtcagaagtttgagaccagcctggccaacgtggtgaaaccccgtctctaataaaattacaaaaattggctgggcatggtggtgcgcacctgtaatcccagctactcgggaggctgacgcaggagaatcacttgaacctgggaggcagaggttgaggtgagctgagattaaaaaaaaaaaaaaaaaaaaaaaaaaagaacactaccagcaaccctggccgggcgcagtgactcacacttgcaacccttggactttgggaggccgaggcgggtggatcacctgaggtcaggagtttgagaccagcctagccaagatggcgaaaccccatctctactaaaaatacaaaaattagccaggcgtggtggcgtgcacctataatcccagctacttggaggctgaggcaggtgaatcgtttgaacccaggagacggaggttgcagtgagccgagatcacgctacttcactccagcctgggcaaaagagcaaaactccatctcaaaacaaaaaacaaaaaacaaaaaaccactaccagcaaccctgaagcctctttcacgcctcctgtcattacttgattttggactttcagtccacactggatcagttttgcctgttttgaactttgtgcttatgaatcacacagtattaccctttggtgtcaggcttcactccctcagtgttatggttatgagatttgtccatgttatcgtgcatagtgatgcttcattttttttcattgccctgtaatattgcactgtgtaaatataacacaattgatttgtccattctaccatggatcaatatttgggttgtttccagtttgggggctatttcaaacgctgcgatgaccattctcatttgtgtcatttggaacacatgagtatgcattcagggtgagattattaggtttaggttttactttttttttttggtagcgggggatggagtctcactctgtcaccccggctgaagtgtagtggctcaatcttggctcactgcaacctccaccttctgggtttaagcgattctcctgcctcagcctcctgagtggctggcattacaggcacccaccactatgcccggctaatttttgtatttttagtagagacggggttttgccattttggccaggctggcctcaaactcctgacctcaaatgat

SEQ ID NO: 65319 - DNA, 2195 bp, Homo sapiens
atcacagcttaccactccctaccactacctgtccaaaccaccattctctctctcctagcctactgcagtgcccttttactttttttctcttattttatttatttattttgagatgtagtctcccagactggagtgcactgaagtgatctcaactcactgcaacctccgctgtccaggttcaagcaattctcctgcctcagcctccccagtagctgggattacaggtgcacaccaccatgcccggctaatttttgtatttttagtagagacggggtttcaccatgttgcccagcctggtcttgaactcctgacctcaagtgatccactcacctcagcctcccaaagtgctgggattacaggggtgagccacagcgcctggcctgcagtgccctcctaagtggttttgctgctcccacatcctgctctcaccctgttcaggatactatcggtgccgcttcccaaaagatcctgttcaaacataaatcagagcctgtcacttctccattaaaaccctccagtggcttcctgtatcatgctgggtgcaaaccaaagtccatactaccacccacaaattgtagcaagatactgctccttttagccacactgactttaactcctgtgacgctcccgtcctcactccattccagccatgctgttcatcaaactggcctttcccctgttcatcaaactgcccaggtgagctcttaatctcaggaactttacactttctcttcccactgcctagaatgcccttgccccagctaactgccagctcactcccttgcctctgtcaagtctctactcgaaatttcctttctcagcaaggactttcccagccccctggtttgacatttcatacttccccaatgcctgacattacatattgctttcccagctttttttctttgctcagcatttatcactatctcacatgctataatttttatatcttttatcttgtttatcagctgtccctcccagcagaacgtaattgctatgaggacattgatttctatgttttgtttacaaccgtagcctggcatccagaacagggcttggcacatagtaggcacttaataaatatttactgagtgaatgaatagatggctccttgccctagatcttctcttgattacctgtgcttcagaagctggtgagaaatcagcagaggtttctaagcacttccaataagttggagttgccaatagaaacatgttccttctctactctccctccctggcgtgcagggacctgggaaaagcagagatgctgatcgatatctctgactgggaaggaagatgggattaggtactagaaataagaggaaggatgtctccgcccgtctgctcagaggctgcaatctgcttggcatgccgcctgctcccagaaacaggatgtgtccagagaggaagtgactgcagacgtggagtgggggaaaatgccccgtgcctgagacagaacacttgaggctagtcattctggagccttccaagggtccattcctgggggatgagtaaaatccgctccgcagtctcacagtgactcattctgaatggcggagaatccaaagcccttccctaagttagggcaaaaacaggtgcttcctcctctggggttcccagcttgggtgactgatgctgaaggacagaggatgcccacacaccttgttggaggctctgcaggaactgacaaagaaaatagcatggtagaaagtcattttaaccaatcttctcttccttgacttgaggtcagaagtagacaagtctagaaggccattgcccaggtgtttcttaggaaatccgcttcctgcaccttccccagtagcgggtaaagaggcaagatcggcctgactgagccctggggcctcaagctcaggcagcctggcagagggagccccctacttcattgagctggtccagccccaaggccacagaggctttttttttttttttttttgatatggagtcttgttctgtcgcccaggctggaatgcagcgacgcaatctcagctcactgcaacctctacctcctgggttcaagcaagtctcctgcctcagcctcccgagtagttgagactacaggtgcccaccaccatgcctggctaatttttgtatttttagtagagtcagtgttccaccatgttggccaggctggtctcaaactcctgaccttaggtgatccacttgcctcagcct

SEQ ID NO: 65320 - DNA, 493 bp, Homo sapiens
ctaactgacccagttaaaatactgagttaaaatctgagccccactgttagactaaagcaaaccaaggaggcaatgaattacgtgttgcctaacttgcttctcccttgcagtttcaattgcgttaggcagccagcttcccttcctctccactgtttgaattgttgctgtgccgggcaaaaactgtggctggtccacctcagagctggcctcatttcaataacagccgggaggactggcatggggctttccaagcttaattagctcatgtttgtaaagttcttaggaagctcaggccagcatgctatgggaagtccaagttactaggattctcgccacacttaaaaaaagaacattcccacataaaaaggctggtagaggcagaaaagagtgcctcagagcatgtgtgtgaatagcaaagggtccttctgaaccacatttgagaccgtaaagaaagagggtaatgcattccaactttcaggccctcctcctattc

SEQ ID NO: 65321 - DNA, 2433 bp, Homo sapiens
tctcaaaaaatcatattatgaattaactcattagtgccacatgaaaaatactcctcgtttctagtgtgactcaaagatcttcaacatcaaataaaaacaaaactaatgtaagccctatcatttctgcaatttaactgcaggctgagaagctacggcttagtcacatcacattagggaagacatcagatgactaatcaaaagccagactcacaatgacaggtttcttccattcacatcgtgttcctatgtagagttttcatccttcctcttgaaaagggtcagatgttccaccacgagactttttgaattacacaaggaaaaacctgaacatctctgtctggatcatctctgtcatattttctaattatctagattttgccagtttaatgatagacaactgatgggaaaacttaagctaatgtctgttctgattgaacctctgaattctggggttgaagaggctggctgaaattccagatcaaatgtctctgtactcaaagctctgataagagcataagctcatcctcactcctacacaactgggctgaaatctgacttctacaggacaaaatataaaaccagatgtaccttccagtggtctacctaccttgattaggaaggaaggctcccatggaagcttttatctcacaaggacagacatgtctgggcctggccagaaggaagttgtggagtgtgccttcatctttatattaacgaaggcagtgagaaaagtcaggaggcctccccttgcctcccaagcctaatctagggaagctgcgggagaagatgggcagggggcgcacaatatggtcactgtggtgggctggaggcctgggacgctgtggtcccaaaaccagaacatctcgggccaaccgggagaagttggccaccctagctggttgcctacagcaactcgcactgtgggctctggtccgtgcaggcacaacccaggctccggctgggggtggagtagggcttccccggggactctcgcttcgcctcttcttcccccaggagcctctggaaaggcctccctggctccccagaggcactccgcccccgcagtccccgcggcttccgccacgtccgtccctcctacatcctcatccctctccaccgaccgcgactggcgcccgcctctacgacccggctgccccgcccagctctgacagcacctgcgaaccgccctgacccaacaggcctcgacaccactcacccgcgacatccctcacgcgcgtgcgcaccgcgtctcttcgcactacgccacgcccactggcgccacgccccttcgcgccgcgcgacgcgccgctccatcgcacacgctctctgggccccgccccactcacgacccgcccgcgccacgcccctgagcgcgccagagctggagttcggcggccgcggctcgccttttcctgagtagagggtcacgaggggactacaagccccagccgtccgcccccgcagtcgccagttccccgtctgccctcgccggggctccgcggcctggttctccagagccacagacgcgcccgcgtcaccagggtcgcccgtgtgggaacgtgctcggcaggccgcgggtttgagaggcgtcccggcgtgacgaatgcaaccagcgtagcccccaaatgagtcggcggccgccgcaggttgtcgtacagccgcggcgctccctggggcagtcacccaaaggactttcccttctttatttgttgggggcggcggggactggaacccagacgcgcaagtgtggggcgtgtcctcgtggcgtccctggcgctccgaggccgagacccggatgccaggagaggcagtgaggtcggaaaggcaccgcggggccagcattagggctgagctagttctgtggcctcgggtgggacgttcaatctctctgggcctcgccattctctttctttttattgctttttgtttgtttgtttaagacggagtctctctgtcgcccaggctagagtgcagtggcccaatctcggctcactgcaacgtttgcctcctgggttcaagcgattctcctgcctcaccctacccagtagctgggactacaggtgcccactatcacgtccggctaatttttgtatttttaatagagacggggtttcaccattttggccaggctggtctcgaactcctgacctcaggtgatccgcccgcctttccctcccaaagtgctggaattacaggcgtgagccaccgcgtccggcctcagttcttttgaagtcattttaccatcctctggattttcctcatcctaattctccttcccagtctccaggaaagacaggcacattttcttgatgacttcagcacttgtaaccccttgttggctctccttagaggacattaactctgtgtgtttgaacctttcaacttcgaggatctcctcagcccatccttatttgttcacccttctggatcatg

SEQ ID NO: 65322 - DNA, 930 bp, Homo sapiens
tcatgggatatatttacattaaaagtgattggttgttcatttgaaattctagttaactaagcaccctgtatttttatttgtaaaacctggccacccactctccaagggaaatactagttccctatttccaaattggtggaggtggtggtgacctcatgattgctcatataacctatccacagtttcaagaaggaaagaaaggtaattctgtatgccaaaaagacacaaaccacacaaatagcaaatatgtccccatgcaaggcacagtgctggatgactcatggagagtgatgtctggtcaaacacaagccctcgggcacgatggctcatgcctgttatcccagcactttgggaggctgaggcaggtggatcacgtgagcccaggaatttgagaccaacctggacaacatgggagaaacccctctctactaaaaaaaatacaagaaaactagccaagcatagtggcacattcctcagggcgggaggctgaggtgggaggatcacttgagcccaggagccaggagatccaggctgcagtgagccatggtcacaccactgcactccagcctggacgacaaagtgagacccagtctcaaaaaaaaattaaaattaaaaaataataaaacaaaaatgtaaaaaaaatacatatatatgttgctctacagattagatgcattcagagaaatttacctgaaaatcaatttctgaaaagtaaatttatttccctagttttcaacaaaaaataagcatactaggctttcaacctcaatctgccaatttatcatttggtccttggcaagtgtataaactaaaaacttcattgagactcagctttctcatctgtcaaacatagcccaaatggctacctttccctccagccaatgccagaggaagtgcttggtgaggaaggggtaaggagcatgacaggcc

SEQ ID NO: 65323 - DNA, 401 bp, Homo sapiens
ctatatgtaaggcggacagaagatatcttgttttggaactgaatattcctaacctcatccctacaagtatttaaggacacctttgatacttggcactgcaggagaattcagtttggaaagtagaataatttaaagcctgaaatatgcctagtctgaggtcagctgggaggttttaactggacttgaatagaagccatggtgaaacagatcaaagcctgcattacagcaaatcttggcgatgagtcactcaacagctttcagccacaaaccaaaggccgcagaaaaagtactaagattttcaagaagttaaacgtagaattaagattgttctaattctggttgtaaactgctattttaaaaaacaaaacaaacagaaaacatcaaaaacacaaaaagatatt

SEQ ID NO: 65324 - DNA, 5338 bp, Homo sapiens
catattatcataagtttttattccagtattatttccttatacttctgaattaacctagacaaaccttcttcaaaaatgaagaccaacatcgaaaacaaatgtaacttctcagaggttaaaaaaaataacagttgctcactgtcttaaaattagagccttgaaaagcaaatactattagcacaattcctctctctgaaggatttttaacatgttccaatttataaaataacttctaggatagaaggtagtcaaaaaacaatctaactcaagaaagaaaaagaagttatgctgcacagaccaacaatgtccaagctcagaagaaaacagacacaaccaaggttttatgagcctaaaagatgttcatttatgaaacactaagaaccaactactatagctccatgttctgtttgttgcttcggcaccctaacccaacattgagtcttctagcaacacattcaaaatttaaaaacttcttccagcccaagtttcaatccagtttaagttacaggatggccttcaatttccctaaaagggaggaagatcaactgcaaaataatacaaagtcggactccaactcacagaggttagttgaaactcatttttcctatcactgatctattacttttattaagtttgatcaatctgaacagtcacttggctattaggaagtcatctgaataactgaaaaacgggtggggtttttttgtttttgttttttaatagagacgaggtctggctatgtagcccagctggtctggaactcctgggctcaagccatcctcccactttggcctcccaaagtgctgggattgcaggagtgagccaccacgcccagcctgagaaactgttctactgtcaaatttcatgtcaacttgaaaaaactagattcctgatgacttacatcatctcataatcaatgctcaacgtagatcacacttacaactcagtgtacattaagaacgaggtgtttaccaggctcacagtcagttaacatgttgatgctattcattaacataattccttaagttcagctgcatcaggttacaaaggtaccttcaattaaggactgtcaaggcagagtctgcagccttgaaagagaccttaattagttttgagctaaacattacagcaggataaatacaactgttctttatagtttaactgcagaggtactagggctagagctggctgtggtctagtgattctctctaattcattactccataatgcctggctcttcaggcagttttcctttacccaaacgctggaagctcgggaggcggttggcggggagggggcgggggggtgacatgcagaagtcccttatgtacttcctgaacaaaaatcccacttaaaaagacctgcaatctgtagcaaactcctaaactgctccccagataaaataaaatccagatgcacctgagttaccaggcgctgcacctaaattttgccaaaatgccttttctatagaacatacttgacacgcagaaacgagtgttaattatctttcaaatgacaaaataaaaaccatcttttcgatttctttgaatgcccagaaataaacaacttgtttatttttcacttaagaacaaagtttaattttaaaactactgtcaataaagagccgagccaattatctaactcaacactcattcattgtctccatctgtacaggatccacatgacttttaggccagtcttcttactactacatttcatctaaatagaagcagtggtactcccttcctgccagcccccagttacttagcgaaaaggagagtggaacgtgttgcacagaaatcacacgcaaacatcctacctgaccgtgacactggggcgaaaaagcacagatgctacattttcatgctaactgtatgggtccactctctcctgattccagtacagtcaacctgacactcctcaagtttcatattctcgcccaaaaggaggctgtcaccctacgcccttgacaagaagtctcgggcaaaaagttcccttattgcgacggttccagaactcgcttgcttaggagacggccaaggaagcagggagttgggagcgcatgcgaccccatgtgactcgggtcacccagccagggtagcgaggttcggcccacatcgcccgagcaggggatgggggtgaagcggctagggctgctattggtgttcctgcctcatccgcagcggggaggacaggagaggtctgcccacaccccgaggcagcacccagctcgccccacttccctctcgcagggggagagaccaggacgcggtggggggtgggggaatggccgtgacgcccaccggggagacaagcgggagagcagggcgaccccgagcatcctctcgccctggggcgcgagggcaccccgggcgggcagggccagttgccggggcgcgcccccttcccgccagcccgcccgccgggcccgttccttcgccagcgacacagcggaccagggcggtgccccgccccgcacccgccgccgccccagcccccctgcccttaacccccggcccccattcccggcccggcacctttgatcacgttgctgtagatggtggggcggaactcctcgcgcgcgcgctggtcgaagtcctgcccgtggatgatccgcatctgcttcaggaaggtggacttgccgctctcgcccgcgcccagcagcaggatcttcaccagccgcttcacataggtcttttcccgagacaggcatttgtcgatctccttggacttgcgttgctgctcggcctcgccactcgtcagcaggcagccggggaagcacacggacagcacggaccgcgacggcaggaagtccgccatcttgccgccgccgccgccgcctcggcgggcccctccggctccctccacctcctcctccggcggcgggcggctccggcaccgaggctcgagggcggggagcgcggcggcggcccgagcgcgcccagggagggagggaaccagcgaactgactcgcagggcgggccgggcagggcgggccaggacagcgggggagggagggagggaaggagggcgggcccggccccggaggggcggtggccccggagcgtgcgcgctcccgctgcctcccggaggcgcgctcgcacgccgcggccgcttctccgcctcccgccctgggcggcgagtcacgagctcgatgtgtcgctcgggtgcccgcgcccgcagccgcggccgggcgcgcggggagggctgaggaaccgcggtcacgtgggccaggctggggagcccgactttctgtttccctttcatggcctgagcccacttgtgggcagaagggctccttccccaaggccgggaggccggagaccaggtcccggacgcggttctttgggctcccacttagcctccctttctcccgcgttgcgcgcccgctgcccgctgtcaccgcccacccgacccatttcgaggccacggactcgaaagttattcgaacagaacagccggcgtgagcctggcaggcctttggtgcattttctttatttcattttattttttctcttttgagacggagtctcaccctgtcgcccaggctggagtgcattggctcgatctcgactcactgcaacctccgcctcccaggttcaagccatccttccgcctcagcctcccgagtagctgggagtacaggcgtgtgccatcatacccggctaaattttttgtatttatttttagatacaggggctcccccctatgttgcccaggctggtctcgaactcctgagctcaagcgatcctctagcctcggcctcccacagtgcggggattccagacagagccaccaggcccaggcctggtgtgttttcttaaagtgactcccttgaccttctagtctccgaatcccagaacggtaaccagacgtcgtccacccccacttccagctctttctggcattttcagacccctaccagggctctctgtgaggggaaagaactggagttgatgttcacttgagacgtgctaccaggggcatttaatggctcactcgtgcattccacctgggctgtgatgtgacttcagggacgcttggccgcgccggaattagcgagtggcagcaggagggtgaggtcatggtgaaaatcccctacaccggacactgtgatgtaggctcttcccaacaaggaagcagatacacaaacacaacgaggaatgggagcacgcaaattttagctttcctgccagattacagaggatatgacccgtccagggactttttttctgtcctaacagcagattcaggccaggacacctgaaaggaggccaggagacaagccacaagtgacagctgtgggttggcagagaaactgcttaaccgggacccccgagagccgacctcttcattcttagtatttagtttcaagtggaaaaagccactttggtctgtccctgttttgggcaatgcaacgtagctttgggctcctgtggctcagaaacttcgtatgtataagggagcggaggtaagaggtcagcattccaagaaactcccgaacaggtttaaattttaaaatcggtactaatcagttactccctggggttgggttaatgaccgagaagcctcgactcagtagattggctgcagtaaacaatgcctgtagtaggattatctcctgtggctctggcaagcccagagggtggacaacctacaatatacaagtagagtaggctcacctccaatatctgtggattgataagagtcagaatcactgagcagtgctgtcaggcaaaatatatggtaaaagcctgccctggatggagaatttttccatcatctcatctagtgtttgggaggccctgttctctaaccatgcaaggactcgcctctcccaggattggggcatagaacctgtccccgagcactgtttctgcattgaccccaggtgctaatctgaactccaacaaagaggagagaaacttgtaagttaggtagttaacatcttttttcagaagtgtgtgtaatataatggaaaaccaagaatgcctaggaggcaggaaggtattcctgcccagccagttcatgtcgtgacatgcagagcagcagagaaagctgtttaaagccctgcgtgtaagcttgccttggaacaaacttggctcacatcaagtctggctgttctagtcagtgtagtttttaaaaagagacctctttgacctgaaagtcaaatgaaggaagaagaagaagaaggaggaaggaggaaggaagaaagaaagaaaaagaaggccgggcacagtagctcatgcctgtaatcccagcactttgggaggctgatgcaggcagatgacttgagcccaggagttcgagaccagcctggccaacatggcgaaacttc

SEQ ID NO: 65325 - DNA, 4361 bp, Homo sapiens
aaactcctgacctggtgatccgcccaccttggcttcccaaagtgctgggattacaggcgtgaaccaccgtgcccagccagaaaaatattttctttaaaaagtcattggcatcatttaaggttgaagtgctcacagtgtgcaacattcaaagaatgcaaatgccattgtgtttatttcaaaataatactaacaattgaaattctttgcaacagaaggaaatctagccattgcttcaggttatacattgcaatcgtattaatgatattttcattttcagatacattgttttataactgaaaaaaatccaaactttttaagggagtataaagtctactagttagaattgaatctgctggatgctctatttccaacagacccagacgttaactcactggaagcgtctgtattgttgccagccagttaatccatatgcaaatagattcagatgccctgtggagctgtgataaaataattgcagctgttgattagttgcaatgttcgtttctttctggaaactcagttcagtgtccgtcttgcaagataaataattaaaggtgtgattaaaaacgaaatacatttccaaatagcttttctcctcttgtcaccttagaaagaaacaagctctttccaacaatactgccagtcttgaaatctatttctaactcttctggaaagataggcttcttatagttacagtttattttcaatgaaaaaaaaaggtcttacttagcttatttgccaatctttgtgccaaataactttgggctgtttacaaaaatcagaatcatccacaaaggacaaaaaatgtgtcaccctcagacatgttcagaagaatgtgccaaaggctctaggaacagttccaaaagaggtgtcaaaaattttttttgatgggaaatataatttaaataagtgtttcccctgccaaggtgactacttactactcaggatgagacaacgcccatttagatgtttatttaaaaatctgtcacattacttgatggttaaaccttgtgttaatccagccttcttattacgaaactctcttttgtctcaccatcagtacaaaataggtggattctaacccttccttacagataaaacaggcgtagacttttcttaccttccatagggaaaggaagggaattcccaagccctcccaaaatacaaatcccttgcatttgtgtcatgttttaaatgcctcaaagcactttgacctactttatctcattctctgctcacagtagcccgactaggaacacccaacattaacctcgctcccatttagcaaatgactctctgaaagcctcattcactgtggccagttgcagagctggaactggaagctgcttagtccagtgcttttttttttttttttttggtaggagataagatctcgctctgttgcccaggctgcagtgcactggcgctatcatagctcactgcagcctcgattctcccacctcagcctcctgagtagctaggactacaggtgtgccctaccaggcctggcaaattttttaatttttagtatgttgccctggttgattttgaactcctgggctcacgtgatcctcctgccttggcctcccacagtgctgggattatagacatgaatgactgcaccctgccccagtgttcttgactttttctgttgttgttgttgtttaagagacaggctctcactatgttgttcaggctggtcttgaactcctggccacaagctatcctcccaccacagcctcccaaagtgctgagattacaggcatgagccactatgcctggccccccttgctctttttgatgtacaaaaattgccgtagtgcccagaatgcccaagtgtatgaatttcaaacctgagacaagtagctaactggacttaacctccaggcaccatagagttcagtactttattatttttccagcccctttcaggctgactgccatcttgaagttccccagctcagacagatcctggtaagatgttctgtactttgaactcaggctctggtttgtaaaatattccaggtggctgatggagaaataagaaaagaggagccaagcttgtttgtttgtttatttgtatgatgcacaagccccacacatttttcacttaccgtaggaagatttaaaaagaaacccttttgtgtgtgtgtgtgtgtgtgtgtgtgtgtgtgtgtgtgtaatgaaatttgatgttgcctttaccagaataagcctctcatgtggaaaattttgtatgaaactagacatgtggaatcaaattggtggtggttttgtttgttgttgttaataaccgaaaacatgactttaattattggttgtattttttctcagcctccaaaaaagacctatgggctgctgttgaccagctgagacctcagctcctccaaagtcagaagctggtactgtcttaaagggacactggcactcctaaaatccttccaccttgcttactgcgtcagataggtttaagggcaatctgtatgtaacactcatcacaaggctttgcctgtaaatctgagattcggaaaaactcaaaacatcgtgctcaccccttctcctttatttttacttacagcttttaaagcagaaggatacatttttagtattttattgcctgtcaatgctctgcgccttgccagaaacggataacgataattttaaattatttatgtgtttatttttatgagacagtttcactctgtcacccaggctagagtgcaatggtatgatcacagcttactgcagcctccaacttctaggctcaaggggcctacctcagcctcccaagtagctgggactacagaccaccacacccgactaattattttttgtagagacaggttctcactttgttgtccaggctggtcttgagctcctggcctcaagtgagcctaccacctcggtctcaaaaagtgctatgactacagaggagagtcactgtgcctggcctaaggatgcttgaatgtaaattctgtttctccagtgaagttcaagttggcagtctcaattcattcctccatgtaaagatcttctgctcacaacccggcagcagacagcagttttctttccctcggaacactggattagcaagcttggacctgccccttccagcagccacactcctggctagcttgctctgtctacaggtagcatcacatgtcatggcctgtagacccggcctttacctcagtgcaaaatgccagggcatgtcctctggttgagtttatcatcgagcagtaagggctcagagggtgctgagaaatggtccatgcagcctttgtcagaccataacacgtgggctcccagtgcaaataatatcataagttttctttaaactcctgtgtcagctgctacagaaaagaaaggcctgctcacgataggattcagggaaaggcagcaactgctgagtcagaatgacagaattaaagggcttagcagatgaggcactgtagctgaggtccctcatttactttgtttatttagaaacagggtcttgctctgtcgccagactggaatgtagtggtgagatcactgctcactgcagccttacctgctaggctcaaacaatcctctttcctcagcctcccaagtagctgtgaccacaggcacatgccaccatgccctgctaatttttaaattttttgtagggatcggagggcgtctcactatgttacccaggctggtctcaaactcctgggctcaagcgatccgcccacctcagtctcccaaagtgctgggattacaggcatgagccaatgcacctggccctcatttgctttagttattagctttctcctggttgtggaaaggttatgccaggcccaaagaggagaagaggagaaaataaaaacaaaggaaggtgctgggtgtgtggcaagcaattgtgtatttgtgattgtttcccctttctttgctcattaacagaactataataggaaaagctcccttaagatagtgagatactgggtgtggtggctcacacctgtaattccagcattttgggaggccaaggtgggaggattacttgaacccgggagtttgagaccagcctgggcaacatggcgagatcccatctctatatcaaatgtatacatatacgtacatatatacatacatatatatatttttaaagatagcgagggaatcgacttttctgtggaaaccagtatggatcatatcagattttttttttttttttttgagatggagtcttgctctgtcacccaggctgcagtgcaatggtgcactgcaacctctgcctcccaagttcaagcgattctcctgcctcagcttcctgagtagctgagattataggtgtgcgccaccacgcctggctaatttttatatttttagtagag

SEQ ID NO: 65326 - DNA, 718 bp, Homo sapiens
acttcctatttctcattggaataaactggaagaattgaacaggtaattctgtgcaggacgtgaaagggatacttaagctattgtcatggctctgctcagcctgcaatatggagccagcagtgtgcaggcagcccccgcccctctcccccagcccccagcatgtcccagcagcttagagccccctggctgggtgggtctgggcaggcgcttcctcccggagctggctgggcaccgctcccagacccaggcttttctaggtcaggcagttctatcttcaggctggcccgaggatacggtttgtgtaaactgcagacattgctggcgtgctgtgtaaacacagactatctcccactgcagcttttcctttggggaggctccccctccagttgggatactggattccaacttcttatcaacttgtgtttcctattctgatataaggaagctattaaagtccctttcctggtattgccttgaccccatcaggacttaacttgtgtggaagcagatgtcctttagagaagtttttcacacacccccgccccccccatccattacccagcctcaaattctccactttaaacaaacctgcaggaatttgttttcaaagccttaggccccgaacatttactttctactccagctagttaaaatgtgttttcttggctttttgggccctccttgatgggtccgctgcttctttcagcttctttcatct

SEQ ID NO: 65327 - DNA, 565 bp, Homo sapiens
atgaatatagtttatattagatttataatatttatttttcattacatagttcttcccaaatgtattaatccagtgagtcattccatctcttctagggcccagccagcaaaggggcaaagcctcagcagttgttgcggggagggcagactcaaagaagaaaaagggaatggggagcaagccttctcctaacactcagctactccatgtctcttatgtctattctacaaacacttttatgctacacttggggcagggcgttgcaaccagtataatggttcggcaatggactttggagctggactacccaggttttgaatctgaccttcgctacttcccagttctgtgccaagtccacacctacctccagattctcacctgaacaatgaggaggctatcaccatatccccctcaggggctggtcatgaagattaaatgagtggtctttaaatgaatgttttacagatagactctatgagtgtttgttattacccttgctattaaatgaaaggccttgagggcttttttgttcctttgttttgctttttgttttttgagatagggtctc

SEQ ID NO: 65328 - DNA, 1823 bp, Homo sapiens
ctgatggcagatctgaagtgatctgatgatcaagatgaaaaaagaaacatgatatacatctctcttgagcagagaaacattttgagtttttttaaggaaaattaagtttttcttggtacaaaactttgaaagaaatttctcctattatacatggtagagagatagaatgggtaattctttgacaaaagtgtttgaatctgatttggtatcaaatcacaattttttttttcaaagagaaattcacacaactaattcttttttttttttttttttgagatggagtctcactctgtgtgttgcccaggctggagtgcagtggtgcgatctcggctcactgcaacctctgcctcccaggttcaagcgattctcccacctcagcctccccagtagctgggattacagccactgcgcccagctaatttttttgtatttttagtacagactgggtttcaccatgttggccaagctggtctcaaactcctcacctcaagtgatctgcctgcctcagcctcccaaagggctgggattacaggtgccagccactgcaccaggcacaactaattcttataatgattttagataacagtgggaaactgtaacactgaactttagcccagagatgctgattcacagtggagatttgatcagttcttgaaagcacgatagcttacgcttaggttggcaagaacttttggaagcaaatcctattttctaacgtgttagtcattctttccatttgcatctttgtttgcaaatgtaaacagtgtgtcatcaatgttgttatctaaatcattttaatttttaacaggaggcagttttgggtgaatcctgtgacatgcttctagagacctatctctacccctgtgatgatgattaacaggaggaattggggttatggtcattcagatacaaatcacttaacttagctctcatctggtacatgtatttatttatgttgtgtctctgtgtctcttttctttttgagacggagtcttgctctgtcgcccaggctggagggcagtggcatgatcttggctcactctaagctccgctcccccaggttcactccattctcctgcctcagcctcccaagtagctgagactacaggcgcccgccaccactcccggctaattttgtttttgtacttttagtagagacggggtttcaccgtgttagtcaggatggtctcaatctcctgacctcgtgatccacccacctcggcctcttaaagtgctgggattacaggcatgagccaccgcgcccagccgttgtgtctcttttcacaagtgagtcaacaaggcatttaggagatgcatgaaataaaatgataaagtataaattaaaaatcggtacaagaaaaacaaattaaatatggagtcaagaccagggtggatatagggtgaggttggagagaatgaagatataaaggcaataaacttctactattgcttcaagttggctgcaaattggctttgggcttcctagagggaagggggcaaagttcactttttcccctctggtctgaaaatggtgaagccccatctctactaaaaatacaaaaattagccgggtgtggtggcacacgtctgtaatcccagctacttggaggctgagggaggagaatcgcttgaacccaggaggcagaggttgcagtgagccaagatcgcgcccactgcactccggtctgggcgacagagcaagactccatctcaaaaaaaaaaaaaaaaaaaaaagtcccattgaaacataactgtactattcttctagtctgtagcctgttaccatcatgaaaaactaagttactctttttcacccagccccc

SEQ ID NO: 65329 - DNA, 2742 bp, Homo sapiens
ttgggaggctgaggcaggggaatggcatgaacccgtgaggcagagcttgcagtgaaccgagatcacgccactgcaatccagcctgggctgcagagcgagactccgtctcaaaaaaaaaaaaaaaaaagaataaaagaaaaaagagagagaaagcccaaattagcaaaataagagaatatgggaaccaatcacagatacatacaaagttgaaatgattttgaaattgctttgctgaacccattcaactaaatttgaaaacctggtttccacgttgtcattcaccatggctgtggccaagctagggctggaagctacatctcatggctttctgcctagtaatttccctgtgagtcaaccagacttcagagtctcatttctgaaacttttattccagtactctaacctagagctaagatgtctttgtagcttggtgggaacgcggctcttccatgggaatgagacacagatgatctgaagacatatctcctgagcatacctcttatgataaatgcccacatgcctccatctgacatcagctttgtctgccatgctcaggccacctggctctagaaataaaagatgggaacgtccctgatcctgaatgttaaacctggaaaatctcctcctgccagagatgtagctagcattccatatttaaactatctttaaagattttaatgttgacaatagtaacaacaactggtatctattgattctttactcctttgtcccctatcattgtaccatccccattttacagaaatcaaagcacagaggggttaagtaacttgcccaaagccacacagagagtaagtaatggagttgatatttgaccccaagtaatctgattccagagattatattttacctccaattatgactccaacagttttcatattattttgagaattctgagaattattctcagaataatatatatatgtgtatatattatatatacatatatatatatatatatgccagactatgtatataatgtatatatgtatataatggaaccactacgcctagtaaattgttttttttaaggtcccaagagacataggagagaaactattggttactggacattcaccaagtgtcagtcatagttctaagcgcttgtacatgaatcagctcagtaatcttaaaaccaaaaccagaaccaaacaaaccgccgcccaccccctggggagagtgcagtgattctcactcatcagatgagacaaaggaagcccagagaggttccataacttgcttgagatcctacagctaggtggcaaatccagggctcagagccagcccatttggcccgtgagcagcattcttcaccaccaagcacaccccactgccagtctttaacccagttattcattcagtcctcacagcacatgatcgacaggagtcatttcctacccacttgcttttctcgggttagatggggtaactgacgctgataaagtttaaatattaggttggagcaaaagtaattgtggctttgccattttaatggcaaaacccgaataatttgcttagtgccattcaatgacttggggctggctagccagggagccaaagcgtgttgcatctgttttcacttccccaggccttagtggtgcggtctaaggctcgccctctgccacacatcctcctctccctcctcccggcagctcctcctcctcctcgtccacctccacctcctcctccaccccctctccctccacctcctcctctccctcctccttttccccccgtacccctccgccccccggggccctgccctgcgggtctcacctgccgctcggcggggtcccggcgggggccggacagcgccacctggcggcaggtggacgcccgcgcagcgcatgctaatgagcccgcgtcgtcgctcgcggattggctggcgcggattccagctgctttccaagttggaggcgcctagtgagggtcagggaggcccggcccgcgccctccccgcccagccgcctccccgtcgaccacccagggctggggcgagccaggctgcctttcgaacttgggggcttctcctcttgtctcccactggtgctctggccgtgaatccatccaggcgccaggagatgacaatccggtaccaaggccggcagtacaggctgaggatggcatttctccaaaaggtaaccctggccccttacctgggccctggagtgccggggaccacatctgggaagcgtccgaggacacgtggggcaggagtggagggcacccctttgggtcgatttgtgcagctcgatttcattaagtgactggtgtgagttgtgataaagacaattccgtttaggtttccaagctgcgtcctgggcctggagactgagacagagatccacggactgcagtgcaggcagcccaccccagatccgagtcatataaggtaacccagacaaccacctacgaatttaaagctcctataagttgccctttctgcatccgaagtgtgatatttgaaagttaaaaacgttatcttacatacatagatcttaaaacgtatcttacaccacaacctactcacagatgcaaaggcagtggtcatggtcttccattgcttggggtcctggggccgggtttgaggctgaatgtcagggtttcctttgccataacctcattctgcaccacgtgctgtcagccaggcagccaatgtggacttggaggctggcatctgctgggcactgctcgaggtaccagggacacagtgatgagcaaaac

SEQ ID NO: 65330 - DNA, 2019 bp, Homo sapiens
tctcagctcactgcaacctccgcctcccaggctcaagccatcctcctacctcagcctcccgagtagttgggactacaggcgtgcaccatgatgcacagcctttggttaagagatcttgattttgtcttcaccctcctctcccatagggaggacgttaggaccctttctacccctgtacctccaatcctccttccaagtggcactgtctgcatagttcttgtactctactcttccaggctcatagttcctcatcttctgaactaatcttcttccccattatgtggtcacaatactaaagtgcattttttgtttgtttgttttggttacttgacttgttaaaattgacaagtcagtcgttctcctacatacgggaaaaatgggccctgaagtatatatatttacaggtcttgttctgtcgcccaggctggagtgcaggggtgccaccaaggctcactgcagcctcgacctcccaggctcaagcaatcctcccacctcagcctccagagcagctgggaccacaggcgcacaccaccacgcccggctaatttttgtattttttttttttttttttttttagtagagactgggtctcgctatgttgcccaggccggtttctaactcctgagctccagcgatcctcccaacttggcttcccagagtgctgggattacaggcgtgagccagtgcgcccggcctaaattaaatacttttaagttgcagtgtcaccattatttttttcgagcctgtaggggttataaaaaggaaagtccagagcttaggtattggaggggccgatctcgaggtagcacttaggcgaaagggatcccggcgctatgggcttcaagggggcccctccgaaaagccttccaccccggcccccaatcccgcggcgcgcgagttccgtggaggaggccgcccgcggccccagagtcggcattaggggttcgcgtccacccggcaaggcctcccgtgagcccagagcagggacctaagaggatgcgagaaaccctccagcagaaaaaaccccgcaaactcagtgcactcaggacgctgtctgaaagaagccgaaagtgggcaaccgccggaagccgacaccctgagcccgcatttcctctctaggaatccggaggtttccgcatctctatggtctgggcgtcgagcggcggagcctgtggtctctggcgcaaaggaaagtgaactcccagcgaggaggggaaggagcatcggcttgtctcttcgcgatccctttcctaccccttctcactcgtgcgcacctggcagtaccaccagcagagcctcggaaattgctttcatcacgatttaacaaaatgaagacacaggaacacaataggacacccccaaactcaacaagtttctctagctttttgccagtagtgtagcgcacatgcatttttaaaatttagatgaagtctaacattcatgcaataacacagctgaaatgacgagtaataacaataataataacccagaaatgtttgacatttgaagttccttttgagtttgaaccccaggctggaactggatgagctggcgtcgtctctcagcacagaccctgtcctctggtccctaaggccgcgagcaggagagacacacctgttcttccacttgctcccagggctccagctggcccatctgttgattcgaaggttcatgctaaccaacttacatatactttcttatttgtattttccactctaaaaagggatagggaaaacaatgcaaatataaataactgcagaatctactaaaattagaattgtctaggtttacaaaacatatggcatccaacacaaataagggtgtggtgaaatttgttcattctgagcagacagaatgtaaatatatgcatcctgttgaaaaactacttggcattttatatcaaaagccaccgtgactcatgggatcccatctgtgaaaatttatctcaagcaaataatgcaagagaaaggaaaagctgtatttttgaagtgattctgcaatggacaactactgttattg

SEQ ID NO: 65331 - DNA, 4708 bp, Homo sapiens
ggtcagttgttgtgtgggtacagtgtagggggaggaggtgaaggtcagaaggtggtgcaaagaagttctggaagatgatggataggttccctatcttgattgtgtgtatagtttcatgggtgtatatatatgccaaaacgtatcaaattatacactttaaatatgtgcagtttattgtataccaattatactcgatgaagctgtgaacaaaaggcccctatctggtcagaagcagaggagggataagaacacacatcttgtgcttcgtggtcttcacaccgccctaaccccagcactgtcttaaaaccaaagcttattctaagtcataaaagtacctttacccatattgtcatttttttaaaactctgtatttataaattttctataataaaaaataataacacccttaaaacaagtagcaaatgcccttcaacagttccaatctgacccggtccttagatggaattgtaccctacagaattgggaaggggtggggaacagagaaaggtgtgattttttttcttttttcctgtgttcatcttgagcaatgcatgtgcaaaatatcttttctggatgcatcaagtgaatttaatttaggataaaaaaattgagaggaaccaggtttctattataggactgtggtttgtggtggtagctggtggtccccactaggtcgaaatagtttccgtacaacccctagatgaggaagatgcaggaagccttctaggaagtaccaactcttctttttctccttctttccctgatcaaacacccagggccacgaggtgtggccagcttccggaggtccaacatagcttctttgtggagcatgtggaagtgcagagataaaggttggtgtgtccaaccatcacttccctttattgttgaacttgggctgacccatgaggagcatagagactctgcccagctggctcgatatgctcagtgtggaaaatgaggccctttggtttcccaccagagtatgtcttcatgctgtattgcctaaaaggacctaagaagaaacattcatgcaactgaaggtttttctgtctgtatgatttttttagaattgcagatgtaatatacacgtatcataatttcaaacaagacaattagatgaaatgtaagcaagggtaaaggatgggcagtgactctgggagtcagatgaacccgacaccatttctgtccaggtcagggagatgtctctttgtgcacgtgtgggaggtgctgtacctgagttgttcaaagtgctgggggacagtggatgaactctgagaccgagatctgggtgtgcgcactaccatagacatttaaaccacacgctgcctcttcacactgtgcctcccctgtgtccctcccagccaccagaatttttgcccttctctgcctgacttctgtgctccaggaggctaactctaaaagactgcagacccattgccctctggatttgggtcaagactgaacaccgggaggaaacaggagatggagggcaggaggagagagagccaggatatgtattccctcaggttttctccttccaagatgacagacccccccagcagggccctggctctccatccttaaatgcctagataatgcataatagctttccacggttgctattatattacctgggatctttaacatcccttagtggctcctttaaccctgccccacttctaagaagtcccttcatggaagtcttggcctggcagcggtctgaaacatccatcctgttgaaatgaactgtttaagtttctgtctctttttccagactttgagaggggcacaaaggcagggaacatgtccttttaagctttagtgcagcgcttggactgaactaaattgttgggttgactaggggtgttgcgacattttattgagatgatcttagacctggattttaaagggcactgctgcttgcgtgtgctgtctggatgaacacatgattgtaccgagatgaggttttagcctacagggaacaaggtccaggactatgtagatcatgttgtacaatacccagggcagcatgagtccgcttagggtctgaatcacactcttttgttgatattgatgcagaggatactggtcacaaaactgatgatgatgttgatgataatggaatgtccatttactgactcagtcagagtcacaggaggatttaattttagtactggtttattgcaaggtaatatttgtttttttggtcctttttttttttttgagacagagtctcactctgtcacccaggctggagtgcagtggcacgattttggctgactgcaacctctgcctcctgggttcaagcgattctcctgcctcagcctcctaggtagctgggattataggcatctgccaccatgcccagctaatttttgtatttttagtagagatggggttttaccatgttggccaggttggtcttgaactcctgatctcaagtgatccacctgccttggcctcccaaagtgctggtagtataacaggcatcagccactgtgcctggcctcagtttttgtttttttttggagacagggtctcactctgtcacccaggctggagtacagtagtgatcctgagctcaagtgatcctcctgcctcagcctctccagtagctgggactacaggtacgcaccaccatgcctggctaatttttaaaacgttttgtagagacaggatctgactatgttatccaggttgggtctgaaactccaggcctcaagtgacccacccgactcaaccttccaaagcactgagatgacagtgagccaagattgcaccactgcactacagcctgggcaacagagagagactccatctcaaaataaataaataaatacataagcaaacaaacaaacaaacaaataaataaataaataaataaataaataaattctggctgtgtctacctgggtatgggattgattgatccatgactgggaaattttggacaagtctgttagaaagaaggtgaggggctcttcttgaaaggctcttaagaaggtagtaggccaggtgcagtggctcgcgcctgtaatctcggcactttgggaagccgaggtgagtggatcgcttgagctcaggagttcaaacctgggtttctatcttgatgggagtgctggtaaacagggaaataagtttgccaaaactcatccaactattcttaaaattagagcatgtaattgtatgtaaactgtaccttgaatataaactttacctcaattaaaaggtttatgtccctttccatttaatccctgacccaaaccctccaaatttcttttcttttcttttctttttgagatagattctcgctctgtcgcccaggctggagtgcagtggtgtgatctcggcttaccttggcctcccgggttcaagtgattctcctgcctcattcagcctcccaagtagctgggattacaggtgcctgccaccacatccagctattttttgtatttttggtagagacaggggtttcaccatgttggccaggctggtctcaaactcctgatctcaggtgattctcccgcctcggccccccaaagtgctgggattacaagcatgagtcaccatgcccgacccctctaaacttcttgaccttgtgtccaacaaactcctagtcaccaccctcaaattatgctaatccttgcctctgcaccttttcttgtgctgttccctgtgaggaaacttagcttgcccctacacctggttaacttcctatcttcttttaagactcctcttccaggaagccttcctgatcttctcttccattcaggatgggtgaggtgcctttccacaaaatcctgtattgcattgactacatcttcatcacacatagattttattttataacatttttgtctaaatattctttttccactttaaactctgagctctttgagacaggaactgggtcatattctttttttcttttttatatttgtatttttctggtcttattctcatagaaaggactgagtcatattctgctttgaattccagactctagcaaaatggctggcaaacaatatgtttgttgattaaataaatcgatgaattaaatcaattttttcccctaggacactggcatgaaactttgaataccatattatatgacaggctctttcagttgcaagaaacaaagactcagatatgtgggaggattccagaagatacccttgcccttggtaaggcactgacccaacttagtccgaggggcttgtctgtgtcatggcccctctgctgctctctgttcagcttgttgcttccctttttttcttttcttttatatgtatattttttgagacagagtctcgctctattgcccaggctggagtgcaaatctcagctcaatgcaacctctgcctcccaggttcaagcgattctcctgcctcagcttctcgagtagctgggattacaggcatgcgccagcatgcccggctaatttttttgtatttttagtagagatggggtttcgccatgttgaccatgctggtctcgaactcctgacctcaggtgatccgcccgcttcggccccccaaagtgctgggattacaggcgtgagcctccgcgcccagcctgtttgcctcccttttctgatcagcttcctctgctcacctttcatttctccttcctcataacttcagcttgcatttggtctcagcttcctgtggccctgactttatctgactcaagttggcatttgtgaagg

SEQ ID NO: 65332 - DNA, 1213 bp, Homo sapiens
gtaattccagcactttgggaggccgaggtgggtagatcgattgagcccaggagtttgtgaaactccctctccacaaacaatttttgtaaaaattagcggggtgtggtggcacgtgcctgtagccccagctactggggaggctgaggtgggaggattgtttgagcctgggaggttgtagctgcaatgagccatgattacgccactgcactccagcctgggtgacagagcaagaccctgtctcaaaaaaaaagttaaacaacaacaaacccaacaaccaactaaccgaaacactaagaatcagagaagtaaaatataattcgcttcatccagacagctagcccggtgaggactacaaccttcctctcttccttcttcacttctttgctctctctttttaaacccacatcttagcaattcctctgctattgggtcattaaatcgccacctctaatttttttttctaagcatttattgagggccaagcactgtgttacacatctcctcattaaaatggtatagcaaccttttctggtcgatattatgatcccatttttcaatttttacttttgagtgaaggacattgattcttagagattgtaaggaacttgcccaaggctgccggctggttagtggcagagctgggatgggaaagtccgtattttccaccgcgctgtattagtgagggctctttgtgtcacttctgtgcataactccgccccaagttaaaaggctcgctgctctcgacaggtcctcctcctcctcccgctaggtcctcctcctcctcccgccaggtcctcctcctccttctcctcccggggccctgccctgcgggtctcacctgctgctccgcggggtcccggcgggggccggatagcgccccctggcggcaggtgggcgcccgcgcagcgcatgctaatgagcccgcggcgccgctcgcggattggctggcgcggattccagctgctttccaagtcagcggcgcctagtgagagtcaggggggcccggcccgcgccctccccgcccagccgcctccccgtcgacgcccagggctggggcgagccaggctgcctttcgaacttggggggcttctcctcttgtctcccactggtgctctggctgtgaatccatccaggggccaggatgacaatccgacaccaaggccagcagtacaggccgaggatggcatttctccaaaaggtaaccctggcccct

SEQ ID NO: 65333 - DNA, 735 bp, Homo sapiens
gtgctcaatgtgaggcctccctctctatgccacccctgacctgactatttatttttcactcaaggtgccctagtctttgcagagacaagctggctcacagcttcccctttccctttctgactgcttagaagaaaggatgcccccaccagcaatgtgtcactcaggtttccttgcatgcaagcaacagaagacccactcttttgttggagcaaaaggggaagtaattgaaatgctatagagcagctcatggaggaaaaggaaacactgacaagccagactttggaaaggccaagaaccagcgtagctctgggcacccaaagagtggaaacagggggcagacttttcagggtgcctttgtgtcccccatcacctcagatgcagctggggcaattcttcctgaaggcatccctgaccctgtccccctccctgcctttgactgtcattaattttggcctgaattctctactggactggggccctttaagggaaagtaccttgtcttgctcatctgggtaatcccaatgcttctcagagctgtgtttgtaacagatggttagtaaaagtttattgaatgcatgagtcacttattgtctgtccttgtgtggagagtgaaggattaaatccttcaggtgtcttttctagctgtagccctggtctcagtttactttctccattgtttttgtttgtttgttttgttttgtttgtttgttttgagacagggtctcatgctgtctc

SEQ ID NO: 65334 - DNA, 4774 bp, Homo sapiens
tctaggagacaagaaagagctgagtgctgcctcccacgtgcaagcagttattcttttaaaatgcggaatttatcttaggactgcatttctaactctgggattttcctgcacacatgaaaataaacttggcttattcctgggaggcacgatgtgactaatcatgtattctgactgtgtaagactcaagtcatggtactaatcgggactgaagatgctgttttgtttagtgccttccttcaatatgtttaagggttgggctcttgtaaaaatgttttacatcttcctatgtccccagtttgcaaaaatgccatctgcctgagaaaatatgccctgaccccacacacatttcagtgactctgctgctgctaagccctgatcccagctgaggagggcacctgtgtactcaggggcattcactttgggttataataatcatcattgttcagtgataaactcaaaaccatttacttccgtgttccataaacccagtttcatgaaaccaaacagaaagaaaatggaaggagacccaaggatagttcttagacccagtttccaatttttatttgtctcaggacctcattaccgtaattttgacatcattagtgttttgacctgtgaaccagtttttttttttgttgttgttgttgttttttacctccagcttctccactggtaaatgtctgggcccgtcgaggtgcctcatgcctgtaatcccagtactttgggaggctggggtgggcagatcacctgaggtcaggatttcagggctgaggtcggggcggatcacctgaggtcaggagttcaagaccagcctggtcaaaatggagccccgtctctactaaaaatacaaaaattagccaggaatggtggtgtgcccctgtagtctcagctacttgggaggctgaggcacaagaattgcttgaacccaggaggaggtggcttcagtgagctgagatagcgccactgcactccagcctgggagacagagcaagactttgtctcaaaaagaaaaaaataaaaaaggtctgattgtcgactaagagagtctcgggagagaataagccagggggcttgagttctgaatagaattgcaaacccagtgcttgtctctaaggtaccagtggtttatctctaaggcatggatcctgttctgtccaaatcttatggctgagggaagacttcagggcaggtgcatttcacattcactgtggacacaattccccacctacggggaggaggcacagcaggttttcaatacccagacagcaggaaatgcattgactcagaaggtctgactcaactcaagggaattagctttttttagaaaagttttttaaattgacacataattgtacatgtttagggggtacatagtgatgtttcaatacatacaatgtgtattgataggatcagggtaattagcatatccatcatctcaaacatttatcatttgtttgtgttgggaacattcaatatcttcttttctggctatttgaaagtatataaagtaaaacagaggttactacagactgggaagggaagggggaaggggagatagggaagtatttgttaaaggataaaaaattaggccgggagcggtggctcacgcctataatcccagcactttgggaagtttcaggcaggaggattgcttgagtctaggagttgaagaccagcctgggcaacatagtgagaccacatctctacaaagaataaaaaaaattagccaggtggtggcacatgcccgtggtcccatctcatcatgacactgacgtgggaggacggcttgagctggggaggtcaaggctgcagtgagccatgattgcatcactgcactccagccttagtgacagagcaagacaatgtctcaaaaaaaaaaaaaaagttacgaaattacagctagatagtgttctgtagcactgaaggatgactgtagttaataataatacagtatgtatttccataatagctagaagagaaggaattagctcttcctccaaatagtgtgtttggaccaattaagccccaggtttaaataatgggcctaagtttccaaacccaggcattatcctgagaaagggtagaacccaacatggcaagagtcttggagtctgtggcaactttgggcttctaagatgggtgcagagacacaagtttgaacactccaagttggtttgaatctaaaaacctattgataaaatataaacaggccatattttaatgaaatagatacagaaaggccgggcatggtggctcacacctgtaatcccagcacttcgggagactgaggtggatcgcttgaccccaggagtttgagaccagcctgggcaacttggcaaaaccctatctctaccaaaaatacaaaaaaaaaaaaaaattagcctggcctggtggtgcgcgtctgtgatcccagctactcaggaggctgaggtgggaggattgcttgagcctgggaggcggaggctgcagtgagccaagattgtgccactgcactccagcttggctgtctcaaaaaaaaaaaaaaaagaaaaaaaagaaaaagaaataggtatagaggaatgacagagggactggatggaagacaatgtttcatttcacaagtagaattgggactgattttgtcaaatacctgccaatcccaagggttatttgatttgaggaaatttctaggaaaacagtaataagtatgtcaccaaatcgatacaggaaaagaggacagcctggtcagttgacctgtgtattgatgtcatatcttgggtgtcgagcttctaggaaatcattttctgtttccttttcaggattgtgaaatacagtgagcagttctcatccaacgatgccatcatgtcaggctgcctccccagcaacccctggatcaccgatgacacccagttctgggacttaaatgccaaattgtatgtattttatatattggtgttttttaaaaaaccgtttttgagttacaattcacatgccataaaattcaccccttcaaagcatacagttcaatggtttttattatattcatagagctacaatcaattttaaaacatgttcattacacaaaaaagaaaccctggacgccctccagccttaggcaactatgaatctactttctgtgtttacggatttgtctgtctggacatttcctatcaatggcatcacttggaatctgaggaatgacagagggactggctggcagacaatgtttcatttcacaagtagaagaggaactgattttgtcaaatacttgccaatcccaagggctactcgattcgagcaagtttctaagaagacagtaataagtatgtcactaaatcgatacaggaaaagaggacaggctggtcagttgacctgtgtattgatttcatctcttgggtattgcgcttctaggaaatctaggaaagactatggggtcttttgcgacgagcttttttcacttagcatcatgttttcaaggtttacgaatcttgtagcatggatcagaacttcattcccatttatggttgaatcatcttcatggtatggatgcactagagtttgtttatccattcatctgctgatggacatttgggtggtttctgccttttagctattatgaagaatgcggctatgaacattcgtgggcaggtttttgtgtgggcatattttcatttctctcgggtgtatatccaggagtggaattgctgagtcaaatggtgactctatgtttaacaacagattggttttgaaaattaaaaaatcatatgtatggctttgcatgtttgatatctaattagcgtaaacttaagttctgggcgggcagggccctaaacctgccctttcccttaccctttggcttttttttgtcagttttgaatagtcattgctcactggacctgcacgcttgtgttatttggaagagggggcagaggcagaaacacaggagagttccggcacacagagggaggaagaagagaagggtgtaatggtcaaattagagggagagagagaggaggacaggggagaagggacaggcctgagtgtgtgagggaggtggggtgatgggaaaggaaggagtgccaggtataggtcacagcttgggtcaacactgccgaggccatgaggaacacacaggtgacactgacccagctgggtaagcaggcctggcctgggagggccctgattctcatcttaagcaacactggtacctattccacgtggcccgctctgggcagccaacaggttaaggaggccactcctctggagtcaggggtcccctgtctactaaggtcaactgcagagccaaagactctagaactaccttctggggaggcttcccttatcctctttgggctctggctgttggggtgcttctctgcagcccatgtctgcctcccagcgtactgaatgagagaggcgacctgtgtctgcctgtggacaagcatgtgcggacgctggctctccctggaggagaaggcagggaatctggccaggaagagggttgtcctaggagggcttggggaggagagatggatggccgctgaattttaaataaaatggggagcatggtattgaagacaggtagagattgctggcaagaagaaaaatgtgtgttctgtgtaagaaccgttgatcagagggcactgggtgggtgacaactggaactccccattaaagtgggaagccctgttcttttttgtggatcctatatgtttattgaaccaaatatatatatacacatatatgtatttgtaagtatatgtatatatatatttttattggtgcacctatcaac

SEQ ID NO: 65335 - DNA, 1339 bp, Homo sapiens
atgttttctagtgagccccactagaggcagcatgagacaatgcccaagagacagtgaccccacatggatgccaaatgcactcctaattagtataaatgcccaggtgggcacaactgtgacagttaatctgataacctgcgcacttgattgggagagggcacagagccactcaacaccaccaggacgaacagagccaacaccatgagcccacgggtctctaggccttgcagcacttcctcctggcttcctggtttattcactatccatccaaggcagctttgccacaggataggcttattaatactcacaggttctgccaccaggaacccaaaggtatctactgtgccccaaagagaaagccgctacatgagggacttgacctgttctgtctctgtatccaagtggacctcactgaactacacactaacccttgccacctagaatagggactggcaaaggtaacctttctgatccctgaaaagtggctcccccatgcttggaatccaaagtgcttcagctaaagggggaagggtgaaagctttaaagtcacctctaaataaaagaaagtttttcttctgggaaggggataaaagaagaggaagtaaatggggaggctgcaggggagaacttagaacctgctcccttctacccctcccagaaccagtctttctaaaaagcagtcttgattactaagaaatataaataaaagaaacccaaagtggctcaaaggtctcatgaccaaccggtcctattcacagatctcatgttgagaacgctcatgcctgggggaagggcaaagcgggcaaagtacagggcctgtgtctggcctggacctgaagtctgtctcagaggtgcatggctgtggaagcaccaggccttatttcctcatctgtaaagtcccaagtatctgcctgcctgccttcctgattgggtcttgggaggatcaaacagaaataagtatgggactacacccaagttatctcatcatgaacccagaataacacctcaatgatggggactgacatgcagccaaggaccaggaagcaagccaaaaatagtctctaagaaaactaaacagaagtcttatcgtctgacgtaaactgcatttgacttaggagattcactcaatgccttcaatcaatttcaacttactcttattttacacataatgctaagattcccacacaatccacaaagtaatatatgctacaggaggaatgcttgctagaagcaagcacacagacagcaaaacacaacagcagggagaatgaaaagagaaaagagaaacttttcaaaggggaaagggtcagataaccctatgcaccctcattgcctatga

SEQ ID NO: 65336 - DNA, 2499 bp, Homo sapiens
ctgctttccctagcacggaaaagatcaaactaagaagggtaggggctgaacggggtgcaaccccgggcgagaagccagggaccccggatctgggatgggtgcacgctgaacccgaccagagcctcgagccgcggggctgggcggcgcggcccacggagaagtggggctgccgttggcaccgcgctacccgggcggtgggaggtggagcggccccgttacctggaagacgaaggccgccgaagccaggctctcatgtcctccgagcccctccggcccggtcccccggcccaaatgcaactgaacgcctccagagccctggcgggcacacctcgaggccggaaccccgggacacgccagcagcgccccgagcccgggcggggggtcggtccccggcgccgccgtttgcagaggcgcccgcagaaaaagcacagaaagcagcagcctagtccagaaatggcgacgcgcggagtctctgcctctccgcaaaaggggccggggcggccacgggcgaggggcccgggccgggaggagggacgcgagggacacgggcgccccggacttgggccggtcctgcgcgcagactgagcctccgccagcgctgtgggccccttagcgcggacccgcggcagggaggggaaaaggggagggggaagagaagtaggaggagaggatggggcggaggagaggcggggggcgggggagggcaagcggggggcgccgctaccctttcatcccacctcccaaaggcactcccgcgcgcactcacacgccgactcacatccataaccgcgacagcgacgcgacccccggggggtatctgccccctctccgcccccgccactgccgccactcggataagtctcctctctgggccccccgccaacccggtcaccgcgctggggagggggctccggcgcagggcgcgcaaggctgcccggccaagccccccggaacgctgggcgccgggtccgccgctcccctccgcgccggcccctagcgcgccccgaaatagccggcctgccaacttcaaagggccgccccgcacatcaaagcgcgcggtccgcccggccgcctcggcctcggcactcaccattgatccccgcgcgcgctcggcggcgagacctcgcaggcgcccctggcaggggcccggccccggcccccggctcggctcgcggcggcagccccgggcccccccgggccggccgcggcgtcggggaacatggggagtcgtgcggcgggggagggggtgcgggaaacaacaatcccgggttcagagcgaaagccaccggccggggagggggaacggcgcgccccgccgccccttttatgcaaaagatccgagcgggcctccgcccccgcccggcccggctttcaacgcaggtcctgtttccagcagtcactcggcgcaccaaatgtcctccgggcgcttccaacaaaaactgcgctgtggatttaactgtgcacttcaaaggcgcgagccgagcgcacggtcctgaaagggaggtacgcgccggccgcgccccgggccgccccccgcagccccgccaccgctccgcagggccgccccgcccgcgcccccctccaggcccggcctccgcctggccgggccccctcccgccccccgcgcccacgccgcggctcggcgcgacctcgccccctgtaagaggggggctttctttgaagcggctccgctggggccgagcttccacccccaccttttacagcagggccttcggcgggcgcctcggccgccgggcggccccgaaatccatcgctctgaggggttatttttatttcccggctctcgggctgttactgagttgccaggaccttatcaaagcgcagccggctccagccgactcccccgggccaggctcgcggagccagtgatcccgccgcgccaatcacagccgcgctcggccggcccgcgccgcccgccttaaagggacagcgccccgcgcccgccccgccccgccccggcccgcccccgccgcacgctccgctcccgcgttaacccttccccggcctctcctccgccccctgccagccccccgcggccccgagggcattctcagcccgagttctgatttcttcttttaagttctccggcctctttgctcccgcctcctccccctgcctgccctcgctctccccggctctggaatgcaacagtttctggtagcattatggccatcgcaagaactgcaagcaagcagatttttttttttctatcatcaaacgcttttctacctctattcaagtttccctgggaatttgggcttggaggactttataaagggagttccggccctggggttggctggcccgctgtcatagggcggactcgggcccagccgctggaggcgtgtgcatgcctgtgcgcgcttgtgcacgtgcatctgagttcgggtaaatataggactgcagttggtggatgaattgcgtttgtgcatgtgtgaaagtggggtgtgaatccgccagtataggcctgagtgctaa

SEQ ID NO: 65337 - DNA, 572 bp, Homo sapiens
gaagtttaacttgaaagtgccaaggcttttatgtggaggtttcatttttgttttggttttaccctgttttgtgtcttttaatgttgcttacctgtgaagatttggcaagcttctgagtgtattccttctcaatctgcttcagcttgctgttggcctgaaaaacacatgtacatgaacacatacacagtgacctgtgagcttggtatctcttccacatgcctatcaccaggcagctgggatgcctgccagctgcaccgcccttctggggcagccagaaaaccacagggcttgtctttgatgttacgccaactattcatcacttaaaaagcaaaaaaaaaaaaaagatctcttctgccaattattagacaaacataagacttctgtggatagaaagagaaagggagaaagagagacagaaatagacacagcaaaagtatgaaggctcagaaggtaaagtaagggaaagagagaagaaacaagaggggcaaggaaaagggagagggaagtgaaggaagaagaaaggaaggtaaatttaatactttttcaccttaattaaaaaaataaaaggaata

SEQ ID NO: 65338 - DNA, 695 bp, Homo sapiens
ttatagttgaatttcccatcacccagaccctaaaatctacttccaccatctttttcattacataaagttcctttgatcgactatttcaactgttgccaggtggtaagcagtaaagcatgtggttaacagcatgggctatgaagttaaaccaacctgggtggtgtgaccatgggcaaatcatttaactttcctgggtattattttataacatgtagataaagtggacaataaagattaaataggactgaggtttagcaatgtaggagtgatgcaagtgcaagatggcaatggatcagagagtagtgagtcagcactggaatgaagacaaacactaggttctttatgcgtgagaaaatgggaaaaataaaatgcaaggcaagagcgatcaaaaggagaatttggtagactgaaatcctggaggtgaactaggcgagtaatgttaggtctaaggcatggctgcatttttgcatggtctaaagtggaaacaagatataacagaagtgactttactacagctgagcttataaacttgcagggtcagactgttagaaaagacacctaccaaaacagtcttttacagtagattctggttactctttcttattcatctttccactttaaacccaaaagaactatttgcctcagcttctttactggggaagcaattttcttcctggcatgtccccaagactggg

SEQ ID NO: 65339 - DNA, 712 bp, Homo sapiens
cccattctcccatcctttgagccactggcaaccactaatctattttctgtctctagggatttttccactctgggcatttcacgtaatttaaatcatacaacatatgacctttcatgaccagattctttcacttagcatgtttccaatgttcatctatgttgtggaatgtatcagtacttcattccttttcctagtcaaatccattgtgtggatataccacattttgtttatccactcctcagtcaaacatttgagttttttccactttttgactactatgaataatgcttctgtaaacattcttgtacaagtttctttgggaaatattttttcagttctcctgtgtgtacttaggagttgaattgctgagtcatgtggtaactatgtttagctttttgaggaactgccaaactattttccaaaatgactgcaccattttacaatctcaccagcaaagtatgaaggttctaatttctccacatccttgccaaaactttcgtctgtcttgttgattacatccagtctaatgggtatgaagtggtatctcattgttgttctgatacatgatttgtgattatttccttctatctgtgggttgttcttttactttcttggaagtttcctttaaagcttttcattttgatgaagttcagtttatctattttttcctttgtcatttgtgcttttagtgtcatatctaagaattctttgc

SEQ ID NO: 65340 - DNA, 996 bp, Homo sapiens
tctcatttttaaacctaccctagtttcaggctatgatcttctcctcttctatcaatagcacctattacccttactctctttgcacagagagaactccccaagaccttctcatttctctccaacctggctttctgcagcatctactggccctctgcactctgagcatgacgaggtagcttattcctccaaaatacccagaatccaaatgagggaagagaatgtgagagaaggtactgacttacgtgtacatttcagagtgttgatgggccacagtcctgtgagagggcagataaactttctcatccctcctcgggacacatagcccggcttgcaggaatacgtaatctcttctcctggctcatagaatgtttttaacgggaccactgtggaaaatggtaaatcatctggcttgggacaggctgaaagagggcacaaagcagatggttaacaaatctctatttgcattttaaagttcagctaagcccacaaatgaaaaatgtgtgtactgttaccaattataagcataccaagttgcatgccaaatacctcatatacactatctcatctaatcccctcaacaaccatttgaaggaggtattataattatccccattttacaggtcagtatgctgaggcttaaattggctacgtatcttacagaggagctttacacatggcaatattaaagaatcagtatcaatccagtccctccagcatccactctaaagagaatttagttatcagctgggcgcagttgctcacacctgtaatcccagcactttgggaggctgaggcgggtggatcacgaggtcaggagatagagaccaacctggctaacacggtgaaaccccgtctctactaaaaatacaaaaaattagccgggtgtggtggcgggcgcctgtggtcccagctactcgggaagctgaagcaggagaatggagtgaacccaggaggcggagcttgcagtgagccgagatcgcaccactgcacttcagc

SEQ ID NO: 65341 - DNA, 1447 bp, Homo sapiens
taatttttgtgtttttagtaaagacagggtttcactatgttgcccaggctgggctcgaattcctgacctcaactgattcgcccacctcggccatgatgcccagctaatttttgtatttttcataaagacggggtttcaccatgttggccagactggtctcgaactcctgacctcaggtgatccacctgccttggcctcccaaagtgctgagattacagatgtgagcaagcacgcccggcctacttatcattattgatccctgacatatacgaaggggttggatatattaattattttttcaaaagcaaaaagtacttactccgtcctgcaatagcaacatggcagagaaaactcgagaacaagatgagcactggagaaatcattgtggatgagtcacactggcactaccaaagtggttttcgtctgctaaaaagacagagccaaatatgaaagcgcttaaacattaaccattttctggtgtacttttatctttgtaaatagaagataaagtatcatgatttgaatggaactctgagacccacattctttaatcatttactttccacttatgtggctctgttatgaaatctttgggagatggtttctgtcttcataacgtttttgttaatggcacaaaacagttcattattgcttttgacagaaacttgttgtttccggggttgcctggacttctcattctccatcttttgttttgtgtatgttgtagatggaacaccaaaagatcgaagctcctgtttcactcacagccttggcatataaactttggacaaacacctactctctgttctcagtctccacctctctaaaatgatgttccagttttcagatgtataattacaaagaatgtcttccaggaggcacttacaactttaattccctacaaactgagctcaacatcctctcttgcaagctcctatagctccagttaggaccttagagctatccttgaattctctatcttctcttacgtcagatcaatacaaagtcctcctcatccattcttaatatgtcttggatctgtctagacaggtttctagatctgtttcaggaatttgaaaattgatttgaaattaacaacttgggactcgaagaagaaaaaaaaacttgagtaggataagataatgggccagtgctgatgttgttgcttgagagggttcggaaggggggttgtctttgattccctagttctcttctacatcatttgctctaaaaaaaaaaaaaaggatatataaatggacaatagccaggccatatgtgaaaacagaactctgacccacacatctgtagcaacaggtctagaaagccaaacctacaacctctatagcagttggcccaacttaaggccaaccagagaaatccaaacatatttctctaaccaatcacatggacacctcacttctagttagtttccttccatcctccccat

SEQ ID NO: 65342 - DNA, 811 bp, Homo sapiens
gaaagttattccttagagtataatgccaagcaattaatatagaggaatactggacttagagaattgtaatttggaaataattatgaaacgatttaattctggcaaagaagtatcaattgatgctagaatcaggggatacaagtaggatgagaaatgttcatacagccttaaacatgtctccacataaaataactatttattataaaggagacaaagagaaacttagaggggaagaacctggcagacaccatcttaattaagtaatcaaaattaatgtcaccactaatgggataaattggcatgtatgtcctccaccaagaggatgcaatgagaaggacacagcgtcacttctgtgatattcctgccaaaagcttagtaacctggattgtgtcatgagaaggcactgtacacacacaaattgaaggacgttatgcaaaatgactgccctgtcatcttcaaaagggcaaaagccatgaaaggcaaagaaagacttagggaacccaggtggacatgagaactgggtgcacagtgtgggcccgaaggggcatttggtgacacttgaatggaagggtctagggtctctgggtaaagagaacaaggaagtttttgttctattcttacaacttttctgtatgtttgtaatttgaaatcatttaaaaaataacgaaaaagaaaaagaagaaagaaagagagagaaagaaagaaggaaagaaggagagagagagcacaagaaagaaaaagaaagaaggaaggaaggggaaggaaggaaggaaggaagaaaagaaggaaggaaggaaggacgctttttgtg

SEQ ID NO: 65343 - DNA, 705 bp, Homo sapiens
tataaaatatacgtatatatatatacaagcatgatcaagaatacctgagaatttaagaatatataaaataacaacatttttatcacaagtaacatgggacctcgtcttttgaaactgttaatgactttatagcgtttcttacgctaatttgtaaattaaactatagagacctggattcagagtccaaggtttttgtattcctgaaaccacattgcatcacatgttcaaaaactttcttatttacttcccaagcagagactttgaccatgatattaaacatttagcaacagtttagattatttgtttaaaaacctactttcaatgttgtctccttctgagttggaattctagtcaatatctaccaaccacatttcagagaaaagattcaaatgccttctctttatgataaaatatgtcaggaactagatatgcatttataaggggtataaacatgtcacagggcttaatgggcatgattaaatatgtctagaaatcaataatgggcctaagtcagcactgggacatttttgtgtggacactgggatcctctgaatacaggtagcttttaccttgaaaaaactaatatccatatgttgcaatttctatttttatctagagtagttagtcttatccttggctgcatagtagatgttcccaattgtttgttaaaaataccaatactcataatttctgggtatagtgctt

SEQ ID NO: 65344 - DNA, 1420 bp, Homo sapiens
tttcatagctaagaaaactgaggctcagaagagaataggatttacccaaagtctcaggaattcatctgagccctatggaccaccccacagcagtgcagattatctttgcaaggtattacgtgcctaagacagtctttccagtagatgactcagtgagctggcaccacttgcagactagccagtagagtgaccacagtgtatcaggaagatgtgtcactgagaaaacaaaaccagcaaggattgtgtgatgccacagtgactcactgtgcccaaggtcccccactctaactaggagtattccccagtggcctttatacaacttgctgatcttttcctacttggctcgtctactcgccgcacaatcattcccatgcagccccaccccaccccagtcccacccgtcctcctgatggggcctgcttctcatcctccgctgaggtgtcagattgacttccagaggcttctgcagagcacttctcactccaatctcctccaattctctaagcacaagcaggaacctgggcatttccagctgctcaagctaagaggtcccccttccagcctggctcgtgctggtgcttaggtggggctcctgtccctatcccctacagctctgttgtctctcgatatgtcactctttgcaccagaaagaacaaccaaggatcattctcaatgcttcacacagaaaccctcttctcccaaatgaatttcccgttccctttctcagggacccccaaaggtatagctgcagcctcccagaacacttattctacaggaggctgcttagaccacagctgtattcgggaaaaggaaatttcattaggatgtaatgatctcaggcctccaaagccctggctggctggaaaaaggaggctacagtcaggatcctgtccaagccgccagaagaagtggctgatggctttctaggctgcctctctctgtgcataatcctgctcatatctcactggtcacagctgcaaaggagtttaggagtgtagtatcttagatgggcacatatccctagaaaagcattgcaaagcagaaggggaaaatggagttgggtagacaacaagtattctcagaagataagggcatagctggcaatctgaacagtgagtgttaaggttagccattccaatatcacacagataagaaaaggccctatgatttggcaaccaagagattactcatggccttggaaaagacaaacctagcagaacactggattgggagtggggttaagcaatgagtgggggtgaggaagtggagacatgggacccagacttttctacagagatgtttcagtaaagagaaatgagggctgggcgcagtggctcatgcctgtaatcccagaattttgggaggccgagacgggcggatcacaaggccaggagatcgagaccatcctggctaacatggt

SEQ ID NO: 65345 - DNA, 3592 bp, Homo sapiens
aattaaggtcctggacttgtaaaatcaagaaagcctgataatcaacatcgtcgctctggtggccattgaataacgggataaatacctaagacaagtcctttaaccatcccacgtggtgataaatgcccgacgtacaaattaaaagtctctaccacacgcaggtgaaataaggtataggtcaagaagagaaggtaggggaaagggtcaatgcttaattatttaaaaatcgctctcttcctcctgtaggaaggtctaggggctaggtcttttagtgcacacgtgatgaaagtgacattttggccaggtgaaacctcaagctggtacaggcagctaaaacacgggcgtcgtgccctggagacaccgggggtcctgaggatggggaaggggctccctgctgcgggtgctgaggggttaggaggtgagcaccgggcgggaggctccggggcaggggctgcgcgtggagcccactcccggacgcgggctcctctcggcccggcacgggtggcgcaggactccgagcccgtcgacaagagagagagcgggagtgggagaaggaagaccgggagaggaggaggccgggcggcaagagcggaagaagaggaggagaactgaggcggaggagggcgagagggaggagagccgggcgcaggaaggggaggaaagaaaaaggcggcggaggagcgcggacccgccactcccggcctcctcccccgcatccccactcgggccggccctcccccggccgccgccgccgccgccgccgccgccgccgccgccgccgccgcctccccttgcccagtgttcccagcaccgcaaggcactcgctgcctcctccgcactcggtccggtccgctcagcgccgccgccgccgcaccctcgccgcacccccgcgcgcgcccggcccgcgcgcccccgccgctcgtcctcgcggcctcgcgctcggggcatgcgcggtgggcggtgccgctccgggccgcctctgccgccgcgagtaggaagcgcgagcgccgggcaccgggctgtcagtgagcctggggccagcgggcgagccagcggctccggctcccgctcccgctccgcgcagcaccagcccgactctccccggcccccgccgcgccccctcgccgcgacctcggccaccggcccgcgccccgcgcccggggtcgccccgagcccgcacctctcccccgccgcccccgcccacccggccctccgcggccgcagctccccggcggaggcaagaggtggttgggggggaccatggctgacgttttcccgggcaacgactccacggcgtctcaggacgtggccaaccgcttcgcccgcaaaggggcgctgaggcagaagaacgtgcacgaggtgaaggaccacaaattcatcgcgcgcttcttcaagcagcccaccttctgcagccactgcaccgacttcatctggtaggtgccgggccgggcactcctgccccgctcctccccgcctccgggtcccggcacccggcgctccggcgcgtccgccccggggctggctcactccgataacttggaaccggcgggagtccgaactcttcgcccggagtgacacgcgcgcccggccctgacaccggcgggcaggactcccgggacgtcgccgtcccgccacacacaccccctggcgcgagagggaggctggccccgtacggtggcgaaggggatccctctccgggccgggcccctcacctccccgggcgcgcccacccgcacgcacccagcggagcggccgcttgccggggtgtgagcccaggggacaggggaggaggagaggccctaagggggcaaaggttcccggagaaacgcgccccggagtaacgggggagcggcggcgattgcactgcgcgcggtccaagttgctggcgagccaggctgggcgcgttcggggtgggggggttgtgtttgtgcttcccatcgggctggactgcgctggcatcttgggcccctgcctactgtaggctgcatctactgggcacggagagactgacttttctgagtgagcagagagagagagagcaaactgttgaaagcttgcagtgggggagggggagttctagcaggcaaatggcacaagggcagagggactcatttaaaatagaccctgtcggccaggcgcggtggctcacgcctgtaatcccagcactttgggaggccgaggcaggcggatcacctaaggtcagtagttcgagaccagcctggcaaacatggtgaaaccccgtctactaaaaatacaaaattagccgggcgtggtggcacacgcctgtaatcccagctactcgggaggctgagacgggagactcgcttgaacccgggaggcggaggctgcagtgagccgagatcgggccactgcactccagcctgggtgagacagagcgagattccgtctcaaaaaaaatgaaacagaccctgtcaactcgagattagacctgtaaccctgttgatgagggcagaggccttatttaagaaaaataatataagggccagaggtcagagatcaggtaatcgccaatgaattcaggcattcttaactcggagggtccctgggggcttatggagaatcgatacatagaagggcttcaggggtctctgaaccctgtaaaactgagggaaattgtgtttgtgaatctttttcctggtgagagaattacagctttcatctgatcctcaaaaggtgtgtgacccttcttcccagatccccgtcaccacacaaaagttttgaaagctggaactaaaggagctctaggtcctctagttagagcagcagtagtttggtttttcttttaagttgcccgacgtcctgactcttctacctcttctttgtggtgtaggaagttccgggcaagacagagctatggctagggcttcttagctccctctccttctaggccagggggagctgcacagggtggcagtcacggagtgaatcctgccaccagccagctgtgtggcacaggtatcttgggccactagggtgagcatagtatggatggctctgtcggaatccatcacacctggggaaaaacatcccaaagggcaggtcccatgatcgtggtgcgaataaggtgtttaatttttcctttcctttttagacatctgctcccaagtacacttttatgaaaagcacagccacctctatgagtgatttccactgtctagtcggcatatgaagcgactgtgctcaaaggagtaggtagtcgtagataaggctatttaaaataaaaatttcggagcatcagggcaaagagaatattgcatttggttaagaggaggtcagctgtgagagtccattaaaagggaacagactgctggtgacttttgcaggaagtaggagagttagaaagggacttgcagcatactgaggctagctattgtctttccactatcagttgcccttgaaggatcagcccctggtgagctgaagaggcgctcaggtcaccaccagtattgtgaagtggaaaatgcccccctgaggatccctgcagcactctgcatttaattgtaaaccaaccaattggaagtcccaggaaaccatccacggggattgtctttttcagtttgctttcattatt

SEQ ID NO: 65346 - DNA, 460 bp, Homo sapiens
ggcaacagagtgggactctgtcttaacaaaaaaagtcaacatttataagttaatatataaaaaaaatttgagagactttccaatgtgataaaaaaagcagtagactggaaattaggtaatcttgatttgtctccagtttaggcctttgtcctcatctgtgtaaatgagggaattagactctagtagggatagcaaacatatgacattcttgccagatactatggcagataacactcattagtcacggtcttcattcagcttcagaattcttctcaaatttagggctccagtggccattacatattggttgattggaactgacatgggagacaacaatttgccattcctaggctacatcctttccaagtcccttcctagctacagatctcctctgtgaataaagaaaaatccttggaagctctaaattaccctgctagtcagtgtttctataacatatttc

SEQ ID NO: 65347 - DNA, 571 bp, Homo sapiens
aaattaagtgaggcgtgttgttctgaaatctgggtgccagtaattcttgcatcgtagggagctgtgccttgcactgtgtatacatgtcaaatctgaacatctcacctcgaaagaagtttgccaaaaggtaaaaagcacttcccaaacaatcctacggttttgagtaaggagtactcaaagaaagaaagggactgttttcagatgtttcataaatggtaatcaatcactaataattaactaggtacttgaccatgcaggtatgctcccagcacagtgcgatagcagcttagaatttgagattgaacttttaccctggttatctttagaatactgtttctctttcatttatgtgaataaacatgtattttgcatgttactgtaaacatttatatatccttatacctttgcagtttaccaagaaaggcttataaaattgtgataaagatttctagtgaattattttcttacagctcttatgcaaggaattcaagatttttgtattatcctgagtcatagatataagtggtttgataggttataagctatcttgacactgttctgcatttataaa

SEQ ID NO: 65348 - DNA, 1757 bp, Homo sapiens
ccaagatgtttaaagtagataattttggatgttgagaacctgaataatttttttttttgtagttttaatttccaaaattaggggagagggagcatcttgtttggtttaccgtgctgaccataggttatatgtcattttatgcatataagtttaagtaatttaagtaccaagttactactagtacttgatttcctaagttgctgggaatatacactgtgggctgttcataatttttggtacttaatccatttcctctctgccatgcttagctttttctctatcactttcttccccccttgtctattctggggccatatcactctttgttatccatcactgaatggcctaacttcctttcaaacagagtttccctcatttggttggttttcggttttcatggaaagctattgaagtggtgtaagtgagtatggggtaggggaagctggttttgttatgatcaggtttagaagttcatttggcctgctgtgcagagaccggattggagggagactggagtgagtgagactataccagttgggtactgctgaacagccatccctgaaagtgatggcgacttggacggaggaggtggggaggtggacttaagaggctgtacttgaaaaatggactagacttagtggaagattagatataaagggggggttgaaggacagggagtatccagggtgacttgtaggttctgagcttgcacaataggatggatggcaatccatttgctgagataaggcatgatggaagaggaacttgatgtttgtttatgtctgaatcatctgaatcatgaggctggaccaggtgaccttgggcttcattttaaaattgatagcaccatgatgcctaccattgtatgttttcagtgagggctcatgagtgggtgtcttgggccccatccctccctaacttagaggaaaaaaaaaattgtcagcagcattttctggggagaggttccttccatatttttcattaggctttccaggggggccttggctcaagaaaaattaagaaccactgactaagtatgttcagtcacagtgaccattcaataaataattgtcataggctcgtaaagcagaagaacagtatcgatgaatggaaatttcctattcggcattttagaagggagtttgaagtgctcctaggagccattttcccagcatggtcttttctgaccacctaagaccaaaatgatcattcagtctcttaattcctttagcggtaattgtgcatgtactatttcttggctttatttttatgtttttttgactatgctgtttagcttttccaatagaaacagctagctgtgccgggcgctgtggctcacgcctgtaatcccagcactttgggaggctgaggcgggcagatagcttgagctcaggagcttgagatcaggctggccaacatggtgaaacccatctgtaccaaaaacaaaaaacaaacaacaacaacaacaacaaaaaaacagttagttgttattagcctatccccatgctggctaagttacataatcatccctgtaaagttagtgttggcatccttattttagagatgaggaaactgaggcttagaaatgtaagtaaatggtagctagtaagtggcagaactgtgatttgaatcaaggctctttgactccagagctttctttttgtcacagatattgacaagtcctgctggttggcagaagtcatacctatactctacttttatttattttgagatggagtcccactctgtcacccagg

SEQ ID NO: 65349 - DNA, 1843 bp, Homo sapiens
ttacaggcacacgccaccacgcccggctaatttttatagttttagtagagatggggtttcaccatgtttgccaggctggtctccaactcctggcctcatgtgatccacctgccttggcctcgtaaagtgctgtgattataggtgtgagccaccatgcctggcccagaatcaataattgttaatgcttcatcgagactttcttaaatgaaactggcataaaagacaacaaaaagcccctgggatttcatggtgggaagaacataattcctgctagtaccgcctggcactgtcaccttgactcaggctaaggttcctgctgtcacaccaccattgctcttgcaccatcagtgcaaacgtcaacacaaggaaaaaggcaaatagtggctcagtattatcattaaagtggtttgatcatgaggacccttaagggtttgtggagcatactttgaggcacactttgatttaagaggttagaaacatcacattaaaattcatactaataaagtgaaattgtgccaattgcccaaaacagtgcatcaatccaaaactcttatttgtcttggagaaatgcattcaaaacatagtcaacaccactatctcattttgtctctgtgttgtgttaagatgggtttgcatactttcagcctcttagagcaggcagttggaacattatccagcagcaggttgaacagcagagggggagggcagctggaagttaggctaatctaacaaatgagtcatccacatgtggataatggagttgtaaaattactctcagctttagtcagcagcaaccaaactatacggttaaaaattacaggtctccaaaatagagacttcctgagaacttttagtatagcatttaactgagaatgtatcaagggtttggttgaggattttttcataaaacctttctgttctggaaggcaagtttgttattaagagcttcagtaatttctcttacgaagtgttcaaaatgcaccagaacctgaacacaatgtgagcagctgagtgttcatcttagctgcgtccatcaagtgaacggtttgctctcttcctgtccataatttgagagtcagcctaatggtgagtggacagtcatctaataaaatatttcatacctgtggcagcaggtataaagcaaatagtttatttttgctttccatgtaaagtttggcagtaaagtttttgtcttgagatttttgttttataagagaaattaaaattccttctgggcttttgctgttctcccctgaggatgaatatgctgcctgcctaccctgctaccccccgcatttggcaaggttgcacatgtcttagggatggaaaaccagtagccaacactaaaccaggcctgctgtgtagacctggcttggtgagtatggagctgttccgcagtagaggtttgcaaagaaaccatcacacccttgtttcctctctccttctggcttttcatttttcttctggccttttgcatggaagaaataagtcatcccttttgaacagtttgggtatggagtgtttgcccatgcggtagactctggcaggacagagagggttttcccgggcctttagttgtccaggtcctgtattctcacatctcctctgggctgctgactgcgcacaaacacaaaattcattcctccaatagaacagtgtttggcctggctcccaaaaactgctctcctcacttgcacggctttgattgagtgttaggtgtctctttggctgcctccagtgtctcttatttttagggccttcgttaatgtcttctgtgtgtgaaacatgaaaatggagccatggctgctggaattggaaacttagggtttttaggccaccattc

SEQ ID NO: 65350 - DNA, 1097 bp, Homo sapiens
taaagtctagataatctctgctgactttaaattcagcagtattatatacttaactatgattgagctaaaagatgctgtcattgaatttttaattttgatacgatgtccatttagaaaataagttagaacctcctttggactttttccctcagtgaacagcttatatcaaattagcatgaggttgattctgaattggctcacacttgaagtgaatgtcctttgtaattttcaaagtgatcagtgagggattagaagcttgctgtaaagtggcagtttacctacacttgctcagctgtaaattattaacttttggcccaaaggtagccctggaagtcctgagctattcattcaggagcacggtaggcagaggccaatgaccttaaaaccaaacggccagatttctaagcgcagtcttaaagcattcttctttgtttccacaaagatcaaagatatccttaaatcgatgttagagaaagcgttcaaagaagtgttcagcttcaaagaaaaaaaagtggtaagctttctagccctttccagctcgaagtgccctggggtctgttggtttctgggtaggttgggcgatagggactttgcctggttgccttttttgcgtctgcttcctcatctgtgaaatggggataacaacagtgcctgctcaaacttgttgggtggactgaatgaatccgtccatataaaatgcctggcacataagcactcatcagctgttgttataattaaggtcagtccttgaaaggcttaaagaaacctgggcaggaggctgctgtaagtgacaagccacccacactgtcaggctgcatgcattcccattcgttaggtgcctctttgggaattctggatactgactggcacacagtgggcattctgtaaatggtggttaaatggatgaatgaaccggtaagaccccctccctcactatgggtttctcttactcatctgtaactaattccaaagtctaccatcatgaaagagcctgcactgttgtcacctgcctctactgaggtggctgatagactagctgctgctggtgtctatcacacaggctacaggtcctggacccctgcaggatgggcaaccac

SEQ ID NO: 65351 - DNA, 576 bp, Homo sapiens
ttgcctcggcctcccaaagtgctggaattacaggtgtgagccaccgtgcccagcctggccttttttttttttaatacaataaaaagattaattgaaaattattaaatccatagcatagtttactgcagtttaccgtattgttcaatttaggtataattacagatacaggtgccctaataccacaaaactgtctggctagtgtgaactttggtccctaaagatctggtgaaatccctagccaggtgcagcagaggaatttgtctttgcctggattatcatctttggttcttactgtcctgtgttgcctctgtggcccatccattcctaggctgcaaggatggcttcaggccatttctgcttgtagagacttgcattctctctctggaattgctctaagcttagattttcagttgagcaaacactcatcacatgtacctgcagagagctcctgctgtctcttttctcagttgcataccaccccaggtaaggagggtccctctgcctccagtgtcactgcaaagcgacagctacctgttgcccattgcccaggctcacgtttggtcttttgtttggctg

SEQ ID NO: 65352 - DNA, 618 bp, Homo sapiens
ctggccttgaaatttctttttctctactttttcctttttacccactgtttagtttgctagggctgctgtgacagagtaccacagactgggtagcttaaacagcagaagtttattttttcacaattctggtggctagatgtttaagatcaaggtgtcagcagggggttggttttgtctggagcttctctccttgcctcgtcgatgccatctcctccttgtatctttacgtggttttctctctgtccttgtttgtcataatctcttctcataaagatcccagtcctaccagattagggcccaccttaatgacctcatataaccctcttgcctttctaaaaggtcctatttccaaataaggtcacattctgagatactggggattgggactttaacatgagtgatttgaggggagactaacatgaatttttggggggtgaggttcagctcataacacccacttcactttttcgtagtacattggcagttctgtttcaagagctcagttaataattatttgatgtgtcatggattagaacatgaaacaggaattttgttttattcataaaactgtatccctagcacctagagcatagcgtaagccctcaataaatataggtt

SEQ ID NO: 65353 - DNA, 1169 bp, Homo sapiens
tgccttttttccagatttgatctacgtgtggatattctaatgattgaatataataggattccattctttaatttcaaaacttttagaatacggagttagaatttatttatttatttatttatttatttatttatttatttattacctaaaacaagttcagtggaagatgctttttgattattatcacattttgggcttttgtttttggtaacatgcaggccatatatgaatgaaattttgctctttcacagaatgatatgagcatctgtttcttctaattagaatacatctacaggagaagagggattttaattttcatgttgtagcgaatgtctaagggttgaccgggtattttggaggagtagttgtactttgatcatatttgtatttgcttttctggtcaggagcctggataaggaagcgccccctaacgggtgggtggagcagagggagtggggcgagagatggagaggaggggccggggcaaggaaggatccctaggtctgccttcctgtccacagcactgcccgccagccacagctcctgagtcaaaggctctgaagcaaagttgtatgatgaaccttggatttcctgtacaatttggctaactctagggtgatctctaataaagacaaaggccaggggacagaaatatctttcttttgctcctggcaaatcccattttgattctatctcaatctaactgtccagaaaattggattgaaagcaggacaccgccgggaggtaaatcagattagggcttcctctaccacagcctccagcagacatttcattttgcagtgtgcgtccctcatttatatgaagccgtgtatggcccctccatgcagcagggtgcgtccaagctgacccagcgaaccaagacatcaggtgaccctccaatttgattcactgaaaatactgccggtggcttcattttctccagagaactgtctgcacctctgttcctttctttttatttgggtgcctatgatgacctcattgaagtcttcatctttttcttagccaatgtagcgtttgctaaggagccagacctcagataggaatggagagccccagaatccaggtgcagcacaggtgcttccagaaccttctatgtggtcccttcgggaaaggatcatctgtttttgtgaggcttaacaggaagacag

SEQ ID NO: 65354 - DNA, 2046 bp, Homo sapiens
tgcttcagcccaggagttcaagtccagcctgggccatctggcaaatccctgtctcaaaaaaaaaaaaaaaaatacaaaaattagctggaggtggtggtacacacctgtagtcccagctactcaggaggctgaggcaggaggatcaattgagcctgggaagttgaggctgcacggagccatgatcatgttattgcactccagcctggatgacggaactacgataacaacaacaaaacaaaacacatgatgaatacgcactgaaagatcaaattagattctctacctccgttgaagaaggtaaaaaagtatatagtagaatccctcagaaatatgaatggttagaattatttttaaagttttgtaaatgtggggcaaatttctattttctggaaaattcttctggtggaacaccttgctctctaaaagtgccagataaatgagattccgcttgatttgagagctaagttctatgtccagttcttccttgctgttattaagcagcaaagagagacccatggttgcacactgggaggcttttctctttatcgttactgtgtttatagacccgactccatcgggggtgcttttaagtaagtaattattttggggcattgttgctctttttcgttcagtgcgtaagtatcactctctactgctttctgatctttttacttttatttttatttttattttttagtacttccaagtgagaagggatgtggcctcccagctggtgtttgtcagggttacatggtacatgtgcaggaagggccacatcagcaggccttgagtaatccatccgcagtctcgaaggatgaatcattcatgaaagcagttttccatcccgctcactggatgcaagcctttcttgcaaagttgatttcttttgcaaaattaacctttgctttctgctccttgcccacacagcttttgaaataggaagcccacagagttgtgttgtttttttctaagtaagtctaacggactgggcatttgtaacttcaattattacgcaaggtattgaattccgcctatgaaatctatgaaggtcattgcccgtggacttagaagtgcctagcagagttgaatggtatgtgggctgtgtgtgtatgatccatatggctgaagtcgtggttcttactattactatatgattatgtatattttaaaaatagctccttcagattttaactagttttaaaactcaaagtatgtgaaagggtttgcatttgatagaggggggaaaaggcatacttaatatccagggttgataagcgaaggcgtgccacctcctgtaagtccacccctttcatcctttacccccatttctcacactacttttttggtgttttgtgcgtttttattttttccgaattgcagcagtgcagacagggagaagaactaaaatcactctatagctggcctctgctgctcattacgttttagtgggataaaaccttgtcttgccctcctagttggagaaccagctgaattgcacctttgaatgttgctgggttttgtgccaacctgccagctgatggggcagaccagcagcttagtgtctcctttgctgtggaagcagaactgcgtccccattatttgacaggcaggaaacggtaaggctagcaaagcggggactgaagacttcaggtgtcccagctcctaccccagaggttggtcgcagacacaggtttataaaacatcagtatgtggagccaccttctctgaggttgtcttgttgtgtctgtttcttccttagaaaagcacatcccagatgggcatgatggctcacgcctgtaatcccagcactttgggaggttgaggcgggtggatcatttgagcccaggagttggagaccagcctgggcgacaaggcaaaaccccatctctacaaaaaatacaaagattagccgggtgtgatagtacacgcctgtagttccagctactcaggggaatgaggcaggagaattgcttgagcccaggaattcgaggctgcggtacgctatgttcacgtcactgcactccaggctgggtgaaaaaatgagac

SEQ ID NO: 65355 - DNA, 3812 bp, Homo sapiens
tctgcatagagagaaaagttggtattatgaacaaaggtagctttaattcgaagagacaaccatccccattccacaacctctttccacccaagcaaggaaatttattgaggccagtaacattttaaatgctttttggagttgtttatttgcatgtactttctttcttattgtgtaagatttgacttttttttttaaaggagtttcttcacatggataactcagtttgtatagcctaatgtaatctcagcaataagtcaaaagctgttcttctgtagggctatatagttctctgacataggaaatcattcttagttccattatattgagaagaaacagagaagcattttacatccaagtgcaccagcagctgttttgttacatagctgctgtgtgcagagcccaatactgagaattttaagaagtcactgaaatatgtcgaagcacgaggatgggtctggatctcctcactctagacgcctgtaccttttttctgtagtcggtgaatgaaattttggaacatgaactgcacgtgtggaaagaatttgtgtgtgggtggaggaagcatctaatgggaactgagctgggggaagtagagcttggtcccaggtgtcccagctggaagagtttgaagccagacccagggagccctgcgtttgaggccacctgcactgctcacaagccacgggccttgggaagccctttctgggaacttgcttgtggagctgagatgggggtcagaattattctgcaaagtggttcccactgagcaacaagtgactttctcttcctccacgttttcttctccttacctcaaaatggaagaaacttcttggcaaaataccatttaacataatttggccacactgaacatttaaaaataatcaaagatggagtctgtgctgttaagaattgataagtattccacataaaatctaaacatcgttcttttctttattaaatttttggtgtaatgcacaaaaacttgaaacttcagcttttaataaaattgactttatttctaaagagaagtgggaataacagtggtgctaagattagcagtaaaagcctttaacctgcgaattccttcacgctggggtcaaagaagggaagtccacgtggatgtttgacttgtgacctcttccttcatttaaaaaaaaaaaagacttaaattactcatgccctcagtttaaatttgtgactggcatttgaaactatggaatgattcacttttccttgtagcaagaaaatttgaaaatgaaagcaaaatgatgctcatattcaaactgaacctactatgaaaagatgtttgctgatggcttcgttgccctgcaaacacacacgacagagatggctgttgttcaacacattattttcctcttcctctgagcatcttagagagggatgactgtgcatgttgcctcatgcgcaggaggtggtgtgcaaagatcttttggtttgtatcgtggcttacaggctctcatttaggccatggcatggtacattccaataccatgagtggttaaatctcaggaattccaaagtgtatgaacggagtgatgtcagctgtactctcatttcatgctatgtagccagatgtcgtgtagctaacctcagcagttactatacataatgtgctataactggctgatttaaggtaaactgcctcagtttcctcatctgtaaatgatggcttttgactaaataatagcttagttttcattgtgaacaaaatgcttgtttagctgggcaaacacatttttttttgcagaaaaacagccctatcaccaatagtacctgctctagtgcttttaaaaattagaatgaaattttgtttgtacatttttgtttgtttttgacagtctcactgtgtcacccaggctggagtgcagtggcaccatcttggctcaccacagcctcaaactcctgggctcaagcgatcctcctgcttcaacctcctgagtagctgggaccacaggtgcatgctagtatgcctagctaattttttaattttttgtggagatggggtctcactatgttgctcaggcttgtcttgaacttctgggctcaagcgatccccacgccttggccttccaaagtgctaggattacaggtatgagccactgcgtctggccttggttgtacttaaaaaacaaaaacaaaaaattaaaaaaaaaaacaacagaaaacttttcatggctcccaggagcatttatatgactaacaagttatctttccttgctgatagttccactttcctcgtgtttgacagaaatgactcttagtttaggaactcctcattagctgtttccaggagcagtggggtatcattttgatgcttctttatttcttctatgcaactaaaatacaaagtgaagatacgatgtctctgaaatgataaagctacatttgtcaaaaagcacatattttccattcgacattttggcttaaagaaatgaaaactacagaatgactttttcctttatctgggtctgtgctgtgtatttacctatttaaaaagatatacaggtgaaaaatattttttgaaatgaacttgtctgaatcaagatgcacactcttgcagcaacatcacagggtgtctctgtcactgaggactctgtcctcatttgtgtgggctgactgggtcgctggctgtgggaggcacacatttgctatcttggtgcagcagtttgtagtcagctgactgacttgttcctgcacatgcattttttttcctggcaagtcataattcatgtttttcctaaggtccaaccctattataactgacagatcctatctggctgagaaacatgggcacccttctgtttttgcctcttgttcccaacatatttgtatgcttttcaataggaagctgacctggagtaaatgcccagggttgtctgaggtctctaaatggaaggtgtggtctgaaaccagctaactatggcagcattagggcaagagcgcacaggtaaaggacttctgaaggagggtggagggtgggaaagtgggaggggcgagagctaacatgaatgaaactgaagagaaacagaagttgtggctggcatgcaggagaaacccagattcccattcaccacttcctctcacctccagaaattacccatcattcctctctattttgcaatcctctctatttcccctgaaggttctgctttgaatgctgtcttcccagcagaaatgttgaagggaagtagctcagcccagttcccttctgggccaccactttcaactgtagactttctagtcagagccaagaaggccatggactctgagaatggcatttaaagtctctgccgggctccacttagttccccttcccctacagatgccttattccctcgaaatgcaaacgaggctccatggccacagtttccttcctctttctgtccacattccagtcgttcaccatctcgagaacactggggcaccctcctctacccccagccagagctgtcatttagttgtgatccacaaatctgctaaagagaaaggtgccctgctatcattttgcaaaggcttgcttggaacacattcctgccattcttttttgctgctctgtagcctgagtgattatttgtttagtgtaggagtaaatatgaggggtgctgtgtttcttaaaaacaaaacaaaacaaaacttttagtgacatatgctcattgggggaaataagatagaaataaataatattgaaaacaaacacccgtcaatcacgtgacaaccacaatatagcactttggtgaaaatggtcttaatttaaaaaagaaagtccatctttctaggtatctgagcaattc

SEQ ID NO: 65356 - DNA, 676 bp, Homo sapiens
cagcgtgccccccagctttctcgtcaaaagttgtaagaagagaagctgtttttatgtgtcatccataaaataacacacatgctaagcaactgtttacacataatctttagagtgtttactctgtgcattggatatgtggacatttgagaaagtaaggggtggtgggggagagagtgggagagggatttgttaaaaggcttcaagcgtctggaggtagtaagctttcctcgcgtttttgttgagccattatgtttttatttgccccatgtgtttttaccagtgactctggcttctctggggagaaacttttcccacagtattttgcacgttttatgtttgaaccgtcccgttgaacagaattcaggtgacttcgcaggttattgctctatctcacctggcagacaaccaacatgtataccggtgacgtcacaggttcactgaagcctgccagaatgtttggaaggggaccaaatgaatacattaattaacttgttaaaagatagggaggcttgcttcagacctgggtacaccttcaagtcagtgaagatcataaaactgatctatttgaagaagctgagcgcactgactgtaaacatttaaagctaaaaacggaacctattgcacaaattgctacaaaccaaaagtgatatcccctgtgagactggactccgtggag

SEQ ID NO: 65357 - DNA, 3239 bp, Homo sapiens
gcatcattattacggctgatgctgggggtgtgggggaacacacctgatgggcttttctgtttttcccagtaactgtttcaaagtgtagtcttcactatttggaatttagtttaagaagtagtgggtgaggcaatagcttttgactggttgggatcaacaattggtatgatggattccttgtttattttttctgaccgatccaagtgactcagtgatactagacatttcgtgatgtacaaacagccaaattacctgaccctgagaactgttgttggaaatggtgtctggagagcctgctgtaggagtgcaaattctcggaagcccagagttggaagatccacggcacaggatgtgacatctttgtgataccatgtatttagcgtctcttatgtgtctggtgtttttcttgcatttattcattgtatgtaaacattaaatgtttcttgagcatttattgtgtgtgaggtattatgggaggcaaaggttaaaaaacacagttcttgtcttcaaacaacttatccttagtgggaagtcatgtatatgaataaatattactattcaaatagtcacttcagcggataacatacataaatgcactaggtatgcattattgttcccattgtacagatgtgcaaattgaggcttgaggtagttaagtgattctcccgagtgcagtagtaagtggagcactaagctttgaactggacctctcaacttccaaacctgttctttttccacagtaccacgtgactgaacagcaaagctaacttaggggcagttttctgtcagtgaaggttccatttttgtgggtggagtctggggtcattgtgactatgagaaatcttaaaatggtaaaagaaatttggaatcatacaatcctgagacattaacagtaaaaaccttcacaaggcagattagcaacgtgaactagtaaagacaggagcatgtagggctgatgggaccgggtgggagctggcagcagtttggagacttggtttaggtccttctgaagagggtacagagtgggacttttcaggacattgggtttctggaaagatccgtttcaagtgtctacaccctaagctgaaagccagcccagagagctttttggctcatgctggggcttattcctggattctgatgagtcatgttttttagaagctgaacttctaaacttctaagccgagtcccattcagttagctggtaccttcctcaccttggctttgttttctgtttttgctgcttaatacatttccagcaggagatttaggaagggtctgtggacagagaagtagatttcccaggatctaagaaaagaaggttggtttactgtgggtattctagctgtcattataactgtgttattttatttatttacaaagggatcatgagccagaaccaatcataacaatcaaatgaacccactcactgtttcagcctctgatggtggctaagagaaaacagcaagtggggagcaccccccctcacagtcgcctctattatgttgtaccagaagctgggatccagcaccctcaaacgtagaggcttgtactagcaagagtcacatggacagtgggaaggtccattctaattattttgttagtaattcagtctgttctatttattcttataatctagcacattccaaaacatatttgttttgagaatgataaaccaaggggaaaagtcaggttttaagaagaatgtcatggccacgaagataacactgccgttgggcgttgccgtggttctgactgggtgaaggtttcccagtgaccatctttgtgtggaaagagcactctgctcctgatgttggggatgtcatgccacccacgtacatcactgtcctcagcattccagcactcttgcctattctccgtgcatctcttccaccctgcaagccattgcttatgtcaccctgattgatcatggtgtaacacccagctgtcctctgcacacaggatcccaagccagaagtctcaggattttcttggttgtctccatcttttttttgtttcacgcacctaataggtttccaagtgctacgagttctgctttcaactctctttcctctccatctccatagccactgtctttgtgaaggccttgttgtgtgctgtgagttggtcttactgactctggactgtttctcctctatgaactgtctttcatattgccaccccgtggtactccagttgttgttgtttttgttttttaatgtgattatgcactctcttgcttatcatcttccaaggttggtacagagtcactcacagcggcctcactggctgttagctgtggctgctggccagggagtcctaaggtctgccccacattagcttgggagggtagtgcaggttttttacaagggagtggcagttttccaagaaggaacacctcagtgtacacacacttaataggcttcccctggcgctgtgtttcccagtgtttcattggccaaagcccagagtcactgtgaaggtttatgaatcagggttctccagagaaaaggaacgtgtgtgtgtgtgtatgtgtgtgtgtgtgtgtgtgtgtgtgtgtgtaaagagatttaatataagatgttgactcaatgcaattatggaggccggcaagtcccaagatttgcagggtgagctggcaagttggagacccaggagagccaatgggatagcaccagtctgattctgaaggtctgggagccaggagagctgatgatgtaagttccagtccaagctcaaaggcaggcaagcttaagacatcagctctgaagtaagagctgatgttttagattgagtccaagagcaagaaaaagctggtgaccaaatctcaaggccttcaggcaagaagaatcctctcttacttggagggagaggcagtctttttgttccattcaggccttcaacagattggatgagatccacctgcactaggaaggacagtctgctttgctcaacctcccgatctaaatgttagtatcatacaaaaacaccattgtgtaaacacccagaataacgtatgaccaaatgtctgggcacctggggcccagtcaagtcggcacataaaattaactatcacagaagggtgtggaacctgggggtatgagtcactggggccgttagtgtaaccatttgccacaggcagacttgtttgggttataattctttcctgtaaatcttattcatctctgtatccccaatgcctagtatgatctctgacttatagtaggtgatcattaatg

SEQ ID NO: 65358 - DNA, 1545 bp, Homo sapiens
cgaggcgggcggatcacgaggtcaagaaatcgagaccatcctggccaacatggtgaaaccctgtctctgctaaaaatacaaaaattagctgggcgtggtggtgcgcacctgtagtcccagctacttgggaggctgaggcaggagaatcacttgaacctgggaggtagaggttgcagtgagctgagattgggccactacactccagcctggcgacagagtgagagtccatctcaaaaaataaaaaattttcagaattagtatctcaggagattttcctgactactccctgtcccccaatggactcctttcttcccctcctcgcccccaattcagttgtttctcttccacctcctgcgtgcctctttgaagactttcataccacttgttgtaattgttcctctgtgtctgcccatgcactgtggcccttgagggcaaaacctatctttcatctccccgtccctgtcctcagtgcttacacagaatctggcatgtatctggctctcaacaaatatttattgaattagcaagtaaatgaatagagatcagattctgcttgagttaaccttgacgttagacagaatttctgttctaacttttttcacgccaaaaccattcttacaggtttttctgagccaatctgttgtggcctcttagcataatggatagttactgagaaaaaagaattaacaccaagttcttggcgcaagtgccatccagttgaggtgtgcaacttccatgcttgtgacaaggttgaaaattactcatcaagctgtttttgcaaagcagtttctgcttatcagtttacgcatgaaaagtccactctgtgtctgtgttgatgaccataacgtggaccatctaacagctaggatatttaggatggttgtgagtacggctgcaggttcccttttgcttattgaaatagaataaccagagaagaacaaggcaagttttaaaaataacttggtacacatgtaggtgaaataaccttacctcccagtagctgagagaaaaaaaaaagatctcaatgctggctgttgttccaggatatttttagtaagatggccctgtcgtctttgatggtcaatgaaggaataatggcagaaaaaaatattaggcgaggagaaggctacgggcattgtttggtgtttcatttaatttccacctcatccaccagagaaaagcaaacataagcagaggttgatgatgagcacagtagaaaggaaaatgtgatgtgtcttttccttgtagttggttgataatatgtgatttgcttataccacattctgatgggaggtattttcagtctgtggctttgtaagttgaagggcctcctaagaaactcctgtttcgtaagatattctctgtcttaacttttttcaggaaaaaatatgattttttggagttgcttaatagtttttagcttttaaataagtatagtttatttaccacagcatttgaactgtcaggattttactgtgaatgctaccagaaaggtttgttctatttttacgagaatcttcttagggaaattgatgaacctggtaa

SEQ ID NO: 65359 - DNA, 918 bp, Homo sapiens
caacacgttagactttctttgcattgcagaaaacatggccctagacgattctacagcttcgcctcttgcagctgcatgtcttctactgtgtcagtcacaaatccaaaaattctgggaaagggattcatcgactcagtgtgggtcacatgccaccctggaccaatggactgtgactggagggcagatatggggtggggtgggaggtgggagacattttcaggaacaaggaatagtgagaagcagacaaaactgtaggtaatgcaacactgccatgaaacgtgagccagggttgtgcaggaagtgtgttcaggaggaggatgcagccaggctcctgccttctacttcgatgctcctttccttcaaccaccttgcacatccgtgaaattactcaagagggacagtggctgagcttatgtccaaaagttggatatgactcatcagttccttttgaacacgtcaacctgctcctggcctggctggtctccaaaaacagccaagggtaaagaaaaaaacttgattgagtgacatttgtccaattcagccacccagtgcattaatcaccctttttatttagaagctgtaaaacagcacaacaggttccaggcgtaaatggtgttgatgtggaagagattgagtgatggtggtacccgcaggaagcaagtcctttgaatgggctcacggggagattgtggaacaagtggctcaggaaggtggagctgtttgatcagggcctaggaactagacaaggccctccagaatgcattttgagccattggccttaaacaaccttcccctgcggcagctttttctgcaggccacgttgctgccttggcagaccctcaccccttacccctggagcttttctttcacgaggaattcctactgcgagaataaacaaaggtagttggcagcatgcta

SEQ ID NO: 65360 - DNA, 1986 bp, Homo sapiens
gcctctgcccactcagaacacagaagccccgcccgccgattcctggtgtcctcaaaaggcagagggaggcaatggcagcattcatggccaggctcagaggccacaccctagggagtctggggagagggggaatcatccccgggacaatcttggcccagctcctgggggcagcagtgagggcagaggggagggatgcaagtcggccggcatggacccacacatagacgccttgacagaaagagaggccattcctacattgcttcttggttgaagtcattggtacgtgctctatgagagaaggggatttcctctgggagaggagcctgcaatggactgaatgtgaatgtccctgcaatattcctgtgttgaaatcctaacccctggtgtgacagtgttaggagatggagcctttagcaggcaactgggtcacgaatggggttactgcccttattaaagcgaccccaaagatggacccctctttccatcaagtgggaatacaaagagaagccagccgtctttagcccgaaagagggcccttagcagccccggaccacgtaggcaccctgatctcagacttccagcctccaaaactgcgagaaacaatgtctgttgtttagataccacccagactatggtactgtgttgcagcagtgccagaggactaacagaagccccaaagatgattaaaattaaccaaagataattaaaattaaatcgatttttttaaaagaagaaacaccaaaaacccactgcagttcaaacacacttacctggacagaaaatttttagggaaaaaaaaagatagctgcaatacacacacacacacacacacacacacacacacacacacaccccaaatgccaagcttctgaatgcagagcaggtgtgtcccaccgggaggacattgccatcaggaggctctggctgataattaagctacaaacatgtacagaggcatggctgtagccagagaacattgtagatcattaggaaatttcaccttctctagctaaggagaagaaaaatgtggagaatctagcaatcgcctccaaaagctttcgcttagtgccagtacaatctaagaacaaggaaggggtcagagaagggccatgacagaaggagaggccaggagggggcaggccccgggcacagggtttgagcccctgtgtctgggactgtgggagaggactcgctgatagcaagttactgctggcagagttcccattttttcagctcttgcccctggatctgggaatgtgctgctcacttcctgtagtctttctgcctttgagaatgaatttctaaacagtaaagatccagctctatgaattcaccagccatgacttcaaaacaagtttcccgacttcagagaggcacacctgtcattgacttggggggccatttagggaatcaagtgcccctcactagggcccagctggttggcatggaaaccctcagtgcacagatgcaggctctggcaggttctggcatattctggggcagagcaaactcccccgctgttctgatgcagcccatcttggcgccctggagcctgtccatggctaaaagccaaaccacgtcaacgttgagatattttccaccagcacgttatcactcaacaaataatgggaatgctagacattgagtaaataaatacgaatttgaacaggggacctaaagggtttgctgaccagtggggtctgtggtcagggaaggcttccctgaggaaatgatgcttaagcccagtcctggatgaatgagtgagggctccccaaggaaaggtcttggacagaggatttcatgggactgtcatgggaaaggctctgaggtgggcttgagaaactaagaggagcccaggatagcaagcaggagagtggaagaacataaggggtggaggctatggttggggtgaaaatgcaggcgataactgttgtgcccgttacttggcattttttaaagggggcaggggtgatgagcacggttttt

SEQ ID NO: 65361 - DNA, 1547 bp, Homo sapiens
cacctcggccacccaaagtgctgggactacaggcatgagccacagtgcccagcccacagctccattctgagtagtgctcacagtgcctggcaccggaaggccctcggatagccactgtattcatttcctagggttgcagtaactaattaccggatggcttaaaaaaaaaaaaagaaacatattttctcacagttctggaagtcagaaggctgaaatccaggtgcagatagggttggttccttgaggaagctctaggaaaaacctgttccgcgactctccctcagtttgggggctgttggtagtctgcggtgctcctgggcttgctggcaccttgctccaatctctgctttctcctctgtgtgtcttttccccttctctcctaaggacacttgtcattggacctagggcctaccctaattgaggatgatctcatctcaagatctttaacttggttacagctgcaaaaacgctttttccaaataaggccacatttgcaggctctgggcattaggactcaggcatactttttgggtggtcacaattcaacccacttcatccaccaactgagaaaatgaatgagtgagtacccggcgatttctggttgattggagaaccaagtgtaactcaaacgctgggtcagagaacaaagccctggcttttcaaccagccttctgtggtagctgtttgtattcaccgccagtttctctaagttggtcatttagggatgcgtccataacacagcatgtcaggtaggtgactcacagtgaataaactgaagagaagctgagtcatagttaaaagcggacttaacattccaaaggtgaacagcaatccagcctcgaggctgaagccattcttatgcctctgccagccaaggcagagacagataaataaataccatcactgagccaggcggcacagcgcgacctccaggcccgcacccctctcaggcatcctgcctggccggtctacctccttccagaagcaatgaatatttccagcatggagcaggaggcaggtcaacaaatgctgctctaaacatcttggtcaagcttgctatgacctcccatcctgccatacacaccttaggtcacaggcagcctcctctccacactgccaccctgcaatgagggccaccccctctggaaactacagggggtcaaaaagtgggaggtttgtctgtgtgccccacaatccaggcagagaggtccagggcagaggggacctttgaggggtacatggcacccttcgaaggcctcagaacacgtctgcctttacaagctgaccacagccaccaacacttagtcttaggaacccgacttctctctacctatgaaggttttctgcaaggttttgtctcctagagaccctgccccatcccaggccctgcccggctgaccatccccccctccagtatgaagagtctgcctgtcctgatccaagacaggcaaggaccagaccctggaggaaggcaagtgacattgcagggggacaagcagaaaagtgtctgaggagcccaaaggccaggctctcctgggactgagagc

SEQ ID NO: 65362 - DNA, 940 bp, Homo sapiens
aaagatttccttatagcacacaaagttgtttgatggtattttactcacagaacttctttcaaaatgggagtcaatcttcttaagcccttccagtattttatcaactaaatttatggaatattctaaatcctttgaactcctttgttgtcatttcaacaatgttcacagcatcttcccaggagtagattccatcacaaaaaaacactttctttgttcacccataacaagaaatttctcactgggctcagtggttcacgcctgtaatcccaaaactttgggaggccaaggtgggaggatcacttgaggccaggagttcaagtccagcctgggtaacatagtgagatacaaacaaacaaacaccaaaaacaaaacaaaacaaaaaaattagccaggcatggtggtatgtgcctgtagccccagatactgaggaggctgaggtgggaggattgccagggtccaggaggtcaaggctgcagtgagtcatgattgcaccactgcactccaacctgggtgacgaagcaagacccttctcttcaaaacaaaagggaagaaattcctcatctacccaagttcaatcataagattacagcaagttagtcatatcaggctccacttctaattctagttctcttgctatttccaccacatctgcaagttacttcctccactgacttcttgaacccctcaaaggcatccatggtgatggaatcaacttcttccaaactcccgttcatattgatattttgacctcttcccaacaatcacaacaagaaagcgttttttagcaatacagtatatattttttgttcttaaattttttagccagagaatcattaatggcatctagaatggtgaatcctttccagaaggtttttaatttactttgtccagatccatcagaggaatcactgtctgtggcagctatagccttacaaaatgt

SEQ ID NO: 65363 - DNA, 1703 bp, Homo sapiens
tatcatctctacagtatataatgcaaaagcattttataacaaaaatctgagaaaagtgtaaaagaaaaggaaaacaccaacactctccaaattggaattcttcatatgatcaataataaacatcatctgaccaactagagaataaatggaatagcagtcactaaaatgtctgaactagaggctggcaaatttttcttcagtaaagagccaaacagtatatattttagattttgtggaccatataatgaatctctgctgcaacaactcaactcagccactgtaacacaaaagcatctatagacaataaataggtaaataaatgagccagtaaaactttatttacaaaaacagtcagtgagccagatttggcccacacactgtagtttgccaatcccagtctaaactgaattcataagccctaaacttgtgagactgtgtcttgagtcagcataccaggttcaaggtccaactgacagaggtactgggaagtattcaaggtaacaaccaccactcgatgtttaagaatatcttctttctggggcatctgaaaggtggaatgtgcgcttgagatcaaacagtactgatgcacaactgggtggacagtctttacccagcgatttctgaaatataccctggaaaagaagaaaatatttctgatttacatttactaatttcttaacagtatctagttattaaaacactgacattgttattttaagatggtaatatctgaaaagttacaaatgaatctggtaaccgttagcactctattgaattagaatttaacacacaattgccactataaccactgtgactctctaccaaaaaaatgacagacatagaaagtatatgcagtaccacaaaataaacacctaattatttttaagtgttcagagtaatcttgcaacagaatggcacataaacgtaagatttataagcactacaattttttaagttcaaaacattcccattctggaattatctttttctagaacgttcttacaaaaatacattgactcatattttaactatttatgctaacaaaaaacagtgaattgcatacttataacaggaattcaaaggttattttcattttattttagaatatattcttatacctatacttaagtagacctctgtctgaggttctggaaatttaagaataaatttaaagtttgaacaactggaaagtcttaagtacttccattatttgcaaaagaaaaatattaataggcctcacgcaatggattattaaaatgacacagaaatgactcatccatccatctactcatccacccacccatctctaacctacccatgtaacaaagattcattaggtatccactatgctccagcacacaggcagatcacatagggcttgtgagcaatccttgggtttactctgagtttgatgaaaagccaacagagagttccaacagggcagtgacatgacatgacttattttgttaaaggactattctgtttctctgggcagaacatatatggtgggggtggatagcggtgtgctggtaaatattttaacacccggctccagggctaggaaggggagaggattccggtttgtagtgtttgctgatttttgtggtgtaaaactgtcatggtaatttcaagctaccagcatttcactgaacatgaacctgagaagtcgtacacgtgattagctctaacaaaccaatacaagt

SEQ ID NO: 65364 - DNA, 567 bp, Homo sapiens
gagcatgagacagttcttgccttaagaagctcatatttcctttaaagatagaatacagttattcaataacaaccatttactacctgtcttcacttaggcacactttcattttaaagattagaaataccatccaaaggggagattttttgttttaaagtgtttctaaagtaacttacttgctgatttctttatactgggctatctcctcaatataaagaaggtcatgtaaccgtgactgatagttgctcttggtcaatgatttgtctaaaacggactgagtaaatagctggtcagcagagaggggaatttggtatctgataagaaggctcttctccaaatcagtagtttcattaggttcaaaatctataatagtcttagaggaagaatcccaacgtttagctgtggttactagctgctgttttgcatgcatcaggtattcgagatctaaatggaaacaaaaaacacatttataaagaaacagaacattaaaatttttaaataacattaaaattcttaactatattacatatttttgtatgagaattgtatatgctagagctcaaattc

SEQ ID NO: 65365 - DNA, 3146 bp, Homo sapiens
tgaagttacactttttattatattaatgatttgcctgagaagtgttaagttgtgagggagaaggaatgacaatttttgaactgcaaacaaaacctgaggatcccgatccaagaacaatcagaggaccctggcttccagccctgtctgaagatttctcagcaaaggcgagggtgcagaaggctccaataatttaggggagaggaatcgaagttccctaggtaagactgcagtctgtgagcccttgaaaagggtactggagtactctcaaggaatctccaggaaaagagagcctatctttatttttgttgatgtgcttgtgggccaaagagcatttccgaggagggggcggggaaaggggggaagaaagtgaatctcgggccgagagccctccgcgggggagggagggggcgcacgcctgacccacttttccccacgcccccgctccagcccccaccccacccggtggaagtccgaggcctgagggggggcatcgagcggggcgtgggaggcccgcacgctccccacccccagccgcgacccggaggaggggaacgtgccgggaggctcgagtccccctcccagagtgctctgggccggagaaacctcccgcaggctcccgggccaggcgtgcaaggccccctctcctgccagggcccaggacgctgcgggccccagcggaggggaaggggactaagtaggggaagaagctgtaaacagccccagcgtccgggcctcgcctcgaagagccgcgcttcccaggcccagccgcgggccgcccaggcccccagcctgccccggggccgccgcgcccggggtccgggacaccggaggggagtcgggtcccctccccggagagctccgggagctcgcggagcggccccaggagcagagaagggggaagtcaggacttacctgtcattactttctacgccatcttggatccacttgtcaacgtccccacaaagcattatgggtaagaaagagcctttaaagtgactccccccggcccccgactcccgcctcccgccgccggcgccgccccctccggccgcgcctcccgcccggaaagttgccccgggtggactgccgaccccggcgcccgcagctggccccttcccctcccccgggctgacggcattgaaaattcacccgcatttttaaaacgtggctttggggttttctccctttctcctgccccggcctccctgcccccacgcccggtcctctcgcctcgccgcgttcctgcccgggcagacgccccgcgtctgcattgaatcaacccgaggtttccttgccgcccgcggcgcggcgcggagctgctcgcggatttatttgtgcgcgtggatgtgagcgtttctgctcctgcggccgcgcttccaggaagcccgcgagcggccggggtcgccttcagaggccgcgcagaccagctccgcacccgccgcccggagaggtgcctctgccctgggaaaccgccccggggccgttgggctccgggaactgggaggacgccgtgtccccgagtccaccagcgtcgaagcacgatttaaaaaaaaaaattgagccaaatgcaactttttaccccttgtttactctgtgtcccgcggtctcctcctccgggcgggtaacgtgatccgcgaccctctaggtggggacccctcccctaggaatgtggctccaggctccgcggagccaccctgggagcgtccgggctgcggactgtgactccggggcaggtaatccggggcgccggctgcgggctccgggcggggcggggcgcggaggcagccagggctcgggggagggtcccgggcggaaagcagggtgcgccagtccgggtccacctggcgggtcgggggagaaccgcgggcgccgctgcagctcgggaggctggaggtggggacgcccggcgtctccgggctgcgacccgctgcgctggaaagtgtggggcgccttggcgcgggctgaggtctctgacccgggcgagtacccccagcccgccggccacactgctgccgggcatcctctccccgcgacaccacgcccgctttcggctgcgcggggcgagcagcgtactgaccccggcgtccagccgcccaggtccccccagcaacggaggccccttggtcagcctcctcccgcgctctccgcagagcctctggtccctgctttgctgtctttggaggcctgctccagttgcttttttttttttccaagcaagtttttacaacaaggagatacccaaaagaaaattctccaagacaggaatgcttgcgaattgtattcggtacaaaatgctgttgaacggctctacctttagaagaccgcagaagcactggcattaaaaccctctttcggtgcacggggagggcctggggccttggatctacccgaggattttacgctcctccagaccctatcaacagcctcactaggaacgtgaacggtggcagacaggagccctgcccctggggagccaaaaactccaccaggcaattgtcccggtctgatgagaaggtgtagacacattaagggattggccccgggtcactcgtgaaggagggaacgaggtagtgagtcattcccagccaagaacgcagcgtgctggggagcaacctcccctgagtcacctgcttctcacctcggaataagtggagaaactggagcctggagccaggttcttagacggcccagcaaggtagccaccaagggcatgggctaggctggggggaggcagcgcccctcctgctggaaaagggaatgcttggcccgtctgaagaaggctccaatgtctctttccagggtaccccaggtgcttcttttccaattcctcttttgcacttatttagccactggtatgcactggcttaatggtggttttgtttgcatggcacctttaggtatgtggtctgagtttatgcaaaagtaatgacaaaagccgcagtgacttttgcacccacctaatataagtaaacaggaaataagttgagggcaaggactgtgtctcccaaacacgtttctttgataagcagcctttctttgccttgtataggcattgacccaaataagtgttcagtttgtgtgactgcccaacccattcactgcctccagtgtgtgcatccaagcccaaccttgtcaaatacaccgcc

SEQ ID NO: 65366 - DNA, 868 bp, Homo sapiens
ttctgttctagttaatttaactttaatttttgtctccagcaggtacctcttcagtagaaaaattcaataaggtttctgacactttctacctatgggccagttacatacagaagagaaaactgaaactgaaaactggtttgtcatttttacagaaagtcactgcaaagaaggagaattccaagtgcaaatgacttgagtacgtaattcttttgtgccatttctgttactatagggttaatccagtatgaagaaagtgacaaagggcagcatttatttttatggattccacattataaccaagtacttggcaacctgccctctcatatgttgcgaaacaaaaatgttgctttcagtgtgtttttaataggccaagcagtttgtttgatcacagtggtcgggtatacactcagagacgccagaacattctcattgcgttttcactgctttggttaacatcttggtctcctgtccgcactctaaagaaccatttgaggactcaggggagtcatgtcctgggagtgactatgggtcctaggccacagcccccactctctcagcctaaaccactcaaaggcactcagatccggatttgcaaaatattttgcaaaacttgcaaaaaccccaccagttttagattttgaaattgttggcacaggcaaccgtctacaatcatgaaattctcatgagtgaggtggaacagatttctgtaaacaaagcaaactccagtctctccagcctgctgtagaaatatttatacccggccgggtgcagtggctcacacctgtgatctcagcactttgggaggccgaggcgggtggatcacctgaggtcaggcgttcgagaccagcctggccaacatggtgaaacc

SEQ ID NO: 65367 - DNA, 954 bp, Homo sapiens
agctaaggcaggagaatcgcttaaacccgggagggagaggttgcagtgagctgagatcgtgccattgcactccagcctgggtgacagagcaagactccgtctcaaaaaaaaaaaaaaaaatatatatatatatatagcaaatagacattgccctcccccttttccctggaaagtatctcagaagattcatcttttctgtttggcattcattatggttttccaaggcccacaggaggtcctcccttcttcagtcctatgatgatgaggacttctcaacagtcctatccattccactccataaaagttcttgcctatgtaaattttcctctggggatcgtcaggcctcccctcttcttgccaattcaggactgccaacccaccctttcaaatcctggctttggacttgatgtttcaaagctttccttccttctttgtttgccctttcccgagactcaataccagttcgcctttgcaccatgacccagagcacaggcctaacccaccctcactggagaatcaatttcggtattttccattgcctcataactgctgaccgatcatgtcctctttcaagcccagacctgactcccaagctcctggcctgggctagaatccaaggccctatttgccaaggagaagaggttggacagtttttccagctgctgccttgctgaaaccagagcctcatacccggtaccctgacctcatcagtcccatagtttgcattactcgtctctcagaggtgaggaagggctttcaccaccaatataacatttttttttcacttttggaaaagaaattaagagcatccagtgtccagtgtctacctccaagaggaatagccctgttggaaaacctaaattagccatttgggcagctctcctatgtattctgcaaagtcctattctttagggcatttcttgggtttgtactgacccactgaatttaaatgct

SEQ ID NO: 65368 - DNA, 656 bp, Homo sapiens
ttacaactaagtcagctagggagggacagatcatctatttgcatgaaagcaagggggaaaccagggcagtgctatgtactgaactgtttcacactatcacaaataaaattgcaggttgagcctcacttcacacacacacacactcacacacacacacacacacacacacacgtgcgcacgcagagtatcaggaaatagcctgtccgttttggctgcagacgcagggattttggtttccttggcttctgagctgttcttggagcggggccatctagggaaactgagcaagtacacggggccatcaaacttgggctggatccatcaggcacacaaaaaacactctccagctctctccccgaagtggagcagacaaaagtgctgttgatgctgaagctgcagaaagcttcagaaggccccgtgggaggaagcttggcacgagaggcgagcagctccaactgaccctggaagggagcagcaggctggggtgagatccagactccgctcagatcggaatgcctgcaccctttgccttgcctcactgtgaaggagagaaacggtctgcctggtaggtttcccctggtgtctgagaaattttctcaaaaaaaaacacctcccaccacccatggaaaaaatgctcatgatacagtgttgaatga

SEQ ID NO: 65369 - DNA, 2720 bp, Homo sapiens
caaatgtatctatcttaacaggccccaacattcttttttttaaacacttctgttacccactggacacctaaaaaggcatatggtattggagtttgcaagtttttcaacagcctggagcataacaacaattatttaggaataaatgctacataagatcaccagaacaactgtagcagtgaagtcttttttcttactgatctataagctgttcgagggcaagagctttgtctagtaatctctgtatttctcatagtgtctaacactgactaggtcttgcaaacagtagactggtattaacagaaattcataaaaggaagatttggttgtccttctctagagcaaattacttgtttcttccttatggacactatcattctattaattccaaagtggaggttcaggggctgaccttggcctgtatgttttgttctagctacattgtattggctcaaatagtattttaatatgacagattagtatccaatttctaaatattaaggtatttaatgagaaattcatcttcctggtttctccctcaaattagcagcatcgacaatactcggccttcatccccaattggcaaagattatctgaaggtgaagatctgccgtctccttttcctgggcaggtgctcgaaagttcaggtttttggccagccgcggtggctcacgcctgtaatcccagcactttggcaggcagaggtgggtggatcactttaggtcaggaggtcgcgtgcgaccagcctggccaacgtagtgaaaccccgtctctactaaaagtacaaaaattagccgggcgtggtggcacctgtagtcctagctactcgggaggcggaggcaggagaatcgtttgaacccgggaggcgggggttgcagtcagccaagattgcgccactgcactccatcctgggtgaaaaaagtgaaactccgtctcaaaaaaaaaaaaaaaaaaagttcaggttttcactacaataggcttctaggcaggacagcatggtgtgtgagggcaccagctccagaatctagaatcggtctgcctgggtttgcttcttggcttcaccactttactagctgtatgatcttggggcatgtgattcaactttttctagcccaagttttcttacctgtaaaataaggataatagtaatagccatcgcatagggctgaggtgaggatcaaatggcttagtgcatgtaagcacggtgcctgacactgcagaaactactcaacaaatatcagttattgttatctgtctggcattggaggcggctgagttttcccacccttatgtaactgatgtttgttgatgctagctgctagaaagctcttaatgaatttgtggctccccctcagcaagcatactgaacctaagatatacatacgtaccaactttatcacctttctccatccttgtttcttggaaagcccgttaaactcttatagtgcctacttgtctttacttctgtagttccgtcttcagtaatgactccaccccacctcaatcttactaattcctcaagacccaatacaaacgtcagccttcctgtaaaaccttcccttatggcaccattaagaatgcatagcttccttctcggtgttccagtaacactttccccttgtatggccctcaccaccatgcatgacttgactaattcatcacgtacatcaactcctaaaggacagggtcctgtgttagtcatcttcgtactatcactttcctgccccttctcctggccaaagaccaggcacatagccatgatccacaaacgatgtaacgacataaattgattgagcaacagcaacagaacgaaactctctgatctagccttaatactgaagcggccttaacccctgggaaactactaaggtaaatatcacttaaacagcatccaagaaacggcaaaaagttaaacggagccctaagtcccacggagggaagtgaccatctgttttggggagggtctgggaagctataggcgctggcgtactccgcagccctggccgggccgacctggggtctcccactcgtgcaggcccaactagggctggacaggcattggggggtgcacgctccagcccgcaggccccctgaggcctaagcaggctccgcgccgtgactcagcccctggcgcccgccaacagccagccggcctctcctcaccttggctagcttcgcacactcgggtaggcgctgatccaccgtggcgctgtagtccacctccatcttgacgatgcgcccgtcagcccgctccgagccgccgtccgccatggtccccgcctgagcgtcccttgctgtccccctgcttcggccaccactcgtcacccacaccggaagttgcccgcgcacccgctcaggcagcccatcgggagcccacgcaaaggacccctcgaggtccccggcgctggttgccactcaggcactgccgcggacagcctgggggtggggcttgaggcgcgcggggcgggactcgccactccagcctgcagcgtcaggttttgtctctgggaacatcagactttttacctaaaatttgcgatgagaaaagcgagtgtaatagaacagaccatctcatatatccctacacccctgcttcgaaatatgatttctcaggaccgtggccagtcgcttttcttggatctcggttttctcatctctacatcaggaggctaaaataaaccttaaaatagaaaattctaaggttttatctacttgagaatctt

SEQ ID NO: 65370 - DNA, 2708 bp, Homo sapiens
ctggatggagcacggcagcactcagggcacaatggagagcggattcaaagggcaaaggagccgaggaaagcccctctgcccgagcctccccagcgccggccgggctccgctccggagcagccccgccgtctggcagagacatgctgttttgtttaaatcctccacattctttgccatttccccattggccggatggggctaccctccccgccgcggccgctgctgatgtcagcctcgctcgcgctcgctcctcccgcacccacctcccggccccaggcacactgcatcggcgcggacgctccggccccggcgaggtggctgcaaactcgcgggcacgcacggcgcccggggagccgagggactcgggggaggggacgcgcgcggaaggcgccagcttcctcccgcccgcccctggcagccgcgagccgaggttggaggcgcccggggccccagccgggcagagccgagcggcggcggcggcggcggcttcccttttctccccgagccgagccccggagcggcgcggggaccggccctaaaaagagcaggaaatcttgtttaccgcccgcggagagaagccgatcgagcctttgtctggaaagtcagcatctccggctccggctgcaatgtgttcctggtgacattagcatcgggcagacccgccggaggaggggggtcgccaggttcccgtctgctttcggaggcggatcgagcgggtgacttttgtgcattcgttttaatttttggaaatctctcttttttcctccctcgctcgctgccgggcatgtcctgatctggcggccgctcctaccaccctgggcagccgagcagagtcgtccccagcgggtctccctccctgcctccctgactttgcaacaccgcgttccgggaggaccggcctcggcgagggaggaggcgggggagctgcgaacacccagacccaaaccctgacatgctctggggcggagaggaggaagccaggagctgagcgcgccgcgggggctgcttcgccctccggctccgagcgccgggctccgggcgccctgccctgcgcctgggcagcagccttgctggtcttgggggcgccccccgcttcccgccccgggggtccgcggccggcaggaccatgctgctgaaagagtaccggatctgcatgccgctcaccgtagacgaggtaagcgccgcgcccggcccggcctcgcccgctccgggacccccgccgctaccgccgcctcctggccggcgagccccgggcgagcggcaggaaacccaggtggacgttaccccgcaaacccgaagcctggaggagaggagggaggggatttgcggcttccacttgtcaccccagcgggggagggcggcgctgggtggggcggcggactccgggtgggcttttcgggggcgcccagaatccagactgttggggatcactatgagccaaagggagtgggtgcgccccctccctccaaataagaaaatgaataaaccaaacccaagagcccccggcgcgcgctgtagctggggtttggggggcatcccgtcctggccgtgggcccagcctcccctccccgccctctgcggtcaggtaggggtgcgaggaggagccctgcgccctcgggatctgcacgccccgagccccgcgggaggaacctctgagcccttaggggaggtccctgcggggcccgacttctcgccgtcgccgcgggcttgggcgcagctcccggcacgtccgcccttcgaggctcgggacccggctgtgtcctttcgcaaaccgcctggctcggaaactttctgcgtctcttgtttcttccgccgcggggagcggcgcgcgagccgggagcggcgggggctgcgacgcggccacaggagggcgctccagcacgtggtgccggggccgcggctgccggctgggggcgccgggcgcggggcgggggctcgtcctccaagcgcggctctgctgtccttctcccgatcctgcgaagccgcgagctccagtattcaggaagtggtgactcagataggattattccggccccggcttccctttcttccccttcttcctccccacctttgtggtgattccacgactgctgagcgtctctgtccagggacagcgagggagcccaaagccaagcaaggcaacgtgaaactcactagtgtggtttggtgtggcaacacacatgaaatcagccacccagaccgtctttatatttaaatctggtgcctcgaaactatcagatatgtttttgagccactacttggtgagaggggcgatgtgctttgggagagaaaaagatgcataactgagaacatggctgagctcacaggggctgtccgtatttgccatctggaccaagggttaaggtaagacccaagtacaatccaagacaagatcaaagtagctgcaagtttacaaaacgcatcacggggacacaggctgccaaggagggagagatcagcttccaccagaatgaacaaccgagttttggagttcgttggcatttgaggaggtagcatttaagcagggtctggaagggtggatgccaggtgggtagacagagattcgagttgcatatgaccttgtaagtggagaagcaggacatagctttgtggagaaagagaagggcaaatgaatgggactggttaataggagtctttccagaaaaggtggagattgtcccaccttgtgggcagttgagctagagtaa

SEQ ID NO: 65371 - DNA, 1231 bp, Homo sapiens
ttaggtcagaacatgatacttagagggaaaaaagtaatcatggcttgaatagctgccctaaggccagctacagggctgcaggggtctgtggaacctttcttgtcagaactcaggatccttaggagtccccacaagggcatggaggctgtggccatcatgagtggaagaaccagcttccaaaggaacctaggattgttctggccctggctccaggtgcatatctctgctttccgtgagcattgaatgggaaatcacgtgttagcagaataaatcccagaatacacattcaggaggagatggttccacatggcacgtaagtcctttgccttattgatgtttgtctggcagatgtccttaagccttcccatcaagggctttattctaagggtggctaactggctatttaaacctcatctcaatagtgtctgtctaggatggcaaaatcacaccaggttctgctgggcaaatctcccaggtggcgtattgctagaggagagcgccactgcagaggacacactgtcttggccactggctttgcaaaccatagtggaggagggagtctggggtcaccaaccacttcctggctgactgcctgagccacattatacaagactgtttgttgacttagtaatactgaagccagagctcaccaagattctgacatcaagcatgaaagtgactaattctttcatttcccagcactttgacaaaggggactctcttaaaactcctcatcggacgttagtggaagtcgactcatgtatctaaacatgtagccagcgtaagttcttggtcagattgatctaatgacttttttagcgtgtgtgtgtgtgtgtgtgtgtgtgtttaatctttttaagtttgggtgaagtttgaccttctagaattcctgtttattcctgagcaaagaaaaaaaaatcaaccctttttaattcctttagcatcatatctgaccatctttagggtgttgtttctttcctagactgaatcactcagagaaataagattggccaacaaatgtaatttgatgataccctataataatgttgtttaagtacctaatctaagccgctaatctccaaagactgttcccccgccccatgtcatcttacacacacacacaggcacaaaaacacacacattctgttctgattatatttgctgtattaaggccaaatccaggtgtttctgagcactagtttgtgtgtttttatgttgaaaataactagtt

SEQ ID NO: 65372 - DNA, 1297 bp, Homo sapiens
ggaggttgcagttagccgggattgcgccactgcactcaagcctagaagacagagtgagactctacctcaaagaaaaaaaaaaaagaaaagaaaagaaatctagattgttctcctttgatcttctcttccactggcttgctactctcaattccttcagattgaatttatgaaatgcttttgtctccctcaccattcctgtggttcctctttcttattgccctttagaaaatattgaacgcaatgcgttacagcagaggtcaactaactttttctgcaaaccgccagatagcaatattttagacttgcaagccgtaaggtctctgttgcaactactcaactctgacctcgtaacatgaaagcaggcatagggcaacatgtaaatgaataggcgtggctgtgttccagtaacattttatttgtggacactgaaatttgaatttcataaaattttcacatgccacgaaatattatgtgccttttgctttttcttttccaaccatttaaaaatgcaaaacccatttgtagttggagaggcgtacaaaaacaggctatgggctgcatttggcccatgggccgttatttactgatcttagatattggaggaccagtgctgaaaccactggaacttcagctttaacactagcactgtcattttcagaagccgcatcaaactgctggctgcttctgacaaggtggtcagttacacttggtcttctccaccccccatcccccgcccctccgccatttcctgacaaagctgtctctctaacctgtgggtatgtgttctgccgaaaacaagcagccataccacagcagccgtaaccataggactttgaaacaaatgcaatgaatggcatccactagtttcaagtttgaccacatgtttttattgtttgtttgtttgttttttgagttggagtctcgctttgtcgcccaggctggagtgcagtggcgcaatcgctgttcactgcaatcttcccctccctggatcaagtgattctcctgcctcagcctcccaagtagctgggattacaggtgcccaccaccatgcccggctaatttttgtgtttttagtagagacagagtttcaccatgttggccagactagtccggaacgcctgacctcaagtgatctgcccaccttggcctcccaaagtgctgggattacaggcgtgagccaccgcgcctagcctgaccacgtttttgattcttgcttctgttatatctgtattaaccgttcttcttagcttcgtggcagatgtgataagcatgcctttgtgtctttctctaagtcact

SEQ ID NO: 65373 - DNA, 3172 bp, Homo sapiens
actgcccgcctcagcctcccaaagtgctgggattacaggcgtgagccactgcgcccggcctcacttctgttttctacttgtgtttttatttccattgcatttcctgacttgtgtatattttctcgttgtagaagcacttagtgttttggcactcagacttactttccagtgtttcttctgatcaatcaatagccctttactcatactaactatatgtgatggaagcaaagtcaggaatgtctaatgtgggggcagaattcactatgaagctacttagaatttcaccagccatgaatgatacattatccatcatgttagctagaatatactgggctccagtctcttttgggggatctttagggtccttctgggtgcagaagggaagatgacatttcaggagatctctgcgcattccaccctggcttccttccttccaggtaggctgagagaaagctttcttcttgatggtgctagtgagaacttggcaggtggagcaggaactgttagtttttcactccctgttggagtcattcacacatacagctcatatagaagacggatgtcttttgtcttggtgccaaagacttgaaaacagagaacggtaacttttatttatttatttatttttgagatggtgtttcgctcttgtcacccaggctggagtgcaatggtgtgatctcagctcactgcaacctctgcctcctgggttcaagcgattctcctgcctcagcctcctgagtagctgggattacaggcactcatcaccacgcctggctaatttgtgtatttttactagagatggggttttaccatgttgcccaggctggtcttgaactcctgacctcaggtgatccacctgcctcggcctcccaaagtgctgggattgcaggtgtgagccactgtaccaggctagaatggtaacttttgaaacccatttttgttattctaaagtcttcacggtgtggtgttgggaaggctgggttgctgtgtcagatgggtaccctcaccccagttatggctgttctcacatccaattccaggaagcctcattcttgtgtggtcatagaaaagcaaccttaattttcctgtgtcttagtttccttacctcctagaaatgtggcaaagatgcagaatctgtttatttagtaaatatttatcaagttctgggaatacagcggcgaataagccaccaaatccttccttgatgggactcaccctctaacacagccaaggcaatgagagaccttccaggaataacattgagaggcaaattatgcatgtaggtgacacatgaggccaacaggaaatgacctcgaattgaagttgaaatttacagtgcgagatgagccaagaatctgtgaacccttagaactcaggcaaggtgagctggtgtgacttgcaggaagtatgactcaattgtgactgtacccaagaaggcttaaaccacatcatctgaaagaaggatgtgccaacatacgcttccaatgactaaaaggaggggcagagggaaaaacaaaacagcatgttcccaggcccatcctaggaggaaggaaggctattaatacattcctttgacattgtctacttaccattgcatagagttggaggtgagtggcatatggagagacagagatttggagacagactgagtttgaatcccaattttgtcttattaggccgtggacaagtcatttcaactctctaagcttcaatttcctcattatttattttttaaaatagagatgaggtcttgctatgttgcctaggctggtcttgagctcctgggctcaagccatcctcttgccttggcctcctgagtacatacaggtgtgagccaccacacccacctgcccagccctagcttgctcactgtctttctttttttcttttttttgagacagagtcttgctctgtcacccaggctggagcacggtggtgtgatctcggctcactgcaacctctacctcccaggttcaagagattctcctgcctcagcctcctgcgtagctgggattagactactacactcggctaatttttgtatttttagtagggatgggtttcaccatgttggccaggctggtctcgaactcctgacctcacgtgatctgcccacctcagcctcccaaagtgctgggaataaaagtcgtgagctaccacgccggtctagcttactcaaacaatgtctagtttgcagggtagtgtatgtacgtgcctcagtgtctttggtgtgatatacacttagtaaatgttagttcagctctaacagactcatctgagattttgattctgtaactcccaagagttcagtatgctagcatttttttttttttaacatgaggaagagttgggtaaggaagagctgtgttttaattgcattacggctcaactgctaactgttttgatatgttgaacaaagtccattgattcttcatggaggagtgcttgctggggagtgtgagtcagcacgtctgcgttattaacttgttcggaagctttttgtggcagattgattttaaaagcccccaaggaaacagaggattttatttaatagaaatattgtcagaatgacattgagatttgggtttagctttcaaatcactggatacaagttgaatcaggtcttttctctgacagatattggaaacatggtgtgttggagaaatactctccattgcctggcagggcccttaccttgggagagggggatgatatttgcctggagcaccccggtgaccccacctagcaggcctgactttctaaaggcaaggatgtgggcttggtacagagaggtggcgaaacctgaatattagtattttcaaatctgattactagtattttcaaccgacctgactaggcgcaaatccatgctcatttaaatgaaagtctacctgaaatcatgcctcactgcaaccatgcacttctgggcttaagcgatcctcctgcctcagcctccctgaaggtccacctgcatttgaataaggatggatgtgcgcccaggtatgtctttgtgggtttccatcctatagttctggagcaaaggacaaatggaagaaagttgctaaagaaaagaagagcgtttctgtggctccttcaagagcagttacagatttctgtcctgaagccaggagggaatatgtggcccaggtcccacagtggagagttgcaatgc

SEQ ID NO: 65374 - DNA, 1218 bp, Homo sapiens
gaaatttattttgcaaaattttacctcgaagaaacaagcgagtgtttctctgtatccatctgagctcaggaggatgcccaagtgaaaggtgtttaatccaacttctgttgaatgattgacttctcagggactgttaatttgtaaactctaagaaagggggaaagtttaagtttttccggctgccaaactttgggcttcatggtgaatcatcaggacaggctttctaggccaagtgtaagcgctgttctgggggccactggtctgagggtgggggagcaggatgtgtttatttagatgcacggccagagttcacacacttggggtttgggatcagcctccagggcctaagtaatttctcccaggagatgtcttcgcatcttataccctgtataggatcatcacggactgctgattgaagaaaagggttaggaccactgatcagagagaagctacgattttttcttttctgtctgtcacagaggtgtcagtaaaggagaaagcttacttgaaaggtttggattaccgagcagctcaaaagagctgttgctggcgggattttctccttgctgaagtttttctttgcccctagaatactaagcaaaaaggaaagaaaagatgaaaggtaagtccctctttaaaaatacattgagtcaacccatcgcagaaaaatacagatttctcaactgacaaataagcggcatcactgcatttgggaatcagaaaaagtccccacgataaagttatttgggaattaatcaacacttggctcatcctaggcgtggagcgcttcggaattcacctcgtgttgcttggaagctggcagcccggttgttatataatgtgaacccagaggcctgccagacggccctccctgtgccccgggggagttacaaggctctgtaactcttggagtcagtcaatcctgcagaacagagtccaggggcctggtgtgtgctgtgttttacagatgacacattaacctttgaaattctgtcctcagtcaccttcatcaatgcctgagcgaacgaaggaagggccacatgtgggctctttttttgttcacttttccaaatggagataagacatgtaacaaaatttaccatcttaaccatttttaaatgtacagttctgtgttattaagtgcattcctatcgttgtaccagtatcaccactatccatctgcagaactctgcatcttgaaactctgtgcctgttcag

SEQ ID NO: 65375 - DNA, 731 bp, Homo sapiens
agaaggtctggaacaacctgagattcagcatttttaggagtgtctctggagattttgaaacacgtggttcaaggactctctgtctcttctccctcccccaaacgagaaactgctgcttgtgtctgagagtcaatacgagatttaaaaacagcaacaaaaccactgctcctggaatggcccagttcccatggccacgaccagcaaagtgggcctgatttccttaggaggggaagaagtgacggctgcagagcccttgaccatctcggtgtctgggctcgagtgtcccgccacccccagcgtctgcaggtcacccccacactgacgccgtctcagtgagctaatgccagtgtctgccccgcgccggctcattcagcagccactggaatgatcaatgaggccggccgcccagccctccaccggctgttggtgaatcagctgcctcggccattcccatctccactgagcaggaagcactcgagctgagcccagccagggctgactggcgtctggctaatggcttttctgtgtcatgcactgaccttgatcccatatgtttttcatacgtgagtgggttggagtgcctgaagatggtccagtggtggaaatagctcttctgccaagccccttaccgaggtcctgggcagtactttggtttagaggtgtctgcttctgaagcaggatcggtgcttttgtttaaattgaggtgaaattcacataacataaaatcaacc

SEQ ID NO: 65376 - DNA, 1956 bp, Homo sapiens
gaacaacaaaagacctattagcattataaaaatagactgcatttgattccttcacagtagctggatattctccttttgcccatgtcgtcatgttggggcaatgagaaacaacacacatggcgatctggtggatgcttaaatctaaactgaggcactttgtcacactgggtacatttgtttagtaattgcctattaaatggtttctccctaagaacatcacaatttatctttacttatttatttaacattattgattgaatctgccatgcttatctgagaaacatacatttctcccggaaataaaaaccttgccaaaaatcacacaggggaccttcaacttcaccttcatcaaactagtctgaatttcctgtaagctgaggagagattttccccactggggctcagagaaggggagtcagagaactcagaaggcctgaaagactgaaaagactggagatctctagagggttccaagaaacttggggggaattaagcatttcacgtaggaacagcacgttattgggagtttacctacagagataaatattttttctttggcagatcgttccacaaggccatggatggaattcctagggagttcccttgcaattaaaaaaaaaaaaatctagcttatttatattcgaccactccctagacccatctacagtctctcaagtccccacctagaacagcacgcagccgattcaggacccagtaagcagcacttccgcgcctaccctatcccttcctggagcacatccgggactcggcgaggcgtggtctcgggaggcggagtctgacgcaagccggcccagcccacctggctaaattcacagtcgcgctcgctccttccgcccgccagaggtcgcaggctgcgagagcaggttcctggtttggcaagcactcgccccctcaggcccgttcattctcgcgagagaaagcgcgaggcctgccgggagtgagcgcggccgtacttaggtttgctcaaaatggcagcgctggaggaagaattcacgttgtcttcggtagtcctgagcgccgggcctgaaggactcctaggcgtggagcagagcgacaaaacagaccagtttctagtgacagacagcggcaggacagtcatcctctataaggtgaaggcaataggtttgggagcgccccgactgccttctcgcccctttctgagcgcggagctcgagctcaagtttctcacagcttcagaaagagatcgtggagaaggcttagcagagagccggctgggcctgttggggacgctgagtgaggtctggaatctggcttgcttgccttcctgtaaaggcatatttccgacttgcaggggcagagcgtctgagtgcacgtgggttagactcggaaaagaaagaaaacctgtgcttttgcttcggaactcgcggaattggccttgctaagattccctcctagggtctttattatcttagccgcccgcgggaggatggaacggagattggttgggcgggagaggatgacactgacagagtgggaatagtggtttagccgtgtctacacttcacacccctctctttgtaggggcggggacaattttagagagtgagggactttcttgatagctcgctaagaatcttgcctccaagtgagttgtctgttggcatctctgattcacgctgggaatcctggagttgagtcctgggaaaatctgcaagccctgcccccatttcagcctaaagcctgatagagaacactttctaaccttgcttttggtggtcgcatagaaagcagttacttttctctgggctgctgaacatagttttccatgttttaaagaagttaggtatctgctttgacgttttgagaacaggttgctaacagctccctgtgccgttttgactctgctaactctattgggtttcacttgggatgtcaagtagatttgcagttttgcagctcctgcataggaataca

SEQ ID NO: 65377 - DNA, 788 bp, Homo sapiens
tagtcccagctacttgggaggctgaggcaggagaatggcgtgaacccgggaggcggagcctgcagtgagccgagatcccgccactgcactccagcctgggcgacagagcgagactccgtctcaaaaaaaataaaataaaataaatgcttttctgtgactttgccacctttccctctccggaagagccattagcgccccctgctgcctgagccggcgcactccactctgccctagtggagaggggccgggtgatgggggcggcaataatgggagcggccccctgggctagagcggtgcctccaacccctgatcctcctcatcacaacccatttgtcagggccagggccagggactcggccagatacagggagacaaccccacaggaacatcagggaaggtgatgcagtcgagacttgctggtgtcctgtcccagaccatgatgacgtccatctgtgctgctgccaagttaaaccagagtgttctggttaacctggatttgaccttggagttctggcctctgatttgccttccctaggactccatgtgctcactctgcgtacagatattcttgatgcatttgctagtctgattttggacttcaaatgtcttggtgttttttgtttgcttttttcttttttccagacagattctcattctgtcgcccaggctggagtacagaggtgtgatcttagctcactgcaacctctgcctccccggttcaagcaattatcctgcctcagcctcccaagtgctgggaccacaggcacatgccaccatagctggctaat

SEQ ID NO: 65378 - DNA, 1671 bp, Homo sapiens
gatcgaagtcctagctggggcactgggaaggtggcgggacattggaacgtgcagtagttgcgttctggagtttactgaggctttcccagtgcggattccacgctacaggtcttagggcgcccctccctccgggcgtggcagcccggggcgtggctcctggcacagatccggagcagttgtcattggagtcattttctggactccagctccatgcttcagagtttcctaagttcagggggcttgtctctctgtcccctcgactaatttccctctgtcgctggcgctgcccggtgccctcggtcgcttgggccgcccctctccgcgacttttttttttctttctctcgctggctctttcagcatcagtttccatagggggagggaagggaatgatatttgggggctcccttgccttcctctccgagccgcgaaaggggagacgcggggaggaggtccggccggctttgggctccagccagcggtccgcggagactttggtctccgaaggcctttgacgccgggcatttcgcgagctgcgcgcccctctcagccgcgccacctgcgcccggagttttgccgcgccacccgcgcccggagtccagccgcaccgcgctgtgccgagcccaggcgcccagggctccccgcccccgactcgacgctcccgcgctccccctagcggccgccgcgccgcttcgctccgtcccaggctcgtcggcggcgcagctcacgtgaccgcgctctgggcctgcggccgctgtcggttcccccagtcaccgagcgagagggaagaaacaagatggcggctgaaggcgatccggagtggggccccagcaattcggattgagccttctccctccacccgcttccgtcggccgggcccctcccgcccggccccgcgggcctccccacccggccccggcgctccccaccgccccccctgcgcccgcccctcccccttcgctttccttctccccccgcctcggctccgacatgaggggccggcggggcaggccgcccaagcagcccgcggctcccgctgcggagcgctgcgccccggccccgccgccaccgccgccgccgcccacgtccggacccatcggggggctccgctcgcggcaccgcggcagcagccggggcaggtgggccgccgcccaggctgaggtggcgcccaagacgcggctgagctcgcccagggggggcagcagtagccggaggaagccgccgccgccgccgccggccccccccagcaccagcgccccgggccggggggggcgaggaggcgggggcggcaggacggggggcgggggcggcggcggccacctggcccggaccaccgcggcccggagggccgtcaacaaagtggtgtacgatgaccacgagagcgaggaggaggaggaagaggaggacatggtctccgaggaggaggaggaggaggacggcgacgccgaggagacccaggattctgaggacgacgaggaggatgagatggaagaggacgacgatgactccgattatccggaggagatggaagacgacgacgacgacgccagttactgcacggaaagcagcttcaggagccatagtacctacagcagcactccaggtacccacccagcccagttgctgcagactccttccccacctcctctgccctccccccttgctcactcgt

SEQ ID NO: 65379 - DNA, 3248 bp, Homo sapiens
ttgagaccagcctggccaacatggtgaaaccccgtctctactaaaaatacaaaaattggcagggcgtggtggcgcatgcctgtaaccccagctgcttgggaggctgaggcaggataatcgcttgaacccggcaggtggagggtgcagtgagccgagatcgaaccactgcactccagcctgggcgacagggcaagactcaatctcaaaaaaaaaaaaaaaaaaaaaaaaaaagcagtatgtaaccggaccacattacagaacaaaggtccttatcacaatctatcaggatttcccagagcacatgtctagaaagatgtgggagtgggtattccccgctaccaaccccacatacacacccaaaaaagcagcttttctaaactcggttctgtacagtcccttctggcaatggtgtttggtcgtccaccccatttgtcaacatctatttattgacagcccgctttgtgccaacccttgctgttctcacccttgagggtgggggctgacagggcttaaatcacagagtggccggaataatacctgtcgtctaaatcccattcatgtcattgtttcccatcgctcccaaaaaaaggctgggcgacctacagcccgggctgtggcacccacgttacaaacggtggtataaagtacatatgcagcgtcattcaggtcagtttcaataccaggtttaaactctggacacggcttattgcagctggaggagtccagggctaacatgtggactcggaagaagaagccgtcgggggtgaggtacaggcggttcatcttgtacagcccgtcccgatccaccagcagggtcaccagccggatgcccgcgcccagcacgtccacatcgtgcacgatcccgttcaccgctgcttccgaaaaacagtttggagaagagcattaccccgagttcctctcccagtcccccaggaggtggtttttagcaaccgcgaaacggcccgcacgggtcaggcgccctgggatctcgcgggcggattctccggggctcggaaaggctcgcggggcggcggggcggcggcgcggcggccgggctcaccgaattcgctctcgcagaacgcctcgcgttcgtccagatcggaccggcaggcgcgcgcgcagggctcagcgccgggctccgcgtccctctgcggcgggctgaggccgaagctgaggctgaagcgcggcggcggcgcgggcgcgggtcccggggccagcgcggcggcgcgcggccggttggggtgggcgtggccggcggagccctcggtggcgagcgcgggcggccgggcggcggggaagcgcagggcccgtgagcgcgcgcgtcgcggggcgtcctccgacgcgggctcgcggcgcggcgacgcgcggttctcggcttgcgccaggcgcgggcccggcgggccagcgggcgcgcgtgcggcctcccggaagctggcctggttgtcggccggcggtgggggcttccggcggcgcgggtcaggccaggcgcgggcggcgggagcgacctcggccgcgcgcggccgctgcggggcctcaaggagtggctgcgcgcggggccccggtgtctcctccgcgctcgggcagccgcgggagtccggctttctgctgtgcggcggcgaggctgtggggagagaagaggagaggcgggaaggcggtgggggaggagaagcagtgaggggaggccgtcggggaaagccgaggaagccgagaaggaagaagagggaaggggaggctgagacgggaggccgagaggggaagggaagccaggaggggaggaggccgctagtggggcaggggcgctgcagaagaagggctctgggagggggagaggagatagaggacaagggaggcttcgcaggcacctgcaagaggagagatgggagggaggcccggaggcctggaagtgaagcagggagaacccggacgcagcgtcgcggccaagcggggcacgcgcttcccaggccccaaaggaagaaggatacgagggtcttgacctctaagattatagcttttaaaattacaaccccctatttactctaagactaaacatgtcttacaacactggttagataacaaacttttttgcccttcctttaatatatacgtatatgtgtgtatgtgtgcgtgtgcgtgtgtgtgtgtgtgtgtgtgtgtatatatatatatatatataaaacatatataaacatccgcctctttgctatttacagtttgttgagaaagtaccaagagcaaaccccagggggaaaggtctcatattacaggttctcctaattctttaagcgcccctgacaacagaactatttggttttcccatccatgtttacactgtcatcccggtctctgcagaatcgagcatttgtaagtggatttttatctggcttcttggacaccacttactggtaaaccacagctaaggaaggttttaaaagcttggctgggaggcagagaggcccctggttaagtataaaagcacacgtcgcttacatttttttccccattagatgatggaggaaagactcctaaatggtatggcatgaaaacaaatttttaaaattattaatgattttccctagttctgcagacaggttggtgagtaaacctcagccagcttgggagctgggcacctttccataccagttacacaatttcacctccttgcttgcctgggtcccagtgccctccaaacaggcaagaactagcctttatttttctctccccttgcattaaagagatggatctgcccatttgcagctctggcaacacttcatttaaagttgatcagtcttgccaaatcgataatctgctttaaaatcagctttcacccagcaataatagctggttagagttcatgtttttgcaaagaggttgattctgactcattatgttgttaaacggttgtgccatgcacagctgaataaagttctggtggatatccaattcctgactgtcaactgttgacctcacaactgcttccccattgatataaccatctgttgtcatgggaaagattgtctgatatttgggttaaatgccactgaagtcattcaatttccatgtggaaaaataacccagagtaaattgccctgtgaggtacggaaactgtttttcccagagatagcgaagccgacagaacatccaaataaaagcaaaacaaaaacacgatcccccagagaacccctcatttcttcacgggctgagtaacttaatttcatttcgtgcatgaagtataagagtgtgtgcgtgtt

SEQ ID NO: 65380 - DNA, 1725 bp, Homo sapiens
caggctggagtgcagtggcccaatcatattataacttactgctaattttaaaatttttttctggggaggttggggttgggggtggtgtcgtctccttatgtcgcccaggctggtctcaaactcccggactcaagtgattctctcgccttggcctcctaaagagctggaattacaggcgtgagccaccccaccccgaataacaagtgatattgtgttacattcgtataatgtgtaatgatcaaatcagggtaactgggatagctgtcacctcaaacactgatcatttctttgtgttaggagcatttcaaatattttcttctagctactttgaaatatacagtaaattaccgttagctataattaccctactgtgctaccgaacactaggtctgaccgtattttagtacccattcgctgacagtgtttttaaaactctcaaaagcacctctttatttgtgataacgatagctgccaagaaccatctcttaatcaactgtccaatgatcgccctctcttccaccaaaactaatctcacgcgacccagatgggactcgaacccacaatccccagctccggaggctgatgccttatccattaggccactgggtcaccacaggatccggcttctcacaccctctccttacgcgatgccatcatcacgctcccgcccccgcgcatcgcggtctcgcgccgagaggcaagtgatttggcagccgcccccagcggcggcggcgcgcgcctgcgcttttctgcgtccctgtcggccgcctggacttcccgcgcgctgcgccatgggcccggagcggccgcaagggccccggagggcctgcgcgtgaccctccgagctctcctgcccggtaactgcatggcatccaccccgccgggtttgggtgctatccttcctgtcgggttcttcaagcgttcttaactccagttgtccattgggctcacctggggaattttaaacaaggttccagtgcctgccccatcccattctagttcagttgactggggcggacctgggcgtcttcattttacaaagctccccgggaccctctgcagggcaggcggcgttgggagccactgcagatcgcgaaatcctcccgcagcttccctctcccgccaaccttcttgtccctgtcttctctttctttcccgcgtttattcagcagagattaatgtgataacctgttatgtgctgggaactgttgggctcctgggtgaacaggcttttccaccccacgagaacttcaaatctgacctttgtccctacggccattcaccttcagccgttttcctccccctgactcttctttccctctggagtaaagggaaaatgaacataacaaagtccctaagtgcaaaatagtacgggtttggcttcccccttccctcagccaacatcctgaagttaagttttgagtaaagacttggagactttctggtgccatgcacactatctgtatgtttgttgcatgtaaagatgctgcatttgtgatttttacaaatacacaatttcgttttcttcttagacacgtaacacttgttcttcacaagtctgtttaaaatatggctaagccggccgggcgtggtggctcctgcctgtaatcccagcactttgggaggctgaggctggcggatcacttgaggtcaggagttggagaccagcctggccaacgtggtgaaaccctgtctctactaaaaatacaaaaaaattagccaggc

SEQ ID NO: 65381 - DNA, 1439 bp, Homo sapiens
atataacacaaatcttccctcccatagtagccagaaacccccgccgagtactttgggtgtcataataggaaaaaaatgcaaagcaatatgtttttctataaagattacttatttactaattagaatttttttattttcatgaagatcaacaacaaagtttttaaaataatgacttagagaatcattttgtggtatttgtttaaggctgtcgcccaggaaaacgcccaaggaccatgcacgcttcaaccctatggaaacacgaacggcccagggaaccgccccttcgcgctgcttgacgggatctggagtcctcccgctccgccccgccaggcgctcagggaccgcccggccgctccctcaccgcccggccgctccctcaccgcccggccgctccctcaccgcccggccgctccctcaccgcccggccgctccctcatctcgcgatgccatcctctttttttttttttctttcccccctcccactcgcccccaagccctatgactccctcccctcccaacgtgtttttcaaatccaccaatgggcacacagcttaggctcgaaccagccaatcggaatgcggagtcaccgggaaatttaaatcgcgccggccggctgcacgagccacacggtctttgagctgagtcgaggtggaccctttgaacgcagtcgccctacagccgctgattccccccgcatcgcctcccgtggaagcccaggcccgcttcgcaggtacagactcaggcggcggcccggcccgagcgctaacggcttgcccgtgggcggcgttcgccttttgggttgggggagggaggccccgggtccacgccgagcctggctctgcctcccgcgttgactaggcctcgggggcgacgttcattgaccaggcggctgagtttcgcggggtctgcgggtttagggcgccgacgctctgcaaacggcagcggaggccttaacgcgtcgcggccgggagaatcggagcgagccaggcttgagggcgaatgtcccgggaggacttgtggcggccctggtttcgcctcctcctttctcgttgcatcttccccggcgtgggggcaggggctgggggtggcagttgggagcaccgtctctgacacctaggccccgggggtggctctgccaccaagtcgtaggcgagcgtaatgaaagcaaagatagcaaattgtaaggagggctttgacttttgtcatcttctgaatgacgcacagctgatgtcatcctaattaagcgcattcactcctagtctctggaaatgcaaatcaaatatgcgagatgcggcactgcatttttaatgttgaccataatgtaatgatgaagcaaatttttatttaattttcgagtctgcacctattttggccaagtaaagacagtaaaatagggagagcctcctgaggatctgaatttattgccctggcacataatt

SEQ ID NO: 65382 - DNA, 1154 bp, Homo sapiens
gccctgcatgctgtgggcgtctaataaatgcagtcggccctgcttggtctaaaactctcccttgagtggaccggacactaaacccctccaggggtcacagctgccgctcccgccgccactttgctccttgcctgctcccttcccgcgttccgcctgggaccctcggcggcagctcacaccttccctcagtgccggtgcccgctccgggcatctggcgcgcgcccgccggccccgccccgctgaccccaccggccccgcctcccatctccccctcgcccccccggagccgacaaatggccgcggcggcctcaggtccggcgtcactcagacaagggggcgggtggaggaggaagcggccaagtccacagtcctgctcccgtgccgccgagcaccgcccacctcagctgaccagccctgtccgctactaggcctcgcctagaggagggaaaggccgtggcgtccgctccctccgcggctcatggcgacgacgcttggcacatccgggaccctcaggccgctgcagtcgcgtcgccggctgctcgggccccagccccggccgctgtggtgactccgccgcgcctcgccgtcgcccccgtcccgcccgccgccccagccgccagggacatgtctaacctcggaggccgtaggaacgggcctgtcgaagtgcgcctgacaggtgaagggggcgcggcgggccgggctgggcagccgcgaggtgggcgagctggcaggggtgcttgtggccttgggaagggccagggtcgcgatcagtggtgagttgggggtcggaggtgtgggaaggcctagttcagagagagcaattggaaaaccacttgttccggtttggacattgtttaaaaagccgaggatgactcggggcgggggggtggtgttttgtggaggggagggtacaccagttcgcatcgcaggcggatttcaggtcggaaagtcttggtcaaggagcccgacgctgcctcccggggctcggggaacagcccctgggctaccgcccaggtgagatcgtgaaggggatgaagagctcccgtggcgaggattattgaattcggttgctgactgcgcgcagtaaacactccttaaagatggagcgcttaacgggagggtgtgcgtctgtgttcccgggttgttaccttgca

SEQ ID NO: 65383 - DNA, 1122 bp, Homo sapiens
gaaggggagacgcggggaggaggtctggccggctttgggctccagccaggggtccgcggagactggtctccgaaggcctttgacgccgggcatttcgcgagctacgcgcccctctcagccgcgccatccgcgccccgagtccaggcgcaccgcgctgcgccgagcccaggcgctccgggctccgcgctcccgactcgacgcccccgcgctccccctagcggctgccgcgccgcctcactcggtctcaggctcttctgtggcgcatctcacgtgaccgcgctgcgggagagggatgaaacaagagggcggctgaagccgatcctgagtggggccccagcaattcggaatgagccttttccctccacccgcttctgccgaccggggccctcccgcgcggcctcgcaggcctccccacccgcgcccgtccctcctcctccgctttcccttctcccccgtcctcggctccgacattaggggcaggcggggcaggcagcccaagcagcctgcggcttccgctgcggagcgctgcgccccggcccctgccccggcccctgccccggccccgccgccgccgccgcccaagtccggacccatcggggggctcagctcgcggcaccgcgagcagcaggggcaggtgggccgccgccgccgcctaggttgaggcagcctccaagccgtggctgagctcgcccaggggggagcagcagtagccggaggaagccgccgctggtcccccaagcaccagcgcccgggtggaaggggcgaggaggcgggggcggcggcggcggcggcggccacctggcccggaccaccgcggcccggagggccgtgaacaaagtggtgtacgatgaccacgggagctaggaggaagaggacggcgacgtcgaggagacccaggagtctgaggacaacgaggagcatgagatggaggaggacgaggctgattccgattatctggaggagctggaagacgacgacgacgccagttactgcacagaaagcagcttcaggagccatagtacctacagcagcactccaggtacccacccagcccagttgctgcagactccttccccacctcctctgccctccccccttgctcactcgtgtgctgtgcatcct

SEQ ID NO: 65384 - DNA, 1932 bp, Homo sapiens
aggcgggcggatcacttgaggtcaggagttcgagaccagcctggccaacatggtgaaaccccatctctactaaaaataacaaaaattagccggacgtgatagcgggcacctgtagttccagctactggggaggctgaggcgggaaaatcgcttgaacccaggaggcaaaggttgcactgagcccagactgtcccactgcactccagcctgggcaacagagcaagactccgtctccaaaaaaaaaaaaaaaaaaaaaaaagcaagaaaaagaaagagaatggcgaggcccagagagaccgaaagtcccaccagagggtacagagctagctcagccctaatgccggccccgcggtgcctttccgagctcacggcctcccctcagcatccgggtttcggcctcggagcgccagggacgccacgaggacgcgccccacacttgcgcttctgggttccagcccccgcggcccccaacaaataaagaagggaaagtgctgagggtgacggccccggggagcgctgcggctctacgtcaacctgcggcggccgccgactcatttggggccacgctggttgcattcgtcacgccggcgatgcctctcaaacccgcggcctgccgaggacgttcccacacgggagaccccagcgacgcgggcgcatctgtggctctcgagaaccgggccgcggagccgccgcgagcgcaagcgaggaatcggcgactgcgggggtggacagctggggcttgtagtcccctcgctaccctctattctggaagaggcgggtcgcggccgctgaactccagctctgcgcctgcccaggcggccgcacgctcaggggcgtggcatgggtgggtcgtgagttgggcggggcccacagggcgtgcgcgacgcagcggcgcggcgcgtggcgtaaggggcgtggcgccagtgggcgtggcgtggcgcagtgcgaagggacgcggtgcgcatgcgcgtgagggctgccgcgggtgggtggtatcgaggcctgtcgggtcagggcggttcgcgggtgctgtcagagctgggccggggcccctaggcagggtagccgggtcgtagaggcgggggccggtcgcggtcggtggagcgggatgaggatgtaggaggggcggacgtggcggaagccgcggggtccgcggggtcggtgcctctagggagccagggaggcctttcccgaggctcctggggaagaagaggcgaagcgagagtccctggggaacccccactccactcccagctggagactgggttgtgtctgcatggaccagagcccacagtgcgagttgctataggcaaccagccagggtggccagctccttcccgtttgcccgtgatgttctggttttgggaccaaagcatcctaggcctccagcccactgcagtgaccgaattctgcgccccctgcccatcttctcccgcagcttccctagattaggcttgggaggcaagaggaggcctcctgacctttcacactgcctttttaatattaagatgaagtcacactccacaactttcttccagccaggcccagacatgtccgtccttgtaagttaaaagcttccatgggagccttccttcctaatcaaggtaggtagactacaggaaggtacatcttgttttatattttgtcctgtagaagtcagatttcagcccagttgtgtaggagtgaggatgagcctatgcttatatcagagctttgagtacagagacatttggtctggaattttagtcagcctcttcaaccccagaatttataggttcaatcagaacagacattagcttaagttttcccatcaatcgtctatcattaaactggcaaaatctaaataattagaaaatatgacaaagatgatccagacagagatgttcaactttttccttaattcaaaaagcctcgtggtggaacatcggaccc

SEQ ID NO: 65385 - DNA, 1422 bp, Homo sapiens
aacccacatcccacaatcaaacttttaaacatgtaaaataataaaccaactcaccaagttagaagggaagagaataaacccccaaaggctcccaataaggcggaggcttggcctccccctccttataagccgctcggtaacatgagaaaaggattaaccccttagggggcgggcccgactctagcgcaagttggctcgggctggtgaggcccgagcgcccgggccctccacccactcccgcgactcgggcacccgagccacaccctccccccgccccccaccccggccgcctgcgacccgggccgtgcgtgctgccgcccgcgccccggccccgcgtcgctgcctagctcttatcctataccggctgcagccggtctccgccggcctcgggggcgcgccgccgccgaccatgtgctgcgagcgctgagcgcagccaaggagggggcctgcctggcgcgcgcgcgccgtcccacgtggacctgagccgcgccggtcgcgcgcccgccagcctgccgcctgggctgggggtcacgaaaggtaaccgcgtcgcggtccggggccgggccgcccccgccagcgccgccggggtccttggcacaacgccccgatctcccaacccgggtgcgcctctgcgcgcgtgacccgcccagaccccggagctttgctgcaacgctagtaggagcgcgagcgtgcagggtgttgggggtgcctgcatcctgtctcggagcacctcggccaggcgcgagcgcgcgggtccccgtccccacccccgggcgccttcccggcgcgcccaccgcccagtcccgcccgcgccctgaggatttagggatttagcggcgagggggaacacgcgcgcgccggggctgatcccgcgcggcgctcgcggctgcggcggcttcgcgcccgccccgggcagaacaggttccttccagtttgggtgtgagctgcgcgcgcggcgcctgagttcctcctgcagcgcccacttcccccagtttcgtcaactcgcgcacccccacagttccccttccggcagtggggagggagtgtcgcagtgggccccagggagcgagcggccgggccgctgcgggtgccttgcttcccccactttgctgcaccggcagcagcggcagcaacagcatccgcgttgcgcgaaaggaatgtgagcagccgggctgagtcagcatccccggcccggggcgcgcgcgcaccctccaggcagtggcggcgtcggcacaggtgcatggctcccatacccgcggggagccctctgtaagggacctggaggtttagacagtccgtgcccctcatcccgtagtccccgaccccaaggtcaccgtgaactaagcggatgatgcacgcgaaatctcaggagctcctcatggggacaaagcatgtgtcagatcctagacatttcagagcctg

SEQ ID NO: 65386 - DNA, 2293 bp, Homo sapiens
gggattacaggcgtgagccaccgtgcttggccgacctcagcgatctttattccaaccaccttattggacaaatgaggaaactgaggccaaggagaatggaaggcatccccgaggccagccagcaatggaggggtccacatcctctgaccatcactggctcattctccaagtcacgtgactgctctcacgcacaccttgttatactcgactcctcagccacctggaaaatcctatcttgctctttgaacctagcaattgtcaaggaaaagtctttagcccttgcaacagtctgaatctttctacatcggtgggaggcagagagggtttggaggctcaggctgggcttgaatcttgactcagctcagggctcagcatcctcttctcattaggtggggttgtggaccattctccatggactgttgggagaatcagtgggggtactgcccaggaggctcccagccttgcacctggcctctaatgataacccccattagactaaatttcttcattcctggctgaaacaacctggcggaaccccacccatagaagcattagaaggggattggcaaacaccctgaaaaagattcccccacaaaaggatcaggcaacttaaatcgcatacagataactttaaaagtgttcaggaactcttgggaaactttgttctgaagctgaatttcaggcacctcaagataacattcttttttggggcaaggccttcccagtaactctgatgtgggatcggtgggtgacagcacttgaattcatgatcgggctggggctggatgccattgccctcttttcttgggagtctgaaagtgaactttgcctgaaaggctgctgcctgggggtaaatacttcttcttcctcagtctccaaagcggcttcctgtcaactaactattccacagcctccttcttcctctctgcctggaatgctgctggagctctgggaagccaggcagcgccctgctcagcaggtggccatgtcctgtgagtcaagggggctggggtccctctggtcacctgctcctcttcacccagttccccatcagtgggacatctgcacggctcactgtacaggggccagactcaagagcagatgaaagagagaaggcggtcaatgttttcgcaacggagtaggacaaacagtacccggagtcgtgcaactttctccctgaagccaggctgctgcgtcaggccacgtgctgtcttcccctgttctcagggcccccaggcccccctgcttgtcttccctttcctttcctggccgagccgcccagctcagctgatgggatgaggcagcgtctcctggagtcatcttttcaccccgtgcgtgtggactgagaatgctccacttggcttgtgccctgcaggggtgaggagaaacggaactggggcgggggcagagcaaagcagccctgccttctcccgaagaagaagggcacgagtcagacacccctgctgtctctgagtccacagcctggtccaggaggcctggctctcccagcagccgccttcccttctccatgccagatctgtttcctacccaggacagaaccaacaccttgtttttcccctaactgactgctcctctgtctggaaaatcttttctcgttttatttgaagagcagaactgttccttcctcccccttggtgatgaggaaacattctgttgaatttggcatccaggctcctaggagaccttggttgtttgtaatttgatgctatcaggttgttgcataacctttcccgctgggaagcagtctctgcatcctgggccttctgtccagtttggggtcgggggtggggcggggaaaagtcagaggtgctgtgaggtgacagagcaagggataagggactctggctgttggccctggctggggacagggcctgctgatagggacctagaggaagtcaaactgcgtctctttctgggcctttggccaccaggcttggtggaatgtcctcatcccatactcagggccaccccaggccagccggagtcctgggtctgaatagaggccaggccgccctgtgtttctagaaaacgagtacactgtaggcatccttggcaaggggacatactacacttagaaacaaagcctgcttctttattttatttttgtagagacagggtctcactctgttgccctggctgcagtgcagtggtctgatcatggctcactgcagccttgacctccggggctcaagcaatcctcctgcttcagcctccctagtagcttagtagctgggactgcaggtgtgtgccaccatgcctggaacactacaat

SEQ ID NO: 65387 - DNA, 2772 bp, Homo sapiens
atagcaagacagtatctgcgctgttggtgacacataaatattttacaattgcctgttcacactctagacccttttaagataaatccctttagaatacaaggtctgtggacctgtgatcatttgggtggctggcatatataattgtgtcttcctgttagagccagaacccaggatgtagcctgcactaaccaactagtctgtacaacaaaaagaggggattgctccttaagtggccacactgagaggcttctctcagccaatctttttctttctcctaattcctgaatcttttgcaaggagattgtctgctttgttgactacacctgttttataactagctggattcctccaaacccctccagctttcagtcctttgctgaaataagacaagcacattgaaacgtttttctctgaagagcgtattaggaaagtcagtcacctacaagagagcaacacaaaaggttgtggcaaacgagaagaatccctaattcttgaagggatccctaattggtgaagaccaattagcaaatttattaattagaccaatccctaattggtgaagaccaattagcaaatttattaactaaaggtcagtttacccttctggaaacatcctggaggcagagaccaaatcctgtgttcaaccctggtgccattgcccaccccagtgccttctggttgaccgatagagctaatggcttgtttcctggaaccacagccgtgatctttccttagcatctggcctcaaaggttaagcaagactatttgaatagtgtacaccatggacatgcagataaacaggctccccgttttcacccacccataccccaagcttccacaaagatgcccccacgggggtggaagtatctacaaagccctggcacatgcctttgagcggatgcttcctccctgccctttggccctaagctgacgcataagtcatacattccaaagccacgtggaaatgcgttttatgcttgctggagttctggattctttgttccaagtgcgtgaataaattggagggagctatatgtatttatgggagacgtggccctcgataggaaggatgtattagagaaatgctgggctagatcaaagagcgtctcattcagcctgcagagactccagttagatttttcaaccccacacccttaaacataaacagtccataggacataagttattttgtgttttgtttcttacttcaaaacttgagggactccaaagctgattatgaaagagtcctaagaatgctgagcatttcccgtgtggtgtgctgggccagggacatcaaaggttccgtttgcaacagtgctagtacagggcgacagaagccttcatcttcttcctccccacgcttctccccacataattgctttcattattcacaccagccaaacaaagggaaattgcatgaccacagtgtgtgtgagccacacacagcacttgccttggaaaggctgtgcacacgctaactttgtgggatccttggcccttggctcaaccaggatgagggtggggtgtgtgtgggggtggtgggatggccgtggttaatgcaacccaacatgtattcaggatgtttccatcaagcatgacctcatgtcttccagcccgctagctatcattatactggtggtcacttttgacttaatggttacaaaaataattcctttaataaccaaggtggaaattcatagattgcacgtagttgtttcttacctcccccaggaggcaagaggttggaactattactgacactgtctccataacatcagaacaactcatgaattcaaggaaaaacaaagcaaagcaaaacaaaataaagccataaaatccatgccagatcggttcttggatgttgagcagatcaaatagctgcagaagtttccttctttctctcttctttaatagttgtatttcttcatcctaaacagacagtcacattatgatcaccaggaagagaaattcacttactcaacaaagatttgctaagccccactatgtcttaggtgcatgagactgatgaagtctcatggtgttgagacacaaaacaagcaaatcaataaatgaaaaaataatttacagtggggaaggtctcatgaagaaaataaaatgaggtgattcagtagagtgaggcaactttttacatctgaagtccagtaaaataaaaagcatattttgaaagatactagctagttgagggaaatagctggttaccaaaaaagtcattcctttgttggggttattggaaactcagagaggggttctcccagagactagctcttagctgaaaagaagtctcgagttatcaccatggatgaaccagctgcctcccctcctctcacagggggaagtccagccaagcagacgacctgggaaggagggcaccgggtcccagcactggcttactggcctggcagagttccagttaatgtcaccagcactgccttgttaaggtatgagaccaaaactaccttgagatgttggggcccagagcaagaaaagtcatggaggcatgggtggctagatggaggcatgggtggctagatggaggcatgggtggctagaggcctcaggaaggtcattcaccacttgcctttgccgggtgttcccagacacttccaagactctgactgtagaagtgatgaaagtaatagtgaagtggggccacgtgtggaggctcgcttctgtaatcctagcactttgggaggctgaggcaggaggattgctgaggtcaggagtttgagactatcctggtcaacatagcaa

SEQ ID NO: 65388 - DNA, 977 bp, Homo sapiens
taaagactcccaggcccaatttctttggtggggtttgaggtttggagtagctggggtgcccttggtagccttagtagggtggatgctttcttcaagttctcatgtaggctgggggcccaggcctgggatgactttgggctgcatgtgccagggaccgtctccctcttccagggctaagctcttgggcttggctttttctgttacttaaggaaggactatttgacagcccaagcttgccaaatcgggatggggctgcctcgagtggcctgagtcactggacatgttgaagcttttctcatgggcgagaggctttctttgtgctccaggtggactaggtacctctgaagttcttgccaaagtctgagacattaggattccgtgaacattagacttagtgctctataattgggatgctaaacctcaggagagagtagtggggggaaatcagatggaaaaagaaagtacacaatactttccaaaatcgaacgcagatcctgtttctcttgctgactgatttgacccatctgtgacgctgatctctcttaggggcacaatttagagaaaactcgagcaaacagctccaaaccaccgcggccttttcagactgctttgtggtcctctttgctttccggtatgtggcaggaaccttggactctggacaggtttctggactgttccgtgctctgcgagtgctgactctgcattcttgactttgcatcagagtggggtgccaggtcctggagcttgtttcttaagagataagccaccagctccatggactgtgggagccaaaggcaaacagaaacattctgcactgtagtcaatggagagattctgcctggggttgtaggtagagccctggagaggagaaggagatggccaacaggagacggagcctcagagcaggtcctttctgcagcccccttagagggcggatatccccccagcccctcagatatcagattggggaaagtggg

SEQ ID NO: 65389 - DNA, 1833 bp, Homo sapiens
tcctgtttcctggagagaaagcagtctgcgcccgggaaaagagtcttggactccgagaaggagatcctgcctggctgggtgggcgatgtgaaaacagccaaagaaatccaaaggtttcttccatccagagcgggcaggcacgatgccctgcgtcggggatgggacaggggctggcctggccgcagggataggctgcctctttgtccgaggccctgcccagatgccacgttgagatgctcaaggacaaatgggaaagtttttcctgtactctcatcttcctgggccccaactacagagtcctgggtcaacttgcaacttcctctcctttctcatctctttcttttggccactgtctctcttccccagacacccactttggtcactggctttcccaccgccctgctccccccatattccgtggcccccgcagccccaccactccctttgcgaactccctgctttcacccttggcccaaccttgtcgctctgggaggacactgggagtggggtggggtggggggtgcggcaaaccccactgaaggggtacggggataacaagatcccaatgcgtccgaagcagacaccggccctcccgccgaggccgcctcgaggcggaagccacaagctgctctcaggacgacacccctgggtcctgacactctgtcccccacctccctggcaggggccgagtcgcagcttacgtgcagtcctggttgaaagagaagcagctgagcgccgactcaaccccgcccgggggagcgtccgcggcctcggcctccatcgggggctcggcccgggaagccgcagctcggagccggcgacagccacctcagcagcccgcccgcgccggctccacgggccgggtcgccggtcctgccccgcccctaccccgccccgtccccaccccgcccctaccccgccccgtccccaccccgcccctaccccgccccgtccccgccgcgtccccggcttcgccccgccccttctcgcccctccagctggtcccgaggaccagagcacctgatagggcggggcccctgcctccggccaccattggccacgagcccaagccacggctggcgggcaccgccccccttggccaatccgtggcagctgtgggcggacccgcccggctggcgacccgcccctggcttcgtaacgcggctctccattggacaaaggcgcgtgacgcaaaggcagcaggcccacgtggcggtgttttcattgccggagccgcccagctgggagggagagggaagaaggaatgcggctggggccagatctgctggtttcagtccggcaactgcgtcggggccgccgcaagggtgacaggaggacgcgctagttcccaccccgcccagaccccttgccatgtgtaactctgcctattaaacttacagagtttagcagagagcgttagactccaaagccccacccttttgtcgagtcctcaagccgcattgagagaagctcctgaaatggggctgcctcagccagagagatagcaagttatcttatccattgccgagcggttgagaaccctcactacttgccaagcgcgccgtactatgtatgtcatcttgaattcttataaaacttgtgtggaaaatacgattgtgctcaatatacagaagaggcaactgaagctccaaagctaaacaatttgtctaaagtaacagtaaatggtagaatgtctgcatgtctgctttcaagacctgtgcactaaataactgctaaacagtaatttgcaaaaacaacgtagcacctagcatgcgagattctaggttttctaaccaggacagaaatgactgcagcatttgacggagctggaag

SEQ ID NO: 65390 - DNA, 688 bp, Homo sapiens
aaaccaccaaatatatttctatattcatgtgtattatacatagctatatatagtttaggtatcttcaattcagctgaaaaatgttaagcctaaacatttccaaatttagagcatttagtcacatcaactctgcttttccctggggctaagtttttggaaaggtagggagtcagctgtcatttctgctgtttttaaaaaggtgaagtgtgcttcctaacaaataaaaaggatgctgacagaaggttactttctgcgttggactccccaggcgtgtacaggaggtgtttgaggcttgagtgacttgtacagcagtgccccgggggcccgcttgatctccggttgtctgatgtcacacatagtgagaagtctggcaacaggaaggcagcgcggccttgggctgatcccgtgacgagtggtcagcagtgcaccgtgtcaggcggctctctacaaggatttctcaatcagcttatcaaaaataaataaatagggcgggagcagtggctcacacctgtaatcccaacactttgggaggccgaggcgggcggataacgaggtcaggagatcgagaccatcctggtaaacacggtgaaactccgtgcctactaaaaatacaaaaaattagctgggcgtggtggcgggcgcctgtagtcccagctactcatgaaaatcgcttgaacccaggagtgga

SEQ ID NO: 65391 - DNA, 2434 bp, Homo sapiens
atacagcccttgaagtatatacaatgttactacaacagctcctggacacttgcatatgtgtgtattttgcttttttgtattgtgttgaatccattatgaattttaagcacacggccctagaaatatatacaatgctactaaagcagcccctagccagacacttggacatgtttccttgatgggccttctttattgagttacagacttgatgtgtctaaaattgtaccgtctcccttttcttcctccttagacagatactctgatggaaaaaaaaaatggctgaaagagtaaagtcgcttttcctccgaattttccccattagtgcagcttgtctggacagctgcgatttcttgttgggtcacagggcatttttgacaatctgcacgctctgcacttctccctctgtgaggtcaggagtgatgggggggcacttcaggttctagaaggactcaggcctcctcttggaccctgacaaagtcctttcccgtgcctggtttccacagggacggtgttgcctgcacagacgacagcacccccggcgggggagagcggccccagcggagactcggcagggctcaggtttcctggaccggatgactgacctgagcccggggcccgggcggcgctggccgggcacaggatgcgcggcccggagagcgcatcccggccatccgcccgcgctcggccccgcagcgcagctgctgcagatccgcgggggccgccacctcctccgggggctggcagcgacaggactctccccgccccggcccggggccctcccttgcaggggctgcggggaggagtcgcccacctgtcatctgagacgccccacgtgggtcggccagggagggggtggaaaggagggagaaaaggcagaggcgtcaagggaggccggagggagagtggggtggacagaggagcggagggacgagagggaagcgcacgatagctgcgcggagagagagcgaagagcaggcggaggaacaaaggcgacccaagacacccagagagggacaggtaaggaggggcaggtgagcaggaaggaggagagaaccgggctagggagactgcggaaaggagaagtggcgggcgtgaggaaactgctgtggataagggacgagtaagatggaaagaatggcggaagacgaacgaccgcagagtgagggtccttccaagagcgaccaggggggaggaactggggctgttgcgcccttaaggttgctaaggcgacggttctggccagagcgaggcgcattgacgtcagtagccgaacgctgattggctgcggccaggccgtttccggtggagctgtcgcctagccgctatcgcagagtggagcggggctgggagcaaagcgctgagggagctcggtacgccgccgcctcgcacccgcagcctcgcgcccgccgccgcccgtccccaggtgagtggggtcggccgggggctcaggcgaggtgagcttcgtcgcttcgcagccggtttgcgggagctggaccgatccaagatggcgtcacggggagcgacctgcagggggacggccgcaccccctgcccctccccggcccggcgggcgcctccccgcaggcctcacgcccccggctccgagtctgcatcctcaaggccgtctgggcgttggctttggtgcggggctccccagccgccccgctcgcgctcgctgcccccaccccacggctcctggggccctgggccctccgcggccctccccggccgccttcgcccccgcgcgccgcggcctcttcgctcaccctcccccatttcctgaaggacaacggctctattttactggggtccgccatcgtctcgtccgccggtcctggctcttcttgtaagccggtagttttcctctccacttttgacgactcgtcattgctagcagtagcctttcctcttcatagcggagtgatctttcccccaacacgacggtcttagtcgggctcctgaatttcctcttgtcccctttcacctctctccctttcccaattttgcccccctgaggcctcctcgccaccactgtggccttccgactggcgtagcttgaagtctcggcttcccttcattttgtggtcatgaccgtggcctacgtgaagtgaagggcattttcctgcccttcttctagaaaatacacggtacctattaacctcttcagctcagagcctgtggtgacgaccgtcctactccttgagagattcccaagagatccgtctttttagcagagcgaggaaagcaaacacttactcaagatgaccctaggggagccgtaacttggctggtctaagggggtgcggtctgaatcaggaacagtttctcaaagtgtttttatttatttcccagaatgtaatcctttcgaaacaattttgtcacaactgaattttcaaaagaatgaatctgagtgttttgttttacatagagacaat

SEQ ID NO: 65392 - DNA, 1086 bp, Homo sapiens
ttattaatgtttcttctccaattctgaaatacttttgagtatggctatctatacctgccttttaagtttgaaactaactcatagattgcaaatattggttagtatttaactacatctgcctcggctcacaaattccgattagacctttatccagctagtgccaaataattgatcagatgctgaattgagaataagaatttgaggtctacattcttggttgttaatttagagcgtttggttaaagtatgtccttcagctgactccagtataatctcctctgctcattaaactgattccaggagattggatttgctgtgactagatacagatggagcaaatgtcctaacagagaaatagaggtgatgctgctaaagggagaaatgccaggcggacaaagttcagtgtcgggaattttccccgtgacattcactggggcatgagattttggaagaagttttttactttggtttagtctttttttccttcctttttattcagctagaatttctggtgggttgatggtagggtataatgtgtctgtgttgcttcaaattggtctgaaaggctatcctgctgaaagtcctgctttcctatctagcatttatttctctggcaaacttttctttcttttcttttttaaagtaaacttgtgtattgagtcttaactgtatttcagtattttccagccttatgtgttacattattccaatgatacccaacagtttatttttattatttttttaaacaaaatttcacagttctgtaatgtaggcacttttattttcattgtgatttatatataaggtaatgtagggttatatttgggagtgactgcaagcatttttccatctgtgtgcaactaactgactctgttattgatcccttctcctgccctttcccaggtaatttaaattggtcatggtagatttttttcatagatttgaaaaacttttaggttgttaccaagtatgaagtataaatctggggaagaggttttatttacattttagggtgggtaagaaagccaccttgttacaaattttttaatttccaaaataatctatattaaatgagggtttctgatct

SEQ ID NO: 65393 - DNA, 2139 bp, Homo sapiens
tttcttggaggtgatccaatgtgctggggaacggttaggtgtgtgcagagaaagactcattttaggcaccagaaaccgagtctcagccaataatcctgtgcttgaacttgatgcagaaccaacagtgccacccacctgcacgagaccaggtgatggaacatggactatgggtcctcctcaaatgtgctcccagacaccctaaggacattgacccaacatgaggggcttggggtaaggagctccagtgatgactcagactaaatttctagccaaccaaacagaaaagagggcctagagtccaaagtgattggacttttgaaaaataaaccaatgctatgttactttgatttttgagtttgtagagcaaaatccatctgaattcatttacctattgagtgagagtagggtaggttctgttagagcaacagcttaatcctgaaatcggagtggcttttcaaaacaagagcttatttctcactcatgctacttgtctcgtgaaggtcagtagggattctgctccacacactgactcagggacccagcttgatgaacacaccaagatcccaacaaatggtcttcacagtcatcagggcaagaaaagagaggaactggaagatgaagtgctggctcttcaatgctttgggaagcgacgcagatcacatcaactgataacccattgtccaggactagtcacatgaccccaactaactgctgggggctggaacacacgggagaacaagtggactttggtgagcagaaaatgcctctgccacagcctcttggtacttattgaacataggatgtgtcttttgatttaatactattaatagtttgcatttgcataaatctcattataaaggcattttaggttatttccatttattgtcttattctcctctcctcaagctcttaaagaaactaaggtccacaaagtggaagtaacaacataataagtggaaaggaggaataaaagccagggttgtgacctgagctttttctgctcttccacagtggctgcagagaaacgaatgctttgtcaagaatttaatttgaatttccttggagccttcttaaagatcatggtggtggtgggtggggggagacacagaacctgattaactgtttgctgttgagaaagcaatgactgtaccaagattttactgagatttttgcgaaatgggctggtttcccgaaatgggctggtttcccgacaaaaactcattcctttctcgttaaaatacaattgcttcctcttctgggagctggttttatgctatgttgcaatgcacctcttgtttccactccagctaactgtgtccttaaccttatcctgacctcatagaaccacagccctggctcagcacttaagtaaaacccgcccagagaggggcatggggcttctgagctggagtggccccgaactggaagggacttgaatgagaaggggcatatcatggattgtcccagggtggaaaccacctggacttctgccttggtgagcaaaaatcagactcaagaggaaccagtgtcccaaaatgggcctacagtgtgaatgaggaaaatagctaactacctcttatgtggcactcacatggggccaggcagttttaagcactttgctcttttaactcatttcacccccacagaaactcctcataaggtcagtattattattattaccaccattgtaaacatatgggaaccagatataggcagcaaaaatgacacctccaaggtggcactgctagtacaaggcagcgttgcgatgacacccgagtatgacatctgaatatgtgtaagatactccaccaataatgatttttccccctgattaggaagaccaaaaaacttttgtataaaaataaaaaactatggtgcataaggagggatgagttggataacttttaaaacgtctgatgcttattgccaacttgccctccagaaagagaaagcaacctatacttccagagcagggtactgggagtaattctgcctcgataatctctgggccctgatgcaaaggggtgtactgtgacagcatggctcactaagcctcctggacacaaatctcttctcaaattggtttccaggactcaggctcagacatgaaataaagttaaactcagtgttgagtttcgg

SEQ ID NO: 65394 - DNA, 728 bp, Homo sapiens
caaataaaatggctttaatatcataaactgcaagcagccttaacagaccactgtcttcacaactgccaaaaagagctgctgcggaccaactgctataaatcctagctcatcatatttggctgacttcccctgccttttaatgattttatagctaataacagaacagaatgtcgtctcattcagttacttggggtgtacattttgcagtgagttaaacccagagaggccactggtgagttacgctgataaagttaggcattcaatggttgctttattgatgttttttaatacctaaggtaggtgtttggttacagtctcttggagtatttttccagccaaacattttgcagccacattccatggcatgtggctttgaggtattgattacccgctggctcgcctgtcacagcagattcaaaggtattgtctgaagggaatctaggctggcccttagacctgtggcttccctgtagacagaggtcagtggctttgagttcacttgcctatcctgtttgactccatgacttcagaaagagccttttgttcctacctctaagttcagttaattggtaaatctatttcttttttttttcaaataacaaacactatgtttattaatatccctctattcaacccctctgcctcccacacttccgagtcttcattgtgtattattgcactctcttcatccgtgcaaacacattcttttttgtttttccaccaatacc

SEQ ID NO: 65395 - DNA, 661 bp, Homo sapiens
actttaagttctagggtacatgggcaaaacgtgttatttttctgtactgaatgacaaccctgaaaaactgcactcaaagtgtttctgaaagttttatcctaaatgcactgccactcaatgtcagtgaaaagccctgctgaaaaaatccaggttcatggagggctgcccaaagaatgtgcctgctgccctttcctctggagcctcagcaatttaaattctctcctgagatgagacaagaaagcaggcttgatcaccacgatcgcgaatgggtggggtggtgcctgggacatgactttggaatttgctgtggggcacagtgctagcagagagactcactgagagccattgctgggtaattcccctatggatgtgatggaaaatgctagtcctgacaccatacagtgtcctctcttggaggaggtgaggcgagaaggacaaggaaggtattcatctgcctagtcactaccaggaattaccagtgaattacctagtcactaccagtgcccttcctgggtcactggctgctttttaccttatagacatggttggtggctcctccccaccaagcagggctgactctgtggtgggaaggttctcatggcaagtgttctgagaagttcctcactcttggctccactggtcttgtgtatccttctttttc

SEQ ID NO: 65396 - DNA, 1746 bp, Homo sapiens
ttgcatgcaaaaaattagccacttgggttctcaggattgatgagaacttggttgtggtgaaagaagagtgttgttaggaacaatggaacagcctctggttctcagctgaagggcttcattttgatctatttggaagcaggaagtgcctgtctttcttggatgaatgacactgatgctctccctgatttaggtttttgctgtggcaacagcagtgaggacaggctttggaatgagggagaaaaaacctgataatggccgtctggaccagccctctcagaaaccatctgcttgaagcttttgattctgagaggagtggagaggtttcctccaactacaagttcagggatttggaaaccactaaaataatatcttttccaaaactagtccagcaaggctctaattgggagaaatgggaaatggaagtcaggctccccactctctctgctaaccacacacgggccgtggttgaggtccatttccaaatcacaggaggccacttcctgtcttagcttagcattgttggcgggagaatctaacaaggggccaaggccctgttgactctgggagagaagcaaatggccaccatccatgagtaagaacctggactttcatccagcctgcgggttgaattgcctgctcacaagaaatctaggttcagagcgttctagggcaggcacaaaataagcaggacagagataaaaagatgggagtgagaatggagagattgtatttttccttccacagatgccatgggggagctggggcagggaggagcttatcttccccaagctcctagacgaggcaattcttatttctagctgaattccttttcatctctcctgacttcttctccacccttctcctctatctgccttggcttctggatcttctcaaagcatcccccagaaaaacttcagccaacttactccctttgaccaactgtcatttttgaaaagctgcccagtctctttgcggtgattttcaaagagagacccaggactaggttttctttcagtgacagcaataggtaggaggaggggtgaagaagacaggagtttctgatgtgggaaaccacacacacacacacacacacccctaagaaatgctgaatctgtaattgcaagacaatataaccttcctgacatctgaggaagatgtcaagaaagaaaagcaaaaactcatatttgtgttatagctgctggggtttctacattagggagagctgaccctgtttgaccttgcctgtcgagaccagagggttacagagagactgaccaaagatatgtggccaaaaggccaatcatatgtgggcaaaactggccaagctgatcagtttgacacgtcaaaagacagatgttgtctgacttgggcagcttgtgggccagagaagaaatccaaagctcagtatctaagaatgcaaaggcgagcaacagtgtgaaccatcacctgtgctccaggtaaagcctgcctgccctgcgtcatcacttattcaagcaaaggactaagagcagcacaattctggcttgttagtgtatggcctgaaagtgaagacttcatttcccttcttccctgtgcactttcctcgtcactgttcaatacaggtgccaaatgtgtcatcatgcttgatggagcctggcgttggctggctggctgtgatcagcagctgaccacctgacagaaacactttccctaattacatttttaacttggattgtgccacacttagttacatttttggggggaaaa

SEQ ID NO: 65397 - DNA, 4467 bp, Homo sapiens
gcctggccctcatatgtttataaatcactagattttaaatattggcagggctacaaacaaggagagcttgtctgtgaagagaaaaacaattagcaaggtccttcattgtttcttcctctgctgtccattctatttatttgtctgctgctaggatctaggggtgtcctcgaccctgcacataatggcaggccccctgtcttcatcagcactgctacatcctcatatttggcagggagcactctcatttaaggtaatgagtgactccctttcacaatagaactctgagtgtggctcaaattcaccctggctaatgaatcttctgtatggttttttttttttttttttctgaggcaaggtttcactgtcacctaagctggagtgcagtggcacagtcatggctcactgcagcctcaaccttctgggctcaagcaatccttctgtctcagtccctcaagtgactaggactacaggtatgtgtcaccactggctattttttttgtttgttttttgagacgacatcttactatgttgcccaagctcatcttgaactcctgggctcaagtgatcctccctctgcctctgcctcccaaaatgttgcgattacaggtgtgagccaccctgcccggccttgtgtttcatttttaaccctgatataagtaacaacacatctgcttattaatatgttcatgttaacatttactatccagtttgggtggaaggagagtgttctctgcctctgaggtccagttttaacatttataagtgcagcgggtcctcctgttgtggcccacaaaccttacttgggaaaatgtcacatttgagcaaccacacaaaactactctgtgatctctgaatatagtaaggtcaccagcccccacttgatcttctgttaaatgaccaagatcatttctggtcagaaagtatgtgtgtttttgcgagttttttttgtctttgttgacacataatggtgtagaaatcaagcttaaaactgattgtagaacagtttggtgagaaagatttttgcttttctgccataatattcccctggactttgcttcgggtccaaagtaacaccgggaagtttaagaccacagaaatgtgactaaatgaatgctgatcacatttacaaaagcaagtgactttgtccaaagtctctcattctcagatccatagtagacatatagatactttttctaagggcaaaatttcctggttcactaagccagacttccatgttattgacgaaataaagataatattgaaaatgacagtgtctgagaagcaatctcaaactgccttttattactgcacacagttaacgtggaattgagaatcactttctttctaacataaaatgtgagccgtagagttactactgaaattcaccacagtgattcagccaacaactcaacttattcctttgcaaaaatttctgaaggtttttttttctcccttcaatctcagcattacaaaataatgagcaaacagttaaattggcccagctctgagtttcaagagagatttatggtctgctcatcctctggagggaccataaaaccaccgatgacatcttactttgaaatctcttgtattaagtaaagagatgggtgtggtgcgatagtgaactctgcatgtgagtggtatttagacaagttctgtacttcaaaacagagtccttaactcatacgaaggcttcctgccactagcaagggatctcagtaatgagcgtgctgccttccctaacacccccatccttttccagaaagattcttaattttatcctaaatatatttgatattttttcctctgtattttgctttgggtttaaaaaattccctgaaagatttttttctcgtctgtggaagcatcaagccgcagatccaagtcagtccaaatcaccaggatcatacaagacgataaaagtgccttcaagttctaatacttgctggatgggcccaagccgcgttttaaatgtgaacaatggggtggctgcggcagagaactgaccatttacttcctgcctcagatgacccccttgtgatctctgaaactgggcagaggaataaggaaagggaaagaactgggttttggggagaaacatgctttctggaaggcgcccaggtttacccaaagagcacagttaagtgctgaatttcaactagctctggagtcaccctgtttggggcctcattctggaaacccgaagtccagcggcagctttcctccacatcaggacagagagtggggtttgggagcggacgagggagcgggagtggacgagggagcaggagtggggctcaacgacgacccaggcgctcaaggggaaggggctgagagcgtttcttcgctgtgcggctgcaatagaaactttttcctcgtactatctgactccgggactggactgtgaggtctgcaacagctggtggggttcgggtggggaacacactctaagcccagcgccagggctggagccgtgggtggagccgctgcagccctgggccgggggcgtcaggaaactcgagactggggcgcggggaggccccggccagagcgcccgctctcccgcgtcccgggcggggtcctcacctgttccagcgggccaccttcctccggtaataccgcagcgcctcctggctggccaggagcgagtcctcggctcccaggagaggcggctcctccgggacgttgtacagcgggtgggcgaagagggcctgcaacttggagctcgacccgctgtggctgccgccagccggttcagtccggggctcggttcgggaaaagttgtgcacgatcgtgccggggtccgaggcagctgcggccgagtcccgcgccagggaggaggcgcggccggtgcacgggcacccccgcgggcgctcccgaggccgcagctggcgctgtacttggggccagaggtggaagtagaggtcggcggagagcagcgcgcccagcagcagcagagtcagtaggcggtcccggcgcagccccggcatggcgtgctggccaagggggacgccgggggcaggccggctgtctccggggtcccgggaggggtcgcggggtgcgggcagaagaggtgcctggagtcccgcgggtgggccggggtcagtgagaccggaatgctccccgcgcgggctagtcccctgtggaggggtgtcgctcctcaacttggggaccaggtgcacggagcaccggggctctcggagtcagcgggcgtcgcttctccgcgccgagtgagccgagggaatggggttcccggggtgcccgcttcttgcgccttttctcccgtgcgcccgcccgcccggacgctcgcggcaggtgaagggccccggggcgccggcgccggctgccaccgcgggcggacgggcgacggggcggggggcgaccgcggagggcggacggaggccgccggctgcaaagcccggggcgtctctcctgaggatgctgtcgctcggcggcggctgctagtgctcccgcgactcctcctgcgggcggcggagacgccagtgccggcggctggcacgggcggcgcgagtggggagttggcgaagcaggagcggctccggggagcttgtctgtgcgcctggactcctagaggcagaggtagcgcggggcctccccgagcctggcctggcgccggcacccccacccactctccgctggcacctgcctctggcgcagctgacggccaactcccgatccgaagccggcgctgcccttgcaccttgtcacccacccactgcctgcgccctccccctcgctcgggcctcccactttccctgcccaggtctcaatccagtcactttaagggactcacgcgaggggtccgaagcctctttttaccatttctattatttttagggaaaaaaaaaccaccacaagccccctaaaaccctttttttcctgtaagctttgccaaatgagtgtgtgggggggggtggggggaggcgggggtggcagtgttggtatctgttctttctttgtgttcccttccacctccgcccccctgcagagcgcagggcacatcaagattcataacaactacctaccacatgcctggcacatagtaggtgctcaggaaacacgctcttggtgaaggaaagagcttgacctttaaaagtaaggtatcagttttacctagaatcttgctgatttcctgtttggaaggagtttgattccaactctgcctgtactttaaaaagaggaaatgtttcttgcactcagggagggaggggccctgatgaccccactccgaacttttgagtttagcttggtgtgaaagtagtccacccaaatgaatcactggaggacacatttaggctttctccaatattctgtgaggtaatgtaccctccccacacccagttttccttttgaagaagagggagggagtcctgaactcctggctcctctatttaatgaccccatagtatagtaaagtgaagtctgattggagaggcggccccaccc

SEQ ID NO: 65398 - DNA, 759 bp, Homo sapiens
ttgaaaaggaaaaatttaataaaaagaattattaactagtaaaagtgataagacacctacctgtaaaagggatctagaagtagcagctgcaaaaattaaaaaaagaagctgctacatctaagctgaggaaaagtggatctaaggactaggagggttcccctacccttaagccaaggctgaagtttagacctcgttatagagagcatgtttaccactggaaaaaaacagccactgttggtgaagaaactttctggatagcaggccatgttgatctgtcaaagagcccatgggaggggctaccgatgcctgaggccatggtcagagctactgtggaaacaaccacagagtggtggtggtggggagtgcgacttgatagtgtggttggagctagttggtgaaggctgcagggctcccatgctgaagtaaaattgaggactgggacccagagaagtgtcttcctgccactactgccttgcagagttcctccagcgccctctattgacaaagcctattattgtgacaactggtaaaggaggaatgtctagagggtccagctccagtttcataaagcccaacagagaaaggtaggtttggaactgagaggcaacaaattcgtaactggtacagactttgacttctgaattccatttataaaaatttgaggaaatcattaaagttgtatgtaaatatttagataaaaaatggttattacagtatagaaaaaaatggaaataagtgtaatgtttgaaaattgaaaac

SEQ ID NO: 65399 - DNA, 997 bp, Homo sapiens
ttgttctcatttgcttccaggagaaatcataatattaaggattcttgggagtgagaaggagacataatatattctaataatattagagtcacacgcacataggaatcacatagattccttggtttcatccctaaagtttctgatttattggtgtaagatttagccctagaatttgcacttaaaaaaaatcaggcctttgctcttcctgcagcctactctgttatttgtaaataagacagcaattgggcaaccagagctgtgagaaaaaaaaaactggtatagcaagtgattctttagggccactgttgctattttaataacaaaggatgctacaaataaacccttcagtcctgtcatttccaaggccattttgacatttatttcaataaataacaacaaattatttcaataaataacaacaataataaatagcaacaagctggaggtgtctttctaactaaatgaatcagcaaggcctccccccaaaaagaaaaaggaaaatccaaaagcaccagattataaacatcactgttgagtgtctttcagagtgaatggagattatgccattacacccacacacttctctctcttctaaaggcaccatccgcggaaagattctgatgctaacatcagtcagttgttgtggaagatgacctagaatgaaccattgcttctttttctaccgtctattctggaaattattaacagatagattcccgagccagaagttgagaaaacactgggaggttgtttattctgatctggatttttagagatgcaaatgcagcaaaggagttatgaacataatgaagggaatcacagtattttaaccagccatctgtacatcaaggcctcattgtgtcttcctgaaaaaaggtaaatgggtgctctatttgtcaagagaggagaagtgacttctggaatctttacttctgataactcaagtccagacccagcaaattagttcatttataaagcatctcatttctcagtgcca

SEQ ID NO: 65400 - DNA, 1454 bp, Homo sapiens
aaattatgtgattaaatagaattacattttttattttggataggatttctcagggctttccacctgctattctgaattatgtatctttaagagggagactgtgtgtatattgtaaaagtcagattctaatgtaaaagattctaatttcgggtcatggcagtaacactgcaccattggcacatggtttaaaactgcaggaacacagacattgatctgtgtgcttatgtaaatgtgtacactctaaaaaataaacaagcaaatactatatgtatacggtgaaggtcagcagtggcggggaaaagggaagactttcgtgggagagatttagggaggttagcacctttaactgaaggtaagagtccttcattctaattctgaatcactgcgttacgttcagcatatctggtcctgtttccccacatgcaaagcagaaatttaaaaagtaaagacatctcaaacttatcttgcaaaacaatacagggattaaacaagcctgtaccattaaactgttttgcactctgtggtcaaggacatggcctaatggcaggttatggtcctggccaccagcaggattaaccaaggggtttgcagagcaggcacaggcagtgtctgtctctccaggaccgcgggtagggcagctgacatcctggggtcagggtgagtcatgccctgtgtgcatgaacatgcaggcatgcgtgcagcaccctcgggctccaggggcttaaatttccaaaagacaaccctgaaaacttgaaaagtaagaaaatctagaacaatgagtaggtggcctagcttttgtggcaggcagaaacaagacaaaatggcgagttaaccatattcctattatgtgggggattttgtaggactgtccgagtgactatttgcttagagtaggttaaatcctaccaaagaaatggggctcccaagaaagcattcattcccaaagtgaattttcctgttgatagtgttggatatgtttgcagtattcacggtccaaattttatgctttctctttcccattgctgagtcactgggctgtcttgaaatctgaggggaaaagtctgtgaggcgtggccggcaactaggaagcctggctctttctagtagagcatgaacgccaccttgagttgtgtgtgagcactgccgagccctacttgacatgatcagcagttccgagggatggagcaaatgggactggttcccttttgcaacaaaaagcagcactatcaggcctgggttgtgtcttgacacccggaattattttttagcaaaatgtaataaatcaatcagagttccccagagaaacagaaccaagagcatatgcgtgcataagatggagaaatttattttaaggaattggctggtgcaaatgtaggggctggaaagttggaaatttgtaggacaagccgcaggctgcaaactcaggcaggagttgatgttgccatcttgaggca

SEQ ID NO: 65401 - DNA, 2769 bp, Homo sapiens
cacatttatctacatggcaaaccttgaaagaagaccaaaattttagctatactctttaccatcattttcttctcataaactggagctgacaaaaagaaattgacactatacacgttgctattttttctgcatactgattctcaggcttggagttaatttttgcagggtaaccttggactgtttgttttatttcatctttctacttctctcagcttttactaactccggtcacaccaaaaacaaacaaacaaacaaaaaaacacacacacacaaaactatgacatcagaccaaagttacaaagttaccacaggtctaatcctattgctaggtagtcatgcttgctggtaaaactgtttttggcatctttatcactattcaccaaaaccgtaattatcaggtgacatctccaggtccccaggggtgggaccttgttgcatggcctctgctgcaggtcatctcagacacactgaggtttcctacaacttcctctgagccttcctttgttctttattgcagtaactggctaatgctagattccaaggtggcattcaaagtcaatcttcaaattccatgccaagtggagaaacatttaattctggggttgtttctagaagtaaagtttcattttagcaatcttggcttctctcagggtttctgacctgtgacaactggggtgtaaaggacaacaaaataatattacatttaagaacaagtgatgggattaaatgtttatttttcatctaaaactttaaaaaaggaagcaaatgagtaattccgtgctgccttttcacaatgtcatgtaaaatattgagtgtttttttaaataaaacattttttcccattgagtataaaatatacacacatgaattactgatttatttttttacaagacaacgtatattcatgccccagagcttctttctcctttcagatagaaatcccttctgggtgattcctgagtattatgtggatcactgtggattttggctgcaaaagagaacagagcatcccttttgtaaaagaagtatcaaccaatgtaacagtttctgcttttttgcttccaagttgctgagattgaccagaaggctggagcctaggccaccactgataggttatctcattcacagattatatcctaatgttggaagtttgcagtgccttgcccccagatgaagacccctcccccgcccagtgatgtgtttggaaaagtcttggaagtaattgctccttgattttttttttttagtttcaagtgaataatgcaacaaaaagcagaaatgtgaataatcccattgtaagtcactcgccttctggtggatttcggtcagggtcaaagagcaaacgggcaggaactgggctgtttgaatgagctttgtaaacaaggtcgtcatcaagccatgactcaatacacagtgaattatctgaagccttttagaattagcaactaacctccaggaaactggtgcatgttgcaatgaagtagctgaccatccaaatagcacaggccacagcaccatgggacattgcatttattaatcattaattaatttatttatttttgagacagagtctcactctgtcacccaggctgcatggcagtggcatgatcttggctcactgcaacctttgcctcctgggttcaagcaattctcctgccttaacctctccagtagctaggattacaggtgtgcgccaccacgccgggctaatttttgtatttttagtagagagggggttttgtcatgttggccaggctggtcttgaactcctgacctcatgtgatctgcccacctcagcctctcaaagtgctgggattgcaagcgtgagccaccacccccggcagggacattgcatttaatacagagggatcactcctcgtgtagtgtccctgaattcttccattgcttacaacattcaagtttccatgagtgaagaactttattctgcttcattatttttatttatccacttttttctttgatatgcagagtggcccaagagagcacaaattctaaaggttgacagaagagggagcacttgtaactttgaaataacaacaaaaaagatatgtttttccctttatataatagggctttgtctgtttttaaaaactagatcttttcccagctgcgtgtcgcaccagatgttctctttgtgaggcttgggcatagaaagtcctccaaggccccaggctctcattgcttccagaacacagccctactttctcccattctgaattttttttaacacagaacaatccattattcttaccaccatgtagtctgaaagtctgtataatcccctaagggtaggaaaaaacaaacacaaacaagctagaaagaagatgattgaaataaagtaaagagctggtaaatacgaaggcaggaaaagaggtaaccagggaagaagctagagaacaaggaagaggaagtgaagataatgggctgaaaagtcacaaaacaaaacagcaaaacaatcttcccctccccccaaactcttttcatatattttgttttccattatgcaaaacattaggtttgatgggctttattttcccgtcaaaaaaacttacagatgcaaacagaaagggaaagtaagacaaggagtgatccaggtctcggctcacatgcctttgctggcaggttgagccacacaaaatttccaaaaattaacccttgacctacagaaatagcaattttatatagtttgattcaatataattgccagtgagatgactgtcacatgcgtccatgtgaagagaccaccaa

SEQ ID NO: 65402 - DNA, 703 bp, Homo sapiens
caggtgtttttttcccaaggaaaatcagaagggtgaatgaatgcttggcaggaaaaaacaacaggcatccattacatgcactatcttccttttctgtttgtggtggccatctgaagtcagggggagcactagggaccctcattagcgtctttgaatgccctccttacaagaacgtgatgccagtccatgccacgtgaaagctgaggtcaaacgttgtggacagatgtcctgtgtgcactgtcctggtgcagctgccaaaatcctttgatttatcccaagccaactgtctagttattttccttactggccattcgctactcactggggggtttcccagggatgttccatctattttcttctatttactttctgtgttaaatctcttattttcctccatctgacataacttacacaacatcattactgacttattaatgccacttttctgattcttagtgctaatgactttcttctttttatattttttggtcaattctatggattctgagagaaagcaaatttaaatatgcaaaattgaattgccatgttatatttaaactcacacttaaaacctgtaatcatcttcactttgtgttcagtatttcttcatactctgttttgccattttatgccatatgctctgatcagcacacatatactcagattgctaagtaccagtcatgactattctaatttatttgaa

SEQ ID NO: 65403 - DNA, 1923 bp, Homo sapiens
attctgaaataactaaaaaaaggtagcaataattattgtttgttcctttggaaaaaatatttttagaaggtgagataacttaggtttgaagttttcctccgaatgtttacaagagggaacatggggtccgaactgttgtagacaatagacaaataggtttctcggcggccagaatctgattacggtgaaaacagaaccttactgtgggaactggagagagcagtgcctcttgaacttaagcaagtgagtgtattttagcccaagataaacaaagtcattgcagggttttgacctgaaaatgaggttagagataatactataatatttcagttgtacaaatcaagacataaacatgttccatcctctgcagttgcatgaagcaatatatgtgcttgttcaaacaacagaccaacctgcctgggttggaatcccggctctgcttttacaaactgtgtataatagataacattgatacctgccttgatctccttttctgggtcagtgcacgcatctccagctgcaatgaattttgtttgctcttggctcttagccgctctcttccaataattgccttgggccaaatcggagccatctcatcatcccccatgatggcaagcgaccattgactaagtgacatgcagggtacaaagaccagcacacgggccttaagtgacaccaactctgtgtcgcaatccactctccagagctccaggctgaatctgttctccatcctagaccattccttgcttagttttttcctccttatctgccttgcttcctttactctccttctctgagagtgttccgtcagtaaatcactttcataagaatccttacattaggagctgcttccagggcacccaaactaagccagttggttctgcaattgttcctaggaagtagacacaggcaggatgggattccagaggttaatcacttgtctcttcaaaggcaagtaggagcctattactggtggcagctggagtattgatagttactggcatgctctaggaggttacaactttatctatgttgagatagcacaggggaacagtaactatcagggctatgaaactgagtggccattgataaggactaataatgcattgaggagagaaacaaaaaggctcagttctattaaaaataaattaaaaacaaagtgtgaaagtcagagaatcttcttggtagcatttaaagggatatttgtcttttgcagccagaggacagcaatactaaaaacaagactcaggagttaactttaaaaatgaaagaacatcaaagaaggctgaattcttagcccaaacaagtcttttatgttgaagttcgggtcctggtatagaagaagtgggactctgagacatggaatggggacatatatgtagacactgagaagtgtcccactctctttgttgaaaggtggaagtggccccttctacttgttcaaagactatgcagaggccttaaatgaatcaggtgcactataagaaaatgcttgccttccccaggatttgcaaccacttggacactagactcattaatagggcaagagttcagcataaccagaataactctactggagatctggtcctgctgaagagagggatcatatatcaaaggaaatgcaggacgtgattcatgtgtgcaagtaggagagtgtggaagtgaatcatccgcatgccggatcaaggacagtcaaataaaagctggagaaagaagagattatcaatatgagatcccttttctgtgacacaagattaaacaccatggcaatggctctgagtgacaggtttagtaagctgctaggaaggttcctggaagcatgaaaaaagtgatgatgcatattaaacaaagtgaagatgctataacttccatggaagtctatagagaaaatatttcaaggacccaggggatttggcatgccag

SEQ ID NO: 65404 - DNA, 394 bp, Homo sapiens
tcaaacatgctgtaatttctctcactttaaataaaactctttcttgaacatgcaaatcccttccagcaccaatgccttttctctgtgcccctttacagaaaagaatcattgaaatagctgtctgtattgttttcctatcttctgttcccatgctcttttgatctcacttccaggattccgcactgcaatccatcaacattgctcttgttaaggttactgatgacctttctattattgctcaatccattcatccattttcagcggatcagttaatccattttcatcacctcacttgctctatcactagcatttgacataacgaaacactgactctttacttttgtttccaggacagggaggttcaactattattcctttcatactcattacattt

SEQ ID NO: 65405 - DNA, 580 bp, Homo sapiens
attttatttttacaattccccaatagtagaacacagaagtatatattgtctcggttcttaaagcaaaactttcttaaagttaattttgaagcaaaataggatgatctttttgttcatcttattttcagaatgacataaatttggatttgttaactttaaaattgccaaaccagctggggatgtgaatttattttcacttccatgcagcactgagaagcaaaatactaacagtagggtcagagtcctccaggtcagactcctctggcctccagtcaatgttaattagggactttcaacagctgcaggaagtcaacaatttaataagaaacatcacaaatacctaatttgctcagcatgaccacaacacgaaattcccacatcaacagagagacaaatactgattcaagcaatgtgaatcaaagcagatgctagctggcctcctcctgttaaattgattcagaaatgtaggacatagttctaagacgaggctactgttggtcgcatatcaatttagttaggtgttaagagggaaatttatggcactaaatgcccacatcagaaagcgggaaagatctgaaat

SEQ ID NO: 65406 - DNA, 788 bp, Homo sapiens
gagtacagaatatagaataatatcattacaaaatattctctttttacagaatacagtttttgtagaaatataccatattgtagcatttaatgaatatttattattataattgcatgtggttttgaatgaggtaatgtcgagaagcacaagttcctgacattgggtcttgttatggacgtctgtgaaacagcaagagcagacacgtctcagggccgtttaggagactggaccttaggtggatagttcatatcacattataatcttgaatcagaagtggattcagtgttggtaggtaagatgcacaatataggcattaaaatgtatgtggaactaatggtgtgatgcttggtgaggcgccgttggaaagcatattttggataactcacaggaaggaaaagtccaacatactctggaaactctggccatagacagtccaaatagcaagtgcatgaactggattactggatacagaatccagtgaaggggtcagaatccaggcataagattaataattacttaagcttgagtggaatttggacggaagttgacaaagaaaggaaaaaaagaggttatgcaggcttccagtgacttggtggagcaagatgcataggttctccttagaagaacgcccttggtgggagttatgttgcttaaaatgaatagtcagtaccttctaagtcaaatttttatattcctttaaaaattgggatgtaattcacataccataatattcacccttttaataatttcatggtttttagaatactcacacagttgtacaaactcga

SEQ ID NO: 65407 - DNA, 616 bp, Homo sapiens
aagtgctggaattacagcacactcagcctatacaatattttaaatgattttgtgcataaaacaaagtttttactgctttttcactgtgaccgatcacatgaggtgtattggtctgtttgcacactgctataaagacatagccaagactgggtgatttataaaggaaagaggtttaattggctcacagttctgcatggctgggtgaagcaggaaatataagaaaaacaagtaaagagaaaacaagtccttccctgaccaggctgactcactccaaagtgcagctggagctatgataacattatctgcaaggccaggcaggggccccagagaaatggattccaagagcagggaggagaaaaacaagttcttatcagtctctgcctgaaattctctccccatgctatcattctttgttctgctcttataattacttttgtaactatttctgcaagtttgcaaggattttgtaagttcctgttttcccatttgtgcaggatggcaaaggtcacaagacatgcctaagttgcaaaacctgtcacagtttgattaactgcctttgttctgttctcactttccccatcctgcaaatttcacgccactggctagccaccccact

SEQ ID NO: 65408 - DNA, 1615 bp, Homo sapiens
cctcaggtctccacctgagctaagaatccagaccaagtgacaggtgtacccagtcaacactgtatacattggctaggtttggaggcacagtggggatgtgggagaagaagggagaagttgggggaaggtgggggtggagcacattttactttctttcctaggtcactaggcagcagtagaagaacaaagaaaattttgaggtctttgtaagtaaaagattttgttagaagattggatctgaaaatttttataatttgaataataatataatacaatattattttgtgccctcaactggtaaagaaggattgatgacactggaactgagttttatggaattattcctcacttggcctttcttgtttggatagaaattttctatggagctggtatactcctagctagagcagaggaagcgctgttgcccctctcagaaaacttaaacggaaaattggttaagaactagatggaggaagcttaggtatatgggttaggcctctttgtcttggaaatatttcacttcctagatatggttctctatttattcatttttctttgcctcctgacatctcaatagtatgttaagagcatagactgtagagccagactatctggattacaattccagttccccacttgcgagttgtgtgatattgggtaaaaggcttaagctttcattgcttcactttttgtattctcaaaatggggaaaataaagatacctacctcgtaagctttttgtgcgaattatgtgcaagtcaggtacatagtcagcactaagtaaacatctgttaataaataaacgattgctatttaaagcgctgatccattaactttgtaccaaactttgtagaaaaatctacaaagctattttgaaatccatgatacttgggttcaatcccaaaactgctgagttagaatccctggctaaaaacagatattctaaatgctcctcatgcaattctgtgatataccaagtctcataacaaccctacaaagtcaatattaatcttgtttcatagaagacactgagactcataaaatttactcatttttccaagagtacacatcaaatgagagaggagagtattaggatctaagaatttctgattcagaatttcttacttcttccaacttatcatataaaaccagatgaaaccatggagagaggggttcacagaatgaaaggagcaagtataaaagagaggtgggcacaagagaaagaggcagaaagggggacaagatgaagtgtggctggataatatgatacagagctgataaacaaggaggattttcctttcaagtaacagaagaaattggtggtgatggaaatggagcagttcaaagtgacattgacaaaaacaaatatcttctccttcaatattttgcctcaagctcaccctgatgctctcggttaataattctttagccttatgttctcactcataggtgggaattgaacaatgagaacacatggacacaggaaggggaacatcacacaccagggactgttctggggtagggggaggggggagggatagcattaggagatacacctaatgctaaatgacgagttaatgggtgcagcacaccaacatggcacatgtatacatatg

SEQ ID NO: 65409 - DNA, 1361 bp, Homo sapiens
tgtaacttcagctttgttagatattgccataccgtcctaattgtagaattggaagcaacttaaaagcctctgatcaatcaagtaactctataaacactggggcagttgataatttgactatccatggggatctcagcaggcagcacctccagtctctttcgtagtagaaaattgaaatttcacaactctactaagcccattctattctctctaatcctattcatgatttcttcacttacatttgtataaagtatgctgcacccttaaatatttgcacgattttgctttagaggtgctagtgttgatatttttatgaagtggttattaagaaagagtattcaatcttagatctaacaagactatagagtgttttagcccacgtgtctcattttacaaataaggaaactgcaatccctattatttgttaaggggtttatccacggtcacagaataaatcggtaacaaagttcatgaagttgcaggccttatctctgtccagagataagttcatctacttaacactgactaattaaatgagaattcaatagctgaagcatatagcacaagtattaaaaccaggactttgcatcaatatgtcccagtagaacatgttcacaccagatttactggttatttgacttctttttaaatttcatgccattacaataattaagcctgtgttagaaacatcagcacttttaaaaaacatatcacattctgtagaacctacttcctgaattcagaagggaactactttaggtaggaattgaaaaaacacaggatatgaaaattacaaatgaaagaaattacctagaaattgccactacttagaaaaaggaaccacttgcaggggtggagtggaaagtcagatgttaataagtgtataaaaactatcttgctaaaaaacaaagcaattcagacactatacttaaagaataaatactgattaaatttcacatttattacattggtaaaaaaattgtcataaagtttatttccactagatagcctgcacttagtagaaacatttcagaatcttttttcttcttagttttaaggacgtatatatgaatttattttgctaagtttttaggtcacatacatactaagaatcacttatcctgagaatgaattcacacccaaatgttccatacctttctgactttaatatagagttgactcatgcctccctggtctcaggtgactgcagggacactgtcccataggacatgccctggacagaaagaaggccccttttacaggggttccctcctaacagactccatgggaggctctaagtccattcttttgtatttcccaaagttccactgcaaaaacttcttctctcttttttatttgaa

SEQ ID NO: 65410 - DNA, 2764 bp, Homo sapiens
aattaaaatgtctccatttcttctgacaacattttttttgtacttcttggctctaagtgtataacatttggtagtagctctagcagttgctgtaatttaccatataattaaatgttcacttaatctctttttatatgaggaattcttttagtctttaataattttatgttattcttcagtctctcaattcaacaaatacaactagagagaactggtaaaatcaataaatcccatctactaattaaaagagaacataagagaatcagtaggtaatgaaacactgtaagagtgctaaccgtggaaagagacaaatttttaaacataccaataagctctctcttttcatcctccatttcttaagaaaattcttgcacagaagtgctttggtttgctgatacacgcttttctgtttcatattcatttagcctattcgctgaaggagaaagtaatcatggtggaacacaacctagaaaaaaataagtgtaataagaaaaaccttgatcatagtgttgaggaaaatatttactacctttaaaaagtgtaaacatgaatttaaaatattatttcaataatttatgactgtaaaatttcacctcaaatatttcaccttaagctttttaggggagtgggtgatggtgggaaggcagagtgattattatcacaattttgcaataacttggagtactgaaatggaaaagctgtaattcaacttcagaacctataatttcacatttttggccttgtatgagagaactttaagtacatgaatagagtgattaaattaatttcatcctgttaatagccatttcttgttctttacattgaaacagaaatctcagagctaatcaaattaacatcaaaagtctgattacttaaatttgtctgaataataaattacatccactagatacaacctcaataaagtgttttcttgtaattttaccttcagattgaatcaacttttatgaaaagagataggttgtaaatcataatccaggctcaaactacttgaaacttgattctgagatacaggaagaataaagcaatttctctcaattttctgaattcagaagtccctgaataactaatgaaactacaaaattagctttaaaagaagcaaaaataaatcacacgggaaagtaattttgcccaaagatttgcaaatcaagaaacacaatttttttcgtttctgtaacctcaaaatgaaattctttcatatttttacatcaaaatattcagataattctccctcagctagcacagaagcaaattttttccatttttctatgtcttactgttacaatctacacaataaaaagtggttgggaaaaagcagaaaaatttagtcttaggtctttaacataaaacacataagaattgggaaacatctgaaaaatagattgattttagcagtgtccacccacatatttggcacagcacaacaaaatagagctttacttactgtcaggaaaataataaaaagcactctagaaacactgtcaaaaccagttctctgtttgtctaggtaacgattacaacttctttattgctgcttcttcattttttctttaaatgggtgcctactccagcagctcttacacagcctggtttctgaaaaggggtgtagccagaccaagctgtacatgatgaacttgttttgttttctgtgtctctttctccctaagccaattattctgcaaggaaatgactgttccgtggttggttgggaataaaataaactctgtgtttgttcacttagcctttcaactacagggataagggggaaaacggtaaacaaggaaaatggaactagttcttcagaaatgatgagaccaagatggaggcaggaacaagaaagagtaaaaacaataactaaccaaacaaagcagttaaatttgtataagaaatctgtatctattttcttttcactactgatgaataaacacaactgccagttagttgtatatttaactaattcagactaagttagcagagtattctggagctgattttttttcctaataaagctaagcaatccatagtacgccttggagaaactcctaggacagacaaatgaagaatttttaacaaatttgttgctcccaccctcttcacagtggatacaggatttcataatacttatgaacaaaataagccagtggtttgcccaggtctacaaaacatataaaaagattcagataaatttttgtgcacgaagactacaacaaactgaaacatgtttaattcatatagcatagtctgtctctctctgctctgtaaagagttgcaaacttttcttgacctgccacagtgaatggcaaaacaggaaatcaaagtccatgaattgggaaatctcaaatatttgacacggctcccaatccacagatgttaataatcataaagctgagaaactttctggagcaaagcagataatttaaacaacaatgacaactacagccatgatactattatgtgtatatgtgtgtgcctgtgtgtatatatataaaatgtatatatatataatgtatacatatgtgtatatatataatgtgtgtgtgtgtgtgtgtgtgtgtatatatatatatataaaatttctctccttggcaattacttctgtttttaaaaatagtcaacagtgaaatgccactttttttacattgaaaattggcacaaacaccgttaataaaggtgttctaaagttctcatggggtgtgggaagggaggtcataaacacttaacattttgtaatagtaatataacaaaa

SEQ ID NO: 65411 - DNA, 1837 bp, Homo sapiens
catggcaaagtaaggtggcattgcagtaacaatgattccaagcaaagctgcttgaaaatacagctcaattttaaaaactatatcagtaatttcctgaaagacaaccacagagtaacaaatggaactgagaatcattttatatcttaagatatatcttaggatatatcttatatcaaaaaaaaatcaaaacctcagaaagaatgtattagaatatctaacccaggcatagtctacatgaaagaatgagtggcagatgtattaacaggtggttgtggacaatattaccaactctgccacttattaataactatctgatcctaagcaaatcattttactttcattttcctgtctacaacacagaataatcaggcatataaattacgcttcacaatttcataaaaatgaatgatgtatttgaaaagcagttagtatgtccaccatagtggtcctatgaaataataataaatatctaagaatgatatttgttgctcttgtctttttaattgggaaaagctatatccaagctcagcttcctatggaactagaacttcttctcccaagcagaagaggaattaactcccacaggccccaatgtcgttagcttccccagggatccaggtgcagtcagctaactttcccagacaatcaataaacagctagcacttcaaatgcagattacccaagtccaaggatactatattatcagccaccctcaccaaggtcagtttcctccccttgttctataagaatacagacccgtgggacagagaaggtactctgcactggaatagaatccgcagtgcctagcagataccctcgcactggcacacccctccatgggatgacatagagacagagtacatcactgtcttgctgaaacctagccttctgagttttcctatttagcaattaagtcaattccaaagttcaggtcatatgacattgcagaatttgtctgaaactctcgtaatatgacagtggaggctcagaaagaacccacaaatatgtagactagtagtgcaagaagtggaaatgaatgagactacagttggatccaatcatacagaatctaatgaagaaacaaatttgaaatattaatacgactatatatgaatagttagcttcaaaaactcccatgtatttctttcgaaatatagtatgattatatgtcagtgttgttgaaaattgtaagttgtaaaatcttgtgtaatagttatggatacagacatatgtagtaacatcaaaaaaacacgtatgggaattacaaattgtgaaattgtgaattgcggttactcctacggaggagagaaggaaacaagattggagaggggtaacatgagttttcacctgtgtcttaaaagttttactaaaaacaaatattatgcaatattaacatttgaaatatttggatagtaggtggttcgttttctgtacgtttgaaatatttcataatatgagatacctctccacagacactgctgctggaaatggaaaatgatgcaaccattttggaaagcagtttggcagttcttcaagtgttaaacatagagttactagatgatctagcaattccactcctaattatatatccaagagaaataaaaacatatgctcatacaaaatcttctactcaaatattcataagcattactcataatagccaaaaggtggaaataacccaaatgccatcaactgatgaacagataagtagaatgcagtatttcacataaacattccatacattccacacaatgaaatatgatttggtagtaaaaataaatgaagcactgatacgtgttacaaaacagatgaatcttcaaagcagtatgctaagtac

SEQ ID NO: 65412 - DNA, 2761 bp, Homo sapiens
gcttgcccttaaaactatttttaatccaactaatttacatactagaaaagttatgacttagtacaatatcataaaattcttttatgcaatcaccctctcaactaaactcaaggacagagattataaattgtattcatatcggtactcttggcacatagtatggtatctggaatgtaaaagacatgcaacaaaccagcctgggcaatatagcaagacttcgtctctgaaaaacaaataaaaaattacctgggcgcagtgacacacgcctgtagccccagctattcagcagggtccctagagtccagacgttcaaggctgcagtgaactttgatcgcaccactgcactctagcccgagacgctgtctctttaaaaataaaagacatgcaatacacatggaatgtactaataaatttgctcttatagtgaatgtaagatttccctacactaaatctgtttgaaaggaaatatactcaaacagcacatatgcaaagattaacgcctctttagtttgattttaacacaaatacccacaaagccctaactgccctaataatgttccctactatggagtcttccctaaaacacatacaatattgctctcccggcaaacacaaaatatactaaataaagcaccagaattagggtctggcagcccgggttggaatctcaactccatccttttactagctgagaccttaataagttacttaacctctttgaggcccattctccacacctgcccaactggaataaccccctccaatcctacagggttgctgtcagaatgaaaagagctaataccgagcctggcttaaagctgtagtccagcaaatactcctcttcccttagattccttcagaacgcccttgtagaaagtaaacgtggttattatcttcattattttcggacttatttatttaaaacgtaaatcgaagcctgaggagcccaggggaaaacctccttcagcttaatagctccagcctgcccagctttccgatccaattaagtatttccatgcctggagctcctattcgtgttttaggatcagggaatttccctcccaaactgtgtcatgagatctgcgcattttcttctcactgaaactccttttaacacgcaaggtaatgatccgcgcgtaacctcgcagggaagagcaagcgctcattacccagctgttcagacggaaatttacatcaatatttgttttccttctttccctgaggttgctgagggtggaacgacagcgtccaggcaaaggcagtgtcccgaagtcccacggccggacccggtcccaggggagcctcgcggagcccccgccgcagggccccgaccccctcacgtccgcatcctgggcgctcccaccgcatccccgaggctggcaacccgcgcttcccgggagctgagggaggtctgtttccctcagctcgccgcctctgcccgcttccgagcccgcttcaccccacacctcagacgccgaactccccttctctccccgccgtccctcgctggccagcccctcctcgtcccctcaactcccccagggacggctgtcccaggctagcctcaagcgccgccgccgcccgcgacgcccgcctcacctcagggcccgagccgcagagctgtcaggcctggacgcgctcagtctgttgactcagtgcgggtgacccagctgggatctgtgcgagggcgcggccgcgcgcacccgcgcgctcctggcgcaggcagagctggcggcgccgaagtcgcgccccgcctcctgcagagcgcacctgagggcggggctcctagaaagcgccgctccgcgtacgggcgcgcttcagacgctcggccccgcgcgtcccggcgcacgcaggcaagcagcgcgcccggaagaggagagcggctgagggtggggcgagcggtggcgcgccgctgcccagggcccctgagccactagagtcgggcctcgtggctcttccccagggcctcccacgcctgggttctgcggggatctcgccacgctctttctggaggcacgggcaaaaaccacggcctcgtgtctcagtggtaaacctgccgcctcttagcgggtgaccttggcccacggccctctcctcatctgcctcgcccagtcacgtctcctcttaagcatccttgccgtctgtctcctggcatttggatgggcctctctgaacgcgttttgagtcctctgcagccccgcttcctcccgccgcggcatctggagtgctgtggccccgtttccgtaactcttgcctcccctccccagcctcctcattggccctcacaccccgacctgggaggtcctcccactgagggtgcttgtagttcgcggagtgtcctcatcaaagactgggaatgcggcagatgctgaattttccaaacggcctgagacacatgacatctgtgagagactggatactgcacttactttgctaaaaatataatctagtgttttgagcttcattactcaaagtgacctaaatggggtcaaaagttattaacactaacattacgtattttcctctccacatttctgtatagtcacattcccttgcacaaagactttttttttattctgtcaatcctgtgtacatcatgttttttttttttacttgtctttgtgttatctgcttctcgaatttaaaccaggtctccccaacatgcactctgctttctaaattcttaggggaaaaacaaacaaacaaggaatcaagttttacttatggaatatgaattaaatagaaaattcaaagaggttcg

SEQ ID NO: 65413 - DNA, 842 bp, Homo sapiens
ttataggcgtgagccactgagcccggccaggtttttttttctggtagaaatttcatgaaggcttagatcggcacctgcctctgcctcttcctccttctagtttatgctcaggtacacgagagcatttacggtcattacataacatggtacaaagcaggggtagggtgtttacacatgcggaactctgccgtgcatctgaaatgtgacagagacgagtttaggcagaactgtgcccccaaagataggagaacttcaggggaagttggtggagagagtaatcaaccaagatctgtgttctgttcattcgggttagattttatgaaaaagaaagagagctataaaatatctgtgcttcttggcaatgcatgggtttctgtatttgattattagtcgggtagctatgaaaatgttaacatgaatattatttctatatatgttgcatgtgttctacagcacaacaccattggcacaattacagagcaaacaactccatgtaaacattaatgggaataacagaaggaacaaagataacgcggctacttttgaactttggaatctcctacgttgctagtgcatgcttaacagcatgcaatcatcttgggtagaatcatgagggtccaaatgtgtggcaattctaccctcagcccgacacatccactcaaagtaaaacaaaataagcaaaatggctatcatgtgccaaaaggattaatatgtcatccttactggacccttttccttacttccatttgaagaaatcaggtggctcattgcagtcacacactgattcatgttcccatcctgaaactcagacgaaagataagaaacagatcaactgaatacct

SEQ ID NO: 65414 - DNA, 1804 bp, Homo sapiens
aaattgttaaatctaatttgtctaaagtttttcttttaacaccttcacgaggggaagtttatgccctgctttaagcagagggggacggcagagctcttctgtgtctgctttttctcaattgcccccagctcaaaataattcttatgccggcatattttggggtgacatattctgatctccttcattgggaagcagtccctgagtgtgagcctagcaaagactctcttcttagaaatcctccctaatttgaaacatagtggttaaaattcagaagctgggtctctgtgcacgttatctaactgcttggcacacaaaggtttgtcaaataaaagacaggcaggtgatgaatgcattgagaattgttgtcaatcctacctaaagttccacagacttagagaacatgtctttctacctgacaaccattcagagcagtttggctgttccaactcgcgtcctcaatttcatcattcaaaatctgtgagaccgatactgagctctcatggaagactggctcatttaattgaacaatttggaaaactgttgagttgaggaaatgtatacagaagctaggtggcgctggcggccacaggctgcacaagataatcctctgcatgtcagaacatgccctgtgcccaaaggacacagctgtgaaacctttctgaagagtttagtatcagatacagggagaatgatttgaaacaaaagagaaatacagaaattccacagcatcactttcagactgtccaacattacccattccttctgacataaacatgaaaacccataaagcacaatttgtatttatctattttctaaataaactcctcctggtcatttgctttttgaatattctgtttggtctctttggttttgcaatcaccactgacttggagctccacagaaaaaccagaagttccaaaatagcaatcggaagagaacttggtttcagtcccttttccattaatgcctattttccacaaccacataacctgtgcatttggaatattttcccaatagcactggctttcataagctgtagtgactgtcaggaaataaaactgctttggtggaaagaccagaattatatagctgagaacacaggaatgttaaaccagccttcgaagtcttgcagaataggagagaacaaaagtgggctgtgtcagtgaggcaggtttaatagaaatagaacatttatgaatttctagtcacatcttctgaccagataatcttctacagagtcatttagcttatgtatgggagatacgaatcttacaagtggaagatgaccatgcctaagtcagaatataatagtctgacaaaattttctgctttatgtatgcttatggaacttgttttatatatagacatatcacatttatatagtcatttaataaatttcattcattgaaaataatacaaatgcattacaatgaaaacaatcattaggtacgtacttttggttaatatttccaactgtcctgaaagatgtggtataaatatatctgtaatccctaggggtttattgcacaagaaaaaaagcagagcacactgttgattttttttttttttgagacatattggctggtaaaatgttgatactaattaattctgaagtggaaacaggcttacaggctggcagacgggttataaaatttttttttttccattggtctcagaattgctagaatctttgtttcagcaccagtagctctggtttaggttaatatttctgcctccactcaataccatgttatacaccctcttgcctactgtcaaaggagtttgttgaagatagtttctttac

SEQ ID NO: 65415 - DNA, 1640 bp, Homo sapiens
ctcatcctgtcctcctgcttctctatctaacacctcccttcctttcccttttctctcaaatctgaccaggtacagaactccttttttctcgtcttctgggctactacatagccatgcttcactataacataccaaatgtgttccttacacgtcgatcttggcagtaggatatacaatcagaattctcattattcttgacccaaggagagagaattgttgataaaattggcaacaacaaggacaaacatgatttatttatatattgatttaagaaatatgggaagcctagccataaaaggcagtattttatgtacttggcaaaaatatgaaaaatataataattgagggcaaaggtgttgctctaagaattattcttagaggtgaaattcagaatagttatttatggacctggagaccaaataataaaggggaaaggaattaggaattttagaaaaatattgttttaggcaagaagaaagacacacagaggaggttagctggggtagcagtgtgcgaggggagcaacagaggatgcgtatgagcagagaatgaggaagggctatgaggaactttgaaagggtggaaacttggacttttgaaggtaggaatagattggtggagagatgtggctacaacagaagtttggaatgaacattggcaaagaatctcctcatggcgtgttgggaaagatggatgaaagagtaagtgaggtgaaaggaagggaaattgagtcatagtcccccagtccaaatatgcactgctgaagggaattgagccaacagcaaagcttaaaaagaactcatgactggatatcctcaatgagagtgaaacctctttcttccagttcctgcttgaaaatataaacaacatgcaaattcaaacaaaaaaattcttcctctgtcacgttgagaaaccctctgtttactttgttgttgtgactcactttgagagtattcttacaagaatgcaatttgtagggatgggcagacctgtagggggaaaaacaagaacctctctggaatgtttacccattcttgggaccatagattttttttttttctacaaaggtctctattcctttttaaaagactcagtttagttttggagaggaaaaatatctcagatataacagcataactggggtgaggtacacaagacttctaagaatcattttttaaagaagcaatagaagatgcccaatgatgtaaaacaaaaatcacttttcttaattcaagttttacccaagtggataccaagagacaggaaaacttacaggaatggaatgatggatggtcatacttggacgtgctagcccaggaatgaagaagacttagacatgttatagttaattgtagctaaatggaagaaaaggagacagggaaagcaagaggtaaatacaggtcaaatcaaatcaaagaatcaaagccctgtgcttcagatgaagtattttaatgatacaaattgtctgtgtcaggggcttaaatgtgtacatttaggggtactgtctcaaaaaaaatgagctttcttccacaaaactaaaatccacatggacaattttgaatcggatggatgagaaagcaaagtaagttctccgtaaatacacagatgctgttaaaggattggtgcctttttttcttgtc

SEQ ID NO: 65416 - DNA, 1835 bp, Homo sapiens
tggctgtgaagtgttttcatcaaatttgcacagcatttttctgtgacctaatttcacatacagttatgtggcgtacaaagaattaactttagagactccctgggaaatacatcaaagagacactgagtcatcttcttgaaaagtttaaagccaagattgacaagaggcctggttcagaacagacatggcatttatactgaggaccatggacagagaacatggtgggtcctcacatgggccccaaatcaagtctcaagaacgaagcctgaaatgttggaatttcggtgacagctgtttctcactgggcaactttatgatccagggtaacagcagagagggacttacttaaaaataaggatccttctgtgcctagcagagaaggccaactagtatccagagaaaacactgggaaaaactttgtggtattcagtgggttacaagattgccatctgcatatatgattttcctcttccatctgtaggtaagttatgtccctggaagaaagcagacctgtctcatgttattattagattgatttgtgttcacagttttattttcccaataagatagcaagaggcaatgctttctaattcttttataattcttcatggcacttaggatagggataggcatacagcagttgtaaaatacatatttttggttaataagtttaaattgaaaagttgggtaagtgaatcaaagattcagttaattcatggttctgaaggttagacccgtaaatctgtaaaagtctttcaaattgctttgatcatgcaatgaaagtgaattgcatttctttttcagcagagtttgttttgcaatctgaattttttggactttgctttgaaaaggttgaaatgaaaggcatggcagtgaatcagcaatttaagaaggttaacaattagtcataactttaatagatgagacaattacaccatctttatcttttaaaaataactacatttttaattagattttaatcataaaggtcagaggtagtgtaagtttagaaaatctgaaacaaagtgtgtgttggcaaaactacttaatctcagatgtgttaacttggccaaattaactgaaacagatggtgagaagcttttgttccttaagtcatcaattgctgattgcatgatcttcataatctttaatattttaagacgcagtctcagaactcaggtttgtaagtattgctttctatttgtttattccttaaaatattctataagatctctgttatttgctcttggctttaacaaagtgcaatatgaccatttaaaaaacttggtacctcatttttgactttgcttctgttaaacatatgactctcctgcttcttgatgcatattttagaccttcatgagccatcaattttgaaagtgctaatttcagatgaacaatattgacttcagctgacagttgttgctctggttacctattactgtgtaacaaatgactctaacactgtggtacaaaacaacgatcatttttatcatattcatcactttgtgtgtcaggaattgcaggatacatctgggattgctgatctgtgctcgatactgattgggacctcaggtggcatatggctatggctttaatggctggagttggctgggatggctagactaggatattggtatgggatggtggttgccttccttacttcttctctataacacatctgctgtgctgaaatgtccacaatagctttttaactcatgtgtctggaacttgaattgcaatggctggaaaaggtaaagctggccaggcattcttctctcctctcctcttctctactcccttccccctcccctcccccagtcgctcccctcccc

SEQ ID NO: 65417 - DNA, 713 bp, Homo sapiens
gtcctatggatagtttcctataagtcccattttgaaagcagttaactttgattacctttataagatatataaaacattggtggtgattcgggagactgttaaatgtcattagtgagactcacaaagccagagaaagacaagcaatatagacaaaatctaaactgaatcatatttcactattgacaagagctgggagccacatgccgagaatactatgaaaataatttggatagaatcaggcagtaaatattagattagtagcattccaacaagtaaataaataacttgcacagatttgaattaaaaaggaagtaggttagtgttgtaactttcattcagggattttgtgtcataaaagcagcccatctggaggacatgcacttggagtctgaatcttcacaatgatgcaataatgaccttaatcttccagcaaaggccaggtgaataattaccttgcaagtctgcattccagtcaaaaatctcctgtcaggaaagacttcagcctagtgagatggaatctaacattttaaaaatgatataaacatttgtataaatgatcaatctcttaattctgaaaatgctgagcagatctataaatatgcaaagtaaattgcacccatgatactaatccattttgtggaacaacctgtactggtattcacaggttttgtaatgtttaaagaaaatatgacttttaagataatgtaatagag

SEQ ID NO: 65418 - DNA, 1658 bp, Homo sapiens
ttcttaatgcataaatttatactcaagtgggtggcaacaagagtcttactaattttaagtaagatagtaacatgttcaaagacatggaacagcacttaggcagcaggatggaatggaggcatagatgggtagaggtttgggcatagtgtgaatttgtttaggaacaaattcacaatggctcatgcaagagatttgccctgtggcagtgataatctaatgaatataaggagatatatcttttaaaaaatagctaatatttactctgtgttaaatgtgttattactaaaattccttccatttttttaaagaaagaatagatgagatttatggtctcttgtaaagctttctctgaacacatttaggttttgttttgttttgttttgaacacgattttattctccaagttctcagccagccaaatcgtgctttgtcttcttgttttggtataatgcctgaacaaggccttacaaaatagcttcctgtctggcttgtttgaaacatacctctttactatctctgagctgagctgtgaggaggatgtgaagtccgcaagtataaggtgaaaataaataaccatccagttcaaacaaaccacttgcctcagtcagtagttctggcccacattcatttgtacccaacaaagtccctcagctatcttattatcacatttctttaaggttaacccctcaaagatgatcttgttttgaagttctaaacatcgcgccgcatgcaaaatgactcaggtattatcatatattgatgattcatgatgttcttctggaaaatgaaaacttagtcatctaatcaataaaatcattttaagtctttgaactggttccaggtcaatttttcttggcagttttttggcttcctgaattatactgacccaaaccatgaataatgatctaaaattgcacaatatacaaaaaccatctgtttgataggaacaagagggtgatgtcatggggccacttcttatctcaattttatgtcctgccagtgctgatgtcactggcttggcaacacattggcagagtccaacttgttaaagatgagtacgttcaagaaggaaattgtatcactgcgtggagagggacttcttatgttttctggattggagatggactaacaagaaatggcaagagctgacaataaaatggctagtatatatttcactgcagtgattaacgtattatagttgacaaatatagtgtctcttcctcatttgcattttccaaggaacaaagtccttcatcttctaaaaaggaaaatgttgcagaacttttcacaggagtaaaatatagttgcaccacaagaagatggtagggagtagtcttaatgtttgtgtccagaagaaaactggggcatcgcactgaatgtgtctgtaagatagattaacactgtatcaactacaaagttattgatatatatgtaagtgttgtatgtaggaaccgtgaggtaattgtccatctatgctcaaccctggcaggtttatccatttttgggtccagctactaccaccaccaccacagaatgatatggagaattttgagaggattgagagaaatacaacaaaaatgattgaagagttagattgtcatttctcggtaaaaacgttaagaaacttgaggtgtttgttgttgacagatggatagtaa

SEQ ID NO: 65419 - DNA, 1065 bp, Homo sapiens
catctttgtgtgcatatttgattgtcttattttgtggtgaatttcaagacttaaagtagctaatgcaaaaggatgataatttgtattaattttggtatactataccaacagttttgaataatatgtatgtcagaaggccttaagaaatagagcattatgtctgctgtaattattctctcctcttttctgccacacatagccacatggctcagtcattatcttctgctatttagtatatttaataccaaaggaattcctgctagccatctgcttttctatgttaattcttgccctttgcagttttccttacaagatataatcatctagaacagcaggtccctacagagaacttgaacatttgcttttaatcaaaaggcatagtttatattaaactcagtaaacaaaatcaggggacttgtataaataacaatttgtgcatatcattttcatttttgctgacacttttgactctggtattgatctttctccaggttgtgaaactcagagggcaaagtgcaaagttcaaaagtggctatttgcctcaaggtttattgaaaataaaacatcaacggaagtcctctgaagtaatttgaggaaactttttttttcttctaggaaggatgtcattattcagtttctaaggttaagtctgcttagagaaaaataatagagtgaaaataggcttgaaacattagaaagctggcagaaaacatctatataattgtgggactgaatgcaagtatgtaaaatttccaaaaacaaacattgcattctatatggaacatctctttatctgttcatcgtccaaatacagaaactatagctccatcttgccaaatccatagtatgtggactgaaaaaaaaaaaaaagaaaaaagaaaaaacagatgcaaaatgaataaggaaagagtacatttaaaaaaatacattttttaaactggtttaataagaaaattaattttaaaaaatcagtacaattggattgtcatcaagcacctaaaaggcacagctcattttttcaattgtcctgttccaaatgattattttgtttcatgcaagcacttg

SEQ ID NO: 65420 - DNA, 933 bp, Homo sapiens
gccaggagcaaccaaccaaatgctacatctcccatgaagaatggctcgatcgttttgaatgtcacgatcagttaaaatacctaatcaagtgggcttgcgtagacccggcattggctaatatgacctactcgtgtgtgtgtgtgtgtgcatgcgtgtgcatttccactatattttcccacttctttttacttggtaaaaatggcttgacccaaacgtgaatgtacctggcaagacgtgttatatttcacaaatttctaatcagagtggaggatccaggagtgccatgccagcttgggccagaggcatcctgcaattaacattgtcaagcgctcctgagtgtaaacagttacctcacattacctcagagctcagagcatgaggccgtgtttgcacaggagagccagccaccacagcgtggcttagctaaaattctaacttctggaagtcattttctaccacgtgcatgcttcaataaatctgcaaaataacttaagcaaagagacccagagtgatttttcttctttcttttttctccccactcgtgctcaactaagctgtaaaactaagtcccctttatcacaaaagtctccactttataatccaattgactttcagggtttgctttcccacatgtttgtctcttcctgtgccactaaatcgtatcagctgctctggatttggggttgatggtgattgctgaggtgggagagaccgcggctgcatttattggctactttctcacaagacatagggatcagaaatgacagtttttggcattactgtagtttgctagatatataacttatttagttagtttttacttttaatttggtatttggtgatttgttcaaagatatagatcttgagatctgaacattattgtcctttttgtttcatactatacagaatataaaaatatagcccaaattactg

SEQ ID NO: 65421 - DNA, 1130 bp, Homo sapiens
tgttctttaaatatctaagtaactgtgtggttattatgtttttccctaagaaatcttactttaaaaaaagatattactacctaaaactggaaaaaaaaatcctttcacaaattaaaggtatgagctagcaaatcatcagcagagagaagtttataagaatcaacagaaatggaatattcagagttaagttttcagaggtgaggagcagggaccttggaaaagtcaaaaacattgagcttttctaggaagggtgagctcagctggaaatccagaatttgggtacatagtagaaaggctaaagagaaggaataggagtttctcagtacaagcaaatcaggcacattagaggtaaaccttgtcttttgcacgattttgccattgctaactgccagaaacgcaagagaagaaaagtgaagttgatgaaatttttggaacaacctggttcatagattttgaaatagtggagtcatgtgccaccttttagtcattcctggcttttaagtttctgggcaaaggtcaataatcacatggaaagtacacaaagtaataaatgtcttgaaggactggccagtcatggtggtcagtcttctatgcaatgtctgttactcgggggccccacctgagcatggctcatgagaaaatgctcctcccttctcagggtcctcacataggagctgtgtctgctgtctgagcagcccatggagtaaaaggacttcaggagtcccatgagtcacaagaatcacttcttgctccagagacaatcttggctggtttgacaactttaagaagtttggcaaaataactcatggccttccctatatcttgacctctccctaaactctcttcttcattaaaagtgatgttcttgcttagaacgtatattccaaaacaacgtgtgtcaaaagtcagttgtaagtttttttccatttcttgtctgttggattggtttggttttaattagatatttgtactatgaagttgaaccctgaaatggagagttccatacaagatctcatggtaaaaagtttcatgaggagcacaaatccacgatggctcttgacacttagacaaggccctgttttcttctgaaaacctacatgtatgaagctgggtcctctctgttccacaag

SEQ ID NO: 65422 - DNA, 651 bp, Homo sapiens
gccatgtaagacatgaatttgttcctcatttgccttccaccatgattgtgaggccccctcccaccctcccagccatgtggagctgtgagtcaattaaaccttttcctttataaattacccagtcttgggtatgtctttattagcagcttgaaaacagactaatacaatatgtcagcacattgccgtgctgtcaagatattaaggagtgactgtgccaaaattcacagggaagatagcactaagataattatcaacaaagcactggaatgcagtgctgatggtatttacctatgttggcaaacttggcctctagctctggcaaccacaagggggcagggaagggtcagaagtcaaattgagaagggtcagaagtcagaattgagtcagaagtcaaagcccaaagcctgctgaaggtaaaaagtcgaatagaacttccaccatcaatatagaactgcaaaaggctatgcgctctgagacaggcacatgtaaaccaaccatttccccaaaccctacttaataagactctagttaacaataatttattgtatcatttcaaacaattagaagagaattctgaatgttctcaacacaaagaaagaataaatgtttaggtgacagatatgctaatcaatcattacatactgtatacat

SEQ ID NO: 65423 - DNA, 969 bp, Homo sapiens
aaggaattagctccagagagaaaaataacaaactcagtcctgaggtctttcctatatattgaaaaggccagtgtggaaaggaaatgcagaaaaacaaacagaaggtgcacgagtttctttatcatacctggagaaggatatgttcaaatccacacagccgtgtcctggcgccaggcctttgcttttctttttctttctttttctttaaaatggcacccactgctctataaaatgatctattgggacttcaaagctgtggcaattgcatgtggcacaggatgtacacaattaattatgtgatgcttaaatgacagggtataggaaaaataagagagaagaagaaaaagttttttttttttttaaaaaaaaagcaaaaaaaaaaaaaaaaaaaaaatccaaagtaaactgaaagacctggttgtctgcctgccaaaaaccagtagcagataaggcctccagttgctgtggaaactcaggcctccaggagccagaatccaatttcagaaaccacaaaatcaacataaacgtgtgcaaaaataaaaaggtttgtttggcaagtaataaggagaaggctaccaatgtataaaacacatgaaccaaggtgacctcagccaactgaagctataatgacgatgatgtccacagcagatttggcacctctgaaacgagcggtaacaagacacagtccacgccgctttctgttatcaggtaattgctacctttttgaaatattaaccgtccaccacttcttcccctgcctcacctcagaaaacataacaacacccttcatgaaagcaatgttagagatcttgattttaacccgagaggccagaaaacagacagctcgacttttcacttgttccttagatcatgaattacacgctgtatcatccaggaaaaagaaaaataaagaaaaatagattctatatacagacttctttatcccttctgcaatctgcaagaaacaat

SEQ ID NO: 65424 - DNA, 706 bp, Homo sapiens
agctcagctggtgtttgactgacatcttttaggacttggaccccaccgcccacccccgcaaccaacaccaccaccagtccaggacctgatgtaatattgccacagactgattcccgttgcctttgatatgcaacctgtgcctacagtcagctctcagggctaaagaaaacagtcagctcctgcggcatctgatttgcctcctgccctcgctgctgttaatctgcaacacgccacagcctctagatcgctgccgttcagagtcggatgtcatgggggcgactggcaggggttctttcttctttcggtttgatacatccttccttccgctgctcctcgcaatcaaccgctaggggaaggagggaagcaggcaggagggagagcgggagacttccggaaatccctttcctcccttcccttcacaggttgccccatagtgaccctggagactcccgcctgcccccagtgaaggaattggttactctcccagagccctcccgggcatcgcccccttcctcacttcctcctcttcctgcccccagcctctacccctccagcctcctgtggcttcacaggcaagtgccgcatcccaggaagaaggagttggagctccgtgatggtgagctttcagacttccccctacaacctccgcctccccaaaggcacagaggcaagcagtggcttccctggtatcatttgtggatctagg

SEQ ID NO: 65425 - DNA, 583 bp, Homo sapiens
tttttttttcaccctgaagcactagacagactggtagaaaagggggaggcaaaggtggattattttttaagccattcatttatccacacttcctctgatcctttcccctccccacaccatcccctgctgtcatttatcaagactgctccaatcctgtggaattccactcattcttcatcagggctttgacctcctccaatcaaacaagcaaggtacattctgggagagtgctaatgccagggtatcgggggtgcagaggaggaaacaatcgatgctccaggactttcccacgcttagtggaatcaattttatcggtgtttggacactggatgtcaaggctggtcaaatggaagccaaaggttctgtgggggagggactgacagaggctgctgctgaggcttcactcatgggacagcttcctggaaggggctggttacctcaagtccagatcattcagagggacatgaggatcacactccgccaatgcagatgttgagggaccttccctctaagatgtgaaaaagaccccaagcaaagttcccaatgtgccctctctgcaccttagaaaaccacaaggaaatat

SEQ ID NO: 65426 - DNA, 785 bp, Homo sapiens
cagagctgctgctttgtggaaggttcacaccttgatgggaagagctttaaatctcccatttcctgtattgataagagcatgatcacctattttcaaaataaggttcattctcaaatgttgcaatgccaggtaggccatcctctctgctgggagaagaagtacttggagggtgtcagttttgagaaaaggatgagaagcagaggggagggaaacagcggagtaaggacaggaagaatattttttgttcatgtttggagctatgccaaggtgttatattcccattaagaatggctagatctggaagaaacttgatggattagtggaaagtggaggtggggagagaaggcggcaccatcaattgctgaaattggccccagacaggtttcctcattgttctgccaattggttttgcaataaattggaggaaatttggcgagatattcaaccagggcatggacagtgtactaggaccaaaataaacaatggtgaataacttggcagttttttattggatatttcagaagtgagttatgagacaccaagttgtgagttagttcttacaagtttacatagtgagaattaaaataaggcgatagatgacaagttttgctcttaaaatttgggagacaaataccaaataggaaatctagttacaaaacatacaatgacccagagaagaaaaacagaataaggtcaaatatttgagatgacatagcacatagtcaacatattgaactcaaaggatttaccccagaaactccacatacagaaactacagaatatct

SEQ ID NO: 65427 - DNA, 852 bp, Homo sapiens
aaaaaaaaaaaaaaggaaatgccaagaacaaacgtgtctgtctgtcatcatgttcttccggcatagatgactgatttttacagagttaatgaaaatatccacagtgatattcatggtgcctccacattttaaattatttctccactgtgcttgtaagaaaagagaagctcagatctatagtttgttactataatcaatattttagtgaccaactttcaaatatgccattttggctgctgaaccatttaactaagtcaaaggctacacaacacattcggccatctttatttcttctctttctctctttggccaaaaggtggtagtaggtaatcaactgatagactgcctttcaataatggaggtcaaaatgttcaaatccaggttccagatgtcctggttaaacagctgggagtggaatttgactcccatggaaagagtttaagccatgatttggtcattgacctccaatgtttgctctgacttcttacaggggagttcaaagtggaactgtgaagtttcccaagctccatgcaggtcactgaagtccaccctgcaaacaacagtccttcaccttctgaagacctgtcacctatgaagcagcaaggaaggaatttcttggctctgcttcctggcagtcattacctgtgatcttctatcccaattggttgaccctagcaactgagccccatgaaatatgtatttagtggactgaatgaattggacaattgaatcagaaaaagcaacaagaactcccaaggttaaaacaagtccaggactacactcctctcttcctgcctctccacattgatctgcagcttctagagaagactgagcaaagagatgctggtgtct

SEQ ID NO: 65428 - DNA, 1739 bp, Homo sapiens
atgtctgcccgatggtctccgagtctcctgaatcaggtgtctgagaattacacagttatactgtacacacaatgcccttctacccgggacacagaaataggtccacactacgcggacttttttctcctaggaaaggacgatgctgttcttacactttctgaaagtaatcacagagccctggatacgaagctattgtatgcaaatctcttaaatttgtaaacgagctatagggcaccagaaacatcccatttgaagaagttacattcgttaaaaaaaaaatgctgttgaacaaggctgtaacttactaccttatgaagagttccatttcctataagaaatgtcgggcttcttccgaagacaacgagagaaaacaagattttaagaaattctcccggaaggacattgatttggatcttgtgatagtgtcctcacttcgcaaattagaaagggaaaaaaaaactagtttttattatgatgtgggccgattcaccacaacaataatttaattgaggcgaatttttgcaagagcccaaaagggtggggggggggggggagtttaaaattaagagtttcccaatgctgtgcgtttatttgggattctgaaagcacagaacccgcaagcgaccaagacttttcttctatcccagagcagatagctccgcacttacccaacctggctctaagcatttcgtgtaaacacaaaggttgtgctcaaatcacacttgaaatacatgagagacaccaccaatgcctcccccagaactcccaactacatgcaggtctgaaccgaccggactagagtcagaagcaccggcgcttcaccccttcaggtgtttcgtaaatgccagcaaaagcaggcaagcagcatgactccgccagagtggagcgttttgtctgcggtggtgcccatttgtttggtcttttacaaaccaagtgaccggcctgggcctcgcggcccgggacagccgcattggcaaacttctatctctcaaagccagagcagttagcaaactctcccccagacagggcgactcggctgacgtttttgacccggccaggaggcaaagaccaaaacgtcagagcagtagccctgttactgaggagcgtcggcagggtcgcgggtagagggggctggagaatgacttgtcagagctcaaggtcgatgtggcgcggggcggcctcgagagcgccgggctcctgcgtggccacggccgccgctgccaaccttcgcggggacttagctttgctttccattgactccctttgcaaaagcgcagcagaatcctgaccagccgcaccagccccggcgaacccgagcatgttaatctatttatatggattattacggaggaacagcgggcgttgagtcaccaaaacatttgcttcaaaagactatttctaagcacttttgcaggcaggcaggctcgctccaggcgcgtaaactcggctacgcattaagaagcggctgcttttcgaatactgcaaactccagctaagtccccggtgccgcggagagagcagtgaaaagaaatgtcggaggtgggggtagatcctagtctagacacacacacttgcgcgcacacacacacacacacacacaagattcgcgcggagaaggcactaaaattctggcattccgagagtacgacaaacttacacacttggaagtcccgggtcccccgccttccccgcagcaccccccgcccccccaccctaccgtccgccctttggctgcgatc

SEQ ID NO: 65429 - DNA, 1281 bp, Homo sapiens
atttgagcacaaaagacattgtggagtgctgattgctgtgatgtttttgttttttatcagcacctttggcaatcctagaaaacaagctgaggaaaagactgtatctccaaaaatctaggcagaaaaatcttgaaaagtgccactccaatagatcacacagaaaattacatgtcagtagttgctcactctggcaaaaatgtttgttgtggttttcatgacctcatgcttcagggcaaaagctgtcccttgtggaggtcacagggaatattagacctgaaatcaggagcttgtcagtagacagaatgccagaggggtgacttgcttatctggttttaatatggcaaactttccgttcctatgaacacatacccaagaaatggagtatccacttaaaaagcaaaggaagccagagaaaatcagtgtctacagggaaccagagagaagcctgtcgtattaacccattaaatgattcagagccttccagatttctctgtagagacaatgaaaggggatgatttttctgctccctccagtttaactcattctaagcagacgcaaagccattgtagaagaaacaagacctaatcctgttttccttggccccagttagatggggagtttccaggttcagagaaacgttcaggtcatttttcattaaatagatgaaatcactccttccctcacatgggcacacctccccatccccactcccacaccccagatgattggagaagtgtctctaaagagtcagtcaccttcaccctctcaggctagttttactactgggcctgtgtctctggcagtcttaaccagagtccaacctctctggcattacctcacattgtctgtttctgcttattggattcctggctgacatcccacaccaggaacatggcaaccaggaaaatggtagttatcaaatcgaggcaacattagtactcggcctcctttgcaaattccttcgacaaacattgattgagggcctgtgatctgcgggggactgtgcaaatccttccctaccccttcagacatcaaattctgttccttgtttgtgacatagccttccatgcgctgaggccctcccttcttacaaaatctctattttttttttctcttgccaacactcacaaagtcctttttaaaagtctctgtggtgttcactaattcttgcctaccttattcgttctaatccctttgtctattaaaatcaacacacaccattccactgcgactacccccttccctagcaaatctgtatgtttgctagactgttctcccttc

SEQ ID NO: 65430 - DNA, 1137 bp, Homo sapiens
ttactgcattagtgattcaactgaaatgatcattactattcattattgatggtgggaagtagagaaggagtagcaaattcttcactttctcagaaactctttgtctcttctgatatgatatctgcactcttccttcaagttgtcacattttcagtcttcatttctgagagctacccgacctaaaagtctctctggagaaagagtccagttgttcttgaatgagagccaatgattatgactaaatgtcttttctgcttattcagtgaatcatcctggtcgatcggtcattggaaaatgccatcttaacctgctgctgactttatgtgccaagaacccaacaaaaaacaggtttcaacaaagttgggggaacttacatgagatcgaagaaagaacagtcatgctgcacgaataggttcaatggcagttatggggcctatttgtccatgttctctgatatatttaaaaaatcattcaatatctgtttttacagtctggcttggagagtgaagagggaggaaggccacagggcacatctgatgacctccggatactctttttggtgatacccaacgagctgaggagcagaatcttgacagactgcaaccccccctcaggcttgggcccaccccacaagctgctgttgtcctgccacagctgtttccgttttttattacaattttctccgcctttcatttttcaggccaaagagaagctcggggggcccatctgttcctctcttgctcttttgcctgttcccagaagcaaagctcacacatgcacgcgtgcacacacactccacaccagaccccacaagctccttttaggacaatgaatgggaaccagaagtgaacatcacccacccagcaacactccagggacctgaaaggaaaggcggccttttgggggaggaggcggtgtcctcagaaagccctgatggaagagcattctgtggaaggagcatcggatacaggagcaaaagcttctcacgaaaacaacaggttttcttccgaggaggactttttgttttgtttctgtttttacttcaacttattaaaacaaacacacaaaacagggctcgcagtgcaaattatctcaagtccagaaaacctaagacaaatgatcttgggctgaagaaaa

SEQ ID NO: 65431 - DNA, 1140 bp, Homo sapiens
tcacactgtctcagccaatactaaccggcctctacgccatctttcataattatttttctccccttcactcctgcaaggtttgttctcagctacatcccccttcacttcccagctgctgttggctccttttcatcccggaacagtcaacatcatcgccataaacaaaatacaatgttttttaaaaatgaatcaaaaccaggggaaaagttacatttcagatcaatgctgaaaacgaagagtttgactaaacagagaaaccaagtaatttccaggcttccacggagcagcgactcctctgttcccttttcccattgtggaaagattccaagcagcatctcttctctccggcaagcagcattctcctgtgggtcactcgggccctgataagacagatcctctgtgtttgactataaagcagtgactcatccttgccattgtttgtcctgccgacctcttagtcctggccactgaccaagtattcctgcttatccacatcagcaggcttaagttcagccaccaggccactgccaccggctgaggccagtttttaccctgaagcgagtcctctgtcaactctaacccaagagccaagagaaagagcaaacaagggtggcttcagaccaagccagaaggaggtgacggcagagctacagctcattcgtgctgtaggcgcagcctctaaaccctcttttcacctctccaccccatggatatccagatactttgtccctaaccctttactggcctgagcatctgatccctgcagcctaaagttaagagctggcactcgctctcacttctgtaactatgccttcttgttctgtacacagcacactagactagtttaaagcacagttccaggttctgaagatcgagttcaaatcctgattgtctattttctagctgcacaatcttagacaagttacttacactgtgtgcttcagtttactcatctataaaaaggaggtaacaattgttacacacctcccaaggctgttatgatgattaaacacataatacattgaaagtgctgaaaacgatgtctggtatgctgtaagcattttaaataaaatgttagcaagggttattaattaattttcccagacttcacctttttttttggtttatctgacttactcc

SEQ ID NO: 65432 - DNA, 750 bp, Homo sapiens
cacggtagttttgctccccctccgctgtttagcagctcaggacacctaaaatcgctctttatatactggccaaggtgaaaagcacacaagctatggtggaataccagcgcaggatagaggaggcgtgtgtagggctgggagccctctcccaagaggggaggttggacaataagaattgtaaggttgctccctgttctggaattctataaatctctgcagggtgccaggcaccaaaggactggcctcagcaaaccctgagatggcactggaaacaagatggattgcagccaaattcaggttgtgctaatatttgttgaaagcttttctgtgacagtgactgtcacatggggaaagggaagagacagactagattggccaggagaagggatgggcaaaaggaatgtggaattcttccatcagccccaccaccatccccctgctagcgagggagcagggatgggactgttaaaagccctacacttacaaacctctctcaatgtccagcccagctgtacctcttccctgtgtaagacacaagcacagagactcactcgttggcactggtcaaaagtcactttccaactttcgatgtcaggctcaacacaaggcgcttccaaaagggcctttccacccatggttggcactcccaatgttggtctttgaaatgtcctatggttttcggcttggaggaagttgccttggcccaagctctcttgagtccacacccagatcgcctaacttagtttctgc

SEQ ID NO: 65433 - DNA, 852 bp, Homo sapiens
caagatcctgaaaggttaccccatctctgtcctatgctcctcaataccctctatacctggcctgtgtcttcctaatctccaccccagaaacaaatcgtcaatcatctctccaaacatcacaagcatctgggaatgtctcctgccccactcacttccctgctgggttcacccttccaaacagagaggggctgagcacacccaatgtgctaaatatttccctgctgcagaatctattttgctgctgcggctgctgcttggcagcaaagagacaggaagctatttagatatattatcttccttttcaggaagttgagaggaacttttctattgcagttcacacaaacattccgtctaatggtcatttagtcatgccggctcattaggtcaccagtgaggaatgcccaggctgattaaacatcattccagcttctctactcgctgccccgggtcccggggagaaaacagagcttccatggcctggtggtgaccaagacaaggagcccatcctgaaagccacaggggctcactgccaacctcacagcccctccccagctcccacacggagcacttcttacttctaagggggcgctgatggctttataaagaaatgtgtatgggactgagtaggaaggtgggccccatgaatacctctggtcagataatgctgtcctttaagggagatcaaagcgggcccttggcagaaggccctgagaatgctgttaccaaaaaatgcaagacagacccatgatgaggtcacagagatgaattgatagctagaacacaagcttgtgcagaatgtaacaactaactatgagtgagtggtggttatgcactagacatattccaagtatt

SEQ ID NO: 65434 - DNA, 2629 bp, Homo sapiens
gacaaaaaaagaaaaaaaagttgtgatttcccctgaccaacccatttctttttcccccttccccaacccctgtggaatttgcaccctcaagaggcacctggggagccaccagcaactaagagttcaaggggctcctctgcatttggggtcaggcagagaggagccacagcaagggaaggtgagtggacagttgcaagctgtgaaaagccaagttgcctccaggcatctaggcctgcgtttggttcccatgacactcttactggcagcgttaataactaaccacgtcccagacaggtgctggcggcctagccttaggagttcttgttcagggctggaaatgagtcacttcccttttatagtttgctaggagactgagtcacccaggggccgaccctttcacacaagttctcacaccctggccaactaatatccatgttcataccctagacctacccatctaccaggtcagccaggcccagtggggctgaccctcatggtctatgtcaaacagcatccccaggagtgacccagtccctgccttttccctttgtccccctactctctcaatggagatggcccactcactgtcccaagaggcagctcctgcctgggcagctgtctgagaaggacagagtctgacaggtaggcgcccatgcccaaggcccagttagatccacctcatctttgaccttactctaaacattgctctcatacgtcctcaatcctctgtttggaaaccaaaaacaccagaagtggaaagttccagagctgatgaactaaaggacaaaactgcgatgcagcaagtcagcttcaaccctctcgggaagggcagaggctgaaagcaggtaaactgaggcctgtgactgttaatacactcccctacttcaggagtcaggtgggaggcaggagaggtaggtcatcgagtccaaggctctgagcacccacattcgtcaggtggctctggtgtcagtctctcaggactaatctcctgatagacaacaaataaacatcattagagaaaacaagctcatatgcatttttcagtaacccttctttccccactctcgtatggcctctcttatgtttgccagcaggtgggtacccatgcccaagacccagtgacatccatctcacctttgacctttaccctaaacattgctctcataactcctcaacccaaggggtgcatttggtcttttttaatttaaaaaattaatttttcttaattaaaaaagagtgtatgtaagagaaaaagaaataatgaaactaaaaaacaggaggttaaaaaaaaaaaaacctccccgaaatagtttggggatttacttttttttttttaatcctcagaaagtccctcttgctacctggtttctaaaacagacaatcaacagagatgacatcagattaaacagcactgggtgtctcactgccaggggctccaggcaggtgtgagactgacaggttgagaaaagatgacactatttcttcccttagaagatgaaaaccaaggaggagaaatgacagcagaggctgagccccgggtgtggtgggaaacgtgacaccctgccagccgttggccttttgggtgaactctgctcgctcctctgcatgggacgacactgcaacccggcgcttgttagttcccccatctctcaggtatcacagccaaactcaccccaagggctcagaaagctcagcctgtggctgtctcacctccacagagccccctggactttccaagcctgcattttgaactctgttggctgcggccgtggctttcacttgacctctgcagagagagaggggctttccctgggacacacgtcttgcacatagcagctaagagcgccagccaagcttcgtcgatagcaccaagggtccagatgccaggagagagactccacccccagaggtggctcaagagtccaagtgagtcatgaggtctgaccagcgaccataatgtcccagggtgaagtgggaggcctggagatggagcccgctgcagggacaggaaccacagtgactcacagttggaccccgaggggaagttccatctgcaaatcctctaaatggctctggtccccgggtgagctcatctgcactgccgctgacactcagaaccaggactggcttctttctcccagggcccgggtttttcactctcaattatggttatggcagaaaccaacattcgagccgcagcacctctcccctacccgccacacacacacacacacacacgatggatggacctggggagacagcgtgtcctcctggagcgtcagagttttcacctttaaaaacagtccttcctcctaatgatctcaccacagaagctcttggagctatatggtagggaatgtgacagttctttaaaaggaagtatgtgaaatccacacaaggcagtaacattgtaatatcactgtttaaaactttggctccagggacctggccatgaggctaccatcttgctccatctccctgggccattggtctgggagcggaagaatgcaaggcattggggaggaaagtgtccatgttgcccaggagcctggcgggatcactcagaaacacactcaaccttgggagaaacacacaggtaaagaccccaccactcccattgccctttcct

SEQ ID NO: 65435 - DNA, 949 bp, Homo sapiens
acctcgaggtaaggtgagaaacacagagagccctggagagcagtccttgttctagcaccttccaccgagctcagtaacacgacagtacattttgaagcaaagggaaaaatcatgagatgttgcctttaccagataactcatcttgctaaggcacctttacccctcgtggtcttgagggttctgggaaggcattgatgaggacctccagtacgtccacccagcattttattatcataagtgcgaagcttggttacaattttacaaaataaaatgaaggcttcctgattcctagtccctagttgggataacctccccaaagcaagcctggaaaatccctgggcggccaggtcactggggctcaaagtcctcctcctccccgccccacccacccatggaaaagtactggcatctcagcggctgggtttcttccaggaggccctgctggggatgtgtcagtgcccccaacccgaagcccacagggaaatctcaccccactgggttgagccccaacctcccactctggccccattggtttcacacccttgaacaatcctgcccaaataacctagcagctaagtgtggccaggggccaggaaaaaagccctgaaaagcagtgagctcttcagatccgagagctcacagcttggctgggacgctgcccactgtggaaaatggaacgtgaagatctggtacagtgagggtggtgggggagggaagccctgaccccacccagcctgcgtaagagcagagggtcaacttcccagggtatctggaaagctctggcaagggtgggcagaggtgggtggcgatggggccggcggacacacggcctcgtgcttttcatgcgatgacacacctgactggccaggcacacctggacgtcggggcaggccaagctttccaacagtcactcactgttccttgagtggagaggcctggcagccacgct

SEQ ID NO: 65436 - DNA, 1519 bp, Homo sapiens
acggtctcgccatctcctataggctagagtgcagtggcacagtcacggctcactgcagcctcaacctctcgtgctcaagggatcctcccacctcagcccctagggtagctgggactacatgcacacaccaccacacctggctaatttttaaattttttgtagagccaggggtctcactatattgcccaggctggtctcggactcctaggctcaagtgatcctcccgcctctgcttcccaaagtgctggtgtgagccactgcgcctggcctgaggctgattctggcagtagtgaggtcaacaggggattacacacccaatacttgtgccataaaagctccaaccaagagtcaaagggttgatctcgtagaaaactctttagctaaagacagagccaaaaaaccaaagtgcagctcaaagtcagatgtgctcttagacaggtcccccgagagagctgggaatcctgggactccatcacttacattttcctagagaagtctaagcccctgggttcctttggcagtctggcagcttggggctcttcccaggctgtttttgaaaggggggaatcaccctgcctgacccttttccaacactacccatctgactcctgctagtggaggggctctttaagtcccaggggaagggctattcaagtgcttagaagattttgcaatcaaactttcaagggtaaatatttgcagtgactcaccagagaggtttttctgctctccttctggcccctggggagccacagggctctttccccaggtctgttagcagtttacgatgattatccgtaggctccctggacagctcatgagtcaagagactgggttcccgtaacccactcccttgcccggaggcacctgggctcaccataccagaggtcagcagcacatttacagcaccatagcctagtaaagtcaatggtacaagtgtccagcttgtggcctggaggctttgcccaggctcgtgggacaggcagacaatttacaaggtaagtaacacatcataaaattgagcagcaaacactaatgagcctacaagccaggacagaggacctttctctccgaccagggaaactgacacagccactgtcccaggtttgggcaggcgtgccctgctagcaccgaccacagtgaccaaggataacgcatcgtgctttcctctagaccccaagaagcaactgtaaaccttgggaggctttcaagagactccccagatcaagggaccttaacactgtccccaaactctatttggcagctggtttatcgcggccaccactatcatccacccccatgattatgactttggtgagtctctctcctgcttcaaatcacagatgtggtccctgactgaggctcactctgtttgcagaaggggactacggtgtcatcagagagctggggagtggaggggtgagcttcctcagagtgtagctacaagagaaagcatttggctctgcatttgttggtgctctgtgtgggtgcccaatggcttgaagttgtcagcatatct

SEQ ID NO: 65437 - DNA, 1739 bp, Homo sapiens
ctcagactcccaaagtgttggaattacaggcatgaaccactgtgcccagccatgtcactcaatcttttaacaacaaaaaatgacacatggtctttaagacagtggtccccaacctttttggcaccaaggactggttttgtggaagacagtttttccatggacaggggccggggtagggggttggggatgaaactgttccacctcagatcatcaggcattagttagattctcttaaggagcacgcagcctggatccctcacatgcgcagctcgcagcagggtttgtgctccattgagaatctaatgccacggctgatctgacaggaggcggagctcagaagataaagctcacttggcagctggctgcccacctcctgctatgtggcccagctcctaacaagccattgaccagtagcggtccttggtctggggggttggggacctctgctttaagacagtatcacagccgtccaacatcacattcagctgtctgatccaaaggacagttcttctgtaacacaaggaatctgttttacattagcccaggacctagaggcatagttcctgggaatcgttatagttacagaatcacccatcattccttctctttctccacttgggaagttaaggaaaaaagaaagcaggaaggcagggaagagaacttcaacctacctacctcccggggtacatgaccactgactccagtgagtctgacttaatcctgtctcaccgtgatccagcaggagaaatggactttgacccatttctctccagagagttctccctgcaccacttccctttctaggggagcagggaactctggcaccagttcaggggtgcttctgccatctctagaacttgtcgggcccagtgtctggtaaggctgtctcatgctgttatgatcttggacccctttcctctactgacagtggtgcatgcagatgacagggctttagccaatggcttgcggttcccatcgcatgacctggccccagctctcttggctcggtgatcacagccacatgccaggctgcggtttgcacggtgcttccctgtaagcacatacatgctcattcccaaatccagctctcctgccatatgtcagtaaaaaagcctgaaatctctggcttatccccaattccagtgcatttttacatttttaaaattttactgtacagtccttcgggggagttatcctcaaattaaaggatggaaaactagagctcagggatatacaatcagtaaatggcaggtgtgagctccagcccagacccctgctgcacagagccctgcctcaccctcctgtcagccctcataatgtgatccatggtcaaaggcctaatgctacagattgtgggggtggggcgggagtatcatctccctgatgatgtcatactctcaataaaacccagcaccacagtgatcgttctaggtcctctcatatatatacagtgccacccagcacatcagctgtactctatatttttaatgaaatgtgacattcaaaatccgaacttactaaaatgtaaataagggggtaattaccaagacattactttaagaaagaaatcaccgatcagttcctctaatgccttgttctctgtttaaataccactggctacttaacagagacattaacaggtatgtcaggtttgatcagaaataaattcattgcacagagctggttgtatcccgatacgacagctaaaagtagagtggtactcaccaagtgaggcatca

SEQ ID NO: 65438 - DNA, 1003 bp, Homo sapiens
caggtctgggcggagaggactgtggaaaagttctctaatgcctcgctactcaaagcgtggtccgcggaccacccaacctgggaattagttagaaatgcacactgtcacgccccacccagacctgctgcaagttaaccagattcccagtcaagttccagaggtccagctaacagccagagcaagtgggaggggcctgggagcagctggatttgtagctgcctctgctcccaggaatcccgggtacccccacacaccgcctaggaagggacgaacgaagaggatttgggttaggactgtaaaaggaaggcatgtcattgccttccagatcaccctggagagggacatagccggggtccggggacttccttcccaccgcccctcaccctcccaccccgccccgacacctgccaaagcctccaatttctcctccaaacccctcctctctccaggcgtacccccttccaagctccaggtggctgcccttccaagtcccacactcttgtcctgatggcctccgaccccgggcctcgagcccaaccaaaggcaccgaaggagagaaaagccaactcactagggtgccctctccagcccccactgcacttccatcagcccccgctgccactctctcgccggctccactcccgcagtcacttcctgcttccctcccgcacacgtggccctcccgcctccgggccccgcccccttggccgcaactggcaactcccgcctgaagaatagattctctggttcacagccgtctgcaggctcaggaacagatctgggcgggcagaacagagccctgaggccaagagcccagcagtctgcgagtgactgcagccctaagggaagctacaaacacccaaggaaagagccctttgtaacacccctgatgttacttatgcttctacacctttggcagccaggtccatgccactgggtgcgcagcagagcaggatgtgctgtgtgtgtgttgcgggagaggctgggggcgggtaatgtgatg

SEQ ID NO: 65439 - DNA, 2407 bp, Homo sapiens
gctgggattacagcctgcttcttaatgtcactaactcttcacccaagtcctaggcgcttgtgcctgctgtgccagtcccaggccgcaggctggcaccgtagctataaagggcgccagaaaaaaagattttgctagatagcgatgaattccccaatcacagaaaggagatactgcggatgcttatcagccgaataccagtaagtgtcccttgcagaatgggattagagactgcaaactgcaggcctgccaacagagggtgctctgtgggaaattatgtgaaaacgtagaaaagagcgcgagccagtaatttaaaaatcgacgtccaaatactcactgggtcacctatcagctatgtaatttgggcaggtaaataagcttttgtttcttttttttttttcctcataaatggactaggaatattactcctacctacctggcatggccgatgtgcgagaaaatgagataatctcgtggacaggctctgaaaactgcacttttactgagtaaaaaaccctttgcctctccgggcccccgtttccccatctgtaaaatgagtctgtaaagtgagaatgatactccctacgccgcaaggctcttgcgggttaaactggaatattataaatgcaccatttatttgcagattgaaattctgtgcgtccggaggtggcgggtgggagagggaatgagcagggatgcagggtaggccctgagttgctgggggctcagcatggccgctgcgcacattgcatcattttgtcgacactggtgtgggtgaaatcttccaaaagaaattaaaacagaaaaaaaaaaaaagaagggtctgggacttagcagaaacaagccacaatctccagattctactattcctgggccacgtgaggagcgcccacccgtctggcgctgcgttccccggggcgtcccagcctctcccgcccagcccgccgccctcctcccccatggccaccaaggtcaggctctcgcagggaaaacgtcttcaggggctaaacatcggttttaaacgaaatggaaaacctccaacacgaatcaacagcagaggaaaagcagacgccaaacaagcgctcagaaccccttcaggggcggcgtggtagctcttcccggggaacagcgaggggcgcggatgtccctcttcctaaaactgcacgcggggtgcgatccgagacccagcggcggcgagcgcgcccgagtctgctcgcgggcgccaggcgcgcggagagcggcggctgcgcctgcgccaacgccgtcagtccgcggggcccgatcccgacacctaactccacagagaagctctgctcctaagggaaagggaagacttcagccacagtttcgcagccaacctggcgacctcacctctctggcgacctcacttcccagccggctccgtttaagaaaaccccgcgcaggaccgcgcccgcccccgcgcccgcgcccgcccccgccccctcgcgcccgccccctcgcgcccgccccctcgcgcccgccccctcgcgcccgccccctcgcgcccgccccctcgcgcccgccccctcgcgcccgccccctcgggtaacaaacatggcccccggcggggcggaagcgcttccgcccccaacgaagatggcggagggggcgggactaaaagggcgtaggtagatcgccgggggctgacgagtgcaccatggccaccgcggcaacctcacccgcgctgaagcggctggatctgcgcgaccctgcggctcttttcgagacgcatggagcggaggagatccgcgggctggagcgccaggttcgggccgagatcgagcacaagaaggaggagctgcggcagatggtgggcgaacggtaccgcgacctgatcgaggcggccgacaccatcggccagatgcgccgctgcgccgtggggctagtggacgccgtgaaggccaccgaccagtactgcgcccgcctccgccaggccggctcggccgcgccccggccaccgcgggcccagcaggtcagtccccgtgcccccaccctgcgacccgcaggcgggtcccggagcccctggccttgcaggtcaaccccgcccccctctgtcagtcccagaccccgcgagtcctcaccttccttagccaggagcctatccgcccctcaccctttgggcccccctcagaggacagtgccagccttccttgcacatatgcggctgctgatccgttctggaaatgccattcaacagtttcttcaggcgctttcccccgacttccgggccttgattcctacacctcactgggctcctttcaattttagcggaaaacgccaggagtttctgtcttgacagttcaacgctcacctatataacatgtcctgacattgtttttcctcaggtttctcccctatgttgacacctgcactccaagtcatttcttcc

SEQ ID NO: 65440 - DNA, 956 bp, Homo sapiens
aataatggctttattctctgccaacaccatgccatctttctgaagatggtgaaccttctgaatgctaggataaattaccatttggtacttttgttttgaaatgtccttaaaggaactgtgattagaactcttctctcattctcttttagactctgacaaaagaaggctttgactccatctccagtagctccaaggagctcttggtttcagctttgcaggaacttgaaagcagcaccagcaactccccttcaaataagcacatccactttgagtacaacatgtcgctcttcctctggtctgagagtcctaatgacctgccttccgatgcggcctgggtcagcgtggcaaaccggggtcagtttgccagtagcggcctctccatgaaagcacaagccatcagcccttgtgtacagaacttctgttctgccctggattctaagctgaaggttaaactagatgacctcctggcttacctcccctctgatgactcatcactgcccaaggacgtttctcccacacaggccaagagttctgcctttgacagatacgcagatgcggggaccgtgcaggagatgctgcggactcagtccgtggcatgcatcaagcacatcgtggactgcatccgggcagagctacagagcattgaagagggtgtgcaagggcaacaggatgccctcaacagtgccaagctgcactcagttcttttcatggccagactctgccagtccctgggagagctgtgcccccatctgaagcagtgcatcctgggaaaatcagagagctcagagaaaccagcaagggagtttagggctctgagaaaacagggaaaggtgaaaactcaggaaatcattcctacacaggccaagtggcaagaggttaaagaagtactcctccagcagagcgtgatgggctaccaggtctggagcagtgcagttgtgaaagtgagtgatgtaatt

SEQ ID NO: 65441 - DNA, 2642 bp, Homo sapiens
agtataaactgggtttgggaaagaataatatggcagtcgggtcagattcactgtatctaaagatcttgctcctaattccgatggcatgtctgtaattgggcccccaatttcaaatttagtccactcttcttttctatacaaggagaggctttatgctccacctgctacatgacccaaatcaataatccaatgcagcagcttggggaaccctaggttttcactatgggaccaaataaactcagaatacttttgagaacttcaatcacatgaaataattatttcagagaaggatccttgtggaaagaccgtaacaggaagagcattctgaggtaacctttcccaactttctcctccacacattcttgcagaggaaattaagagagagaaaaaaattaagaaatcccaacttagtccggactctagtagtacatgtcaagcacagaacccctaatttaagacccgcgtcccgaggccaggctccctcgggaaggtagcgagtgcatcgcgataaaatctttcctcccgccttcggagtcaaacggccccgcaatccaaacagtttagaatccagcttgttcttaatgccacagtcaagagaagatccataacccgccttggtcatctgcccttctgtgttcacaaccgttcagggcacaagttcttcggtctaaccgaatctttccctgctgcggggttaagcccaacctttctttctgaccttggggagccggcagctccccgcccggtgccctcacaaaagcctttgggggctccctctccaagatgagacgtttatcccatccccccaccctcctaaatttaggacaggaaagctttagggccaccgtctctcttccgggaccgatcacacttcgttccaaataggaaaagacaggggggaaaaaagatggaggggcgggagacctggaccccggagagtcaccttccagctacccacaggaaccaagcatccgatcactcgcgcatccctctcccctcctcccccggcccgcagtgcaccccacagggagccccgccgggtccactcttgctccgacccccatttcgcgcgccccctcggctctatctcccagatcctcaggcgacgaatggaaagggggtcccttccctctcacctgggacggaggcgctcgctcatggcagctggcggatggaagctacgcggcgccgctccgcgaagagagggaacagagggggttgtgtttcggcggccgccacgcccaccccctcgggccttggctctcgcagccgctcgggtggacgcagccggtggcgagtacccctcagtcggacccgtaccaccactacttccggcgtctgctccgcgcccccccatgtcgctgccgccgtggtaccgccctctcgcggctgcgcagtggcaccatcccaaccgcaccgactggtaaccccgcccacgggaagaggcgggctcggagcgggaggagcgactaggagcttctgggagaaaggacctcccctggggtggcagaagcgctcgcctgttcacagccaacggagggtacggtataaaagtcaagccaggtttcaaataaattcaattatgtcataataatatcatacaagtatttgagttgaatccgtgtaacatattttaaaacaggcggacctatccggcagtggtgcagacggcctgacgaggttccttggccgggggttgggcaggggcctggggggcttccctggggggcttgtcgccggggccgcctgggctttcaggtcttccgaggtgaggacggtgctctgtggggagcttgcaagggcgggtttgttttccgcggcccacgttctaagtctgggggagactctcctgagcggagagggtagggaatcgggtgccggggccggcggagggtcttcctggaaccgcaggaggaaatcctcggtggggctgcgggaacggctgtccctgacccaggagctgccgggccgaccccatccactccgcagaatcagaacagctggcagaatcagaacagctttcagggaaaggaagggtgcggggaggtgggcaggctggtaacgcagcgggaggagggaaaggcggctggagagcgccggaggtgagggtgaggattagtggaactattgaggtcctccttgagcccggaggctggggaggtcttaactctctgctttccggaacctgtgtttctatttggttcagtatcgtgccgcgtttactcactgtgcatgctgccaagtcacctgtctgatcgtgtcctacacaggctgacattcacgtttcattctgccacactcgggaacggtgatcggggaagcatggggatccgggagaagcacccacaaaactagcatcctcctggaggagctcgggtaagaaaacagacacccacgtatagacgttatcgtgggaatgtaccgggatctttcaagtagggttgagtgtgaggtggagtggaggcagaaacgtctagcaggtgtcaagcccttcctaacgttgttagccgaaggtccatggactggcttcatttgtgtgtattattgtaaacaaacagtctgtggctttcatcctgttagtgtgtacctccaaagaaagaaagaatgatggctcacgcctgtaatcccagcaggctgggcgc

SEQ ID NO: 65442 - DNA, 1386 bp, Homo sapiens
tttttttgtaattttagtagagatagagatggagtttcaccatgttggtcaggctggtctcgaactcctgacctcaggtgatccacccacctcggcctcccagtgctgggatcaggacgtgggatcagcgtgagccaccgcgcctggtccatccagagggttttaacaggtctgtttaccaccgagtctggtccagcagggtgtgacacatggtccgcctccaaccgcctccaagcacccactggaagtccagcacctccctcctctcctccccttctgcccacagcctggctccagggctcccagcctgacctctctgcatcctcacccccatccgcttccctgttctctcaagcctctgctgcccagcctcatggcttcccccaccagcaatgtcccccctcccagtgcccacgccataccgcttatcattccagcaaacacaaagttctctcgggcagggagggggagccaggcacctggcagacttgccacacagtgacgtgggcgaggacgtgagggatgccttgagatgatactctactctgggtcataggtcagctctctctcctccctacccttaggaaagtgaccttcccctaactctaacttggattatctctgggccccaccctcctgccccacctcaacctctaaacaattagacattgaaccgctagaccaaaggtcagcaaacactttttgcaaagggccagagagtaaatattctcggccttgtggctgatagggtttttgtcacagctactcaactgtcttcttagtataaaactagccgttggccgggcacagtgggtcacaactgtaatcccagcactctgggaggctacggcaggaggatcagttgagcccaggagttccagaccagcctgggcaacacggtgagaccccatctctacacaaaatcaaaaaaagaaagaaaggagccatagcaacatgtaaacaagtaggcatggctatgttccaataacattttatttacagacaacttctgggttggtgagcagatcgaggtgccaggaaggtggtgcgtgccctgccccccaccccaacacttgaccccacgcatcctcatgcagctcttccgtttggctgttcctgagtcgtatcttttgtaataaaccagtaaaagaaaaaaaaccaccaaaaagccacatctttatttacaaaagcaaacgcaggctgggtttggcccatggactgtagtttgctgactcctgaatatcatatatgaccctcttggccagccatgggctcctaggcaaaactctgaagaaaacaggaagggaggaagggagggagggaggaagggagggaggaagggaggggaaggaaaggaaggaaggaaaggaaataaggaaagaaaaa

SEQ ID NO: 65443 - DNA, 3904 bp, Homo sapiens
ccagttgagaaacagcagccttgagtgagaacacacaggtgaagatagagcaggtatgctcaccaggtaaacaacaaagacagagaagcagggaggcgggtgtggatggtcagaaccgggtgagaacatggcggcacgagcccccagagctgcgttaagggtttcaacgccaaggcaggaacccccagaccctgtgagtgatgtcaggtcctgtggtttcccgatcttatacgctcattagagaggaaagaaagggaaaccacagacccggctccccaggactcaccagagaagctgcaggtcactgtggctgcccaaagggaccaaatatcctggccatgatggctacaggggaggacagctccccgcatcccattagccacaccacccagcacatccttgcgggtagaactattgaggtaggtcagaggggacagcagggaaactcagctgaaatcacggccatcctgggctagccctggggtccccaggatcttgttcaaccccacaccccagaaagacagggacaggtctacccagtgctgcctgctgccacggtctcgcttcctggggggttgggaacgagactttgtggcttgtagaaagccatcttcaataaccagcaaggaagggtcctgagagagttggggcctagagggagtcacgcatctgtcccactgccccagcgaggagggggctgcagtacctggcagtccacactggggatgaggcctgggtgtctggagctcagactagacaggccacccagcaggattgagggtcagcaacagcttggtttcaccagccttgagtgaccttgagtcactctgagcttctaacagagaacagtttggaggtgacgagctggatcatagagtttaagagaaagtaggtggtgggagtctcgccagaggcctgggcaggtcctgggggcagctatggtttgggaggccacagggcattgtggctttgggcggggctttcagaagcatggtgactcagctctggggaagtggctaaaataggctgcccaacgtggggcaggcactccccatagcctgccttgggcgggacacccccaccccaccccagaaaccacatcccactttcttggcagggagagggaaaatggatcacagctcacagccctccctagctctcctgagcctccggaggaacagattcctctaccctcagcccactgaccacggaaccttcctttaaggtgggaacgaggagccctccccagaaggtcaggcccctgcttgggtcacagcaaccacacctttagttcagccctgttcctgagactacggaagaccacccttgcctggacccctcgcctatcctccctggccctcccagcttggccagcccagcagacccagagcagaaggacagacgggaccaacacttctcactccaagtgaccgggcagtggcctgtccctggcagcttggcttgaggcaggcgccagacctgagctctcatggggcagctaggcaggcctcgctctctgaagctgccctgcggttcaccccggtatacagggtacacaacatgcctcaatgcccactgccactgcctccgccactgctgctgggcagcatgccctctgcagggccttcccctagctgttctaaccaaccacccgatgccaggtccaggcaatgtggccgaatagcagagggcttttagtgcacgatgactttagttgtgacctggatcggctacaagaggctttgttccattactcatcatccagtcactcactccatgacttcctgcagacccactgatattcacaaactcttctaggccctggagatagagcagtgaaaatagcacgctgttttcccagggcacgtgtgtagtgtgagtgtggggggtgggggtggggaatggaggtgtaaacctataaataaaataaatggtatctcatattcctcagtataaggagggaaaggggtggtatgagtgggtgtgggagtcagggggtctgggggaggcccctcttgaggaaggagcatcatgagttgagaaccaaatgatgagaaggaaccagccgggtcagaagcgacccaggcagagggaacggcgcgtgcaaacgccggggtataggaacaggcttgtggcatttatggaatagaataaaaatccatgcagccagggcccaggttacatagagccctccctaccaggccacataaagagttctgttttgtttttagtttttattacaggcacctgccatcatgcccagttaatttttgaattttttggagagaccaggtttcaccatgttggctaggctggtcctgaactcctgacttcaggtgatctgcccgcctcggcctcccaaagtgctgggattacaggagccactgctcctggccgatttttttatgtttttagagatggggtttcaccacgtcggccaggctggtctcgaactcctggcatcaagcaatccacccgccttggcctcccaaagttctggcattacaggcatgagccaccgcacccagcccaggtaaggagtttggaggtcattataggtgtacaaggaaaccggcggctgtttgtaagcaggcgagtgattcaatctgtgtatctggaagctcccggaggtcctggcattggaggaatgaaggaggggagctggaattcagtcaggaggctgttgcagaaatgcaggtcaaagaggatggagaccaggatgtgggtctggcgaagggggacacagtgggagacatttaggccatgttttggaggtagagacacccgggattgtggagggcccagaccagggaggagagaaaagacaggatcaaatgggactccaggccttccaggggcagcctctggtcctggccatcctttcccaggttttgcctggcaggccacggccccttctcacaggaggggctgacatcctacccctaggcggaacttcactttgccgaaacacaggtggcattctgctacacaaggcttgtcagatggaacagcacgctggagggggttgtgcaagaggctcactgggacatgggccacaactctaagaggtgagggactctggctttagtcaccagagaaaaatccagtactttctggaacactcaccagccttaccctgcaaagataggaaagcacagggaaggcggaagactgtgtttcattcaaactgtggcagggctgagggcagctaagtgaatgggcgagaacagtgaccgcttagatacacgtggttacatgttccaggcaggacttcaatgccgactgtgttgtgattttagctgactttagtattcttggggatcttttaactccttcatgtgccctgctcaaaagcccttgcatctggaagtgtgctgcgtgcgcaaggaggttaaggctcactgctgtaatattctgagcctaagtaaccacaatcaaaaaccaaacacaaggccgggcgtggtggctcacacctgtaatcccagcactttgggaggctgaggcgggtggatctcctgaggtcaggagttcgagaccagcctggccaacatggtgaaaccccatctccactaaaaacacagaaatcagccaggcatggtggtgtgcacctgtagtcccagttattcaggaggctgaggcagggagaatcgcttgaacccaggaggtggaggttgcagtgagctgagatcgcgccactgcattccagcctgggtgacagagcaagattctgtctcaaaaaaaaacaaacaaagaaacaaaaaaacaaacccaggatgggaacatgaaatgtcaccatcaggactcctgtaccatttatgtatctgtgtcaaatatctccttaaaatacctgggtgtggagggatcatactttcaagatggaaagaccaaattaagggacttgccc

SEQ ID NO: 65444 - DNA, 776 bp, Homo sapiens
aaatcacccccaagccagacacgtttattaggtccttgttttattctaagttgcctgggcggaggaagtgggcaagctttattaacctgacatcagggggcacagggagatcgggaccctctcaaaaaacagaactcgctctccaacagctgcttcctgatgcttaagcctccccagctgagcaggagatgagcgataaggatcactcccaccctaccggagatcggcctatttccagtgacactgaagctccaagctggaggccagcctcccacataacagtgggatcctctcagagagatcctgtgcaggtgaaggttttacttctatagctctagcttggctagactgtcactacaagggagcagagaaaacaagaaggggtcacatgagggcaaccagcacccaggtgctccagccaccactgaccgccaagctgtgtgcagaattagatcatccctgggggtagatctctaatggggaaggcactaaagtgagtcttagctcaagagtcagagaaacaggctccctaatcccctcctaccccatccctccagtacacctcctcattcaacagttctcattcactgggctccgctgcgtgccaagcactgtactgaggacaacatacatttatgcccttgaaactcaaagcaaactcgcaaggaggctgccctgattgcccctattttaaagaacgagaaacggagactcagacagagtgaattattttactcactctcacatctcacagctttttttttttttgagacacg

SEQ ID NO: 65445 - DNA, 1240 bp, Homo sapiens
acagtgcatcataagtgtccctggggctcaggcctgggagggctgctcaaggctctggatgcatgagtacacacaggatacgcagttgtgcacacaatttcaggttaacatctcctgagtctgagcacctcattccccaccactccagggaacttatagattaatcctggaaaatacaggctacagcccaacaccccaggtccatccaggggagcctcctgctccttgtgggctgggaaccagctgccctgcttgtctccttcatcttcgttcctgcacccacctcatccttatcctcatccccatcccagaaccacaggcttcaggccaggggagaagcaggtcagcaggaggtgaaggggaaaccttccctcacctcctgggaattagaacagcacagagaagggaagaaaaaggagccaagactagggagtgaccggaagcaacaacggaggagtcaagacgaagaggagccagtgactcaaggacatccggcaacttcacttgattacagggcccttcctggaaatgtgtgcttcccggagccaccacccgaagccagccaccagcagagggaccatctgggccaggcaggatggatgcctggtggggggccccactgcccccatacaggctgggccctcctcctctaggagtggtgctactactgggcagcagggtgcctccctcctgctcgggagtgatcgcagaggaaagtgccgcgcttgaaatcagatctgccaggccttgtttggtttcactttgccgctcctaagagccgggtgctcagctaagaactgggaatttcatggccaccttggggtctccaggagactggcagatctaaactccctccagagcagacaggctaatcttgcatcttggccctgccggaagttggggacaaagagccccactccctaggtcacaaggtggcctgccacgtgggtcaagttatttgtgcctcagtttcctcattagctctcagaacaattgataacattacataactcccaagtgctgtgctcgggtgagcacagttccatgtgtgctataaagatgatgctgtcacacccagtgacactccagccactgtcacttcgcaaacttcatagagaacagccacctgagagcacctaattcaaaagtctgtacagtgaaacgtgggctgagacaatgggttgacccttttcaaagtcctgggggttcccaggattatctgatgcagggggaagggtcc

SEQ ID NO: 65446 - DNA, 1241 bp, Homo sapiens
gacagggtttcactgtgttagtcaggatggtctcgatctcctgacctcctgatccacccgccttggcctcccaaagtgctgggattacaggtgtgagccaccacgcctggccctgaatttctctcttttttttttttttttttttgagatggagtctcactctatcgcccatgctggagtacagcaacctccacctcttgggttcaagcgattcttgtgtctcagcttccccagtagctgggattataggtgcacgccaccatgcccggctaatttttgtatttttagtagagacggggtttcaccatattggccaggctgatctcaaactcctgacctcaagtgatctgcccgccttggcctccccaagtgctgagattacaggcgtgagccactgtgcccggccctaatgtctgaatttccttcccaacgcactcaagcaaaaagggctgtgtccagtgccacatgcgggctccttccagcactaccatccagttccctgccgagagagggcacgcatgggcttggccttcctagagcaccccagaagcactggctggagttggccttcaggacactctgccggatgacccctcaaagtgtccccagctccagaatttggttcttttcctcacggtcgggaaaaatcctccagtacgtaggtcagaagagctacgcagagctcaggtcagctctgtttccagggcgagattgctcaacccttctccctccgcccacaggccttatctctggcatcaacccagctccccattcctccaagggacggactcctccctccccccacagggacaaactcctctgagtctgcagaaccagaatgagaacacagaaggctggacttactgctaaccaagtgcaaccctgaccactctgacttctgacttcttcacttcgaacccaatccaaacgtaggggcgtggggtgggggagagtgaaagggagaggccaacatcaaacaccttttggccacacctgcgcacagacagtccgggccgcagaaatcaatcagtcactccaaaggggtggaagccctgggccactgccaacccaaggcccttctggaaaagctctggacttgttaagaagggttggccagggctgggtgcagtggtttacgcctgtaatcccggctcttggggaggccgaggtgggtggattgcctgagttcaggagttcgcgaccggcctgggcaacacagtgaaaccctgtttctactaaaa

SEQ ID NO: 65447 - DNA, 3690 bp, Homo sapiens
tggtgggcgccagtagtcccagctactcaggaggctgaagtgggaggatagcttgagcccaggaggtccagcctgcagtgagccttgactatgacgctgcaccacaacctgggtgacagagcaagacctggtctcaaaaaattaataaataaaataaaaattatttttaaaatcaaaagactggtgtaagattcctctcccaggtcaacactcactcccctgacctttatacatgagacctccctttgcttctgactccttggtctctggttctgtgaggtgctgtcgggttccagaggcagcagcacagtggaggcagggtacagaggatggggacaagcacggtgggtgggcaagggaaagagagaaacgaggggaaaagagaagaggaatccaaaaagagagaggcagaaaccccagaaaatggagaatcattcacagcacaggcctaggctgtacagcagagcaggagcaagctgccctctgtgtgcagggaccctaggacttcagggagatttcagaggggaggcgctgagactcaccccagaaccaccgcccatatgatcacagcgggcccctcctagtccctgcaggggtccaccaggatgcctgggaatccacttgggatctccccaaattcactgaacaccccttgtgggaaggagcagctgtcttcaaggagtggagaggcaaagtccaagttcagaggagataagccaccccactaatcagtcagtcacatgtgcagctcacacagggcagttgatgagagcaggaaccggcagggcacccccgcattcagtaggcactggcttctcagcagagatagagcctcaggagatcctggtggatgccctgttattgccccaggagcccctggggctgccaggggctctcttagggcctggctcagtcccagccaactcccgatttctgggagaaatcagaaatccgcagctcagcaatcccttcctttgtggcctgttctttgttctcttaaaattcagtccaccctgctggtggtccctcctccaccctagcctcagaagcgggcgggggctgagggagttattggaaacccagactgccaaagaagtcgccttgcaggaggcccctgtcaccggcccctcattatttacactcgctggatgggacatttctctggtacagatggctgctggggttcggacgagagagagattttccctccagcaccctggaccctcaggggagggcagggggcttcgcagcgacgggggctcccaaggactccacccggatccagctgctcagctatctgggcaaacagtgggcaccgggcacacagtaagggatgtgggagccggtcagattgcaaggggtgggagtcgtggagagagagaagttccagaggcaacgagaaaagaaaaggcattgtatttcccctccattctcccagggagaaaaagaaaacttccaaagccgaggccgcagtcactgggaaaacacagggaacctggtttgagttagcagcgagcacccctcccccagtcacacacacacacacacacacacacacacacacacacacacacacacacacgcacttcagtcctctcccaggaagctggctcagcctcagccccggctcccgcccagctctccagccctcccggccggggcactcaccggctgacgggatccccgcgggcaggatggctcctgggggacgcgccgggggcagggggcagttttgtaaccccggctgggggcgctccggagagggggcggggccagggacggccgatccgcgcgcacccgccccaagcgggcgattaaatcattaaccgaccgctcccgcctgcgatcccgctgagcgcgctgagctcggggcgcactagcccaggagcggccgtctccccggctccaagggggcgggtggctcgactgccctccccccgcaccccgccaggaggcgcctcggcctcccgggcttccgagggagcgggcggggcgggagcctggcgggggagggaagggttcgcggggcgggagtaggggaaaggaggaccatttgttccttcggccattcccttccagacagctccttccctctggcttcccggccgggtgacattgggtggcgtgtgctgcagtgtgtgtacgagagcgagatgtgtacacgcctctgcccgtacaggcggagaattcggttcttattcatggagaactccgggcgcacacacgcccccctcgcggagatcgcgggccgcgcgccgccgattgctgcgctcctgcccacaccgacacacaccccattcctgggaagggggaggccctttaaaaccggcccccaaccccctcagcggcacccttggccagggccgggagttccagcgtggagagaggaaatggagtcccggcaacgctgcgcccggctccctgccacctcctcctccacacatcccgctctgccaggacactaggtgcgcagcttagggtcccaggcaccgcggtgggcgcggtgaaaagcgcgagcgccgagaagtgggggctccgcgcccttctccccgcgccgcggcctcgcatccccagcttcgatcctctctgccccacagggggactcgagacccccaagcccacccagggcacccagcgcgaaggcggctaccacagacagaggcggttgcccgtcgcctacctcggtccccggagacccgagctctgggccggctgcgctgtccccttcgtgggctccgcgcggcggaggggctggcggcccctgtcagcgccggcgtttgtttccctctggctctcgggctttcagggctgggagcctccaggacactccccttccaggctccgcccgcgcccgccccgcgcaaccctccccgcgcacccctctgcgctgatgtcacggcgccgcagcagccaatggccgtcgggaacctctgcccgactgctcggcctcctcggttcaaactgaaagcctgagactttcccaactccgtatggggcagcctgggcccgcccggcttccgggagacactcccgccccagcctgcgctccggccgcgaacccccactggggcccccagggccaggggcgcgtctccctccgggggcctggcgcgaggctcttttgaggctcttccccattcgagccggggcaagaaaccaagaactccagcccgggtggcgttcctcgttcctgctccctcccggacctgctaaccacctggctgcagtactgtcgggagatggggcaggagggctggcgccaccagcttcgtgggtgccatcccagactctcgctgtaaacgagggagcggggaggagccggccagccccgaggccaggcttggactgggcgtcagaaatgtttctacagggtgacagcccttgagctccccgcatccccgtctgtgcctttgcctcctaagtatcagctgaggctaaatttgcaccaggtgaacgtcaaggaggatcaactcctgagtcccagagcctgaatccaagtcccaggccttggactctattctttttagaggaatagtttcagttgaaatgatcattatcaaggtagaatgccagctgcgaagtagtcaactaaagtggacaaggcgcaaagtgaaaagttcccttgcctctagctgaaccccaccctcggtttttaaaggaagtgagggtgaaggccccagactttcccca

SEQ ID NO: 65448 - DNA, 747 bp, Homo sapiens
ataacaccaggtgggtcagggaggtaagaaattggtcatgttgaaacgagtacacagggcttcactggactactctacttttgcatgtgtttgaaaaattttataatgaaaaagtttaaaaaatggcaaagattctgcatttctcatatgactaaggcaaacaaacatccttaccgtggcctgccctgccagcacctctggccttatctcttgctattcccacctggcttccgaggctccaccacgcagccgtccatgcgggctcctttccattcccaccgacgccagggggcgtctcctctatcatccccaaggtatgggatgaagcctcctttctccagtctggctccttcctgctaacctcaggtctcaacttaaaatgccctttccaatgccctgatttaaatttaactaaagtttactttctcactgcaccctttaatttttcatttttgtgcttaccacaattttggtctgttttccccgtgagggaagttccatgagggcaaagttcacagctgttttgttcagtggtgcatacgtcaagcccagcacatgttgccaaatgaagtgagatggcagccacaccctcggtccccctctgaagaaactgccctaggcagttaaaacaataattaaaatgaaaaaaaaaaaaaaaaaggacaacaaatgcaagaagccatgggtccactctgccagatcaacaaatgttaagcatcttttcctttcttttttttttgagacaga

SEQ ID NO: 65449 - DNA, 863 bp, Homo sapiens
acctgaggattagacagagatagtgcagtggcacaggctagaccccctgaggattagacagagatagtacaatggtgtaggctagaccccctgaggattagacagagatggtgcagtgccagtgttcctacccccatattgcttatcattgttgagtatttcttccagcattctaggataagactgcttctttctcattccccctgtggggtaaatattaggagttgcttcaggacccttgagcaaggggacaagacaaacctatagcagagtgacacctgcggggtctggagtcttcagctggaatgaattcaacaaatactcaccttgtgccaggcactgttcaaagcactgggcaagcagaagagccaaagaggcaaagtccatattccactggggagaaagagaaagagatcatcgtcgaaggcgcacgtgcataggtcaagtgcatagggtcaagtgcagaggagtgcaaggaagagacttcagtcagagaacagctgagagaggacggagggcaagtccatgtttatacacaggcagagacgacggcagcttggactgtggtggcaacagaggaagtggctggaggtgactggactgtagatgcattttgaaagtagagcttttagagcgaggggtgtgggagacagagaggagtggaggatgattcgagggtttccagcttgagaactggggagtgagttgctgtttactgaggcagaggagcctgggagagaaacaggtttgggggaagccacttctgtcccataactgtagcacttgacggttgtcccaggggactctcacgtgccccccccgcctcccccgcctcacagttcctgaccggtgctgtgatgtgc

SEQ ID NO: 65450 - DNA, 921 bp, Homo sapiens
aagccatccatcctcctggagcagctctgggcaggcggaggagctctgggcaggaaagggaaaaactcaggtggcgagatggtgaagagcagccttctcccgtgcccctgaagagaggtcccaggtgccccgagtgtccaggctctcatgtggctctggttccccccaaggtgcccagcactctgcctcctgcatggggtcatgctttcagccagagcccccagaatgctcaggggcccttgctgtttcttaagatcaactcatctgactccttccgaggctgagagctcagctctgttggggcgttgcctgccgtcctgccttcctcctttttctgcctggctgcgtggcggtccaggactatctggggatcggctgcatggtgggaaagggccacttcttcctggtagggctggccaggaacaaaggcaaggggactggggaggggaccgggctgtgctctatttatactgtatcttggggtagggcacattggcagcccagcgctctggatgcctcccagaagcctgagtggcggtggcgggggcatctgttcactgaaggaagggcagagagaaaagaatgggcacttattgattttcttcgatatgccaggcaccaggccaggcccctttgatgcatgatctcatcatgtaaatataggatggtggtcaggagatcagcttccaaaattgacagaactgggttagaattccagctcccccagtttctggctgggtagcactgggcaagtgggttcacccgcctaagcctgactttgttcctctgtaaagtgtttataatcaaagcgccttcctccaagaggtcctttctctaaagcacacagcagcatgctgacccaacaggacgtaccccgtgaacattaacgccttctgttatgaacgaccatgtgatgcagaa

SEQ ID NO: 65451 - DNA, 1677 bp, Homo sapiens
tccagcagccacattaaaaaaaagtgaaaagaaacaggtgagattgctcacaatagcatacgtcatttaacccaatatatgaaaaatgccatgatttccatgcataataaatataaaagaattatttatgagatatcttgccatctctttttcatactgggtcctaaaagtcctgtgtgtatcccacacttcaggcacctcactagcccagtgtccagtgatcaatagccacatgtggctcagggctgtcatatccaacagcacagtgatgaaatcacagtgaaacttctccactctccagtccagagacggccatctccccatggcctccgcagggcattctccaaactcacacatctggagccaatgcccacgggctcctggctggtcattctgtgttgtctgatactgttcatgttggtgaccttagtgctggccagggagggagtctggctctcttctattggaggtaattgtggagtggggtggctgtggggcctcagaacaccttggagctctcaaagaccctctcacatcttggccattcccacttccaggaccaaagcaatgattctgggaatcagctggggccaccactggaatagaatgaggcgatggggagagcccaagttgggaaaatggaatctttggtgactgtgggggatgtgagagccacagacaggagatcacgggtgcctctgcctgccacatatttgaaaatgcacaaagcaagagcctcccctctccccagcacacgcaggcacagggaagtgtgatcatggaatcaatttatttgtctactaatgcgccaggcactgtgttttataggtatgagcccatgtcagcctcacgacaacccttgagataggtcctatcagtgcctccattttaaagatgagaaaacagaggcacagagaggtgaagcatcttgtccggagtcacacagctagtgggtggggtagccaggatttggacctagggggagctccatccgggcaccaagtccactgtcccctggaaatcacatcatgacaaggggagaaggcagtggggagatggaaaagttgggaggctgttcaggaactggtgacaaggagggggaaggctgccatctggcaccaccatgcaggcagtcccagatggtggagaacccacatccactgcctggccgggctggaacaggatggggcgcagacaggcaggttctcggcagacaggctctgtgaagaaggtctcatgcttcccccatcccaccccaagggagtggcgagggaagggaagcctgtgacctcatcatctgggccaaggccaatgacatcaccaggagggcaaggagccaggcccagcaagttatttatggaaacggctggcggccaggcacagctcctgagctgtttcagatgtggctgggataaagcctccagctggcccactggggctgctgaggccaggcaggcgggtgaggatgaaggagggctggaggagggctgggggagtcagcccgctgatggggcagggctcttcgaaggctcactggggtccccagcggggatcactggggcaccatgcttctccttggcgtctgcccatctgtgtcctcccttgctcagggtggacctgtggtctctgcagcctgccatcagggtctgagtctggatgagcttagaaagagcagca

SEQ ID NO: 65452 - DNA, 4796 bp, Homo sapiens
gaggccaaggcatccctcactgaggtttttcctggttgagacacaaaaacctgtggacctctgcatcctgaccctgtatctgagccatgactcactggccagggaagatctactgagaccagtaccaataatggagcccaattgattagaaccttgagaagccctaagtggagtgagaaacatttgacttccaatgggaaatccagatgcttagggtatcattcaaaataccatggtgggctcctcaaaggcatgacctcagctcttgtttcctagcaggggatcagtgactgagcaaggccaataatgtcaattccacatttgggctcttatggagctggccattccagagtcaggtgtagcaaaacaaaaccacacccctgaaaatgcagtattctgaagaatgggaaatggaaggggcagtgaggaggaagccaccaggacacccgcagccctgggttcgagctccaccttgctctctgcccttctttaccccgcactgggccctgggggttgacctgaatggaccacagcctctaggggaaggtccttccttgcctcctccagcttctggtggccctgggtgatccttgccttgtagctcccttttccctggagcagctcccaggactgctggcaggttcctgggggctttgtggaacaatataagaatccctggtagagatcagtgtttctcagcattagctatggatcagaaatggctgcagagctttggaaaaatacagaggctgaaatctcacctgtaccctgcggcacaaaccacaagggaaaggccccagtgtctgctggattccaggtgactctgatgtcaggcagggttgagaaacactgacccaaacattctgggctttatccctgggttatatcagatcatttccaggccttgcaacacctgttcactgtgtttactctagaaacgatgcagttggtggtgtctcccactattttagtctgtgttcaccacacagctttattttcttagacaatgagaatttttgtaaatgatcatgtttgtcttttgtattgactgcttggacccacaggcttaaatgtgcagtttaattttagcaatgacacaggtcctgtggctccaacagctgcagatagcctttgcctctgatcttagtttcctctattttccttggtcttaattttttattatacttcactgcttcatggaattacacatcggtaccaggaatagtttagggaataaagtggcatttacatttataaagaacaggccaggcatggtggctcacacctgtaatcccagcgctttgggaggcagaggctggcagatcacttgaagtcagaagttcgagaccagcctggccaacatgtgtaaaaccctgtctctactaaaaatacaaaaattagttagacgttgtggtgggtgcctgtaatattaatcccagctactcgggaggtggaggcaggagaattgcttgaacctgggaggcagaggtcacagtgagccaagatggagccactgcactccagcctgggtgacagagtgagactccatctcaaaaaaaaaaaaaaaaaaattatgaagaacaaaacggaagtggtgtataatgataatggagcttgtgtctgcagccacaggacaccaagtgcaggttaaagagacctcctctagctttagatttcctcatatgtgccacctcctccaggaagcctttcctgatcatctgaaccagatgaatcacctcatgataaatgatcctaactcttgttctccattaaaatgactcgttcagccccagtcttcctcaccagactgtgatttttgacatgagccaaaagcatgcctgtctttctcctgggtgtaaccccattgcccagcacacggcgtgctgcaagcataatcatctgataaatatttattggacgagcaaatggaaatagccgcaaaactcgactgctgggtgaaatatacaagaaataaatataaaggctgtgtgataagaaggtgactcacagagtgaggagagagaaggaaaaagaaaggcaggtgggagggaagaaaggagcagctggttgaaaagaagacagaacgggagctggcagcatctgagcagctatttacccagatcccagtgagagtctctacagactgtgtcccattttatcttcacaacactctcggaaggcgagccggctacccccactttacagatgaggagactgaagcttgaggcgtctaagctgcctgaaattcataaagcccaggagtaactgagtcagatctgaatctgagggtctgtggcttcaaagctgggaggctgtcccctgcagcacagggacaaatatcagaatcccaaagtggccacacctactactcatcctgccagggacccttccacctgctccacgaacagggttctcttcgcagagggtctgtttctgtggctggctgggcgagcagggatcagcggaaaaggaggtgacaaggcttcaactttggcatccctattcagtgagaagaatggagcacccagattataagagggccaactgggagactgagtaaggaggaaacacctcccatttcaccttgcctgtgagctgaggaggtagtaagggttgggcagctgctgctcccatcccgaccctcccagcctccatccacacctcctcccagaactgccttcagaggagccagccaggctgggcttgaggatgtcaggccaggaatggccaggggcccagaggggtgggcaccagctggggccttgcttcagcaacacagccagagctgtgcataccagggccagcagtggccgtttttccaagctgcagtggctgctgagccagaggctgtccctgtggattcttgccacctgcaattcccagtcttcatgggtgggaagaaggctcatctagacaccccaacccaaggagaagggtagtgccaatgcgtgcccctgggacaagaggactttatttgccctcacctgtgtcctttgatttggggactctggggaccctggccaagatacatgtatgtgctccaaagccttagcttcaactctagccatcggtcatccagagcttaattccttatgtgaaaacaaaaatgctagcaagagaatagaagccttggggaagttgcccagaatagaaaggctttaaaccgccagaaagcactgagcatttcaaatcgctatcctgagtcaactggtgccgaatcctctttcaagctttgaatcaacactgtccagctagtactgttgactcaggagggtccaagggttgaccaggggagagatagctgtgtgtggcctgggatcagagctctccaaccctactttctggagctcttccaacctggacttctgactcaggctgtacagcaaatattcttgttttcgctgatttctctacatgtgaagaatctgagtggtttggatcccaaccatttagatggatgactggacttatagccctcctggacccttgccaactatgattcagccattcttcctaccccaaagggagttgagcaacaaatgatatactgcagtttttgcctgatagatgcaatttacacatcagcaaaagcttcccaacaggaaggtctgacatggacgatggtgaacagcattccctgggcctggcatactggcttatgccagtaatctcagtgcttttggccgggggggggggggccgaggcaggtggatcacttgagcccaggagttctggaacagcctgagcaacatagcaagaccctatctctacaaaaaaaaaaaaaaaaaaagaaaagaaagaaaaagaaaaaaaaggacagcattccacttattctcaagaggtatttaaattctgaagaatttatcatcaccttgcacaaagaatggaaccaggagtatccatgtttcttctgtgcccttgaattctccagtgacttcatctttagctaaaatctcagcaaaatgtggaggaatggctactcctgagcagttttctcttggctccctgggatcatgtagcagaggtctggcttggtcagaaatactgtcctttccagagatatggtcaataggcaatagtgagggggagggagagagagaggatagggctgaagggggttattactatagagccagagggtcacatgtccctattcaattccacacaagaaggctcagctataatcaccaacccacttgcttccctacaaggtaaccatgtcacaaccagttcctcccagaggattcaacatcactgctcatctcctcagaccaatcaagaggattggtcattgggaagtcatcctgagctgtgaccactctctggaacccagaacttcctgcttcacatggactggatgaatgtctaggggcacagctgtttccagacacctggtttgtcttcagaatctcaaatcttaaaggctttctggtccaaccatccaatgcatggtgaggccccttctggattgcccctgcctgcagcatcctggtgtgtgcctacatatttccagggacagccaggaagattccatgcaattatgtgttccctgttccaggggagcccacagcttgatcaggggacagactgtatcttccatcaactcaagaactaagactcaaattaaaaaaatgcaaggctgggggccaggtgcggtggcttaagcctgtaatcccagcactttgggaggctgaagcaggcatatcacctggcctcaggagttcaagaccagcctgggcaacacggtgaaaccctatctctaccaaaaatacaaaaaattagccgggcgtggtggc

SEQ ID NO: 65453 - DNA, 689 bp, Homo sapiens
taggtggagcatagaggacttttagggcagtaaagcttttccagatggtattgtcatgtggatacatgccacacctttgtcctgaaccacagaatgtacaaaaccaggagtgaaccctaaatgtaaactgtgaactttaataacaatgcatcaacattggctcatccctcgtaaccaacgtaccacactaatgcacgatgctaataacagggggtgctggagtgggagtaaaagggtatacaggaactctgtgtaccttccatttttctgtaaacctaagactgcttaaataataaagtctattaattttttctaaattgcaggatgaagaaataaagagagggtgaaatcattctgggaagtttccttgaaaggggtgagtcataaagagggggttgggtgcaggtgaggaggaggaagattacagactgcagggatgagcaaataccatttcccaggatttcctgaagtttttctcccctcccaaagcccaaatctgcctctttctggggcccagcgaggaccctggaagacagagatcctagaaaaagcagagggaaaagaagaggaagagaacatggagaaaccgccagggaacagaactcttggtccaggaggcgcaaaccacaagtgcaattagtcaaaaaaaaaccctgaaattaaaaaatgattccaagctgaggagggga

SEQ ID NO: 65454 - DNA, 1041 bp, Homo sapiens
gttggccaggctggtctcaaactcctggcctcaggtgatccacccacctcggcctcccaaagtgctgggattacaggcatgagccaccgtgcccagccacagctgctctttttctagggccacctgctctctggattctgcatacaacaccccttatggcttccctcaaataatcaccctttgcccctggtttgcataaaatctcaggccaatcaaccacaaaccagagcatctctgagtctcagtcccaaccccaggattgtcccaggatagtctaatcatctgaggccatcaggcagggtgtggagctgggaaaacagcccatctcccaggctggagggcaaactccatcagcacagggaacatgtttcttcatctctaagagaagatcatgttctagctaagagaaggtgcttagtaaatatttgcagaataaatgagtcacctcacagtttgggtcctgctccgacgaacacatgacccagctggtccctggagaaggaggcaaaggctttgaggcattcaataaggcaacgctgcacactcaagtcacgaggcttccttgccctccagttactagctgtgtgaccttgggtgagtcacttaacctctctgtgcctcagaggcctcatctataaaatgagggtttcaattttgcctaacttagagccgtggtgaggattacagatgatcttcctggaacagctggagtggctcctggcgcatagtagacactcgacacagcggaagctgttgttccctgttctatgctgaaaccacaggacagggtccctctctgctccaccagcaggcttcctccccaggtctcatgtgactccagccagccacacacgctgaccctctgccaacccagccagacctctgttctcagggcgttaaatgcaaggggaaggccacgttgacaaccaactgcagccacgcctcctctgccctccccaggagcctgggctgaagacttcatctgctgtaattaacaagccaactgcagctgtcttgctccattaatagcagatcagcctg

SEQ ID NO: 65455 - DNA, 1633 bp, Homo sapiens
gcccctgcgcaggtccaatgaaagccgtggagaataagcgttagctcttcaaactgaatctgagctaaaacctagcaaagccaggctggggtctgaggggttgcgggggaagacaggaaggggtggacggggaagaggcgggggtcctaggaggaagggatggggaggagcgagaggagggaggcggagggagggcggcagccaggatggtccattccattcttggagctgcactgttgacttcgaccacaagggggcagggctgctgaaattggaagtgcgaacgcctacatgagtcttgatcctcggcaggcaccgtacccagtttcctccgttgggagggtttaactgcccggaaacggaagtctcgttctttttcgtccttttccccggttgctgcttgctgtgagtgtctctagggtgatacgtgggtgagaaaggtaatctggggcaatccactgccaggtgaaatctggggaccccaggtccgcgtggagggtgtcggggaggagaaggggagtgcgatggggccgatatttcgggggagagcgggaaaacggggttcgctgccagcccccgcgccgtgttaacgccgaggactgtttcccgcaggtcctggtccgcgccagagcccagcgcgcctcgtcgccatggtgagtacagtccctgcctggcgccttcccggggtgggctcgtggggccccggggcgagggcgagagagcctcccaaggatctcctgaggccgggagaagctggtggactgggccatcgccgggagacgtgtctctttcctctctgttcacccgcttcctttgtgttgcagcctcggaaaattgaggaaatcaaggacttcctgctcacagcccgacgaaaggatgccaaatgtaagtggttgctccgaaggttcaagaagagcggtgcctagcctggcaccgctccgggagcgtcttccccggaatgtcaggcaggagacggttaggccgtctgggtgtgtgcctggccctctgggagcagtggtttcatcctgtttcccatgagaaagacctgtggggggcacgttgaggccctggaatttctaggaccatctttagctaatcgcgatcatctcagaggccgccctgagttcagttttctttcgtataatatagtaaattgtcggaacggaatctccactccgcgaaagcctcaaaacacacgtcccataaacactgtttaggttctctgcagttgtgcaaaatcttaacacaaaatccattttgtaataaagtgctggatatttgcatgtaatgtatcgagcacggcacactgtgtagtatggtcgtttacctcgtgatcctgtggtcgctggccagtgtcagaaggtatcatacctatctaatccagaaaaatatttaaaaaaatttttttttttctttgagacagtctggctctgtcgcccaggctggattgcagtggtgcgatcttggctcactgcaattaccgcctcccaggttcaagcgatccccctgcctcaaagtagctgggcgcgccaccatgcctagctgatttttgtgtttttggtagagacagagtttcaccatgttggccaggctggtctcgaactcctaacctcagatgatccacctgcctccg

SEQ ID NO: 65456 - DNA, 603 bp, Homo sapiens
ggtttcactgcctgcctcagcctcccatagtgctgggattacaggcatgagcctccgtgcccggtgcatccctaatcttgagcatgatctcagtcggcaaatgaggccatctgttttcagcctgtttgaaaataagatgtggggaggccatgatggaaatagcacgtggggttaaacataactggcagatgtgggagcgatggtggggcatgccattcaaacaggtcccaaaatgggtgcaacaaggtatagcacatctaccactcgctaacttgactgacttggagaaatgactacacttttgcctgtttcctcagttggaaaatagccatattaacacctctttcattggcttgctgtcagggtactgggatggggggaggtgcatgggttggggtggccaccaggtggtgctgtgccacagcgggcagcccctctggaaatgactggcatcataaaatctgtcttcatacccgaggtagtgttttttgtttttttaagatctctaccttttaaaagcgtggcatacagtgtgcttggtattgtgttaggcatttagacgtgctcaggttgtaaggttgaagtgccagtctttgaatattc

SEQ ID NO: 65457 - DNA, 1671 bp, Homo sapiens
agacaccccaatgagagaagaatggctgtttccagccttccgggcccctcagctttgggctcctgcagggccccagaaccgtgggatcacggccacgaggagaggccccgaggccaggacttcctctaatggacacagggcctttgagcaccgggtgactggggccccactccccagcagccatatgtgtttgcgagcgttttcagtcggtccgcatccacccggtcccttcagccagaaccctaggagccccgccccgtcctcccggggctcctttctcacccgcgtccctgccgcggtggatacgcacccctcaggctggctgcccagcgcggtttccacgcccaatctgccgcgaccccatcactccaccgcacctacccctgactcctgcttgtcctgcagcctgggctcctccctccgctggccaagtcacgccaagcagtttgcggttacaggacgggtgggggcctctgcatatgtgcagagtacggagggcccagggacgcgaggctccccgatgggcaacctcccctgcctttgcttttccccagagccccctcctggcctgcgttcggcatcttctcgggtcgtcatcgccctctgcggtgcctgcgctcggggtgagggtttttgtcggcttttgttacatcaccgatgtaacagtgcctggacgtagtaggtgctcaataaatatgttgttgaatgcgcttcagtctccccgaatgcttgtcccttccgggcgctctcatcgctctcctaccttccccgctacacagctcgaaggtcccctcctccgggaagctcaccctgtcccacttgccaggaagaatcaagcaaattttctgagtgagacaccttgtcctcactcaggcgtcctgcaggcggcttcagcgagttgttggggcagatgcgccgggagctcccgagggcagggacggcgtcttatttctctttttaagtccacagggcttgcacaatagatgcccaaaaaatgagagtgaatttagaatgagtgaccgagtggctgaagattgcctccttcctttcccagtctgtcggttacttaccctgtgacaagcccttgggacgggcagtcgcccctctctggcctatgactgctggctgcccccactgacaccttatacccttgatctgatcataaataagaagcagcccggggacctcgagactgaaactgatttagagacttctgggagcttttttcacttccctcctcccatccggccaggacagatccccgcccagaaaggggctgttgactgcagcgggctgcgcgcccagaactgggactgggatcgcggcggggcggggcgggcgcgggcccagggagaggcggggccgggggcggggcgggcacggggccccggccgggaggtgagcgcagctgtcgttcagcttgtgggtagcactcgggccgagccatgcaggcggcgcgcgtggactacatcgctccctggtgggtcgtgtggctgcacagcgtcccgcacgtcggcctgcgcctgcagcccgtgaacagcaccttcagccccggcgacgagagttaccaggaggtaagtttacgccgccccagaccgcagccacgcgcgccccaagtccccgcactaccccctctcccctcgagagcctgcactttcccacgtgcctctc

SEQ ID NO: 65458 - DNA, 949 bp, Homo sapiens
ccagggccagtcagaaaggggtgatcttaaatcagatgtgaggagcccaggcctgtgtctgtccagccacaggagacacagccccttaggtctcaaacaccctggttggattccacattactccctgccctaaaccagtacaggttcatgggcccagaaccagcactggggctatagtttttgttgttgccaatgaggagaaagaaaatggtctcttaacccagggtactaggagaacaggaaaggaggacctagctggagatgaccctgagcttctgctgagccccccgagctcacgccccttggggaaaggtcttttcctccaccactgggaggcgggagttggcagagtccatcagagccatgaggagctctgctccccaccctcagcctctccagggaggctctccagggcccctctctcctctcagcaccaccatcccggagaggcagctgggagagatcagcagatggaactcccagctgctccaggctgtgggtaaacacattagcagctgagctaggaccactttctgcttcctggtcaggctgagctgacctttgtcctgaatgggaggttcagacctgcccccaccctcttagtgggatgacatcagtcaaagagctgtttgtgcacccagcacacagtcaatgcagaatcaatgcttggctttccactttgcctctctgcttctccccagagcagggatgtccagacagggaggttcagctaacccagaaagaggataatgtgggtctccaatgcatttgccatgattctcaactccaaaaaactctgaaaaccaaaacatgtttccgaaatgtgccacaaacacgtttagcggcacagcgtgacccggtgtgaggtgatttctggtcccgaagttgtcctgtgattgtgagtcctgccagccccaccagggactgttagtggagtgatcatgtactg

SEQ ID NO: 65459 - DNA, 727 bp, Homo sapiens
ggaaggatcacttgagcccaggagtttgaggctgcagcgagctgagatcacaccactgcactccagcctggacgacagagccagacactgtctcaaaaaaaaaagaaaacattgagcactttggttggccagattacagaggtgctggctggcagggaccaagggacagcccttggcatgggggtgtcttggaaatcttgcttccctggcctccttgtcgctgggggtggcctgagctccctggcgggttttctgcccacctcctccttttgcatgtccctgtcagctcagacagcagggggcgctgcaggactggctggacggtcgggccagggagtgggagggcgggcctttaagccaaggttcaaaggaagatcgagttactgcaaagaaactgcctgccctgggccagcagccagcaccgagtagttgggtgggagggctttgtaccctctgtcagtctcctccaccctaaagccacgtctgccacgctggggctggccagccacggggctgcagggccctgcaattttctcagatgactttggtggtttcctgtgcagagtggtgtgaagggccctttcatcgttcatcgccctcctctctccactctccttcgcagggtcctgccagcccctcctgctggcctcgggttctgctcacctgccttccccactctggggagcttggcctgccaggctgcggagcctcagggcttcagtcagcg

SEQ ID NO: 65460 - DNA, 1682 bp, Homo sapiens
ggaggagccaagggctttaaagggggatggaatcaagaggtcgagaggaggagagaggcatcctggattgagaatacgggacatgtgagcgaactcacaggaaggcaagtgcgggggcgaggcagactcagagcaggcttctcaggctggagtgaccatttcctgtgggggaacaggaaggagaagaggctggagtcaaggctaggtacaggttgcagaggccttgaatgccaggcaagggagcctggactttcacataaaggcaccaggagccagtgaaggtgttaggaatgaaaggtgttggggtgaagtcagtgaaggtcctgccccggatgggggtttgcagggtgactggagaagactgccaccaggggccatcactctgggggctggtgtagccactgcagcaaggtagaaggaatgctccccccgaaatgctcacagattggggtgagacgcttcctgaaggtaggggaacaaattgcagtgagggctacacgtttccattttgattttgatagaggcaggctgactgagtggcctggatccctggacccttggccttgatgtctggttctcaggatttgcgcagtctgtggatggaggctgaccagatcagagcagctcaggggaccccgttctctccttccacagggagttggttagcggccactgagccctgggcagggagggggatgagggaggagcagattttgcagccatgggggagggttcagcatcaggtgacattccagtggactctgcccaaggcctgcttccgggtacacttccagagcgatcacccatgggcagccagttgtggtgaatgagggtttcactcgcctgctccctggccctggcttcctccttcttaaggggccacgatgggacccgagtcctttcaaaaaactaggcagttcccgctgctccaagcagaaagtcctatgagcctaagagaaaaagagatttggccagacactgcagccagggcaggaaccagttaatatgagcctgggagcaaggagaggtgaaatgctgtttaccagcagccggctgtgggttgcagggcacccagccacctagcacaggattccaggccccaacttgtcaggaagcaggagccccaccctcagctcagtgagggactattcctccccatctggggcctggctgcaagacctagggctctccactccccaggtagagggagcaggccttctactctgtggaggaggaaatggctcctgttggagattctgcagggtgagactgcaatccagaactcctgctgcccaggcaaactgggaagtccctctaaacaacacaactgacctctggctctccctgggtaggcctctccatgcccaaagccggggtgccagggcctcctgccctcatctctgatgcagggcattgcagccccatggcaggtgacttctccagtaggcactggggcttgcctgcttctcagaaagtggggtacgggaggcagggcaggggtggtgctgtttgcaaggctgctggtgtgagggggaagatcggccgtggccagccacagaataacggatattccacaagcatttactgaaaacatttacccacacccgtctgagtgccagatgccagggaaaacaagatgagtgagacatgtccctggctctctagaagggcacagtgtaatt

SEQ ID NO: 65461 - DNA, 4905 bp, Homo sapiens
agccagagcaacacagtgagaccccatatctattttctttttcgtttgtttcaatagagatgaagtctatgttgcccaggctggtctccaactcctgggctcatgcgatcctcccacctaggactcccaaaatgctgggattataggcgtgagtcactgtgctgggcctcaagatctctttgaacagtagcactctttgaacacttctcagagtgtagttttttggtgaaaacagagtttgcaatgggttctacgcctactggggtattaaatcaaagtgaaggacatttgggggcacagaggaccctgtggctggagtctcggaaagcagcgccacctcccacagaacttcccttccagcatcacaggctcgctgggtccagcagcccccaccagggtctgactcatggtggaggggtctcatgccttctccaactcttgcctccccactctggaccagcacaggcccccgggactagagcagagaccaacagggaccctgaaggctgaagcccatgtcatcggccccaaaggacttgctttgtcctttaaaggcaaatcctgcccaggaagtgagacggagtgaacacaaaaagagcaaacagctctcaggaaacctccctacatatccgccgccatctaccatgcagggctggcagtgggcagggctccgctgctccgtccaggcctcagatgccccagcctttcccccgcctgggtcgggagggagtggtaaagagttgcctttttggagaatctaggtagggaaaagagattcccaaagcttgaaaataaattgaaacagatctgccagatccacaattcatctttggcttcttaaggtcacaagcagtctcggggactatttccattccaccttcctctagctcttagctggcttttcacatatgctaatgagcggcccctcccagcacactgtgttcagcaccagttgcctgcttcacgagaactagtcccagcccacagtcacggatgcccctcgcctaggtctgacccgccgtttgcctttctagcgttggcactcaactgcttggaccctacaagcgtttgcctccctggcatgggggcctctgaatcttagggtgggaggtggagctacggaagggagcccaggagtgagcaacagatcagcagcagcactgcgcccctcttcttaatattgaagagacttgaaacaattcagtcttcgccaccccagaccagcccgtgagggcaaggccaggaagggatacagggttctagagaaccagggcctcaccgccagctccggccgctaagcaaacattccctccaggagtccgagaagccggtgtgcgaggggaggaaccagcctgaggtttatcgctccagcaactccgggtgattcatagagtttagactcccggttgtcgtagaccgcggcaggcacgcaaacaagcagcccgggagataccctcccctttcccagcccccgctcctccaccttgctaccccctagcccgtgaccagctgcctcccctccccctcgcgggcgctcagggttgagcaaacactccgggccgcccgccccgccaccagctggctccgaccggcgcaccgctggcgatcccccaggcaattcggcgtcatgagaaccggcaccccgagactcggcgccctgccctccctccgcgtctccagggccctggccaggcccaacaacctctccctcctctgtgcgcctcagcccctacgggcctctggcgcgggctaactaggcctcgctgcgggcccccaggactgcgcaccccaccccccgcgaggccagcagccccgggggaaggcggccggaaaatctcttgtttatcgggctggataagtaccagcctggattcgcttcccaatttctgcggtccagcttcagcagattcctggggccggaggggaaagggtggcaacccacagatccaccccggaacagggagtggggggtggggctggtgggaacctgacctcctggaaaggacggactcggagtcagagccaacgtgtcccggagcgcagaggcccagggggtcgcgctaaacactgtacctcggggaacaaaaccgtgaaggctaattaggacaagtcggagcagggaacggggacgccgggaggggagagcgcgctccgagttgggcagaacctggaacggtcacaggaaacccgggcgcggggtagtcgggccgagggggacctttgcccacggtccagagtggtctggactcggcccacgcgtgagaggagcgcttggtgacgatcccacgtacgcttggtgactggtggaggtcccagagaaggaccgtgcgtgcaaaaggcgaacctcggtgtgcggtgtgtccacgtgtgcaagctggggaggggagggggcgcagaaggcgtgacaaagacggactctgtcttgagtgtgcgcctcgctccggcccgctcccagcgaactgtgcctgaagtgtgtctcacgggagggccaggacgaaggtgacaaaggctaggtgtcccccacggagacgcgccaaggtagccccgcgcgtgtccgtaggcgcgctctctggaagacgcggtggggggtgcgcagggctgcaccctcacaccaattgccccggcgaaggccgagcccagaaagtgagtgcgcgtgagtgtgcgcgcgcccgcatgcgggggcgtggcagtcaacagcaacaacccacacgccggcagggccagaaactcccatctccctcaccagccggaaagtacgagtcggctcagcctggaggtgagtcggggcggggagggccgggcaggctttgttcctgtgtaaacggagcgcacgtacctggagcgcggcgggcgcccgattagcgccctgaatggaggtgatgtaacggtgatgcaggctccagcccaccctcgccgaaagcaaggagccctgcctggggacaggcccgcgcgagagcgagcaacccagcgcgcctggctcagcctcggtcccagggagaggcaggccctgcgtcccggcccgggccccgccatcccagccaggaccgggcctggcccagcgccccgcgccgcgtccctcccacccccgcccgccccccgcctggggctggagttggccccaaacgctgcgctggagcggggccggcggcgagtcccaggtaagggctgctgccttcccgctccgccgcccggaagagtcgggtcgggacggcggggagtgggcgagggcagaggcggggggactggacatcctgcgggctggggacgccgcgccaactccgctcggtcgctgaaagttttcaaacccgagccggctggggactgggggggtgggggagcccggcgctgcggctcgggctggagggaggggaaaccactccataatcggggtctccaagaggagcccctccaccgcctgcctctcggtgggagtccgcggtcactctctctcgtgggtggcgtcctctctgccgcctgctactgtggatgtggagggcaggtttctgtggccctaaaaatgggagagagtgactggttcccttgctccccattccagccacccagggagcgcaggtgtagaccccagtaccgtcgacccaagtagggacgagagggttcagaatccccctgagggaagtttggaaattcagactatcaaagcgcctccccttctggtagcctggcccctagatcccgaacccccactcccggctggcttttccagcgtcctttgcacctccatccccaggcccgcagtgttacacgctggaagacccaatcacttacaaactccacgatcaagatcctaaagcccgggagaggagactgttggaagtagggttttgtgctcctggagcttcctctccccgccggccccccacccctgtgccttcaactggactgggggagggagtgcattggggggtggggcgcattccagagtgacattccagagcagacccttgaagatttccaagtctcagagagctcagggcattttggcccaaatgcctggtcttggtgcggggcaggggcagggggataggggtggggtgtctaggctgaggttcgaggaaccccaacccaccccccaccaacctacacactgaggccgctccttccaggcacaggcgtctcctgtgcgccttcttatcgatggggtaaacgcctgagcgccctgcacagaggggtgagacagtgggacctaaccagggactgggagagaccgataggagtggaggcaggaaggctgtcagtcgggccatcgtctttccctataggctcttgagtgtgtgggatgggaggaaggcaagtgctctgtggtatccctgggggaacctccctgaagagtgccctggtcacagcacccttgaagacagccattggccatgggtcagtgttgagtttggttggccctgtgacgcgctggagctctctttccagtgcggtatccttggccctggtgggtggagggggtctcaggcttgtgtgtggatgatgctggagcgaggaagggagttttgctctggagaagtgagaaggcctggctgtctccccggttgctggatgaagccacttgttgctgggggaaaccagtcagggctgcttgggcctctgggcctctgagcctctgagcccaccaggcctctgcgccccctggagagagaaggagggaggagggaggttcagcaactggactgcactgactcacaggagagctgggggcagggtggctgagcctggggaaaggccgatttcggaggcgattaaaaatatttgtacaactgattccagggaagtgaagcaaaaggcccttttgtccagaaaataatctgaggctggagctgggcttcagctgtggggtgggggagactcagggcggaaggaggttcccctcctaccccc

SEQ ID NO: 65462 - DNA, 2792 bp, Homo sapiens
ccattgcacgcatcccacctgctcttcctcagcctgctggctgcagcccctcatctgacatgacctggaaatttgggggtgccatctcaaagtcctgaccctgcccccagactgtgctgatctggaggcctgggggcttcagactttcttaactgcccggttaacaagcaccggctctggggtctctgctgggaggtcagagtcaggcagtggaagttccagaatcagagacattcctttctcttctacacactgtgaaatcctcataatccctgctttggagaaagagatgacccttgtcctgccgggcacttgatctttgatctgcccacctgggctgaggtgctggcctcacccctgggtggcccctgtcacacgcacggtgtgcatggcgggggtggaattggcaaaacccaccagagaggtggggcttacagacaagtgctgggaggagcctcaggccccgcccccacactgaatgccggtcggggccaaatggttctcaaccttggggctgagtttttacttcctttttttttttctaaatggaaaaatcaatagagtgagcccagccccagcacttaggaaactctatataggttgcggtccctcagaactgcagggccgtcagccttgccggagccagacgtccgctgtgccgtcctcacagcaaggcctgctccgaggccccggggtgcgtcagcagccctcctcaaacaccctgggagtgcccagcagggcggaacacaccgggaaaccaacaccccaaaggcacaaggaagtatccctggagctaaaaatagttctggaaacttgccagggggccacaggctgggacgtgcgttaaggctccctggccaggctctgggttggtgtagtggggaaggggcgcccaggtcggccctgggaggacatgaacaggcttaggccgagggctctcagatgtatttacctctgtgcctggcagctggcccgtggtgacaggcagagctggaggctggccatcttggaaggcggccgaaggcccatgtgtcctcttggcctctggccccggagggcggatggggatgtggaagttgctgacagagcattttctgagctgttgggtcaggggctggggtgtctacagtgcagggaagctcagcagtgttgttcactcccatgcatctgtacaaaggggtgctaggcttgggagggggcccccgtgttcacaacctcacccccaagttggccactcctgggttagagactatgccagggttggcctgccccctttacctcttccctgcccccagagagccttgcttggtttgtgggaggtggggaagggagctgagagccctgggatcttcaaactgttcctgcttttccttgtagctaagaggccggtgtcaccatacagcgggtacaatgggcagctgctgaccagtgtgtaccagcccactgagatggccctgatgcacaaagttccggtaagtgggttccccaggtccccgtgacacgtctgggctacagagaccagcctcagcaggccagtgggagaaggccatgtggccagagctgggttgggtggaggtggtaaggggaaggcaagcttctccatctggtgcttttacctggggaatccagagccccagttcttaaattccttgtcctggagtcagtgtacccaccaccttcagctgcactgcagtgggacccgccctgtgtcactggggcattgcacacaggttgtgtcgggatgctatagggaatgctgggtgagctctccctggtgggagctgccagctttaccctggagggcttggggagggacaaaggagggtctcagccaggtgctcccaaaatagacaggggtccaaatgtcacaggtctggataggtgtttacttctcaaccacagctgtgccaagggggcccacactctcctccctctctggcaggcagcaagtctcgaccttacacctccccctgggttctggaaactagaagcatcgttagccaggggagggggagggagcaggaagacggtgggttggattctactcactcctatatgtgttcctcctcccggctggcagaggctgtggggagaggtcagtgacccgtcttggcaggacactgggaacaggaaacaaggaggtcagctgggtggcgttctcatccccctccccgccctctctgtgagagccgcggggcagggggaggtgagtgtggctgaagcttccaatcccagcgcctcccctctccctgagcctgaacctgagcctgggcagaggagagcttccggagcaccaggagtggaggctgcgggctgtcagctctggcggggagtgggcagccacagaagcctttgctgaatagcttccttcactgttgctgcacctcactccccagcgcgtttggagtctgcttcctgggggatgatctggattaacagggatattttatctgaccggttctcaaaacatggtacccggaccaccagcactagcctcacctgggagcctgctcaaagtgcaaatgggggccaggcacaatggctcacacctgtaatcccagtactttgagaggctgaggcaggtggatcacctgaggtcaggagtttgagaccagcctggccaacatgctgaaacctcatctctactaaaaacacaaaaatcagccaggcatagtggcacatgcctgtagtcccagctactaggaaggccttagccagaggatcccttgaacccgggaggtggaggttgcagtgagcacagactgtaccactgcactccagcctggacaaca

SEQ ID NO: 65463 - DNA, 1560 bp, Homo sapiens
taggagggtcttgagaaggggatccccctctgtgaagccccagcaccatccaaggtcagcaggggcctcgttcccatgcccagaggcagggtgagataaggggctcaggtctggctgtcccaggctgctcctggggcccagccagagggggcagaggagccgaggggggagttgggggggatctggcagtcccagccctgcaggaagtgtttgtgcatccgccccggcggaacctggctcccaatccccgactgtgagaccgcctgttcttccttccagtccgaaggagcttacgacatcatcctcccacgggccaccgccaacagccaggtgatgggcagtgccaactcgaccctgcgggctgaagacatgtactcggcccagagccaccaggcggccacaccgccgaaagacggcaagaactctcaggtctttagaaacccctacgtgtgggactgagtcagcggtggcgaggagaggcgggcggatttggggagggccctgaggacctggccccgggcaagggactctccaggctcctcctccccctggcaggcccagcaacatgtgccccagatctggaagggcctccctctctgccagtgtttgggtgggtgtcatgggtgtccccacccactcctcagtgtttgtggagtcgaggagccaaccccagcctcctgccaggatcacctcggcggtcacactccagccaaatagtgttctcggggtggtggctgggcagcgcctatgtttctctggagattcctgcaacctcaagagacttcccaggcgctcaggcctggatcttgctcctctgtgaggaacaagggtgcctaataaatacatttctgctttattaactcttgctctgggattgtggtttctgacctggcctcctggtttctgatgaacgtctcctccaccatggcctgtgggtgacttctctttcttccctccaaatccagctcacatttaaagctgctgcagatttttcctgtgcagttaagtagctgatgcctctccccagtgagtggttctttagcaggtcctctgtctgtattgtgtgcgatcagaatgaacacccaggctcagtgcgtgcctaggatgcagtcccgcacctgggcttgtctgaggccaggcagctttcctctgggaacccccctccagtggctgtggggataggactgggaaggtgagccttgagccaggtggctctgtgtgtaagggaagatgaactcatttcagcttctcctgggatgaatgacagtgaagatcccatagcggacaaagtggagactcattctgctccatgctttgagatcacaccgtgtgatacgtgcaaaggaatggcctagagagggtcaggaattgtttacaaatgggttgacaaaagtgcaaagggttgggccaggtcctggttggtttcgttcccgagcggtcattaaaatgtccatttatgcggggtgcgatggctcatgcctgtaattccagcactttgggaggccaaggtgggaggattgcttgagcccaggagttccagactagcctgggtaacatagt

SEQ ID NO: 65464 - DNA, 2303 bp, Homo sapiens
atcttcccttccctctatgctgcctcatgccctgggtccccagagtgggtggcttggcaggttgccacgattggaagaggatgctaaggagagagacccttggcagtgcccgcgccctgactggcaggggagaagggctagcagaggcgttaggagggtcgccaggtgcacaggaagcctaagaagctaggctgaagatctgggacggagctgctttctgccagcaaatgtccactgtctactgggtggacgggagggagtggagatgagagcgatctggtctctgccctcctttgccaggtcaggcctgagggctgaagtgggagtggccatgtgagtcccagcaaatgcgttttgggattaagcacgcaggtgccttcagcaagcttccccgggtatccccttcccaagcggcaccttcgtggcaggcagggcatctcggaccagggcctggctccagctagctctgtggccttggacagctcccttgacccctcgcccccgcaagggtttcctcatctgtaaaatacaccccgatgtctccagctctgtctaagccctggagttggtgtccccagcagtggagaggggacctaaagccccagggctctgccgcagatgcacccccaggggttccgactcaaagtctggagcagaactgggcagacacagggtgaccgcctggctgtgctttggagagagaagttgggtcccgtgggggtgaatggggccggtcccagaccggttgtccgccccatccgccgacccctcacctccgcagactcctccaagccaggggcctggaagtggctccttctgattcacctaaaggcaacggtggcttgcctcacccccaactccaccgacggcaggagagggtccgcgggggcccgggcccagggaaggttttacgctccgtccttaacccagcgtcctaacctgacccggctgggagagggggcggggccccggaaccccacccgcagacagcccactcccccgcacgcacctgggttgggggaggtggggggcggtggggggcagtgaaggtggggggaggtgggggtgggcccgagcagccggcgcgcccacgtgcctctcccgcgagggcccggccaccccagctccagccaacccgaggccgcctctcgtgccccaccccaagccccgccccggcccctgcaacccgatcctcgccgcggggcggcggccgaagccagctgtcccagctcctgctgtagcctgggggccgggccgccgcgctccgcccatccccgccctcagagctgggcctcgcagccgctagggattgcgggggccgcatttatccctgtgtctctcaggccccgcagagacgggggtggggtgggtgacgccagggaagcaggccccttttcccaagggaagaatccccttccggaggcccgccgggccatggagtttccgcgggtggaggtagtgaggccaagggcacggggagccctgtcgctgccttacgtctggctctaggccggggttcctcggctccaccagcgacatttgtggccggatcgctgtgtagtggagctggcccgggaactgcaggatattgagcggcatccctgaccccctccactggatgccaggagcacagccagccccctaaccctacaaccacaaatgtctctggacacggccaaacgtcccctgggggcaaactctccgggtggaaacccactccccgagggtttttcggtgggcatttgaggcagccacacgggctgggggcctggagctcgaggtccctgcagccaggaagctggtgctggcctccccttctccccggcgctgccagctgcttcaggctggcctgggaactgtgacccttggcctgacagtatttcggcagcatgtgacctgccaggctttctcaccgtagggtgcccccaccctgatgtgggtgctggcacaggggatgctggggacaagcccatcactagcagtcaggccagctggggcaccggaaagagactcaggcactgggtgtccatgggcagcctgaggttcccaagagaagctgggctgaggccgccgtgtgagcccaggggctgtccgggctgaaggtcagggggcatcctggcccacagggtccaccccttacgcgcacacacacacacacacacacacacacacgcacacactgggtggggcgtgggaaagacaaaaggagtcggtcccagctggggaggatcccgccctgtcccttcaccaggcccatttgggagcggtcatcagagccaggaaggtggtgagagggctggggc

SEQ ID NO: 65465 - DNA, 1763 bp, Homo sapiens
gaaaaaaaaaaaaagtgcaggtacccctctccagctctcccctccctacacatccctcaaaccgtcccgctgtaatgcacccgccctgttccttggtaacttgaagctgcttatagaatgtggagatgggggtaattgaaaggtcggcccaggccacagagcccctgagctctgctaccggcaaccccagctgcactccccactctctgtcaccaggagctgccgggtgcctgggatatcctggcagctctgctcaaaatgatctacgacttcatgaatttatttggctcctcctcggggccagggtgagtgtcatgggttaataaggccggccccgccttcaggagcggtccactgggagatgtgtgctgcgcagccctcttgcgaaagctctcccctggtgggacattctgggcacaaccaacaggccgggggaaatgagaggtgatccatactaaagggtcaaagtccccgcaccaggcagaggccccaaaacaccgcagcgtacatgtgctgcaaggcgagtacgggttggtaaacaaaactatattcagatgagctcgggccgggtgacttaacagatgaggaagtgtctcggggccatcggcggaggcgcagcccaggggtccccagctccccgcctcgccacctggggacagcccacggcccggggctcgggcgccgcctgctgtcgcggtgcgcagcgactacgggaactcttccgcagcagacggggtccccgcggcccgctcccccaggggcaagcaagcgaccacaggggaccggtcccggggctggatgtggctcatgtccgaagcgcacggagccgagccggtgttgctcagggaggctgcccgccccttcacgcagaccctgcggctctgcgtgccctcagggaacagcaaggtccgagccggtgtcgtcgagggggcgacgggacggagggaggagcctgaggggtcccggtcgagggaggggaggagtgggcggggcgggggtggggccgttcctgcgctctccttcgcctgcgggccggcactgctcacctctcgtccagggacatgacgggcacgccaggcgccgttgccacccgggatggcgaggcccccgagcgctccccgccctgcagtccgagctacgacctcacgggcaaggtgggtgggcctcttccgtgagacccccgccctcctcggcgctagccccttcctggctgcgtctgggttggactcagcccttcccccaggcagctgcgtctcccagaggagggagggagagagggtcaggacacagcctctggggccgtcccaagctctaggtgtctctgctggcttggtgggggcgggtcgcggaagatcgcaaaaactgagtgatccccccgccggccccaactcagttctcttctgccacactctggcaaatatgagcccccgggagcccatgcttcttggtgagggttaagcgcgcaactctcggggctcaggctgggaagggctgggagatggggaccgaacggagactcggagaggacgtcccctgctggcagaggaactggcgttaatgccattttccgagctaagctcttagttgagatctgacatccaggtttaaggcctgatgtcccccagctgctcccctcccattccacccgctggaggcactgcctcccaccttcctccctgcagtcggaagccgctcctcccagaaggatgttgccagccggcctgcaggtcacttgggaatttttcgaacctgagaaagatttc

SEQ ID NO: 65466 - DNA, 4503 bp, Homo sapiens
aaaaaaaaaaaagttagggtcctttacccgagggccggctttcctcactccccgccacaggtaggggaaaccaggccggagccggcgggcccacccgcccagaaccgggaattcggcgagccccgcccctgccaccccagcgccggccgctcggtaacaaacacttccacttcctgagcgctagtcttcgcccgccgcggggcgccgcgccgagcgcaggccccgccccgcgcgttcccaatggccggcgccgttcacccggccggagcgcccaggcctgcagccccctattggcccgcggaggtccccaccctcagcgcggccccgcccccggggtaaggagccggggcggactctgggacgctcagacgccgcgcggggcggggattggtctgtggtcctctctcggctcctcgcggctcgcggcggccgacggttcctgggacacctgcttgcttggcccgtccggcggctcagggcttctctgctgcgctcccggttcgctggacgggaagaagggctgggccgtcccgtcccgtccccatcggaaccccaagtcgcgccgctgacccgtcgcagggcgagatgagcgcggacgcagcggccggggcgcccctgccccggctctgctgcctggagaagggtccgaacggctacggcttccacctgcacggggagaagggcaagttgggccagtacatccggctggtggagcccggctcgccggccgagaaggcggggctgctggcgggggaccggctggtggaggtgaacggcgaaaacgtggagaaggagacccaccagcaggtggtgagccgcatccgcgccgcactcaacgccgtgcgcctgctggtggtcgaccccgagacggacgagcagctgcagaagctcggcgtccaggtccgagaggagctgctgcgcgcccaggaagcgccggggcaggccgagccgccggccgccgccgaggtgcagggggctggcaacgaaaatgagcctcgcgaggccgacaagagccacccggagcaggtaagcggggcccaagccgcgcaggctggcatggagtgggaggaggatccggagagacccaggtgccccggccgtccagccccgcgcccgccgtcgtttttctgaaactcgagctgcgagggggagaccgcttccgcccgccgaccaggcgccctgacacatcctaggcaggcctggggctgcgtcccgcgacctcctctccttcccaggctgtgctgggagcttgagcgcctttgccgcctgcacctcttgttccctggcctttgggagggcggcgcaggggaacccagcccccttccctcgggtctgtgggtgtctgctcccgttcctcggaatcccccaatcctgctccttccctggtgccctctcctcgttcaccccagtccgcagatgggccggggagaaagggctctccgccccagaggtgccagcttcgcccgccactcctacttcaaaagctagaggaatagcattactcctcctgtgtggagccccggcgcgaggaggccctctccgcagcccgccggtgtgtgtcctgaacttcagtcctgctggacttcatcctcccggagtcctgtgtgacttctaagggagaggaagccccaccatctcagggcggtgtgggggttgcctggcagggaggaggagccaaggcatctcggagtggtggttctgccacctcagaggatttacgattctcaggaatgtgaagagtaagcgcctagaactgtatctgggagggaaggggaaagaccttggaagaagaaaaagatggccatggggaggagagagagctcctggggctcacggccctgtgtgcgccagcggagctcacggtgagccggtggtcttgccctggccttgccatggtcactctggtgcccacacagccagcaggccggttgctttttgcccatgtttggtgtttgcccatgggatcccagtttggatcagctgcaagaggggcagctggcaaaataggagttgtgctgagcctcctgtccccagagagtggagtggtgcattgtgtagggcagggcgtgagcctcccaggaccccttcagcttgcaccaccagctctccctggtggcagtgtctgatgggagtgtccgtggggctacgaggagcctcctggacagagaaagggcacagttcggcattaaggtagaaggcaaagccctagaggatcaactggtttggtggaagtgaggtcaccagaagccctgtccagccagagctgggtgctgggaatgccagggccaccaggctcccacttcctgcccctgccaagctggcattggcaaggggagggggaagggatctgagcacccggagcaaggaggttgatgccagggagttggggccgatgatctccagtcccaggcagaaatccagtgtgaactttgtgctgagtccatcgatcgatttgacattcttttttttttttttttttggactttggcacccacacaaatacccacccacccccaccccccacaagttgcagtctcgttcagctcctccctttgcccttttggttatgctgctgggtgccagagggcctgggaggcgaacgtggaggcctggcatagcacacgtgcgcaaaggcagcagctttgagcttcctgggtgagcacagactcagattcctgcatgttttggagggacacctacatttgtgtgtactttgttaggccaggagatgagaggagagccaccagcaaatcctggggacaccatcaccagccaagtcccaggacttctgagttctggttctcccatctgtgagatggaggcattgggcgatgtgatgcctgccttctctagaattatagaaatgacgtgaagcacttgagccccttactaaatgctgaactgcactccttcatgcctggcgtttgaatcccagctcctctaaactgactcctagtcaacaccattgagtccttctagcagaaaatcctctcctctcaatcctgtgtgttgagcatacagacacccatgtggttattagaaaaaatgttaacagacattgtaagagttcgtttttctaaaacacacccgtttcctacataaagcatcaaatggaggtttgccaattcgttttagtctgaatttgtgtgcaaggtggggctgttcccttgtcttcattagccctccacttactaagtgatgatatcagtggaaaagtgtggcgcagagagtggttggctgggtggcctctggctgggaagaccagctgtgtccagaaccactcagggcagaggctgaggggtgcctgtaacactggccatccccgctggggagtctaggcctaaggaggtggaagtggctctccagctctgcccaccggctttgctttgtggatggccttccccgcctgccccgtggggagagaggagcagcaagacccgccctgctgttcccctgcttaaagccctcctccccccattcaccaccagtcacaggatgaggcctaaacccttgagtctgggttcagagtgccggccgggcagagccgagccagctcagctgtactagccaggctgtgcgaagccaagttacctcacctctgtaagcctccatttcctcttgtgtaagttgggggttatggcagctacctcggaattgcatgaggctgtgtgtaaagcacgtagctcagtgcctggcactgagtccaggctcagccagcctttgcagttggtattggaatgaatacatatttcatagtgatcattgcacacctatcatggggcagctagcgctgggtcagcctgcctagttgggcaaatgccactgtggccaagcctggcacacagtcagtgcctgatcgatggtcactgtgggttaagaatgatacgttgtggccaggtgtggtggctcacacctgtaatcccagcactttgggaggccaaagtgggaggatcgcctgagcccaggagtttgagaccagcctaggcaacatgacaagaccctgtctctattaaattttttcttttttttttttaagagttatatgctgttccatggcccttctccatctggcagcctgttctcaccactgcctccctacccccaaaaccacacccagggtccgaattcccctctagcctctaagccttcacaccctgacacttctgtcccctcccagggagcctgtccttaatccagtaggcagagttagcatttcctttccttcactttttttgtttttgtttttgtttttgttttttttgagacagattccacccaggctggagtggtgtcgcaacctcgcctcgctgcagcctcgacctccagggctcaatcgatcctcccacctcattctccctagtagctgggactacaggcatgcaccactattcccagctaatttttaaattctttgtagagatggagtttcaccgtgttgcccaggctggtcttgaactcctgggctgaggtgatctgccagcctcggcctccgcctcctctttg

SEQ ID NO: 65467 - DNA, 3855 bp, Homo sapiens
agggtaaggagaagacaccttctgcctagaggtgtggacactggctgagtgcctggagcccctggtcacttcccagtgcccccaggctgcccgtcacacagcactccaggcagggccagctgtctccatcctggcttccttgaagagctggcaccaggcccagccctgtctccagaatctggggaacaaactgagctgtctcccagagcaaatatggctcttacacccaacatactcctgacacacacaccccagcccctgagaacagccagggttccttcctgcccccgccgtcctgcccccttccatcctcttgttggggctgattttcctgtattgggcatggggcactggtcttctttgcataaacaagagccctgggctgggggaggggcagtcttgagaggtggggttacctctgttgttcccctggacacccaagtggtcttcctactcctccagcccctttcctctggggtcctgagctagctggctcgaaggaagcgggctgggctgtttctgtagggcccatcaccatggcatcagccagggaggggctgggcccaatggggcgttggcccccaggctcccacagccttccctgaagggaggaaggaggagcagggagcggccctgggcctgttccccagagacggtcactgggattagggtatcgactttccccagctttccaggtgactgctggtggcgcctattgaattccgtgcccgccatccgctccctggactgcgtgggtggaggtgatggggcggccacttagggcgcggtgaagctccctgggggaaaggacagatgaagggaggaagcctgagggtggaggaggccccgggagaagggtgtgggggcagctctccgggcagggtcttttctggaaagccagccagcattttgtgaaagtgagagtctccagcctgtccagccctgggtcaccccggcccagctgcgctgcccatcggctgcatggcctcatgttccctcctgttgattctggctctctgccagtctcctctctgagcagatcctgattttgtcttgaacttgggtctcccaggctgtcgtcgtcactggaggtcccactttgccctccggaactcactggggctatgttccttttgagtctcctcctcccaccatgcttcggacccctctgtagctggctcctcctaagatcctgggggccacacaccaagcccaacatgcctggacgtcactcccatttatcccctttccccagaggcagaacccagccctgccccagcttggcggtgagggtccaagagcaatggtggctgagctcggccaggtaccccacacctccccatcttctcctctcagtgctgggcctggagaccacaggccaggccccacagatccccaggggggctgccccaagggactcccctgccagccccagcctccacccaggctgggatgggctggcttgatgggctgactcagcaactggcactgacacctcctggagacagctgggaggctcctgctagggaggggtgaggaggaacaaggctggtctcccttgaagagtgggaaccccccttcccatgtgaggggaggaagtctctagggacttgggaaggaggctctgcaggtgcatcggagctgtctaaatgctggtggggtctaccgggggcttcccatctccttgtccagccaccccctcaggtcctggagccgccacagagccacatctagacagaacagtggagcaggtcccagtgcaggggaaggaaacagagggcacctgagcccctcaggctgggtaccctgtttccccttgaactgcacgacttggtgctggcagagcggagcaaggctcaaagcaggccctggagctttggcaccatatgtcactaggcgaggggcactgggctgaagatcagtaagggaagcccacagcacagagaccagggccagaggatgggcatcccaaaggcagctagcacagccctgccctgccagccggggggggcgcccagagccacctgcccccagtccagccatgcccctgccctgtcacccacaccaggcttcatcccccagctcaggctgcagctccagctgcgagaggccctgagcgcccggaaggaaggctgtggtaggttgtggtttcttcagctcccagcctacctccagcagaggctgcagccgatgccctggagagagcccctgtctgccctctgctgcctgactcctgttgggtcctcacctcccaatgggttgccccattctggacttggatccttaaggagcaccctgcagtgtggtggaaggaggacaggttccaagtcagagaccagggttggagttctggctgtgtgatgtcaggcagtgggctccacatctctgagcctcagtttccccatctcaaaaacagctgacaagccccagtcaggttgttatgggaaggtttttgggagcgcagggacggtggagggaggttggaggaggtcactagagctgccccctgcctgtcctgagatttcaccctccccactttctcagggtgtctggctgaagcagaaagctgcgcctgtcctggtgacggcgactggtcagacttgtttctgctcacctaggcggcccgggggagggcctggctgggagctttgtggagggattagctctaggggagaagagcctcacttactcccggaacaagatcccacagggctgtgggagtgccggggggtgagcctggggcaggtgacagccgaactagctgggagtgggccctgcagtgaggcagggggtgggccagggagaacaaggcaagaggagcttcattcagggttcctgagcctttgtgagccactcacgtttttaccactcacttaaccgtctttgttgttggggtgaggggtcctcgagcctggatttgggtatgaaaacccaggcaagaaagacctgcccaagcctttaaaggaatgcaaagtcatcctctagccacccccagagatcgaaaggctggggattgagtctcctgcagatggtggcggcctcctggggctggcaagttgggacagaggcccataagccctcctgggcgcgccttcccacccctctcggccctctccactcccagctggggatttgggtttcagagcagcctggcacacacacccccaccccaccagaatctcactcccagcttcctatgactattcattagtattcacaacaatgggaaagtctgggtgtgcacagggattttttacagttagaaagtgtttaagtcaatgacctcactgggcctcagcaaccctgggaggcagatggcagtcagaatgatccataaatgacctgccccaggtcacacagctcctaaacaggggagctggaacctggctgggagccttgactatccactgctcattgtctgatgtgctgagtgataacacagggccagcaggctggacagcagccagtggccctgcaccaggcctggaggagggggagagggacagggactcaggcgtagtccttgggcacaggcttcggctgcctacacccatattccctccatcatactgtgtgtccaggcctgcagcttctaagctgagctgcttactttggaccaagcatgttggaaactgttttcagctgagtccaagcactcgaaatctgcgtgtgcccttttagtaggtcacaccctccaggccacagccacactgggctccctttagcccagccctgcttttcccagtcccctccccattcaggctcctctgtttctggggtctctgtgcttccgttgccacctctgcccttgggcagcggtgtcgggggaggaggtcctggaacgcctgaggatgg

SEQ ID NO: 65468 - DNA, 697 bp, Homo sapiens
agtgggtttctgaggacggcttgtgatggggtcagctggcatgaggtcggtgagagagatggacagatcttcttattcccggccaaagctgcagccccaaaggaggcccaagcccccagtcctgtccccaccagcagactttcagggcagtgtcaatgtgaggaaagggttaactccggggaggcctccagcctttgcttggtcagatcagagtccagtgacgggggccggtgcctccccctccctcctctcaggttgtcttggaaactcagccttgctggctctagagagtagtgggtcccccttcaatccctgggcccctgccctccccatcccccaccatcaccctgccaagcctggcgcctccccctgcccaggcccgagccaaacagggcagggctgctgcaccggggcagggaggggttaagcatgctctgctccttggtctggactttctccctgggaagatggctccctggagcgggcaggggtgctcactgggccatactgagggtggaacctcttgggactttgcagtgggtggggcctcctggagactcaaggttgtatgtgtaaaaggagattcacacaaaggtcctgcgactcccatcgccagctgcaagggcccactggggaggccctgtccccttctggcgcaatccaaggcctgaggctcctagaagaggggatggcccct

SEQ ID NO: 65469 - DNA, 4804 bp, Homo sapiens
gagatgttgacccagggaacaagatctaataatctgcccaaacccaactcctacctcctctccacgctctattccatccccgttctggactcacctctgctctgtcctttgcctaggtcccctgcctgtgcccttcaccaatggggagatacagaaggtaagggcgggtcccctgtctctttggatttcaatccttggggtgcatgagacagatcagaaggtgctgtggttggtaggatagccatctgactaaggccaaaaccccagggtccccagttccagctccttcttcagctccaagctatagaactgccagaaccctcttggcctctgcctggggccaaagctgtcaggagggagcgggctggctgggcccctctgcagcccgccatcctgggtgacaagcccccgcctccaactccccaccatacagaaggggccattcttccccccaagaacagagcttcagtgtctggccacgggcagccgggcccctgctacttctagtctgggttggaagaacaaagcccctcctccccccttccctgggcagaagggaaagggggtgaggcccggggaagagatggtggggctgggcgccagctgaagccatggaggaacccaggaaggggctgggtgccaagctgacgccccagccaaagccttcgctctgggacaggccgactcagtcaggccacagagcaggaactctgcagggtctgcttaaaggttccccttccctaggagctcctgccagggtacttggcaagggggagggcccttggacccagccctcaaccttctttcacctcatctttggatctagaactttccatccaccttcttctttcaaggccctcctttgctgcttcagggttagggtttcaggattcctggggtcaaatcctggcaaacagtcaggtggaccacatgagattcagggagcaccacatgggctccccatgcccccatgtgtccccacattccaagaagcccctccctggtcactggcccaaaaggcaagccagtacctaaaagccacattggagtggcccagggagagggagcggttcagctaatcccatgatggtctgttcccatcccatccctccagcctgagcagtagaaccagcctgccctctgatccccaaaggaatgtaaaaaggagccccagcaggctcaggaggtgggaaccaggggtgggtggccagggcatcagtgctacctcttctcagtctgaggcccctacttccccaggagctccctccctcctcaggaccccctcaccccatcctctgacaacccacaaccctctcctctctgccaggagaacagtcgtgaagccctggcagaggcagccttggagagccccaggccagccctggtgagatccgcctccagtgacaccagcgaggaggtaggccagccatgcggggggtggcaactgggttacaggaagccgattcccaggccccacttgttcctggcacaccagcctgcctttgaggtcacatgctgagccgcattctgttcttgtgacctggcttccctgggcacggccccaacggagccacctcaccaaggctgaggaccagggagcctaatgagggactgactcccaacttcctgcccccacttctctttacagctgaattcccaagacagccccccaaaacaggactccacagcgccctcgtctacctcctcctccgaccccatcctagacttcaacatctccctggccatggccaaagagagggcccaccagaaacgcagcagcaaacgggccccgcagatggactggagcaagaaaaacgaactcttcagcaacctctgagcgccctgctgccacccagtgactggcagggccgagccagcattccaccccacctttttccttctccccaattactcccctgaatcaatgtacaaatcagcacccacatcccctttcttgacaaatgatttttctagagaactatgttcttccctgactttagggaaggtgaatgtgttcccgtcctcccgcagtcagaaaggagactctgcctccctcctcctcactgagtgcctcatcctaccgggtgtccctttgccaccctgcctgggacatcgctggaacctgcaccatgccaggatcatgggaccaggcgagagggcaccctcccttcctcccccatgtgataaatgggtccagggctgatcaaagaactctgactgcagaactgccgctctcagtggacagggcatctgttaccctgagacctgtggcagacacgtcttgttttcatttgatttttgttaagagtgcagtattgcagagtctagaggaatttttgtttccttgattaacatgattttcctggttgttacatccagggcatggcagtggcctcagccttaaacttttgttcctactcccaccctcagcgaactgggcagcacggggagggtttggctacccctgcccatccctgagccaggtaccaccattgtaaggaaacactttcagaaattcagctggttcctccaaacccttcagcctccgtgtgttccttggaagttttgtcctctggccttggaccccttataggtagaaattgagaaatggtaagccaaggtggtctttggctgggagggtggggtacactggagggagggccatcaagggctccctgtgaccccaagcctgggtagctttagctagagggcctagctgcagtcctgtaggaaggaagatgcatgcacccagccgggtattcagcttggtgtggtcagtgtgcctgtgtgctgggctgcaagcaccgattgtgggctggggaccccttgtctaacggggatatttacaaggggaagtgggagctcagaccaacgttctcagaggactctgggaggttcctttaattccagaagcgtggaaagtgtgtcccaggatggagctgggtttggaatgtgaggacttggctttactctttctgcctatagccagtggggtgcagaattcccaggggcaggctgggctggtgccagatcctctatcttatctggccattgtgacctgattggagggcaagtgtccagtgccaggggaaaacaaaccggtccactgagcccggggacatgctgtgtggctagctggggtggaagggactgttcaagggcaaggtgccctgcccccaacaaaagacccaggtccctgatacctttggcacctgaagcctgatctggaggtccaggaaggtggcttgcaagagctaggctgcagagccgggaggttccgggcaggtgctcaggaggaaggtgcccccaggctagtctccacccaacccaaagggacacctctcagaaaataggctcctgggctgaggggaatgagtaaagcaggtagatctggaatcagggagtggacagtgtcccccaggccagtcactatctggccatctcctgctccttgtcagaggaaccatccaaaacccttaccacagcagtgccctgctcagctgacctgcccccaccccacccttgcttctaccctttggcccctgacagattcccctccacaggggtcgtggagggcccctccctatctcacctgctgggtggggaagccctgggggacctttgactcttcattaacctgaagactggtggaaggaatgggtggccccaagggaactctcattgctgaggtacacatggtacgaagggagccacggcaagcaacgcgttcgttttataatgtttgttttatactgaggcatgttttcggttccagttgttcacatgcagtctgctgtgagactccaagatcaagggtgctgggaggccttaggcaagtcaccttacttatctaagactgtttccccacctggaagatgccctacaagcctcctgtggctgtgtttagaaagcatgcccggcctttcttgacagccagccaccccagatgatggcagggcaaggaagactgttaggagtcagagtgctcccctcaggtggaaggaaactgggccaactctactttgtaagccatagggtgccaggtagcccggccaccctgagcctgtgcctccactgcccccgcgtggccagtcaggtgcagctgctcccagagatggagggtgaggaacagacgtgggagcaccagagggacagagctgatggcctgacgctctcttcaggagggcacccccaaggggcctctgcttcctcagtgccccctgagctttatcagcagaggggtgttttccagccacaaggagctgtatctaacactaatgcctttaaactcaagactggctccaggagagaggaggacggacactaggttgaggggccaggccacactcactctggaccacctgttgttcccgggtcaagttcccagggtcacaccagcctgcctctgcaggacaagaggaccaagctgcccttgagtggacactgtgaggctggggctcgtggtagctcttcacatggaccaaacgggaaaatcaggaaagctggtagtgcctggagcttcactcccagccagggcagcacctctggcctctaaggagaaaggcctgtccactcccatccatgttccaggtccccctgcacctccagctcccaccttcatcccgacatctcccatggatccctgccctccattccagcttcctagagtctgggtctgggtttggccgggaggggagaagggaactggccctggccctggagtctgctcagccacaccactagctggagggaggccacagcaagccccgccagagtctgaagggcctcgaaaggtgattcccag

SEQ ID NO: 65470 - DNA, 1452 bp, Homo sapiens
tgaggaggaggtgacagggctatcacacacactccccagaggagagaagagaggatggtactcctacccaagccagagcactgcagaacaccagcatctctgagtctgccaggagaagagggggtcccagagcttccttcagctcattacaaaattccaaatctgcctcatacagaaaaagcctctccaaccagcaaccaaattctcagagagcagggaacacagaggagggcagtcaccacactaggctgtggtgagggacatgaggggcagggcctcaatttacagccagagccccaaatgctctactttctccaaatccttccaagcccgatgcagtgggtggggaagaggacagaagggtcagccacagggactggcttcagggccatgagaatacaggagttccagcaccttccaggcttttcacaaagcttctatggccggggctgggaaagggaaggaacctggagactgactgtggagtcagccctcccagtaccagggctaggggaagtgggggggcactcctcactgtctgcatcttcctgccagctgcactgcatggcatactcctgctccagggtcagcggctccgaggctgtcaaacgctgcagctcctctgatttcatccactcgtggtacctgctgggacagaggggtggctttagacatggaggactcattcagaggcatacgtctgacaccttatgagggtccagaaccagacagggctaacatagggctcaaagaagacccaaagggttatgattgctcctaaggcaggggccacagacacaagacccagaagcaagctagtcttacacaagaacagcaggacgagtcagttctatctgtccaatttcctatcctgtctcgggtcagtgcggaggagcagtctgaaaccaaacattcttcaaattccagaaggggatgtatatggcaagccaacctcaacaaaggcggctggacagatcccacgaagttagggcaccaggaaccctcaaacggaaaactacaagtagagaatacccatctacagcaccactatcccaatctaccagacatgtgccaactgcccccacaggaatcccatcatgactcagtcctggccttttgaatggtagatatcacaactcatcagctcagagttcaaggacaagctaacattaagtctccaagaactgaacatactcactggcaccagggaaacatcactaatttacaattaggtgagaagacaatttctttttcttccacgtttagtttacataaagcaattccttgctgaaaggccaaaaagctgagagaatgaaagggaagaggatgggcagctcctcccaaggaagtcacagtccccaggttctgctattttttttttttttttttttgagacagagttttactcttgttgcccaggctggaattacaggcatgtgccaccatgcccag

SEQ ID NO: 65471 - DNA, 1834 bp, Homo sapiens
ttttttcccccctcatatataattatttctcacaaccaatgtttcttcttaggggaaatagccctgagactggggctgtaccttacacagctctgggtgctgatacgcaccccatgtcaagcgggaaagatacctgggcacatgctccgaggtgtagggtacaaggaccaccttcttccccagcagcaaggtgttctgattcaacctcatggtagcagcctgcatgcagatggggagagcaaagacttcaggaccctgaatttcctccaactttgggtaggcgctccagctttcctgctggggctaagttgacttccgtcattagttccgtctagacacttcaaagaatacagactccaaaattcttgcaagaaagagaaccaggctggttaaggataattaaacaatccttgactcccactccaagaggccaagcctgggctccgtttctgccggttccttccgtccactccccagaacttcgattcctcaaacccaagcaccaagtaccaagtaccaaagtatccccagagctcccattacttgccccagtccagggattccaacccagaatcaactttcagccctgccttaaacctacttccaacctcttaccccggcgaccaccccacggggctctagccactccctccccgcccccgaccacttcagggcaaggcgggcttagtcttaggccctcccctttgagtggcgttctagaccactctcttcgaccctccaaccacgcggacccgggtactgccaagctcacacccacctaccaccgacgaaatcgtcccccgcagaaagggtgatctacctcctccaaccagccacgttcccaggcccggccggctaccgccccttccgcatgcgcgtgagaacgcgccccgcccacttccgccatgctgacggcagccgccaggccccaatcccggtcccgcccccgcgaggcgcccaatcagcgcgcgcgaaaaaggtgggctgtggggccggcgcatgcgcgctgcggaagctggtgctggacagctggcgccggcagcagcggaccggcgggagacggcggcttgggagctggctgtgctgcaggtgttgggtcgggtcgggtcgggacgggcgggagaggacgagacgggtcgggataggttggggcggggcggggcggcactagactcgggactcctccaggagggagagagagggagaggctgggagtggggttcttgagaaaagagggagctttgagggtggggaaccctaagagagtaggtggggccagggagtggaggccccattaaaaaaaggaggccttagtgccaagagtggagttggaagggcaatgtaggaaagcccccagctccctgccctaggcagaggcggcagacagttccttgggctcccatgtgtggtagtgagctcctggttcctggaactaaacgaggataaccaccccagagcgtggaaagggggctcttgtggtgggtgagacttagtggttttagaggccccttaaatcacttgcaccccgagcagcattgaaaacatccgtgctgggcacagagcagtgccctgcacagcaagggaaatgttagaagaaaccgtccagatttctgtcatccagggtgacccctccctcgggggtgagtcttgtgacagatactgaggccctaagtgtctgtgataaaagaaccagaggtggcaggggaagtctgcaagcctcctcccacccctgtctcagtccatcagataggtgaagcctgctcttttgttttaaggagctgcggcagccgccgtccttgcacctaaggaacctctgctgccagcccttcctcac

SEQ ID NO: 65472 - DNA, 2029 bp, Homo sapiens
gccaatggcctgcccaacaacacttcattccctatccaatcggctagaatcccacatccttccaacggcctccatatcatcccaatctcgcccccgtgggtctccccacggtgtccctcctctaacccctctctctctccacaaaacgctatattgcccatatagacccgtcttattcctacagatccctgtttcgactcagactttcctctcgccccacagacctccgtatcatcctccattcaccccgtctcacacctgtagatctcaaagtctctccttttcacctttgttgacctccgtctctaaccctagaagcctcacatctcacgcacagatctccgcccacccccgtacaccaccgggatctcgccagcaggaagacaccccttcagtctcacccttctccagccctgccccagctctgctccgacccctactcagcgctcgcaggcctccccgcgctcccatccagccccaaaggcgccctgctcctactcggggtgctcccggcgggaggcagccgggtccgaggccacgccgaccagccccaccagcgccagcagcgcgaagccatggctgggaacagcaacctgcaagtggatctgttcctagctactgctccgcagggcaagcccgctcctgcccgggcccgcccacaagcgaggccccgccccaaaccccgccccctgcgctccgggaaagcggagccttgcggctccaccccgactcccgagagaatcccgcccccaaaagagagacccgcccttaactacgccccaccgtcgaagccccgcccctcggagcatccggggtatacgcgatttaatacatttctccccaggcctcaccttccctccaaatcccggaagcctagggttggaagagagcgaatccccatcgctgtttcagtccctccccaaggaaacagccactaagaaaggagcttattttacttagccgcgcccctctcgggaggctctcgtcgctcactgatgacgcagacgcccttgccatttgattgcgaatcctcccacgtgacttcgtcctagccaatcacgagtccggctccaagcgagccttcccgccgttgggaaataaccagagtgcggaagtctggggcgagggagctccttcccggagcccagcagcctccttcttcgaccccgggtgttgtgccgatgtaacccctcaaatccccgtctttgccgggccagggagaatattaaaccctggaaagctcgtcccacctcacctcctttcccattacataggtgaagaaaagcggggcggggcagtggcttacgtatggtactaaggacagagcgtccgacccccgtgcagccagccgagccgggaccagagttgaggtactcccctcgggttcagaatttaagggggctccaaaacactcagtaatcaagataaatataatactgcaacgttttaaaaggtcaaaagtaatgcaaaaagtctatgatcaaaatgtttttaaaaataaggacaggatccgtagtcacagctgacccaataatcctaacccctcttccttttccccatgggccctcttgtcaaatattacttccttggagaagccttttctctgacccgtcccctcccaagttccaaggagttaaaggcctctcattccacagcatctgaccttatcccatcatgacttactacactggttgtcgtttttaatgagattttaaattcaataataacatacagaaaagtgcacaaatcatgagtgtacaacttgacaatatatcacaaggtgtaaccatataaccaccacccagatcaagaaataaaacatggccagtatcccaggagtcctctgtgcccttactggtcacttcccctccctcccactggtaagtaaatgctgtctgctttctaataggtcactgtgttttatgcctgtcccactagaccaggagtaggcaaactatagcttgcaggccaaatactgtccaccagcatgttttggatgaccaacaagaatggcttttactgtttttgt

SEQ ID NO: 65473 - DNA, 865 bp, Homo sapiens
cagtccactccgcaggctgcactcccacggctgctgttgcagaccccgcgccgccacctccgccgcaccccgcccccacccgcagcccggccgggacgccgggtccccgcgttcctcacctgccggcaaggcgaagaggctgagcgcgaggatggcgcagtccacgccgtggcgctcccaccaggagctcgtcctcaccacgtcctgcaccagcacctccagctcccgcagcagcgcctcgcccccacggtgcgcgctccgcgccggttccatgggctccgtaggttccatgggctccgtgggttccatggactctgtgggctcgggcccgacgcgcacggaggactggaggactggggcgtgtgtctgcggtgcaggcgaggcggggcgggccggggcggagtcacgcgccgcctggggacacccgcccccggggtcaaggtgcgagacaccctggctcctctgctgcgggcgctggcgacccaggcccggctcaggcgcgcgaccctggcaggcggcatcagaaccgccgcggagggaggagccaggccgatgagctgagagtggctaggcggggaggcgaccctgcggtgagacccagcccaggtagtagggacggaggcgtcaggggcacggagaccccagtggagacaccccccacccccgccccgccccgagggccttccctgacctccgacctcaaataactccctgagttccctcggtccctgagatctgtccgagcattctcttccctcgaccctgactattcgtagtggcactgagcagctcccctcgtacgtgacatacatgacacatgctgtcgtctgtctctgccaacagacggaccctcagtgccgtagag

SEQ ID NO: 65474 - DNA, 944 bp, Homo sapiens
gaccccagcgctgatctaagcgctggcgtgtatgaactcatcgcaccctcccaaccagcccaggaggtatcagaggagtaaggttggatatcatcagcacaagtctcctaaaggtcaccccactgatgacaggcctggagggttcacactgcagagatttgaggtagacatatggaggcatttcccgaccgcaagaaccttgagaatctgaaataatgtacccttcagagcacacgattgtctggaacaaactcagacggtgcatgggggagagggggatgggcagcagatgacctcactccaatgtcctgagcgccttaccccgccaggcgctgacctcagactggtggaggggacagatggggcgagatcattcagtacagtgtgcgcccagcgctggagcgaacatgtccggggacagggagggaggcgccgcttgcaggggtgtggggactcgaggaaggtttccagatgtcgccctatcctttaacctcaacccgagatgtgcagcgcgcgaggtcggtcgacgcccttcgcctcccgcaacgccgctgtgcggttgggggcggtgcggtccctctgccgccagcgcagcccgcgagccgtcacttcctgtgggctgggccgagccgggctgcgcgcggaggtaggggatgcaggctgggggtgagcagcagcgacggtgccatcggctgtcgcatcggcgtcctcagccccgccccgcgcctaagcggcgctcgctgggagggcctggccatcttcgcgcggtggccgggcgctcccggggtcccctgcctgtgccccgttcccccatccagaacctgggctggaggtgctagggagctctgggagcctgggctgcacgcagggaagtgctctcggccgccggggtcacaagactccagggcttcacagtgcccaaggcttggtggacatcgagccca

SEQ ID NO: 65475 - DNA, 1739 bp, Homo sapiens
tagctgttttcaaacactgcttgctctactgtgaacctttttcagaattggaacttgtctgtagttcatcccttaccagcgctatgaaagggttctagttagctggcagttctctgaattctctccctacctcccgagggaccccctctctcctggctggaagaaagcatcatcttgctccataaagctgaagggcgggggacgatgttccaggttttgcaaacatttctttcggtggcctgccttctcctcccatctggtatttgtcctgcagagctgctgggtataagccagtacacacacgtgctcagcggggaatttgctcataggctgccttgtaaaaagagcctggcgttcctaaaactcagctctaccagaacccaactttcaaaagtacattcctacagaattcattttatcagtactcatggggtgcccacgatgtgccatgttctgggtgctggggatataccagtgagccggtgccctcctggagctcacattccggctaggagacagcaattagacaattaggactgagtgatttttgtaaaggaagagaaaaaagataaattagagcagagtaaaggggctgggaagcgcggggcgggagatgccccaggctggccgggcaggcctcgctgctgtttgaattgggcagtgggcggtccaggcggagggcacggactctgaaaggagagaagtggtgtttctgggggccacaagatcggggcactcttccggtagcagctcgctctctggccaccgtcttccccagccaaccaggcctcccggaggcggccggccagaaagcatcggcgggaccccagtttgccgcctcccctcggcgggacctagaaactgcgcggaaccaaagctcgagggcggctcgagtttgcggaccgcggggaggaagcgcccgccggaagcagtcgcaagacctgagcatggcggccaccaggtgcctgcgctggggcctgagccgagccggagtctggctgctcccaccgcccgcacggtgcccacgccgggcgctgcacaagcagaaagacggcactgagttcaagagcatctacagcctggacaagctctaccccgaatctcagggctcggacaccgcctggagggtcccggtgagccgggaaggactggacggaaggggcgttttgtcaggctgctgggtgacgttaggaaccccaggcccattggccggatgtggagctacgtcggggggctacgtgatggtcgccgcgggagggggctggctgtctgcgctaacctggccgggagtggggtgctcgctgtagcgcgagatgtgcaggagcccggaaggccggctgggtatgcttctttcaaggctgccagcttttctacgttcgtgtccttggccctcaagaccaaattccagtcccaaggggaaatacgggcattctggccctccaaggcggacaataaaggcaagaggctgccaagttgtttgctaccctttgggacgttacagtgtccattgtctctagtaaccccaggacgcgcgaataaaacagcttctctgtcgttccttcaggatgcatttatttagccagctgtgtgcaggcattgaatcaagccccggagcaagagagataagacccacccaaacccattgagcttccacttacaggactggaaaagaatatccattcatttgttcattaattcactcactcactcaacaaaagctgtgctaggctaggggatgg

SEQ ID NO: 65476 - DNA, 2372 bp, Homo sapiens
aggcggacagcaaggctcagggcggtaggaaggaaactcctccaaacctcagtcttcataccccatggtccgggtgtccaggcaaccaccaagcggaccctcggggctccatggggcgtcccagtgccgggggctgggggctggtgctcgctaagtaaggatgggggcaggtccctgcgcaccgcggtatcttcccgcccgctcaccaaaagtgcgcgcggcagggacggacccactccatggatcgcgcctctgtcaggccttctctaggaaaaggggacactcgcttatgaggggaagggatggcacggccacgtgccccaagccccagtggcctaatggataaggcactggcctcctaagccagggattgtgggttcgagtcccacctggggtagaggtgaaagttccttttacggaattttttatttcttttctcttcccttctcagggatgctggaatcgaccttggtctctagttcgactcccgtgcaacgtgttgaggaggagccacctcctccaagcgcctaaagccggtaagctcgggtcttgccaagcccttgaatgaacagctttcgtccgggtagggccccacaatttcgaagctggggaaactcgtaagaataaagttgcccaaagggttcccaggacaccccagctccacctggcggggcagccccggagaaccagaggtaaatgaccaccgcgactgcaaacagagggtcctgcaagagaaggcgaggggcgcaaacagggcagaggcaagcaggtagcgggcaggtggtggtggattctgaggtctctggctgccggcaccaaaagaaaccttgcgagcacagcccctctcgacaccccaggtgggactcgaacccacaatccctggcttaggaggccagtgccttatccattaggccactggggcgcggtaagacgctaaacccacgtgctccttgataggtgttcaaccatagtgcccaaacacggccctgctgtgggtcaccgcgctccaagcctgagaagccatggggacgacaggatgaaccgctggctgggcgcggcgtccccaccgggctacacaagagctccatgcggtgacgacgcgcggggaccaggagcccgcggtgccctgtaaccccgagaagaagtgctcggcgagcgcagaggccggtggagcatagctgggaggaatagggatggacgagggcggagggaagaacaaaccctcaaactatgctgggattcgggcaagggctgctcgctccaaaagagcccgaccacaaaggaaccctcaatcttatgatctgacgtcagacgcctcatcccttaggccacgcggtcgcaattcccagggaggctcagagactagtccaggtgccgctccgctcgggggtgactaggcgggcggctggggccagaggaagggtgagcgcttcgctcaacaggcggccagggtgcgagcagtgaagctgcggcacgccggagcgtttaatggccatcaaattggcctctctaggaggtagctgcagccggagaccgcgtggcctaatggataaggcgtctgacttcggatcagaagattgagggttcgagtcccttcgtggtcggaacgttttaatccctgcaactataatcttccctcccttgttttagacccagaaacgcctcccaatccctccacaccgcggctcccgggatccgaagctggggagctgcttctgtccaatcaggctttgcatcccgggacgcttccggttatggcgtcattatgcagccagggtaagtagggccccatttcttgttgtctctcttgagctggtacctggaacgagttcaacatccaaacattcgcctcgtaaacgtgctctacaagctacaatcccacaagcaaatgacacggagcgggttatgtttcagtctatcgttatgaagttaaacagcagacaaaactccagtctctggccgggcccaatggctcacgcctgtaatcccaacactttgggaggctgaggcgggcggatcacgaggtcaaagttcgagacccgcctgaccaacatggtgaaaccccgtctctactaaaaatacaaaaatacaaaaattagccggccaatcgtggtggcacgcgcctgtaaacccagctactcaggaggcggaggcagcaggagaatcgcttgaatccaggaggccgaggttgcagtgagccgtgatcgcgccactgcactccagcctgggcaacagagcgaaagccgtctcaaaacaaacaaacaaacaaacaaacaaaaaactccagtccctagcctcaagggcagtgggggtgctgcccaactctgtggcctcagtcctgctagtgggctctgtccacactcacacggcac

SEQ ID NO: 65477 - DNA, 1978 bp, Homo sapiens
gggttcaagcgattctcctgcctcagcctcccgagcagctgggattataggggccttccaccacgcccagctaattttttgtatttttagtagaggcggggtttcactacgttggccaggctggtctcgaactcctgacctcgcgattcgcccgccttggcctcctaaaattctgggattacaggcgtgagccaccgcgcccggcgaaattttttttaattcttaaaaatctattgcttaatccccagcgcctagaacagatcatgcgcataggaggtgctcaatgaatctttcttgaatgagtaaccgaactctgcacccgaggagccctgaacgctctatacgttcgaatcctggaagctgccgaaggggaagggcgcagccccgcagccagctgagcgtccctcggcaggttaacactgtctgcgtaatgtttccccagtccccccaccaaactattgaagtctgccgcgctgggagcggactgcacgagacacggcttgtggcagcgcctacatcagcggcgcctgggacacagccgggcccccctgaccccgcgcgccaaggagggctgaggaagggatcgcggggcgaggagcggcagctacacaagggacactctgccagcggggcaagccgagggcccagcgtccttgacgggggcgtgacaagggtcggcgtgaggtttggagagggcagagcagaggagccctccagggatcggatccaatgccccaagccccactcaccttcaccgaccctggctgcccacggtcctccgcagcaagtaacggaagtgggtcacgggaagatctttcctcagccaaccccaaagccaagggggtgggccttgcttcgcagatcagccaatagagatgagggctggttccggaagtatcttcccgggggcgggcacagcgcctcccccgcgcgggtccccgggcgctggttgggggcgctcccgtccctctcccctctgccccacccccgccgatgggccggcccggctctccctgccgagaaatgggccggcccggctgcgcgcgggcagcagcggtggcggcggcggtccaagatggcggaactgcagctggacccggcgatggcggggctgggagggggcggcgggagtggggtgggcgacgggggtggcccagtccgcgggccccccagcccacgcccggctggccccacgccccgcgggcacggccgcccggctgccgccgtcgcgcagccgctggagccgggtcccggaccacccgagcgggcagggggcggcggcgcggcccgctgggtcaggctgaacgtgggaggcacctacttcgtgaccaccagacagaccttaggccgggagcccaagtcatttctctgccgcctctgctgccaggaggacccggagctggactcagacaaggtgtgccccgccctcgggcgcgcccccgggccttcgaaccccctggtttctcgtagatcggtccccagagtcctgagacacgctcctcacaggcagccccctcaggccgggaccccatcctccccctccctcccacactactcgcaggggcctcagagggacctcccactccccttcttccatgctgaggcatactctggctttctccccgaccccgcccttcgttctctgagactccttcccacactgcgcccacctgcacccacgagaacgcactccacaccccttctccatattctctgcccctgacatcccactgagatctgcatgagttttccctggctcctcttcagtccccccactgccggtgccagatgcatccagaactgggtcagggttagctcaggcatccttgtagctttctcagactccctctcggacccctctgccaagttgggcttccacagctgcaggaagcgctccttgtgatatcacactgcttttctatagtcctggtcgcagaacttttatctgttaacagtcactggtttaggtccatattta

SEQ ID NO: 65478 - DNA, 3337 bp, Homo sapiens
ctcactgcaacctccccctcctgggtacaagtgattctcctgcctcagcctcccgagtagctgggactacaggtgcctgccaccatgtcttgccaatttttttgtatttttattagagatggagtttcaccatgttggtcaggctggtcttgaattcatgacctcaagtgatccgtccgccttggcctcccaaagtgctgggattacaggcgtgagccacctcgctgggcccccactcagtcttgtgtgcctgaacaaatacaaagggagacgatgttagggtctgatggcgggggaggagggcgacctggggcagcacccactcaccctccaggctgtgtctgagcagcgggctgagtttggggacaggagcgtgggtggaagcatcccctgacttgtatgcaaatgccttgcaagccagcgtcctgccctggaggctgctgaccctgcttccccacctccacccgccaggttactgcaacctgaactttgaccccgccaccgccggcgacgagctgttccagctctaggagacccgctgggtgctgaacctggggatcctcctggagcccctgacagggggcggccccttcccgggcttcaagcagtgaccgcagatgctgtgctcgcgcggcctgtccgagggccgccactaggacgggaggtggaggtgtccaactcgtgggtgtgcctgggcgtcacctacccccgcagctccccgctcggcggccgcccgagccgcagcgtggtctacctgctgggccgcaaccccttctcgtggtgcctggagtgggacgacaacgcgcagaccgtgctgcacggcgcctaccaccgcacgctgggcgtggcgctcgactgcgacgccggcggcttgtccttctacggcctggcgggtggcgccagcctcttctaccgcttcctggcagccttcctcgagccgctctaccccgcggtcatggtcagcagcggcgcctcggccacgctcaagcggcgcccggagcccgcgccgcccgtgacagcaccccataaataaacctggacttatctaagcgctggctggcgcgccaggacggttcccggccctgcgccatcccacctcccaaaacgcaggcgaccctttctcgccacagccacaggagggctctaatccggctagagttcccccaggcactggggacagtcccgtggccttgtgggtgggggattcctgactgcggtgcacagcccactcccaaaccccatcccagcagcgtcctctggccttggttctccaggctggtcttggccgcttggcactggggcctgtgccaaaggccttgtcgtctgagagggggcaaggtttgggccaggtggtcagactgagaggtggcgccagctggattggggtacgggtgggctgtctgagtggcttcattgtcgcctgagaggttaaactggaggagcccaggcctacctcagatccaaaaatgttgggctggggacccaagcccaggcaggggtggggctgctgcccagagcagagctgctcactcagctggtgttttacagcccagagggggtgtgacactatcgcgggtgagtaaaccttaaaccccctccaccctgctgagtgctgctgaaagctgctcccccatccccagccatcaccaacccactcagctcccagaaggtagcactgctcacagcagaggggctacgtccatatccaggcctctgccatgcgaccagaggctgaatccaggccgagaccctgccaggggaccctggccaggccatgactgagaactcagctcctctgtctggggaagcggaagatttgggtgcaccatggagccacctccacatttccagcctcaaccagccacttgttcctgtggcttctcaagcaagggttctcagcgaggttaatgattggctctgaagaggaactgatacaaatcactgaagaaaaaaatcccaagggcaacgaattccagaaccagcccacgcggtgccccaggggtgttcctgaattccgtctccacctggcctgttccgggaaaaattagtgacccggtttttccttcaaggtggtcattttggagccaggagggcacagggggagcagagtgttctctgaaggttggtgggggcgggggggctcctctgaggaagccctggctacagcctcgtggtagcctttctccctggagccttcgctcagctctgagcccagtgactcattccccacaggctgctgcccctgtgaagtaaggaatgagctcgaattctttgccccttattaaaagaccttttacccaaaatccacatcttgcctccccaccccacagtcttcctcctggcaccagtggccacaggcttctgcagaggagcgctcaggtcaggaaatgctgaaaaggtgagtgcatgacccaagtgggtagcagcagccgcatacatctcagagtcttcccacatcacggggctggcaaggacaggggcttcctcgccaagtcctccccgctctgaaagacacttggtggcaggatggtgcgtgacaccctcaggcacacatccaaatgtcccggggatgatacttgctctcaaacagctgttccttatttgggggagtcctgggcccccataggtccgcaatggtggtcctgagggtcctgaaactcttttcagtatttccacgagccagatggcaagcaggcctgtgctttcaaggaggcaggttagcaaaccgaatgtcagggtgtctggtctctgcctggcctgttcctggagaaattagtgacccaggtttcagcctgtgcttcatgggggaaaacatcacagggcgggcaggcgtggtggcgcatgcctctaatctcagcattttgggaagctgaagcaagaggatcacttgagcctaggagttccagaccagcctgggcaattagctgggtgtggtcacacatctgtgaccaggccaggctggtcttgaactcctgacctcgtgatccacccgcctcggcctcccaaagtgctgggattacaggtgtaagccaccgcacccggccggaaatgtttttcaaataatccttggaggcagatttgtttacagcctgtttggatttagcctgagtgctaaagcaggaccggaagagtgagtgggtggcattcagggacagtccctgccctgggccccacagtgggggaaaagggaggggcagggtccactgatgtgggttattcatgagcactggctgaacttgctgcccccaaagagcccttctgtgatttttttttttttttttaagcaggttctccctctgtcacccaggctggagtgcagtggcatgattacagctca

SEQ ID NO: 65479 - DNA, 1006 bp, Homo sapiens
cactccagcctgggcaacagagcgagaatctgtctcaaaaaaaaaaaaagaacagatctgacctgacctggcactccctgccaaactcctctcaaaggaattcactcgctggttccaatgaaattttattcacaaagccaggtaactgccccaaggcccatggattgctgatgggattttctaacaatattgcattaactttttgtcttaattactgagcttttttggtgtcccctaatattctgagccggaggtgagtggctcagtcacctcatcctagcaggggatgtcacagacaaggagggggtgtcagggatgccaaatgttctgcaatgctcaagtcctgcccccaacacagatagcgcccctgttgttggtaatgtgttggtatagcaacactgcgtgaaaagtgatgaaaagtgaaataacattcctggagccagttgctcactcttgccaaagtaaattagaatcaaagtgtcagaagtcagtgtcaggggcactggttagaaggcttttgggtccttgccaagtgtttctggaagctgcatctttctcgttgacatttcctgtctggaggtcaaaggccttgttgcctttgagtttcacacagcgaaccacacagctggagatggttcaatttctgcccggtttgcttcagtgctctgtaagtgtcccgtgagtggctcctgtgggccaggcacaaggctccgcagggtgggtgcggtggggagcaacgtagatccattccctgcccccaccgcagctcaggggtttgggggaacagaccctaaggttggtcacagtggtgcccacactaagctacacactgagataaaggcttttcagggctgggcgtggtggctcacacctgcaatctcagcactttgggaggccgaggcaggcggatcacttgaggccaggagttcgagaccagactgaccaacatggtgaaaccctgtctctactaaaaatacaaaaattagccaggtgtggaggcgggcgc

SEQ ID NO: 65480 - DNA, 484 bp, Homo sapiens
acagagtgagactctgtctcaaaaaaaaaaaaaaaagaaagaaagaaattgcggtttaggggtcatgcagcccctggctgcaggagtctgaatcttcccagattgctcctggggataacatcattattgcaaaatctaagatcagtgcttgagatattttgtagactctgaactccatggatcagctgacaccacccagactggtaatctgactcagccacttctgccatccaacccaggaacagaggacagcaagaaaacctcacttcaaccccttatgagtccatctccaacctgaccaatcagcactccccacttccccagcacctacccaccaaattatctttaaaaactctgatccccaaatactcagggagactgatttgagtagtaataaaactcccgtcttccacgcagccagctctgcatgaattagtctttctctattgcaatcccccgttttgataaatcgggtttgtctagg

SEQ ID NO: 65481 - DNA, 562 bp, Homo sapiens
gtattgtagaaatttttaaacacgatgaatcatggatactttcactgatcctttcaagtgcccctgcccctacctacgccttttagaggtaaggaaagcaagcaggcacagaacacaagacctgcccaaggctgaagagtgagttcacggcagaggaaacaccctgtgtcccgcccggccacaccaccctcagctatgcagctctggcctgcagcccagtccccacccccacccctgtgactaagggctttccccaatgtcaacttccctaagtcaggccagagtctctggcgtgaggaagctctgtgggtcagtcctctccagagccacctccccctctacaggggcagagacgccgggccaccagcctctgcttgattatgtctgcgacgggctgctcacttagtctgtcacttgcttttttcttttttttttttttcggagatggagcctccctctctcacccaggctggagtgtagtggcacagtctcggctcactgcaacctccacctcccgggttcaagcgattctcctgcctcagcctccctagtagcttggaat

SEQ ID NO: 65482 - DNA, 934 bp, Homo sapiens
ggccaggctgctcctcgcagtacacccacccacgcctgcacctgcctcagcgaagccgctcgccgctggttccagcacaggctaaagagcttcggcatccagaaaaccagaagcgcgccgcgcacgcgcgccaaggagttcggcgacggccccgccccttcgggggtagggacagcgcggcttccgccgggagcccggaaccgagcccaggagccggggacggtgcgccagtgccccctccgcgagccccaaccagtagacggttccctgtctcccgcgccccaatttcgattttcaaacgcaactcctacaggattctgagaccccgtcccatctcccatatcccatttccagctgcaaattactgcagaatctgaacccaggaaagaaacccatttgccgaccccctcttccctctccagacaggtggagagcgggtgagggtctcgctcggctttccccctgcacctttcccaccctcccgcccgtccctgggggtcctccgtcaccgcggccatggcccagaagccgaaggtggacccccacgtcgggcggctgggatacctgcaggcgctggtcacggaattccaggagacccaaagccaaggtgagagccacggtgggatcaggtggcagggtccgctgtgaccgccgcccggacctggcttcagtgccgctttcccgttgcagacgccaaggagcaagtcctcgccaacctcgccaacttcgcttatgaccccagcaactacgagtatctgcggcagctgcaggtcctggatttatttctcgattcgctgtcggaggagaatgagaccctggtggagtttgctattggtaagggcggggcccgttccctagatgcctaaatgggccagggtgagataagtgaattagaagtgagtccttggggccgggcgtggtggctcacacctgt

SEQ ID NO: 65483 - DNA, 1933 bp, Homo sapiens
cccagtactttgggaggccaaggcatgaggttaggagttcgagattagcctggccaacatggtgaaacccccatctctactaaaaatacaaaattagctgggcgtggtggtgcatgcctgtaatcccagctacttgggaggctgaggcaggagaattgcttgaacccgggaggcggaggttgcagtgagccgagatcgtgctactgcactccagcgtgggcgacaagagcgaggctcatactcaaaaaaaaaagtactgtatactgtttcatcatatgcatgtaccataatttagccatctggctattaccaagcattctaggaagctcccagtttccacgttgctctttttccatggcccttctcagttcttcagggcaggttcacacaggtagacccagggagaagctcaaagcagctgttgctgtggcctcttgtgggtcctctggcgccatcttggctcatctttctgctccagctcagacttcctgccctgaaactctgtgcccttttcttttctggccctcaccgccttcttcatctctaagggacactacccgctaggcagaggagcttcaggagttccctgccactgcggagagggtccaagcagctggtgagctctggcaggcacccggtccatccttggagactcctaggcctctgtgtggggagggagggagagggtggctctcctgaggcctcctcctgcccccaccctctggttttccgcagtctgggtggcagtgccctgcccaggcgcacctgggtgtggtgatgactcagctgccaggcagtgactcaggcttcatcttatcacactttacacagagagaaatcccatcaccccacccgcagtccagtgtgcacaggaaggccgctcccgtcagctcgggagacatgccgcgggtgtgtctgagcagaagagtccgaccacagcacttccactgcccctgctccagactgagcctggcatctgcccaaggctggattcgttgtccttactgcttccagagggccccgccatttcccatgggagggccgccatttcccatgggagggccgaggggcagaaggctcccatctctttagcgttttgggcagctcactcagtctctcatagccttgacttctcccatggaaatgggggtgatgttagcacttgtttctagggttcagtcatgtgtccagtgcgtgctcagtgaagtgtccacggttctaggaacttgagccctgccttatagctcctggtggaagggacagagcaaggacaaaaggcagcctacagaatgccacagccacgctaggggccaccctgtgctttagcaagtgctgaagtgggactggcaagggaggctccaagggccccatggggagaggcgctcagtcagggcctgcttgccctctgctgctgctactctttctcaggactccagagaggccaaagagctccttccctccctcagatgtgtcctgcctgtgagctgcagcccagatctaagaactacagaagtccagggtgggcaggatgtcagggagccacactgtccagccccctgaccatctgcggttctttgaaccctttcccccccgggtcagtgcttaaaggatcaggtgatgaagggctgccctgacatggtagagcacctagtcgggtatcccaggaagacgccacttgcaaggagagcagtggagggcttgttaccagcaagagggtgtcagtgtgtgacaactgggggctgaaaggtctcagggatggactgaggttggagactgcaatgagtgccagggagagggaagaacagacaggacggctcaggggtaaggagcacacggacatctggaatttactccacatgcagtgggatcctttaataatgttcccccagctgggcacggtggctcacacccgtaatcctagcactttgggagg

SEQ ID NO: 65484 - DNA, 1703 bp, Homo sapiens
tctgcggtggcccctgtgggcctgcccttcctttagctccagctgctgcccgcggcatccccgctcattcccgctgcgcagctccgcgcttgctatctaagatctccctccagttgtcactccaggagagcagccgtctccttgtcgggggcaggaccaggtgccgattgtggcagcaggtgaacaagatgtgctcccagcttggggtctcctcctggcctaggacagtgaaagacagcgcgctgccatctgtcatgggtattattactccctctccctaatccgggcaggccagaggcctggaggctgccaaggataacgggtccaacctcgaactgtgtccttgtcatcaatgagcaggtcccccaagaccaccgtcttgtcccttgtcaggataattcgttctacgaactggggccccaggtgctgctccacccagcggtactgtgtagaaaacacagtctgtgagtagggcctgatggaagccggaattcagggatagggacttggctctaagcccttgagagccccccacccccaccttctgggtttctggtggtttctttttaaaatcaggatttaggcagctccacgtgcggagtaggggcggggcagccacaccttctcacccacacagtggtggtacttcagcagggggctggtgcagatgaagacctgcgtgctgcggagaaggacgcggttaccgccgggagccaggagcccgcccaggactccgcccgcccccctctctccttactccggtaggtcgttcatctcccgcacagcgtccaaggctcccgggatgggctccaggtccaggaaaaagcccggggcttcgtacacactggccactttatcctgaaagacaagagttctgggtcccggcttcccgttcccgcgaggacccgcagggaggctcctgggggctccgggcccgagctcagaggggcggagggggcgtcggtcaggggcacgcgcccaaaggctcctccccagggtgcgctgcccgcgggttccagggtgagagctctgcgcccttcacagagaagggggagacccccggaacggagcgagcgggccctgcccgggtggggaccctgcgccccctaccgccaggtcgggccgcagggcgcggtactgctcgcgggccaggaagccgcggcgttgctccagcggcacgtgcggctcctcagggaagcggcggcggaagccccgcaggaggccggcctcgaagtcggccaggacgccgtccatgtccaccagcacgcgcacgctccgcgccatcgccgccgggccggagctgcgagctctcggggtctggggggcgcgggctcggccggaagcggagggagcgctgcttccggagtccgccgggctgatttgcatagagtgtccgggccgccccgcccaggtcgtaaaccagtgccgacggccctgcggttgcgcgaggccatcctagggttcgggtgcagggacggctttggggggcacttttctgaccctgcgcttcttcgggacccagcctttgtccccatcagccgcctcccactttacggcagacgtacccccgttcaccccacgttactagtaggggaccgaccttccgggggcccaacaaagggatgctctgaaatactgggaagcatctaacgaggagtcaagggtcctaaacccgtggggctagctccacattttttttcttt

SEQ ID NO: 65485 - DNA, 1989 bp, Homo sapiens
agaaaacagaaagggagcgaccagtttcctaggtctgtgctacttaagtaccccatcctcccagtaatcaccaatttatttttttaatcttacctagtctttttgaccttgtaaacctgaaagtattgagttgtaaaggaatgtcatttcccatgctttcctcctaaggctcaattgctgagtgaggcgtgctttttgttcccaagttctctaacccctgtgagatatggctatttcacgtgtcttcttagccccacaaaatggctccctttgtgccacttggccaggaccccgagggtagccacacatgaatgcaggtcataatcgatgtaaaatacatgctcaaaaaagtgatttaagcttcttccaagccttgaagaggatcccagacataactgtaacccaccttaaagaacagtgtgcaattagctgagacaatgtggacaccttccacagaatccaaacccttccaccaagtaagttaagcaaggacttggaaaagggttcctgtccaaacactgtacccagtgccccaagcccaaaaagcagtgggaagaagggcaagaaaaatcccccgcttcccaggtagcgctaccacgttagagacaatggatgtctccggccccgcccaagaacaagaaacctcctcctgcaagggaaccagggccagggatgaactcactgggcaaacgtcaaaggaggaagcgaaggtaggatgcaaaggccacggtccgaaggtttaagcgcagaaaacccactcgggttggctcgttccccgcgcccgcccccgccccccgccttagaaatgagcgcagggatggggagaaggggtctttcctttgttaggaaggggagacacttggaagaggggaggcacttcgaagaggggaagaacgattgggtcctcaatggggggtgaagggtcgcgatgaccagccccgctcgaccacacatgcacctgtcaggtaggtccgaataaggagtgggggcacggcgagggtaaggagcccgccggacctgatcgatccggtctccggatccaatggctgcgcgcgagagcgagaccaaccgcatgccacgggggagagacaggagcgcgtggcccatcaatgggacaataggacctgaccatgcatggggccctaaaggatccccgggcacctggggggccaagcccaccaccctggggatgcaccagccgggatgcacacaggagaaagcgaagccctccccgaaggttccgattaacgaaaaccggccgtgctccgaggggcgaccagccccggcctcctcagcccctgactccgtggaaggaatgaatggagagcagcagggacccgggtggggccggcgcgcagggctcgccaggcggcacaaaggcggcgccgacggcagaaccccgccacccgccccggcgcgagcacagcgcacggggctcgttacccgcaacgaccggcgcgaggccccgccggcagcggccctcccagcccctcagccccgcgcggctcgggcgcgacccggtcgcctcaccgggagctattcctgctgttggggtcgactcccttgaaggtggtggttgtggtcatggcgccgaggagcgaggtaggctggcgccggagcagaacgctcaaagggtcggacccgaggggcgctgggaaactccacacccaacagccgaccaccgctgcaggagccgccgctgccgcctgtccggccgatcgacgcctttatagggttttcaacccccgccccctaacccgccggcattggccgattcaaatgaattctttcattcctattggctctctggagtgccaagcaccatgcggcattacgatgggctgtggcggccacggctcagcctaagcccgcccccttcctggactgggaaggccttgggactctctcccctcccccaccccaaaatctcggcgatgattggacggaaggcgaatctacctcgcgctgggtggaagtcgtgctggctgt

SEQ ID NO: 65486 - DNA, 2231 bp, Homo sapiens
tatcagtagcaacaatatgtttaaagttgggtcctattcagtgtattgcaacgttctcttgaagttaaacttcctaaaatgacatatatcactcccaaaatactttaccccccaaaaaagttaaaaatagagtcccttctcttttctaagcactttaagtacaactgcaagaaacaaaacaataaatctacagcctgccattcaaaactcattaccgttgtcattaaaaagttaccaaactcagtttaataacctaaatccaatctccattaaaggaaacacacaaacaaaaaaaacaatcgaagaatatcccgattccccccggaacagcggtaatactcagtcaggaccacagttaacgttctcctctattagcagcttcatttttattttcggttaagagcacttattctcccctccccccctttgttgtcatgggtcaaatacacagttttatcctgatttgtttcttgtagatttcgacccaacctaaagttgtccaaaatcgagtgcagaagcaattctgtagccctaaaacgctccagaaagtaaaggcgcgggaggcggggggtgccaccaaactaaaagcagcaagtcccgtgtgccccgatgatgggtgtccccaagtcctcccgggaagtctccgggtgcctcaaaagccgcgttcaaaagttaagccgcacaaagtctctctgctcgtacctgtgcctccaacttcatgaaaccacatggtgttcgcggattaggggttcgttggcacccagggaaaagccgctgcccctcccccttcgggcccctgaggctattaaagtgggaaatactccacgggaatccccctacccccaggcccaggacggcggcccgcgggcatccaggttcctgcccgtccgcagcccattgattcgccccgaaccctcgccccgccgccgcggccccaggcaggggtccccagatgcccgcggttcctacccgagaggtgaagcccgagcccagaggactcctcgccgcctcggagactgcaacacccgacgcggggtcgacagaaggtggagaccccgcgcgccctaacgcccctcctcacgcgcgccggccggctgggccaagaatccccgttcggggctggtgggtccgcgggcgtccgctttctgcccgcccaactcgcgcccggcgcgcactcggaggccgccgggggcgggagagagcggcggggcctccttcggcgcgggagggaggaagagagggagggaggaaaatggcgcggagcgcccgggcctgagccgcggccggccccgtggggggcccgggaaagcgctgggagccagcggcgggctctggccggaccccggcccgcgccatgacccccaccgcgcggcgaggcgaaggggccggcggcgagctcaccttgggcttttcgtcggccatggcgagcgccggagtctcctcagctgccgcttcacaaaagaggtaccaggtccgcaccaaacgagcacacaagcagcaccaggagcggcagaagaaggaggcggcagcggtggacgaggggagagggtgcgcgcacgtcgtgcgctccctccccccaccctgcgtgcgcgagcacgagtagccgaagcctcccattggctggcgcctcgcgggagcgcgcaacgcttacataaccacccccaccccccgtcccacgccaccgcgtcctgggccaggcgcccgcccggccggcgggaagaggcgcggacacgcgcacccggcccgccgcgggggcgcgcctggctctgggcggggctgtattgtcctccttcgtggtggagcataatcaaaatggcttccagctggtcctcggtgggaacgatgaggctcgaggctttagacgtaagccataggccagggaaggcagacttactagaggaggaaggggattcctaaatcaaagccccagcatgaggttctggaaaaatctctctcattcagtggaccagcagccctcccatggttacttcctctcagtcaatctcaacctgcttcccaccggactcttgcctaaaatgcagtgtcttcttcttcttcttcttcttcttttttttgagacggagtctcgctcagtcgcccaggctggagtgcagtggcacgatctcggctcacagcaacctctgcctcccgggttcaagtgattctcctgcctcagcctcccgagtagctgagactacaggtacccgccacaacgcccggctaatttttcg

SEQ ID NO: 65487 - DNA, 2132 bp, Homo sapiens
aacggttggaaaaatgaaacaattatcttacaacttatttttctctttcctctcctcccctctctctaaaagagtgtggctccttcccctctcttttccccttcctctctctagagtggttaactctcaaactgtatttaactctggaaaagttttcaattacacaggcgataactccaacttgaggtataacggaaacttattaagagaaaaagagcaaaataatttttttttgagactcagcaaaataatttttttttttttgagacggagtctccgtctgtcgcccaggatggagtgcagtggcgcgatcttggctcactgcaacctccgcctcccgggttggaacaattctcctgcctcagccttacgagtagctgggattacaggtgtccgccaccactcccggctaatttttgtattttcagtagagacggggtttcgccatgttgtccaggctggtcttgaactcctgacctcaggtgatccaaccacctcggcgtcccggagtgctgggattacaggcgcgcgctaccaagcacagctaatttttttttttttttttgagacggagtctcgctctgtctcccaggctggagtgcagtggtgcgatcttggctcaatgcaacctccacctcccgggttggaacaattctcttgcctcagccttccgagtagctggaattacaggtgtccgccaccacgcccgtctaattttttatatttttagtagagacgaggtttcatcatattggccagactggtcttgaactcctgaactccagtgatccacccaccttgggctgccaaagtgttgggattagaggcttgagccacagcgccgggccttcaggggtatcgattttgttcccgtgcctcttgtgtgtgttctagtgtggaagtggaggcgattgctttccagcacaagcccgtttgactgtcggggtttggacaagtggctgcgacgacactaaggtggagaccgggatgtagcgaggactcccagagttgggagacgttgtacgcttactgggacctaaatcccgcacgagttcccacccaagtgccgccgccccagcctacgcacgcgcattcgcaccgtctccagccccggggtcctcctgcccctcccgccgtctccgggggccttttctccgctcggcaccagggtgtccccggcgccgcctgatcctgttagcgcggtactctgagtgcagtcagtcctcggcgctgttttccctgatttgctgtcgacgccaggaaggaaggacgcgtgcagaggaccgcagaggggtggccgtggctgagaggagacagcgccgcagcactgagggtttgggcttgcaggcgctgcaggagacgcccaggcggagtcttgtctcgcagccagctctgagcgggaggcctgagcgggaagcattggcgtccgagcgacttctaggagcctggggttcggcgctatggaggagctcgatggcgagccaacagtcactgtaagggtaccccgaacaggcttgctcgtccttgcgggttgagaactgcgtctgcttagttacttcaggcttgtctgcttccctagtggtcgcgaggcgctcgtccccttccctcgactcagttgccacttttccggaggtcgcagtgttaacgaggtgcccgccctagggtcgcagtggtcgcggggtttctgccaccagtcacaaaccccggcctcgaaggtcccactccgtccctttccttcctttgtgttcctggcctttttacttcccttgcttttcctcttgggcattagagtgggttcagcccaagcagaggaatttatatttttattccagccgtattaagctctgcatcgcggcacattgagcttctgcctgtgtggcctaaggtttattcaacgtattatctcaggagactattcctgttttatcgctgtgcattcaattccatttgaactttgaagacagtatgtcaactgtggatgatctgtgatgtgtataaaaaaaattcacgcgctttatgtacgagatacctaccgtttctgctagttggattgctcttgttttccctcttgttaaccagaagtgactgaggcaggtctcaaccgataaaggtttaattagctaaggttgagg

SEQ ID NO: 65488 - DNA, 2171 bp, Homo sapiens
gaacaaggcaatactaggtatctcacctatcccattaccagtccaatttctctctccacttaaaggaggcttccaggtctagcctacaggaaagttcacttattaaccctcaggcagagtactacctgctaaccaggttaacacacatttccttcgtagcactgtaattcacagtgcaatgacagcaatacgcttctataactacagcttcagactgtgctcctcagccttactcagaataggctatcaacactgactcgttaggatattcaagggggtatatgtatgtgtgtggggggggaattcccgacaccgatttcaccatgcttctgtggtcactgcaggaaaaaggtagagctctctgttctctatcatcgctctctttggaatattattctcacttcaagcattctgcctgagcgaagccgtcacttctccaacacatggtcacaattctgaagctgccaggcgactgaacgcagtcggcagcacccaccactaccggagactcagccccaatccgaagcttctcccttagtcagggattggggcgctgggttcctggtgtcaccgccgggcggcgaccccaccacaatctccccaaagcgccgaagcatgtcagcccgaagatcttggctgtcgcctttccccgagcctgcggtgcccgacaggagcccgagttcacgccgccgcgcgccagagcaagaggacgcgccgcagcgagggaagcgggggccggactggggcccggcgccctgatagggaaggggcgtgatcgcaggctgctcgcggcgagggcgagaccgggcgtgggctgccaagaggcgacgccgtggagcccggggaggggacgtgggggtgaagacaggggcagcccagcggctcgagggcaggcagaaacggccgcggctactcactgagccaggactccaggctttccccttccgcctccgccatattgcagccgcccggccccgcggcttcaaaactcgcgagagtctgcacgagctgagacggggcggggcctgcatggggtcctgagaggagtgagtgccgtcaccgagggccgcgccagactgcgacggatacagggagggcaagggtttccttttggcgctcccctttggaccccggagtgaaaaactctaacgtccagatcagtggagagaaacgcagatttaggaccctgaggagtctttttcacccgtttcccgtcactcgctcaggcgcgccgagggcagtccttgtggggtcctcgtggccagccaagatggctgcccccgcagtgaaggttgcccgaggatggtcgggcctggcgttgggcgtgcggcgggctgtcttgcagcttccagggtgagagggtggcgagcagcggcgggggggcgctgcgaggaaggaagggggccacaggcaggccgcgtgggcccctagagagagcattgccctgggggccggagtatctggattcaagcttctaagttagctgcgtgaccctgcgccaatccgaaggtttagtgactacctctcgcctaaggagtctggctgatctagggttctaacgcggagctgaaagtgcggttcagctaaagagctcagatctgggatcgcctgtgaattgggatgggtgtgtaggcgccaagcccatccttaccgttagcacttgaccaggaggagactttacccgcctgcttggggaatgtcctcctacttgggacaagggcctgaattgttgtggctcaggtttagctcgcggtctccgcgccgctccccctcgtcggcgcgttggcagtcatgcctattgttaagtcaaacctactcgcttgtggagtcagcttttgcctgcctcctcctttccccccctcccaggctaactcaggtgagatggagccgctatagtcctgaattcaaggatcccttgattgacaaggaatattatcgcaagccagtggaggagctaactgaggaggagaaatatgttcgggagctcaagaagactcagctcatcaaagctgctccagcagggaaaacaagttctgtgtttgaagacccagtcatcaggttagatggaaacaaacacttgttacatggactgggactatcccagggagggtttctggtgaggattctgtgatacagccttggagagctaaacgtgttgcttttctctttga

SEQ ID NO: 65489 - DNA, 2149 bp, Homo sapiens
ctcctggactcaagcaatctgcccaccttggctttccaaagtgctggaactacagacatgagccactgcgcctagccctatggttaaacttttaaaacagtctttacagtctgagaggtgactgtgattcatactccaaaataatggcctcaatgtagcttgtcttccagttcaagaattacgttgccgactcctatcgtcagagaatgaggggaggggtggaggcattcaccaggctcagcctctggtgctgcccacaggggcccttctctgtagctcctgaccccagctcaggaggggtcccgtgctcacctttgagtgctgtcttcagcagctgctgggtctctgcatcaaaggactggattttatactcctctctactgggctcccccatgactagccagccccggtagctcttgactgggctgggaataaggacagcacctgaggagaagaggcgaagggagcggcctcaggtgtggagcgcagggcgggttccgtcctgcaggccctggacggggctgacggcgcgctcgggacagggactcctgggcggtccgtggcgtgcggtggttggctgaaggcccaccaggcttggcttctggtggggactgggcatcagccaggcacctgctgctcagtttagaaatccctcgcttgtgggattacacaagagcgagaagctgaagcaggaaagcgcccaccctccagtcccagcaggaggcaggagtagactggggcagggtgtgtgcgggcggacgttacagttgcttaaataaaccggcctgacgttgctggcccaggaagatgccgggtgagggccaggctgggaactccaagcggtgcgactctgtccccagcaggtctccgagcccctctccccaaccctctctttctggctttcgccgagtccttcggtctcaacacccgccgctgcatcccccggatggggccggcctgcgtgggtggggacgcaggcgccctgtccgccgcccctgccgggagcagcctgaactccccagacccgtgccagcttctccctgggacaggctggtcggatcggctcccgagtggcagtaacccggccctacgcactcgagactcctaattcctgagctccattctggagccttcctcttactggggggcaggatgatgcgccccggagaggtggctcccgccggaggctcccctctggccgtaggaggcgcctttagggtctccagccctcggccgttccccccgcgcccggaacgcccctcccggaggcacagggcgggctgcggagcccacggcccagggtcccgcgggcgggagaggcggcgtgggagccgggacccacctgccgggccggtggcgcgcgcgcgtgcccggggccgctcggcgcctgggagcgcgcaaccagcgtccggcgctgcggggcccgccgtgagctcatctcctcgcgcggcgccggggaagggtcggctcgcccgcgccacctgccgggcccccggggcactgccctggcctccaggccgccccggaagccgcgccgcctgcgtgggaccctgcgacgctgccacccagccgcaagcggaactcgcttggctcgtcaccccttcacccggtgcgcctgggccgtgtccgggcccacgccggacccgccggcacctcgatcttgcgcgtggccccgcacccagccctccccggagctcaggtgcactgggccgggagacaccgctgggctgcgcggcgtgggaagagcctgcagagcgcgtggtggggacctggtggcaggaggaacagcatcagccctggtcgcaccactttccccgctcccccaacccaggtagagaaggcaggggctgcagggccggggccagccacaaccctctcccgctccaaggaggacatgggcgaagcgagtttcaggtcataggggcagccccgagaaaggggccccattggcaactcgcggccgtcggttgttgcgaatgcccctgaagtggcgcggaccccaccgcccggcgtctgccctgggtgacaggagggcacctagaagtgggggaagaactgccgccgctcctgccgcgcgaccgggaggagcgctgccggcgctgcccgcgttctcgcctccttttaaaagaaccgccaaagtggtcaccga

SEQ ID NO: 65490 - DNA, 1792 bp, Homo sapiens
gtgggggaggaggggagatactacctacaggatggcagcctccaccccagacatcaattccttttctcctctcacccaccctggaactcctccccaggcgcccatgaggaagtttaaacacgcggcaagcgactgagaggcaaaacctctccaggggttacccagggaccgctcaggtcacactgagcagcgtgtttcccgcccatctgggcagaaaggaggagcaagcccgagtggcaggtgtcctggatcgctgtcaggagaccggagcataccaggctcttcctggtgttcgggtgcccatgtgcccaagggctcagctgagcaaatctgcagaggtccccgtgtgggtacctaggtgtccacgtgtgcctcggggtgtgttttttctccttgagtccgaggggacgccctggagctcaggtgctcaagggcgtgcgcggggctcggccgccggtgtccctggagatgcttctctggtctggtgtgacacgtgtgtacacagtccccgccctctcgtgagcgcccgggtgcgtgtgctccctcccgaccaccctgaggagcgagggtgctggtccccgagagggcggcgagaaggacggaggtagaggttactcacacggctcggcgggtgcggcccggctcagcgctctccgctctctctagctcctcgcgcagtcttaacagcaaaactctactgagctcggacgaaactggcgggctcctgggccaatcaccgtgcagctccccgccagacgctggaccaatggttgtgcgcttgaggtctggcaaccgcctcccgcaagatatcaccgggtaatgtagtccttcgcgaccaagggcaggacagctggacggcgcacagcttcctgggagatgtagtccggctgctcgcgggcgcgcgagttcgaccgacgcgttagaaggaggtgccttgcgaagccgggctgcgaccttaggggtcgccgtgctctggcgtgtgactcgaaagtcagcctgcaggcggggtccaaggttagggcgcggtagacttgacccgctttcctcaaactctgttaatgccagaacccggataatctcaacttggtaaagatggcaggaagcctagcaaaaagctggaggacgtcgggaagagaatagatgagaacagtcccctcggggacggggaaggcaaaaacacgagtgtccccccctctcaccccgagttttagtatttctcattataaaagtaatattaaaagtatatagacagaaaatatagaaaggaaggaggaaatgactcatcctaccgcccgcacacaactagcgtcacggttttgcgcgacagtattgcctcctgactttttaattgcatttttatattcgtgttatcattttgacgcacaattttaagacatttttattgtagaaaatttcaagatacacagaagtggaataacccgatgaagccgcgtagagtcgctctccgacctcagcagttacgcgactcatggggcaatcttgtttcctctatttctgcacctacctcgcacgcgctgcccagcgttattctgaagtaaataccatcacgtgttttcaccagtaaatatttcagtatgtgtctttaaaggacaagcattccctttttaatacgtatacattatgcttcacacacacacaaaactgtcactccgaccccccaaaaaaacttttaatatcaaatatgaattagtgtttacacttttctgaaagaaagaaatgttcttctttttttttttttttttttttttttttttttttttttttttttgag

SEQ ID NO: 65491 - DNA, 1349 bp, Homo sapiens
gtatgagatcttgaatgccaagatcctaatcagcacctgtcacgatgtacttaatcgttgcagttgcaaaacacccgtgtacataatcacgttggatcctcagagcaacctagggacattttccttggtttgatttttaaacagatgaaggaatgggggtgagaggttaagggccctggtcgtggccaggcgccatggctcacgccagtaatcccagcaatttgggaggctgaggtgggtggatcacttgaggccaagagttcaagatcagcctgggcaacacagcgaaaccccgtttctattaaaaatacaaacaaccagccagacatggtggaacgtgcctgtaatcctaactcgggaagctgaggtgggagaatcgcttgaacccgggaggcggaggttgcagtgagctgggattgcatcactgcactccagcttgggcgatagagtcttgctctgtttcaaaaaaaaaaaaaaaaaaaaaaaggaagaaaaaaggagaaaaagggggccctggtcacacagcgaggaataaaggccctggcctcaggcctgcgatctcatgctctttgtcctacatcacactgctcctgaggggcaggagcctggactttgccctctttggacaggctggggaaagaggcagggtggagagacaggaggaggttttgtggcagtggggagagggggacgaagggccgggaccaggatggtaccagggagcatttccctgcagccctgtccctggagccctgtggcgtccctggtgctgtggactcttggctcacctcctgccgctctggcctctctcctgtgtgcttcctgccttcccctcgcccagccctcagggctgtgcttccttatggggactggagtatgtgaggcctcacccgtggccatggtttcagggccacctccacactgacaacacctggatctcgatctcctgtcagatctgtctcctgagctccaggtgaacacaccctgctgctttctagatgattgtcctcaggcacctcaaatccaaccctccagcctttctctctgcttcaccccaccctgcccctcttcccctagttccccatctcaacaaacaaaagccacagatccccccactgccctgcagccatctggacctgcctttccctccaccccaggtcttcccagctcctcctaaatacagctcaacgcccttggccctctgccactcccttcactgggacaacatcagcagtttctttattttttttagacggagtctcactctgttgcccaggctggagtgcaatggtgtgatcttggctcactgcaacctccgcctcccgggttcaagtgattctcctgcctca

SEQ ID NO: 65492 - DNA, 1282 bp, Homo sapiens
tgttaaaagtgtacaatgaaaaacacagcttctttgtgtgtaatcagggcgaaagaaggtgggtgagcacagggagagcgatctcagcattgtgctcggcatcagcacttaccttgaggatgtccccccttttgaagctcagctcgtcgtctgcagtagctttgaagtcatatttggcgatggcttccattctgagcgctgctcagtgctcagcagcctgaagcagggggaagggagtcttccctgctgaagcaacccagcgctctgggcttagcctcgcctctcttctgggactcgctccggcactctgggacacacaatgccaccctgaagcaggagagggacgattaagagcagtggccaggattgaaggcaaccccgccctgccaatcggcctgctgtcccagcccccacgccccctggctcggcctggctcagccctcctccctcccttccaggcaacagcccccccccgccgacttcttcctcttttcagcctcggcccccaggcgactgacaggcctgccggccaatggcacagctgcctgagctattcctgaacacacttcctcttccttcccgctgggtgtgcactgcgtgcaggaaccggctggagtcccactcagtctccgcctttcctcctttactcctcacaggctcttctccagcaccaaatacggtccactgaaaggaaggcctcaccctggggatggcacctgtctcttctcggttaaacaggcctgtctccctcccttccccaccgccatcctttctggtcttctgagaatgctggcttccctactgcacagtcaagagcaagcaaagcaaaactctttggtctcgagctgctgcactcttctcgaaactaaaccatgatctgctcccaggagagcaggagaaagtaaatgtaggaactgctttttcaatccatttactgctacaagcaccggcggctttccccctgcacttccatgttgtgatcggcaagctcaggtaaccagagaaagatcacagctccaagctgtgtaccagtggaaatggtggggatgacgctcttgcataaggctccctttccccggcagatccccaagactctggggtccccaccaggaatgaaataaatgaccaaggctcagcactccagaaatagctccacattatttctaactaacctaaggagcagagctgaagtcctaatctacacttgaaaggaatccctttttcagaatctgagctgccaagtatcttgtttgggaaagaaagtgcagggagatggtgcccg

SEQ ID NO: 65493 - DNA, 2430 bp, Homo sapiens
gcaaaaagagcaaaactctgcctaaaaaaaaaaagtcactgagctgacccaatcttcctattataaagacatactagaagaaaacataagcaggcacagaagcataatcttaaaagaaaaagagtaaaagacaaaaataatacaagcaaaccacacttgcgacctagtggcaggactgatttcttagggatgaattcaatcttttgagcctccccgttctcagagaggggacttcagcctcccacggctctctagcaacccttctggctgactgcagggaacgcaggggacgcgcaaaagtaaaggaacgaaagcaaggaaagagagtctcttcccgaggaaaaagacggaatcttgaaatgagagaaaacgaacagcacgaaagggaagaaacctcgaaaaattacgccagagtggggactacaaggaggaaggggaagtacattagaaaaaaaggggggggtggggggaggaaggggcaaatgacttgcattacacaagcatttcgtgtccctagtggaaaggacagaagcagatagagaaggaaggaaataactggagaaagaggagtaagaaagccaaaatagactaatgctaatttctctcatgtgtctgacatttcggaaagtcaacagcatcaaaaagagacagacctcaagtgcacttcagtcccctgcaaactgcactttcacagcgtttgaagccagccttgaaaaactttctaaacaagccataactcatgtgtggcttacaatcatagagagggcgcgctgcaaatgaaaattaccagcgcccgctctcgccgcaatccttcctcggtgcagtccaacctgctactgctgaatttttcttgacaaatatttttcaaatagtttttttttttaagtgtcagaataaaggtatctcccccggctccagcagcaaacgttccaccccaaagtggattcccgcacaaaattaagcccaaagacgccaggagatggtgacgtggttgccgtgcaggtcgaaggcacatcaatcaccacagctgcagcccacaccagtcccccgccgccaggctcgggtagactgactcggtcggcgttcggcccgcctgggcttcccgggccccttccgtgcaaaccctcccgatgaaggcaggggacctcgccagagaaccccgacctcttcccccggactgcccagagccaagagccggaggaggacggtccccaggaaggaagcgccccaaaaggggaaacgtagagtccggagccccggggattgcgctccacgtcccaagcctcgccgccccgacgcgaaccccggggccggtcccggttcccccggggcccactcccgctgtagagccaagaggaaaaggcacgagagaggcgccgagcgcagcctcccgtactcaccgtggcgcagctgctccgctcagcgtccggcccgcccctccacaacgctgcgagcggccggcgaccccaaggctgctctgcgagggcagcgcttgctcccgccgccgtcaccgccacaggcacagactctgccacagccgccgccgccgctgccgccgcccggtcgccgaagcagcaatacctcctggcttccgctccccgtcggtgtcccgcgagaacttctccacgaggccccgccccgcccccgcgagacttcccccggcggaaaaggcccagagcgcaagcgctcctcctcagccgggcccctgcgggtagggaaccagctaggtgtcagggcgcatgcgccagacctccccgcagcaggtggcctccgcacggctccgcccccgggtcgccgtaaccctctcggtgccagagcgggtaaatgacagcttagccctgaaggactcttcccccgtctaatcactttattttcctcttctaccaaacctaggcagttggatgggtaggggcttgggggaggaagagatcttccagaatgaagcactccaaatagaggaccaggtcttaaaatatttgagaatccggtccgtacaaactctgctgtgttgaatgattggtgagtttgtttgctcattgattgaatcactgcagagtttgtacggaccggattctccaatataggccgaacactgtgctggggatagaacagaaatcttggcccttaaggaattcacggtctaggaagtagaagaaaaataaacaaataatgccataagtactgttataattatttggagtttgctgaggaagctaaaaaaatggagggggtactgctacactgcccattgcagaagagccttcacagatgtgatgcggcgatgtctgatctgagtcttggaggatgagtaggaatttgccaggcagagaagccagagtaagggcatttcagggaaagggaatggcacgtaagtacagaggctaagtacagaggaacggaggcgtgagagagaaagtcgtgttctgtgca

SEQ ID NO: 65494 - DNA, 646 bp, Homo sapiens
gtaactcggtggtttcacattttacatgaaagcatacttcacggttttaattagcaagtggaataacttctacttgctcatgttgtcagccctacgtgttgccatcaaccacagggtaattagtgagggaaaggatcaagcggcttctgttgtgacaaagagtgcagcatttgtaggtgatccttacctaggctggaaaatcgggtacttcccttggttgccattagatgtcactcgagacaggcaggcatttcctcagaggtggttgtagaactaactaactgtaaaggaatgcagtcctttggctccaaaaatggattcgaccttgctgcccggactcgccgcactagaagtgccaggaaacgttgtttgatggagcgtggaggaaatatcctgttgcaccatatgtaatggaaaccctatttccctggaaccaaaacagaattcacgacccaacaagactgctctctccctcccccgccaacccctaaatctttgttaaccacaagtttcttttctttcttttttttttgagaccgagtctcgctctgtcacccaggctggagtgcagtggcgcgatcttggctcaccgtaagctccgcctcctgggttcaagccattctcctgcctcagcctcccgagtagc

SEQ ID NO: 65495 - DNA, 2192 bp, Homo sapiens
ccctccagcctaggcgacaagagcgaaactccgtctcaaaaaaaaaaagaaaaaaagaacctttaaagcaaagcgtagggaaccaaccatgtgacgaaggagcagaggtggaaaggtctctgtcacgtttaaagaatggtggttaatctatgtggctgcaggaatagtttagcctgtggggacttagacctggaaacgtatgtctgagtcaatttatgaaggactttgaacatcaggcagaaagatttggacctatttgcaaaggtgaactatcagtttttgtgtgcaggttagtgacatgattcttatggcgttttaggcaacagctaaactgggtcatacaagattaggtactaaaatgccatcttcttgtccagctgagaaagggattttaattacgtaattaaactcatgaatgtgggaaggggctcttacttcacaaggccaacctcagctctttcccaattatataaacaagtttttgtttgtttttttgtttttgttttttttaaacaagccttccagacttagatctctgggaaaagagaagtaaatactgacacaggcttgctttgttttcccaagagaggtctcccaggcgatttatctaattacctagaaaaaaaatttaacttgtttttccctttagatttcagccgagctggaagcgggaggggggaattgcagtattgccttagattttctagatttggtttggacgcaatattcgtcctgagggagtccctccaaggcctctcggagcgggcagcctctaggcatttgttcaaggcaacaaggagggagcttagaagaacttaagagaggcggggagctctgcaaagggcttattttaaaaagaaagggaaaaaaggtggggcgcgccgtctatctttttagaataattctgtaggaaaacgaatcggaggtaaagccatgccctctggtcagggtttctggactagaaactgcctgagctttacgcacaggaaaggacagtggctcttcactctcccggccgcatcactcggcacctaattccgccaggctcccagaggggcggttgcagctacagcctagcacgccgcgtagccaataagaagccagaattccccctattctcaaatcctgaccaatcggtggcctgaactttagctctctggccggcgcctctgttgcccggaagggaggcaagcccccttagagttgccagtaacggacatggctgcggcccccggaggaggggacgtgaagtgaggagggggttgggaggggagaggacgcgggcgaggaagaccagccccggggccccggtaagtacgagaaggcccgtggcccgaaagtggggagcaagggggcgtggggctcggccttgcgcgtcctttggattcttggccaaggaaaggggagtctggggtctgcacccagagaacggcttaaggggatgcctcctgagggggagtccagggactggctctagtctccagctcttgaccattgccttcccccgagtcttcagactcttgctctcagccctggattggtccattgtggggtctctcgccagaaataaagcctctcgccaacaaagaatccctgccccaggtctgtcgtgcctaggccctggcccagagggctcccaacgccgacgccctgagtatttatttcgaggcccctgggagtcctcatccccgacctaaataaagaccgttgtcccgcctgcgcgcgctctccgcagccgcccggggtcctcgcgcggccgtccccagctggatggagccggccgaggggctcctggcagccatccctgatcttgcagtttggagcgggcttttttttctttccgcctttccagaagcgttttcaggctcctcggaagctcaccatccatgccatcggataaagtgactcctgtggaatgccctcgttcctgtaccgcacacccctggagcccaggtctcctggttcctagcatgccacgatgcggcccctgcccgctgcccagcgccagatgcaagcaaagccccgctctttcattggtgtgtcaccgcgggctaaactttggcgttgccttggtcacgtgctgctacatcccaccctctctcctgagtttttcggtggctcttgagggaaaaaaggagggagctcgttatggaatctgttttccttctgctatgtgggtgtatgcattggag

SEQ ID NO: 65496 - DNA, 2306 bp, Homo sapiens
aaggcttcgctttaatggctggatgccctagtcctaggactctttgtgaacggagagcatgaagtgcttctggccccccatttctgggggctctgcctgctagagagggaagctgcacagcacctgttgctgacccgccctcgccccttgtgtcgggtggaggagcagctgggcagagaacagagagagctggggcactgctgacaaacggggctcccaagccccccaagcctgaacctgaagcccagaccctggactccaccgcagagaagcttacgtcagtttctcggtggcagcgaatttactgccagagtcttgtggcatgagatccgcgcaggcctggggccctggccgggaacccctcactccccaaacgtcccaagcccaacccaggggcactcccacgcggagcccgcggccgacacgggcggagggcgcccttggcagtgcctggggtcgggctggctcccccgccccccggaatgtccctccagcgcctcgcaaccccccagcccagcccagcccagcccaggcccaccggggaacaaagcggcgggagaagccgggcgggccaagcgcccgaggtataaacgcggaggatggaaaaaggggcgcgaggaggacggaaggagcggggagatggaggtgcccgccgaccccgcaagaaaagttagtttgcgcccgcccccaggggcgctgacccccagcgcgggccccgcagcctcacctctcccggccgcccgccggggtccggctggccctgctcggtccctggcactcaggacggtggctcccactcccccctgcccccctttctccttctccttttccaaggccggctcggcgcctcccgcaggaaatcccgcccctcccccctccctcccgccggatcgggaacggagggaccgtcccggccgcgcagtcaggctgtcagtcagcaccggcggctccgcccccatccgcgccagatcccgccccaactcgtgcccgcccggaccgggggcgctgaccggatcagcgcatgcgcccaggtgaaacggaggggcggggggcgcgggggcagaggtgacctggggctctggacttagacccaagggctagacaccccgggtctgactggtgggagagaagacgtaatgtgaagggggttggcaaccaagacgcgggaccccacttgcagtaccccccgtctgcggccggcgtcgcccacccgcagccgccggccgggcaatggcaccacctagcggacggcaccagtgcggggaccccagcctcgaggaggcgctcgtgccgggcggaggtggcgcttcagcaccgtcgtgggccggacagcgcctcccgcccccggccctcgaaacctggcttcggagcccagccgtagggaccggacggaagacaccgaaggaatggcgaacctccccggaccgctcctgacagttcccgggtggccttcggcctgcaaagtcggaatttgcacaccctccgctcgtccttccctgagcccttctgccctccttgcccagcccgggcggtggggactaagcagcgcgaggctgcagaggggcggtcacaagtgtgaccattcgcactgcactccagacgccggctcctcaggctttactggagagaagccccgaggagggctaggggcaaaagaggggccttctgcatctccagcaacctgcgggctgagctcccagacccggcgtcggggtgcgcttccgggcgggcgctaggaccggggacaatcaggagggcgcagagcgggctggggcggtgcagggggcggggctgccgcggcattgcggatcggcgggcactagggcagcgcggagctccggcggtgggcggggcgtggcggcgcgcgcagcggcaggcggcggcgggatggagcccgagcccgagcccgcggccgtggaggttcccgcggggcgcgtgctcaggtgcggcgcggcccggccggagtgggtgtcgggggcgcggggccagcgcgggtagggaaaccggcgcccgggacccggccaggcggcccccgatgcgcggcgctgaccccgcgtccccttctcccccagcgcccgggagctcttcgccgcccgctcgcggtcgcagaagctgccccagcgctcgcatggccccaaggactttctgcccgacggctcggcagctcaggccgagcggctgcgccggtgccgggaagagctctggcagctgctggcagagcagcgcgtggagcgcctgtgagaggggcgggcccaggggtaagggaagcgggggcgaggcgggccgcggggtctccggaatggact

SEQ ID NO: 65497 - DNA, 1072 bp, Homo sapiens
ggcgcggcgcgccgttctgcgtccaggtgcgcgcaggtgaggccggggcgggcctgcggaaccccgaggccgttcgcgaggccccgccccgcgcttcccggggccgcggattggcaggagcgcagcccccacccccgagggtgcccccgcccctgcggcgccgagctggggggcgggccgggggcggggcgctgggccccggcaggctcgccctttatgtaaatagcgcggctccgccccaggctcgccgcgccggaggtgagcaggaaggagacggccgcccagcagcccgtgggcaggcgcggcggagcgagcggggccggcggcgggcgccgagggacgccgaggcctcgggcgggggctggcccggggttccaggtgagatgcgtgccggactcgcccagccgggcccgccccctcggggcttccacctggggcggggaggccagggaggcccaggacccctgggctgtcgggccagggcgggagggctgcgcccaggtccgcgcgcctcgcccctgtccgcgtcgctgtgctggcctggaagagagacacctgtagaaagttctgcgggaaacttctctgcctgatctgcgcgatgactgaaacttgggcttgggtttgcacaataatgttggcttaggagagcaggagaacaggtgccccggccggctgggtgcggggggcaccgcgggcagagacggagtccccgggcccacgtgcaggcgccaggccagcggggttggcgacgcgcgtctgcggtgaccccctccccacgggcggcggccggagcgcggtgccccggcggcttagcccctgcccctgccatctgggctgtgtccctgccggccctttgtgcctcctaatccccggacgcaggaagcccgcgggagggacttcggtctccggcctttctccagctggggcggctttggacaccttcacatgacagtgcggagacccagtctgccctccatgctgacgggcggggtttgcgctgtgggatttggcgagaagtggaaaattctatcttgccaaagaaagtgtgtcttagtttgttccggctggacga

SEQ ID NO: 65498 - DNA, 1172 bp, Homo sapiens
ctaaaaatattttaaaagttatcagggcgtggtggcacatgcctgtaatcccagctacttgggaggctgagatgggagaatcgtttgaacctgggaggcagaggttgcagtgagccaagattgtgccactgcactccagcctgggcaacagagtgagactctgtctcaaaaactttttttttttttttttttttttttgtggagacagggtcttgtgatcttgcccagcctggtcttgaactcctgggctcaagcaactctctcgccttggcctctcaaaatgctagggttacaggcatgagtcactgcactcccagcctgcagttttgttttttaacctatctcgataagaatcagaggtggactggccccagggccctatccacaagcagagatggggtggccttgggccaggagagcagggctcggcagctgtcttccaaattccacccccactcccacaggcggcagagagtggagagggctctgcctggcagggacagtccttccccggcctgaggctggatgttgtccagttgggtcatcttttatccagagcactggttctggccgactgggggctcccagtgttttcagagatgaaaaaccggatcaggttgggcaccccgccagtctgatctgtgctcccctcagggcagggcccaagggagttgagagatgagggaccacctccaatagcttggctgccacctccagcggagcctgacctccctcttcccctctgcccggtgtgggggaggggtatggagcactcgagttccaggctgggctggtgtacacagggggccagggccttgctgcgggctcagccttccctcggctggttaatcattgccaggccacagccagactctagttaccaatccctggtgccaagactaatgggccaaggctgttggtgataggccccctggggtgccgtgtgttttttcacaggtgctaccaagcgacagccaacatgtcttttgcagctcaggatcagggtggcagcctgacagttgccagggtagggcttcgcctttctatggagttgctcccaccggcctgactgggaaaaatctcccagggatcaggtcactggcctggtgccccagggccagggctgctgtgtctcctccccaccctaggctccatgcatgggtcctgctgcc

SEQ ID NO: 65499 - DNA, 609 bp, Homo sapiens
ggaggctgagcagggagaattgcttgaaccccggaggtggaggttgtggtgagccgaggtcacaccactgcactccagcctgggcaacagagcgagactcccatctcaaaaaaaaaaaattaaatattgaatattaaagtccccttcaactctcactcttgattcaaattctaatgtcagtgaggtcagtgctagcagtagatgtgccagatatagataatgtggagagcttgggtttagtgtggcttgggtccaggctgggtccacttcccacatccttgctgttggctgttggtcctgtgcctgctgccttgtggtttttttgttggctgcaacacctccagccctcacggcagcattccaggcctggagacggggcaggggtcaaggctccagggccaggccaactcacacagagttttgttttatggggctaaaaaacttctttattattaaacactcccttttgcaaaaatgcactgaatatgaatgtacagtttaacagattcttgtagagcatccttgcagccttcctgccgggcatagaaatagaactttgatgccctccggaggtcttatgcacccttcctagtcaaggctccctcttgc

SEQ ID NO: 65500 - DNA, 1598 bp, Homo sapiens
ctcaatggggacacgtcgggtggggacggaggcagctcctgtccggacagcgaaacccgcgaggcccaggagagcggcagccagcgcggcacagcccgggagctgcggcccacgccggagcctacggacatgggctcggaagggacaaaaaccgggccggagtcagcgctggagccaagcagcgacggcctggacagcgactggccccacgcagatacccggggccgggaagggtcgtcggggacggggcccctgggagccagcgagcattccggcggggactccgactcgagtccgctggggaccggacctggacggggctctcgggcagctatggcctccaggaccttcgaggacagctcgcgggctcctcgggacactgggccggccaaggacgcgagcgacaaccgggcgcagcggggcgccgagccagaaacaatgcaggcctcgacggcccgggctccgcgccaccaggtcggaaaggcggtggggcaggtgccagcggcggcaggcgagggcgaagcgggagccgcagcaggagcggggccggaggacccagccccgctggcggccctcctggtggtccgcaggctcctcgcgaggcccccgccaggcgccgcttcccaggccgtgggcccccgccgcgctggcctcaaggagcggctcctgagtgtagcgcgagccctgggcctcctgcgctggctgcggcggcggctgcggctgcggcggcggccgccagagggcgaggggcagggtaccgggccacgggcgagcgaggggtggggccgccggaaaccggacgaggggcggggtcatgggagaggaagcaaggggcggggccgcgggaaagcggatgaagggcggggccacgagcgaggggacgagggtcggggccgcgggaaagcggacgaagggcggggccacgagcgagggtacgaggggcggggctgcgggaaagcggacgaggggcggggtcacgagagaggtgacgagggccgggaccaccagagagggtacgaggggtggggccgtgagcccgggctgcggcaccgtctagcgttgcgcctggctggcttagcagggctggggggtatgccgagggcttcccctggtggccgctccccgcaggtcccgacaagcccagtccccggcgacccttttgatcaggaggacgagactccagatcccaagttcgcggtcgtgttccccaggatccacagggcagggcgggcgtcgagcagccgcagctctgaagaagcgtccgcagatgcccccacgggggaaggccgaggttggcctcgtgcaggggtgggggggcacagtgaggggtgcaggacgagtggggaaggggtgtccgggcttcgtcgcggctccctccttgccccgactgcacccgacgggccttccctcgacgagagcggctccagcagtgaggcggagttggagaccctcaatgacgagcccccggtgcgctgggcgcagggctcaggcccccacgagggtcctaggcttggcgccgccgtgctgctaccccgactctccttggagacccgcctgcagcaggagggagacccgggcctccgtgggtccctgaggga

SEQ ID NO: 65501 - DNA, 1572 bp, Homo sapiens
ttcttttgaagtatcctattcttttcctgtcgtttctgtgaagcatccagggcttctctggtccaaagtcagtttttacatgaatgtcaggcttaagggattccagtgccaggcaggaagcataagtttggactcttcatttcgcccccgctctttcccggcctccaggaagcggtacctccggcggcgggcagctttgggacagctgaacaccatcctgctggtggcccagcccctgctccagaggcggcagagactgcaggtgcaggggcttgggtggggcggttcagggtagaagccaggctgcctgagctggccgagctggccaaatcccagcagcgttgaccctctcagcccggcctcgcacgggctgtggcttcagacacagtgctccttgaactcatcccttttccctccggccggggtaggccggggcccttgggaggtgctgtcttcctccatccctgcctactctccccagggcctggctcttccctcttgcctggggttcccatcccctccaggcctcccctgggccccgtccgctcccctcttttgcatgatgactcaaatctaaggtctataaagcgactcaaaggtcaatgcccacgtgctaccccctctctggcccctccctggctggactttgtcccctgggaccatttcttcccttcttcctgccctcttcccggtgccctggcagatgggcacagacgcccacagtgctaaggctggtgagggccctggagggccaggggtggctggcccctcctgatctgttctcactcctttgctgagaacctcccaggggcaggaggggacagctgaacttcagagctggggaggtgcccccaggtgactcacatgggaggcatcagctcttcccacatctcttccaacagcttgggcgttggcagggctggcatagcagcgaaagggccttggagagagtgccaagcatggtaggtggcctggaaagtggggggttttacatggggctatgaacctgctgagactgggacagcttagagggctgccagggtgctaccgtgggtcttgtccctcagggccatgcattgcacctcctgagaagaggaccggggtgctcttggctcttggtttccctcagagggtctttggggctctgtttgttcgagtgtccagggtcagaatccttggtctttggctgggtgtggtggcacacacctgtaatcccagcactttgaggtcgaggtgtgaggattgcttgagcccaggaatttgagaccagcctgggcaacatgacaagaccccatctctacaaaaacaataaaaattagctggacacagtagcacatgcctatagtctcagctactcaggaggtttgaggtgggaggatcgcttgagctagagcctcagaagtcaaggctgcagtgagccatgatggtaccactgcactctagcctgggtgacagagtgagaccctgcctcaaaaaaaaaaaaaaaaaaaaatccgtggtctttggaagggatgtttataatcttggggttgagggtgtggggagggacactggtccctaggcccctcctgt

SEQ ID NO: 65502 - DNA, 1593 bp, Homo sapiens
tgccatgaacaggtttgggaaccaacacttgactcttgataagcatctgacttaactgacggagctgcacgcaaagggtgagctagagactggcccactgctgtgagcgttcagcatgccaagggccttagtcagtaagtttcacacaaggaaacagaaaacatcaggtaacccgggtcagtgacgcccatgatagttaagaacgactgttctaaatctgcctccatctgtcatccaaccctggccacacctggggagaatcacctggggatgtgtaaacaatacgacatcctggcaaccccagagactgatataagtggtaccaggtggggcctgggcatttctcaaagctcctagatctttaccagctgggataagcacccgagggctagaagggaagcccttggagggcagggcccgcctctctgatctcacaactggacacacagtgcctggcatggttcctggccatagcgggccctcacatcctagcttttaaaggagtatatggtggccactaggtttcaagcaccagggcacaggcttgatcccctcttcccagcttccctattgtgccagtgggcagaaaccaaccacacaatgttgctgaggccgtgcccagggagcagacaaaggcaccaatgggaagcctcagggggggagcaacacttcccccagaaacagttccaggaggcaccaggcgccagccagggctgcagttaatcattcaccccacaacacaggaagtgagccctacgccagtcccagccccagggcttcctgagctcggggcaggtccgcagtccacacgtcacccagacagaggacagcccagcccagccacaggtgaggcggcctgatggcctggggcaaaggccctcggtccagtctcttccccgtccaccccaagtctgacttctctcaggagggactcatgaacacgtgccctgagcacccccaaaatgacatcacacaagggcagaaaggagctgaagggggaacgtgaaaggcagaaagggagccgtggttgccaggcaaccagccctagcccacctttgtttgtttggtgacagcaactaaggtctggtcagggccgcttggccacgctcatgccttttcctctcaacagttgcttctttgagtcagggtgcagctctggtcacctggcggcctcttcagctcagccctccacaaagtgtgagcctgaaggaccaccctgaattgcccttgtaggacccagaacagctaccagcagaatcaggtaatggctccctccttctccacctgggctgccctcacctggctatgggcttgcagtctgcgataaggagctccgcttctagaggactcctaagttctattctcagctgctccaaggaggctaccgaggcctcagctggagttggcccctcctcggctcctatacgctctctcaaatgcctcccaaatgtttggcagttggggcaggaaaaacagggagactctatcatgatgctttttagattctagccaagtaggtctcagggatgagagagagtccttgctcacacttgctactcaggaaagaaggactggagaatccaggggcatccc

SEQ ID NO: 65503 - DNA, 1876 bp, Homo sapiens
tgacaactctaaagatttccaaatccagttatggaccaaaggtgaggcagtacgaagggtgaggaggagggtgttctgccgcagcgttatggtatagccagcataaatttaaaggaaggtagcttggtaatgttaccttttactacagccatggtcgcactctcctgtaaaggcgtcttaaaagagtcaaacccaaagaccttcttcagcgtactccggactcgccgctcagggtcaaaaggaaaggtggtatggtggctgctcatcttagccaagaacagtggccaaaggttaaggcaaaggtagtaaaaggttgccacgagaaccctctgttttgcattaaaaatacagattatttttctgtaacaatttgctatattacacttaaataatgtattatttttaagtaataaagctgaaggtgaactgcctcaagcaatacattcctcagtaattaacatctccacttttacgctcaatgaaaatgaaaacattgaactattccaggccacggtatagcacagagctagaaatcagatcaagagaagaaacataaatgtcttcagaacagcttggagaacggggaaccgttttcctaagatccaccacctgctcctacttctataagcgcaaccacgacgaccgttcttccaccccgggaccccgaaccccttctcccgtcttcctgagcccaagatccgcaattttctctcttggctggccgacacctccctctcttcaccctaagatatcagaaccggccgtggtccgcccaagaattaaaggctgctggctggttccggaactgttcgaagacccctatacacaaccccaactcagagaagccaaagcgctgggaattcagctttaggcagaacccacgcaatcttatatccgtcgcgcagtgatgacgtagcgcgagcgctggcatgagggcggagccaggcgcaggaaactgccgttttgattggtttccagtgtggcgcgggggtctcctgggatccgaaagaacctgcctttccgcccggaagtcggcgtcttgagtcataggagtgagccacgcccgggctgtgggaataagatggcggggaagaagaatgttctgtcgtctctcgcagtttacgcggaagattcagagcccgagtctgatggcgaggctggaatcgaggcggtgggcagcgcggctggtaaggcccaagtgcgaagctggaagggggaatcgggtgtctgcccggaatgctgtaccctcgctgggcgggagggaacaagatggtcattgtgctccaagcaccggaccccgaagaatggtccagggtccggggtgagatagagcattagagactgtggactaagaatgaagaatctccttcccgttatttcgattaatttgcctaaacttactgaaagactccgtgccggctatagtgatagacagagggatggacgaagagggagcggctgctcagccactgcctgtttcccctgggctcgttgtttgatgagggagagcgataagtaaaacatacgtggaagatggtaaagattgtgttcgttaactttataacttttagttaggaatgtgccctaaacacatcttggagcttttaaaaacaaacgtatctgatgcccaaagtgagagaacctaattcggtagaactggggtaggatgtgggcatttgtgaactttttaaggatcccaggtgatttttcttattttgtgagtttttaaagcctaacggtgatgttctcctcctcaggttgagaagcacaatgttagataatggaaacagattcctttgggagaataaagaacaagttacctaacaacatatcaggaccttagcttcctcatctggaaagtgaaggggattggatt

SEQ ID NO: 65504 - DNA, 1735 bp, Homo sapiens
ctgcttctaacactacctgcgaagcgctcggtggcttgcggaacggtccctgggaggcgggcaggggcaagattcctctctccattgtacaaacgggaaactgagtctcggagaggttaagtaaagcaagggagacctcacagctggtgacagagcccagacttcccccaggtttctggcgggtccgggggtctctcctccccagctgtgccgaggctgcactcgctcatctggaaaggcttcagccgcgcaagggtttcacctgccgcggccttcccgctccggccgtgcgcatctacccccgcccccaacacacaccccgggatcccgggagctggagacgggctcccctcgcagagcctacggccttcccccgcctggccctgctcggcccggcgccccccggcggtgccaacgcggcccttcgttgttcccaaggctgcggctggaagttcgagcccctgctgggggaggagctggacctgcggcgcgtcacgtggcggctgcccccggagctcatcccgcgcctgtcggccagcagcgggcgctcctccgacgccgaggcgccccacgggcccccggacgacggcggcgcgggcgggaagggcggcagcctgccccgcagtgcgacacccgggccccccggaggtgacaggctcacccgccgccccccgatccgcgcccacccagcctcactcgcgcctgagggcctggggtgggcgtctgcgctgcctcgggggccccagtttcagccaggcccgggccttggcggctgggagcacagctgctcagaggcagggcccagtgccaggggacgcgtgaggcaggcgcttgggcccttatggtgcctgcctggccagggggtgcaaattcagaagtctgcccgggaagcggaccctggcacccaagtagacccctcaggggcctcaaaggacaggagggaaggcttggggatctccccagggcagagctgactgcagacgcagcaaacccccgccactgccagggtcagcagtgctcacaccgatagagtggccggccagaggatatgggctgtggaagcctgggtggcccttgggctcctgcagggacagagggcctctgtccctagtggtttgagggaaactggttgtatttaagcaaaagccacccagagggtgggtgaccaggaatgtgcagggcccagcctgccccacggggcccgggtctggggcaggcctgaccaagggaccctgctctccccctgcagagcacctggtgaatggccggatggactttgccttcccgggcagcaccaactccctgcacaggatgaccacgaccagtgctgctgcctatggcacccacctgagcccacacgtgccccaccgcgtgctaagcacatcctccaccctcacacgggactacaactcactgacccgctcagaacactcacactcgaccacactgcccagggactactccaccctcacctccgtctcctcccacggtgagtgacctcagccaaccctgcctctcccactaacccttcctctcttccagctcctggagcctcgggcttctgtctgctgtccccaccgcccattctccaacatacacacacgcatgcacacatgcacgcacacacgtgcacacgcatgcacacatgtacacagacatgcatgcgcacacgtacacacatgcatgcacactccctgctcctctcactcttgttttgtcctgccctaggcctccc

SEQ ID NO: 65505 - DNA, 1709 bp, Homo sapiens
ctcatcggcaccctcagaggtggtgaggagagacaccagcccatccttgcgggggctgcccaccagcaccgtcatgagctccagagcctggcaggagagacaagcagtacgtgaggcttccgccagctggagtaagcctctccaatgacactgcctccagccgaggttctgatgcctccacagtcatcaggttctgaacctccaggttcagcgtcgcagggaagatcctgagggccagctgaccttgggggcttgagccctgcccccttaggtcttcaggggcggggcggctgcagctggagcacagacctggactctgccctgagctgtggggcaagggggagagctagcccaaagggaaaacagatcactggagctccaaagcctttacattttggggtggctctggacatcctgtacctgtgcactccccaagctgcagatggggcggaaagcgccccccgctgaaagctgggagtcctcactcccaagtcgcagccccgccaagaacctgctgtgtgacctccagcagttcactgggcctctctaggcctcagtttcctcctctgtaaattgaacgggctgggccagaaggctacgttcgcccaggtctgcggttggggccccacggtggccggaggcgcggagtgtccccttctgcgtggcacacagggcctcacagtttaaggggaacatgctcccaggttgaaggcgaggagccccagcccccagagggcgggcttgagccaagaggcggccgcgcaccctctcccggccacttcctcgcttcctcccttccaacgtggggaacagcctgtcccggggactcttccgtgcaccggtgctccaggcgcagctgcccgccccacatctcccgcgggaagaactcgcccccagcgtccccgaggcccgccctcctcggcggccgggacaggcggcggcgggctaggggctccccgtgcagcccctcaccataggcagcaccaggccctggttgtagtccgtgtgttccccgatgaggttgacgcggcccggcgctgacacggccagctcgggctcggccccgaactcctcccggaaggctcgccgggcctcggccagcagctccgcgacctggggctgtctcaaagcagccatgacgcgcgcctgcagctctgcacagctgctccggcacagccccgtcggcgcgggatgctcgggcggggccccgcgcgggggtgcgcacattcccgccagccccgccccgcgcccggacgccccgcccccagacctcagccggttccgcccccacccgcaactcccgtgggaatccagctgctgggtggtgggtggcaggggctaatggtgccgggtgggatacagcgcccccgatggtgtccttccctctggacttcgggaagaaccaatgagcactcactagagtgagaatagccctgagtggcacttggcatgaccaggatttctgagctgcccttccctggcgctggtgactttctatgtgcctcaccacccaccaccacccacacagccagagcaatggagctggcacccggttgacctgggattcccaaagggatcccctaggtccccagggccagcagctgtgagaggtcatcagcctctgatcaccggtctccaagagggtgacctgacactcactgtaagtagagataaagacagacaagtttgggccgggcgcagtggctcac

SEQ ID NO: 65506 - DNA, 773 bp, Homo sapiens
tttggcacagccaacaccaaacaaatcataccatgagtggcccttgggctggttgaaatggaatgaaactcacaaaccatacctccctacaagggcccattctatcagggcagaggtgagcgaagcagccccttctctgcatgccttttactcacctcacctctgacacccaacagtgctgagccctcatctccactcttcctattatatgatctcaggtaaatgaagtgacctttctgggcctcagtttcttatgtgtaaaatggggctagagattgctcccagacatgctgttgtaaaaggaactgaatgagatcatcttcataaagtgcccagcccagcagctggcacttggtacgcacagaataaatgtttgctattcttatcagttgtccattaattcaacaggcattatggtactctcctatatgcaattggccagaaagataaatgcctcaggctctcacggtctgattgggaggcagacagtcacaaatctgaccccctctgtctgcgataaatgttgagtagagctttctgaataggagaagagagagcagggattctgaccagttagaagtccacacccttatctttatttccattgattcattttaattgacaacgtgacttttttttttttttttgagatggagtctcgctctgtcgccaggctggagtgtagtggcacaatctcagctcactgcaacctctgcctaccaggttcaagcaattctcctgcttcagcctcccaagtagctgggattacaggc

SEQ ID NO: 65507 - DNA, 877 bp, Homo sapiens
ggcatggtggtgtttgcctgtagtcccagcaactcaggaggctgaggcaggagaatcactggaacctgagaggcgggggttgcagtgagccaagatcgcgccactgtactccagcctggtgacagagcaagactccgtctcaaaataaataaatacaccacttcagcaggcacagactggcactgtcctgggccaactgtcactgaggtcacctcaatagggagcttccttattattgaatgcgcacgtcccagccccagatgaatcagaagtcagtgctttttggacattgccccaaactttttgaaagacattatcatttgaatgaaaaccattgagaaatgagaaaatcttaacttcaaaaattttattttagtctcatccatcaagggcataggatacctgcatcagctgcaacttctgcttttctcctttgcctctgctcctttacccttaccgagggatatcccatacaggaagccgcctacaaccaaaagctatcttcgccttctgggttgagtgctcaagccaagtgtggaaatgcaagtcactgcttcggcagattgcaagctgcccaatataatctaagagccttctatgccagcctgcagactggagaaggttcactagtgtcacccacttgggttgtcacaggtagtaagcagaagctaactcatcaccgtagccaggtttgtgtactttgtttccagacacgctacagcatagcacgttccaacatctgatcttaatctcattctgaagcacagtgaggaatcaagtgtgcttgttccagagctgattatgaactttctagaaaagcgggtcattatattgcatcctttcataggagctcattatcacgacctgaaagatacct

SEQ ID NO: 65508 - DNA, 1730 bp, Homo sapiens
ttcttacaaaaaaagtcacaaattaaaccaaagtattttacagaatttactacaaaacgccataaaaactgccttcacttaagctctctctccccgtatccggcgagccaactggatgtctttgggcatgatggtgactctcttagcgtggatggcacacaggttggtatcttcgaacagacccaccaggtacgcttcgctagcctcctgttgaggacgagagccgcactattaatcccactcggggagcggaaaccgcccagccctcccccggctccaggcctttgtcttacctgcagcgcaccgatggctgcgctctgaaacctcaggtcggttttgaaatcctgcgcgatctccctcaccaacctctggaagggcagcttccggatgagcagctcggtcgacttctgataacgacgaatctctcgaagcgccacggtcccgggcctgcagcgagcaggggaggagtgagcggacgctgccgcacaaagccggccaccgccgggccattgttcccccgcccgacctacctgtagcgatgaggcttcttcaccccgccggtagagggagcgcttttcctggcggctttcgtggccagctgtttgcggggggctttcccaccggtggacttacgagcagtctgcttggttcgggccattttctttcacctaagaaagacgccccgaagataaggccgccgcgctcacccgggccgccccccagggctgcggggggaggaacagatcctggccccaccgccgggcctcccgcctccccgcgccccacctcgcggcagcagatggccgagggccgccaacctcctccccctcccctaatgactcaggctgcgaggagcggcagcctcccccgggagggggagcgcggggaggagtcacttcccttcctcgacgggcggaggcccgactgcccggaacccggcgtcgggacctctgaatcaccgccgggaaaaggcggggacacagttccggaacaaagccccaaggggaaacctcccggccccatacccgacccgacgccagcggcccgagcagcccccgccgctcggctcccaacggccgcggcgcgcggcgccaacggttggcagaacctgaagccgcgggtaaacctacgaacgcctacccaacgccgaagttttaggccacttctccgaccgccgcgccgcttccgctgcccgaggaagagccgcagtcgacgagcgaaaaaccagcaccgcccaacgaacgaccaaaccgctctgcgctccaagcccccgcgtcgcctccgtttttataggcacgcttcacgctgcgtctctgcgtcatagaacccttatttgcatacaccaacgactttttctattggtgggcgctttcgccgacgcgctgacatcccccgacacaaaggccgtgcttcggcactgttccatgattggtgcatatctacgccgctgattggctgttaaagtggcctaatgattggatggatgcaaagaggaatggacgaatcagagtttagcactaagcggcccttctgattggataaaatggagctatgtttggatccttcccttggttccaaagctctgcaatagaaagtcaatgcaaatgaattgcattggtctctatcagaatgagcaggagtctaaactcacaggcatcaagcgaatgctatgcacccagagaggctactttaacaaaatttttgtaaatattttccgatgtaaaataaaa

SEQ ID NO: 65509 - DNA, 3734 bp, Homo sapiens
aaaaaaaaaaaaggctgtctctcttacttcgtagtcatgcaggtatgtttcactttttccagattggtacaacggaggaaaagcaacacaggaaatgaggaagaataaaaaatgtttatacaatgaaaaaaagcagaagaaaacaaaacaaacaaaacccaacagtgaatgtgatgtagtcttgtaggctactgtcctagttcctcttgttaccaacttgctgagtaactttgtgcaagttacttagcttctctgggtttcggtttcctcttttgtaaattaagcagtttggatgatatcatctcccaactccaccagtacacacttattctgaagctcatgatatacatctattatttaaaatccagtgctgtgaactctatttcttcagtcagatcacacttgagtattgtgaggctaacataaaccaagtaacttgcgtttaatcataggattaaagcaatatactacaacttttatttgtccttttgtaatttttcattttcaaacgcccctagtggctaaacgatttagcctgtttaggaaaaaccagtttctcaactctgtgatgtggcttctgatgtgagggaacttggagctaaataaaataagtatgtgtcactcaaacattaacgattttccattagccccaccacccttcatccctaaggttatttggaatgtgtttctttaatgagataatcatttgttaatataatcccatctaagaaaatataaatcaaaaccagtggatttgaaatagattcaatatgaaaaaccaaattaaatgacaacggttaaaatatctacggagaacattctaaaactcacagaaacaaatgcctaggtctggggcatctggcttattttataaagtgaagaactttgcttgactggtgggaagcagagaggggaaagataatgtcccaagtaaaaaggctgacgtccagacaagaaaactagagtggataaatacgggcacgccctactcaaacccaggcctttcctctggaccctgtgatgcttctcaacactggcaacttgtcagtgtacctcagagactattctaggcggagattaaattcgtccttggcccttaatgtactggaaacaagttggtcaggccaggtgtcaggctgagaaagcacacaagtcgtggagttccaggtgtcgagtttggcaaaggtaaatgaagcgcctcggcaaaggcgcgggaactgtagcgtgcggtgtacctcctccttagcaaagctttctcaatgcctcttaggttagacccgccgcagggatgaaggggttgctggcggattgcaggtgcctgcagcacagggcccagaactaagaaccgacaacacagattcttaagccctgcttggagcactgctctgagctggcattagaaccgaacctagctgtactaagtataaaggcaaagtagttatgacactgttggcagtgaaattatacttggaactctttcgcagaaatcgctagggcctccctagctctgggccccttctcctccaggcgctccagtttcatggaaaggcttccctatgaaactgaaaacgcgctggtaagaaggagaaatgcgaccggactgcaattcccagaagccgtcgcaggccctcagcatccgggacactagcagcaaggatccctgggtattgtggtcctgtgctttgccagcaaccctctgccgacggtaaaattccagccggacatagaaccacaactcccagcaacccctgctgccgtgtggggggtcttcacgttctcgtggcgcggcgcaggcgcactgggtcctcggcgcggaccgcgcagactgaataataaaaggggagcggcgaagaggcaggaagacaagaccatgtcgaagggccccgggcccggcggctccgcagcttcctcggcgcccccggccgctaccgctcaggtgctgcaggcacagcccgagaaaccgcagcactacacgtacgtagagcccccccccccccgccgcgcgcgcacgcctgacgtcagcggccagcgtgagtcacgcgcgcagggagagcgcgaggcggcctcttcctcccccccttcctcctccggcccggcccagaccggttccaacctgctggggccggtcccaactgcctccaactgccaccaacctctggtcgggctgtggggcgggaaactcggtcccggccgccgagtggggaaggcgggagctcgggatgcagagtgcactctccctaggccaggccttcgaggcctaactgttcctcagaccataaaaccacagtagtaggctcctttggggcagtgagaagtccaagacacaaccaagaggagttccgtggggtccagccccagaacccacctatgaatgatgattaacgtgaagtcctgtcaggagattccgtgcagtttgcgcaggaagccttttgtgtccctaaggctcgtaggttgtccacgagggccacacttgcttgaattcacagtcgacgtagataaacatgcaaagatggaaacgtgtccgtgcgtgcccatgaccgtttccctcgcgggctgtgcggagcctgagtctgggagcccgaaggtgatgggttccaagtatgtctgcaggctcagcagaaatgtagcattagagggagccccaaatactgacactacaggagtccagcaggatgggaaaacctcttcctggaagtcttgcatctgtgtgcttttaggtcgctgtcttcatttccttcaagccacgttaagcattccctagagttaggtgatgtgggagaaagatgaataaggggcggtttctcctgttaagcaaaatgttgctttccattttccctgatgctctgtgaatgcctctcatccccatgggctcctgagtgatgtgcatgtttaaaaggatccccagctgcgagaggttttggaacctggggggttgaacagctcttaagttgttcagtgaacgaagaacagaatcatctgttggagtagaaagaactcaaaccagtcaggaggaactcttgttatagaagaccttgggaaactgttctggggttggggaacattggttataggaagtgtatggtttctttgtgggattctttgttgttggctgaaatcatttaagcttcttgactacagtctgactcacgttaaccattccttttctgatatggacattgctttcctggtcctttcttactggagatctttcgcagtctttccattgattttggtgagatgttcttagctcaaagactactgatgagttgaatggtgtagtcttgattttcgaatctggaaacttcacgtaattggaacttctttataatctctggttgctcagatcactgtttttagcaaaataaacacattttgagtcacgagagtcttggcttcagcaacttgtgtttctgtgttgtgttgtcattgagcatactatggaatctgtaatagaaaggctttcttattttggaattgacaggtgaaacaagtgaacagctgattaaatgtcagtatctgagtctttgtcctcttgatgctcatttgtttaaaacctgtctttcctgccgggcgtggtagctctcacgcctgtaatcacagcattttgggaggccgaggcggatcgcatgaggtcaggagtgaagagaccagcctgcccaatatggcaaaaccccgtctctactaaaaatacaaaaaattagctgggtgtgctggcgggcgcctgtaatcccagc

SEQ ID NO: 65510 - DNA, 1215 bp, Homo sapiens
agcctggggctgccaccctctgtcaggggaagttttagggagggtggctgggagggacggaagggtgagggtttcaccgcttcggagaggcagtctcccaggccccctgcaccttccccagctgggatccctacaggaccctcctctggctggagcagaaggtggaccccgtgggcaggcctggccccgccccaccctcctacagaggccctgggaaggggacaacgctctcagcagggggcgggggggcccagaacaggcgggcagcatcctgccccatccatgtgctgtgcccaggctgggctgaaccctgagagaagctgacctgggcccgggggggttctcaccccacttcctcgagtgcgtccagacgtggggcggggcggggtggggtggggtgtggtggcgcccagggtgggggctcccaagaggcgtctccctggaggacagccagttgctcagcctgcctggccccacaggtgacattccttggagatgacggggccaagctgtgctgggcagggacagccctgtgcccctgcccccaccttggcagtcaggacagtgctcccttcagacacccttgaagggggcttagccaagtcccagagagctctgggccaggctggccaggaggaggaggcagaggggctgctgcccgatctctcctgaggacagacttggctcccgggggacaggaaaatgcgcctcagcatggggctttcctagagctctgtggcctgcccaccctgtgcccagtgctgggctgggggacttgcgggcgtgtgggcctggtcacggcctttggccatttcccaccctcctgtcccttcaagttcacagcagggcacgtgacgtgggtggtggcaagccggcttggctacctcagtgtccctgtcacaggtcctgacgtgctccagggctgactcggcctcctccctccagcaaccaggacttaggccagggctgccattcctcgaggagccagcaggggacaaggtggcagccccaactcctcccttcaaggccaactctgggccacatccacctctgtcccagccaggccctggggactcagtgggggagggacacagctgctgagcgacaaccgttaagaaccagctccagaggccagagctgtcttggggaccagacaggctggctgggccgtgagaatggggatcctcccatgggagggaaccgtcccagaagtct

SEQ ID NO: 65511 - DNA, 1734 bp, Homo sapiens
ctcggcctcccaaagtgctgggattacaggcatgagccaccgcacccggccccagccagggttttaaacccacgacttttatctgtgactgaaggtgccaagttgagcctccagagatggggttttgagactctcctgtctttgtgaagtcatggagattaaaacttgaaaatgtgctcctcttcttccagctgtctttgagtctaagtcttttttttttaggcagggtctcactctgttgcccaggctagaatccagtggcatgatcccagctcactgcagcctcaacctctccaggctccagttattctccaccttacctctcgggtagctgagactagaggcatgtgccaccacacccagctaatttttgtattttttgtagagatggggttttgccatgttgcccaggctggtctcgaactcctgagttcaagtggcctgcctaccttggcctcccagagtgctgggattacaggcatgagcctccgcaccagcctgtctttgagtctaaatcttgagtagccacaggcagcaatccttttccaagaacatccatttgtatttctcaacctctcagagtccacgtgggtaactctcaggcagggcccattctgcagcctggcatttgtcattctgcggggtggtaccgggctctctgcccagtccggaggccgtgccatgcaactgtaccctgtttactggatttctcactctggatacacacagggcttcatgggctactctcacagaaaacaaaatattaataataatagtctggcctccaggcccaagtcatgccagcggctgcatccaactctatagagattttgcagcagcggctctggaattgacatgggttcactgcccagtggtcaggtcagttacacaaagagcctggtgattctggaatccaggagcatgtgacagagaaacaggcagagtgaagcactaacactcaccaggattcagaggccacctgactcatgaggctgaggcagacctgagactaagactcacgtcacctccaacagcaacaagcctctcaaccaactgccctgctgtgcaactcacccggtaaggggtaaggtagacagtgcctttcttggtccctttgaaggcttctggcacgttcttcatgtcattgaatgtgagttccacgtgatcataggacattaggatgctgtgatgagaaaagaggaaaagcctcaatgagacagtatggagacgcgacgtcacccagacactgggcctttctcccaagcagctgcccggcacgtcagctctcataacctctcaatagtgcggcattaaaactattcatagggctgggcgcggtggctcacgcccgtaatcccagcactttgggaggccgaggcgagcggatgacccctggtcaggagtttgagaccagcctggccaacatggtgaaaccccatctctactaaaaatacaaaaaaattagccaggcaccgtggcgggcacctgtaatcccagctagtcaggaggctgaggcgggagaatcgcttgaacccaggaggcagaggttgcagtgagctgagatggcgccactgaactccagcctgggcaacaagagagaagctctgtctcaaaaacaaataaataaataaagccattcatagggccaggcgcagtggcccacacctgtaatcccagcactttgggaggctgaggcgggtgaatcgcttgagcctaggagtttgagaccagcct

SEQ ID NO: 65512 - DNA, 4014 bp, Homo sapiens
gggttcttaagcggggtttgcaggaaagtccatgaagcccttgagatgatcacgtatgtcatatgtgcatttttctgggaggagagtccacagctttcatcattgtcaaaggagttcacgacttgaagagtaacgttcactattttaattataattttttatttttttgagacggagtttcactcttgttgcccaggctgcagtgcaacatagcgtgatctcagctcactgcaacctccacctcctgcgttcaagcgattctcctgtctcagccttccaagtagctgggattacaggcatgcgccaccacgcctggctaattttttgtgtttagtagagacgaggttttaccatgttggtcaggcgggtttcaaactcctgacctcaagtgatccacccacctcagcctcccaaagtgctgggattacaggcgtgagccaccatgcccagcctaattatcaaattttggacactggacttaacacttcaattgttatagatacaactttttcagacagcaggctgaagcactttctaaaacagcaggctgaaggcacaccttacttagcaggactgagccctaagccaggtagaaggccgagcaggatagatacattcttgtctcagaaagttccacagagacagaaagaaaaacagtccccagagatgttgccaaatggcacgaaaagctggccaggcctgggaactgactcacacacagagatgcaacaaaacagtgtgaggtgtctctgattacatgataaaaaggttcacacggttctgtttgtcttctgcctccccccatatatcacaactttctctgactggggaagggtaagtgggaaacaactggtataagcaaaggaaaatggctgggcgcggtggctcactcctgtaatcccaatactttgggaggccgaggagggtggatcacgaggtcaggagttcgagaccagcctgcccaacatggtgaaaccctatgtctactaaaaatacaaaaaattagctgggtgtagtggcgggtgcctgtaatgccaactactggggaggctgaggcaggataatcgcttgaacccaggaggcggaggttgcagtgagctgagatcgtgccactgcactccagcctgggcgacagagcaagcctccatctaaaaaaaaaaaaaaaaaaaaaaaaaaaagagaagagaagtactgctcagagaaaagaaggaattaccagcaacaggctgggcccatgaaactctgagcgggtaagatagagggaaagtgagcatgctgggtcactctaggcattttcctctgactcatcaaacattcccaagtcacagggcagctggatgctggccttagctgggtacagggctctgactccacgatgtctcctttggggactcaggtgcctcctaagctccttctgccttcaagaggcaattcagggtcggcatagttcaacccagggctggctggtctgattttcaatacccaaggaacaaaaggagacagaggccatttaaggcttctcttggcagagactggaggagagacaggatgcaatgagcaaggggtggggaggatggagtggaaagaaccttgaattaggagagctctgccttccgaggtgacccaaaccaacaggcattcaagagagaggcaagggaatgactacggacccacacagtgccaggaactgttagacacctgacaaacgtcatctgtttaatttcacctctgggacctcagttttttaccgggaacctgaacagttctggaacatactggaagcctgtatgctggtggttaatcctattaactttggagtcaagactcctttcctggaattaccacctctgttacttacacagttgcgatctcgggcaagttacttaacctttctgccctccactttccctacctgtgaaatgtggacagtagtagattatactgcacagaatttattaaataaggtagaaaaggcgcagagcctgacacgtagtaacgttgtagacatccaataagtgacaattatttttgtttggggctcctcccagctactgaaatcacaagtctgggaaggggttcaagaatcacccctaggccccaccgggggccccataccaggtccccatgcagacgtcccacccccgcctcccagctgatcacaacctcccgggctctcccccacggcccacccaccttcctccaaccccgcccccagccgttccccaccaacctcactccatcagtgctccctcttcaggggcttattccccaccacccaccacccaccgcccacttcctcgacacccgaactttggtcctccaggatccttccgcagtgttttcacctctcggtgttattgacgatcactccgccgccctccgagtgattcttgttgagcgccatagtctctccaacaggggtcccgagactcaaaacgcaatgagcttgcgcccctcttcgccccgcccctagtggcgtcttcttattagagtcagccaatcaaagctcgagtgcggaggctggcccaaacacctgacccgaacgtcacgtggtaatagtttactccctccttccagttcctcctgcgcaacaaacaagatgaagactacaattcccagcaggcaacgcccccgcagcctcggcctgtccctatgctggaggaaggatgcattctggaacttgtagtctcctggatcataggcctgaattggttccacattttgcgtaaccaatcggcttgtgccatccccaccccgcctcttcagccggacggaaataaacagttccgctcctggcaggggcgcgatcttggggactccggcagcgcgttaagggaagtcctgctggtcgaatgcgacctggacatggcgtgggagcgccgagctgtccccttgtggatggggagctttcgttcactcagcagacgtttatggggcgcatgcgtgactctggggcgtttagctgagccggaggccccggctcttggggacgcggtgggctggcggcgtcggatcaccccgccatccatctcaccactcccagcgctgagcccggggggcggggagagtccctcatgggaaggggaggccgtgtgccccgcctggctcccaccacgttcgcaggccggccgggcgcccctcgcagccccctctccggcctcgcggtggcgccgctccccccttagcgcccagcggggtcccggccggaagactgaaggctgagtgggactgggcacggcgcgaaaccggcatcctgataactaggatttacagaataaggctgactcctgtcagctcgtgacccagccctgggcgtcctccacggggcagctgtcattccctaaccgccccccaccaaacccctgcacctccgagctgaatccgtgaggcggagagagggggctgcacttcccacgtggtagttccggtactcgttaatgttaaggaattagagtttgcttttcagtagacagctgctttcctgactgtggtggccaacctctagatccacctgcttgacttcgctttccagggaggtctcctatgtgaagaaacaaagctgcctcactagaaaagatcaggaaacagcagcgttctgtgaggtcctgtgcaataccaggttggaccttgcgggacaagtacagtgggttaaggatagtcataatgaaatctgccccaatggttagatgtattttggcgcctgcaatctctgcagtctttaaaaagaattaagtcagactatgtgctgatatgggaagatcatcaagggttattaagcacagaatgctgtatacatatagttgtatttgtataaaaaataggatctagatagaaaatttttgcaaagatccatcagaaaatgtctgtggcatttttgagacatgggtctaggaatttggggtggattggtgactcggtatgtcagtatgcattgtactctttggtactgtttaatttttttttcctatgtgcgtttaaaatataaatttaggccgggcgcgtggctcacgcctg

SEQ ID NO: 65513 - DNA, 1313 bp, Homo sapiens
tacaggcgtaagccaccgcgcctggccccaattttttttttatttttgttttttgtagcgatgaggtctcaccatgttggccatactgatctcaaactcctgggcttgagtgatcctcccacctcagcctcccaaagtgctgggattacaggtgtgagccatcatgcccagcctcaatatttttttaaagagatgtttgtttcccaaacttccacgcaagactctggagctacaggccactctgcagatggcatgcttgctgagtggctgtgtctgtggccacaggtgtgactagtcatgcctgaattccaccaagaaagcaccaggcctgtctagctcacattccaggacatgccaacacttcctgcagggtcagagaccagaaggttccctggcgaggggcgcctgtggggtagggagtgccaagttgggggacaagatgagacagcaggtggcctgaggggtgggagcggtcctctgcaaggtaggaggcttgtagtaggtggtccaaggagcatccaaggggacagcggggcagccttctccaccagccccttcactgccgggtgagctggggacccatggctgccaagggaacgatgttgaaaacacaaagcaccaggggcaaggaggccccgcccggaaaaacaacatcctggctgctagagcccaggcaggctctatgggaggggctatttttagctgctgaggctgctggggctggacttgtatggccttgctgtctggctgcataactcacccattatcccgcctgaccttgagctgggcgtctgtctgagaggcctctctgtctgcccttgccctcggccacagcccctctctggggtgcacctgggccacacagaacccaggcaggagtgagctggcctgggcctggaaacacactggactgtagcctcagggcgccccaggcctggctcaggttctagggcagcagagggcactgggccctcccagaagagaggcagaggctctcctggggcacaggtcacaggtgtccccagcatggagggcaagaagattccagagggggacataagtccttttattttttgagatggagtcttgctctgtcgcccaggctggagtgcagtggtataattgatctcggctcactgcaacctctgccttccgggttcaagtgattctcctgcctcaggcccctgagtagctgggagtacaggcacccacaaccatgcccggctaatttttgtatttttagtagagacgagggtttcaccatgttgcctaggctggtctcgaactcctgacctcaagtgatctgcctgcct

SEQ ID NO: 65514 - DNA, 3742 bp, Homo sapiens
tccctgggagcttcactctccaagaggttcgtactctcgaggtcttggggctcagcatcagctgtagaagaggagacagtggtgagaacgcccccagactgcccccctctgaacctgtgactacaatccctacccccttcacttcctcccagagtccagagccaccagggagcaagcaccacccagatgtggcacgctgtgctcacacacatgcccgttgcctgtgttctgcctcttgccccatgtgcttcccgggccacagccctctggagctagagggtgggctaggagaagccccctctaccccaggtccaaggggctgattgatccccacagggtggcagctctagtcactggcaggatttgggctcctccctgtgccaggcacaattttcctcctccacttctggatgggcgccaggcctgggggcctgtgcgagaggctggcagagggtgagtcatcgggggggcgtggggcggtgcccaccttccgagtccagcttctgtggcccatcctcgttgccacccggccccctcagctgctcccactggttgacgcaggccacggccagcatgtctctcactgcacggacagcttgggatgatttggtgaagctgagctccctcgggggtccaggcccagggccacacccatcctccagggccagccttagtgccagcagctcctgtgccagacaaatgcccattaaagtgctgctggccatggctcctccttgctgggggtggaggcagctctgccaggaagtcatgcacccactgcctcctcctccctccaccccacctgtcccagcttctgttccttccgtggcccccagagcggccttcacctgcaggaagctgactgagtcagcttcagggacctggctgagattctggcgggctcggctcaggcggctgcgctgttcctcctgtcgccgcaggtcaccctgggagcggcctagcatggcagcttccccctcctcgatgaagcccagcacctgggtctggaagccctgcagggcggccgcagcatctgcaaacagccggctcaccctctcccgctctgctacggctgcactctgcacaggacgacagtagagggggcaatgagggcaaagaaccgtcccggactgtacccccctccttccctgaccccggcttcccaccggccctcttgaggggacagaggggccagactgagcctgtcctggatctgggccaggtcaggggacacttgtgctcagtaggtatgggcatggtttgtttggagtggattgttccatgctgagggaggggtgtttgaccttgatgagggccactgtgcgcctggactgtgcaatgccagcacccagctcgtccatgcggtcctccacggcgctcaggactttggactgctcagcctgtggacaacaccctccatgagtgtgaggtctggcagaggccacagccctacactcgggtcccaggccttgccaggggagagaagggggtgactggggagtggtatctgtgcatcaggtgggactggagtggccacgatgtcccataatatgccagaggtgcctgcagcccaggctggtgcctttcctgaacgcctggggggcgtgcaggctgactgggtgtctgcctcgggtctctgacaggaggcctagtacagggccgtccgctggtctcagtgttgctcagatgaatttgagaacttcctccggcggggaagaggcagagagtaagccagttaggttgggaggtgggcggcggaggggtgactgcacaaggaggcattaagctgtcctgaggatcactgttcccaaagagcctgcatccacagtccaggcctggaaaaaaggggattccgggcaaatcccctaggtcttatgagtcactgctccaggcaggagaaacggaaaatcccttggccagaggcgccaagaccgggctggaggccaaaggaaactgggggcgggaggtagaggccgcggctcacatgctcccaccactggcccccggaacagctggacagagaatctgtgtgcccggtcgccctctgccgccctcctgccgcctgccacacccatcgaaagctgctgcctcagcccagggcaaatctgagctgagaccggcgtgaccctccgggcgggagcagcagccacgctaccggaaccccgcgggcctaacccggctccctcccgcctacacccccatagaccccggcccggcttcaggtcccctgcccgctcttcgcgtccttgtcctgttctcacgtccctccttcctcccttcccatctccatcaccgccagcagatgaccttgtcaaggctggaagggaccgcaaagatcctcaggttagaggaggagattaagacccaacccgggaagactggggggtccaaggtcctcggcccgctcgcgcgcggtcggtcaccagccccggctcacccgagtgtgcccccggagcccacctcctgaagcgcgcgctcctgctccagcggcaccagctcgtggccgcggtgctcctgtgcggcgcaggcctcgcacagacacacgcgctccgcgcggcagtagcgctcgagcggccgtaggtggcgcgggcacaggctctcctctagccggcgcagcggcggcaccaggcggtgtccgcggagggcggggctgcgctcgtgcgggcccaggtgcgcggggcaaaaggaggcgaggcaggagaggcaggacagcgcggcgggcagggccgcgccctcggggcacgcgtcgcagcgcactggctcttcgcccgcgggccacggctcgggagcgcagggggccgacggctccgggacactgggcagcgcgctgggtgccgagggctccggggccagggcaggggccgggccggggccggacccggggcccgagccctggcggagctgcagcagctcggacagcgtgtggttcttgcggagctgaaggccgtcggggaagggctcctggcacagcgggcagcgggccgcgcctccgggtccgccggctccactcgcgccacgatgcggccagagcgcgcccaggcaggcgagacagaagttgtggccgcagggcagcgtcaccggctcccggagtggctctaggcagatggggcagctgaagggtccactgccgtccatgactccgcggccgcccagggcgccgccgattgtgctccggcctgggagggacccgggccgttcgcgccgcggcacctccccctgggacctaggccagggctccggcccccgcccgcccccagctcggcccgccccgcagcaccgcccgcctgcgggcccgcggactcccagtccccgcccagacaacgcagggaggcctccgagcccgcgcgacccccaggggagtccgcgtggtcctaaggaagggcgctgctgaaagggtgtgaaactgagtgagcgcgggcggagaacgcgagaggtacagtggaaggaatgggaaggactcagcctccatccctctggtccttctgggccaggccagcgctccgcaggggctgggcgcgtctagctgtgtcatgcctgcacctttgcgctcgacccctccctggcacccttagcaaagttcctgagctgctgactgcagagaaaaataactgctgatgtacatatgtttttgccccttagcgactctttttttttttttttttgagacagagttcctctcttgtcgcccaggctggagtgcaggggcgctatctcggctcactgcaacctccgcctcccggat

SEQ ID NO: 65515 - DNA, 1971 bp, Homo sapiens
cgattcgggtcttacatcctgcccccttcagcccccagccaggtgatcagtctccatgaagcccaaatctgatcatgtgccaacctgcttccaagcctataatggcccccatgaccctacagtaagagccagactcccccaggaccctgcccgatcctgcccctgctgacccccagggcctggcccacagatctcagtggcacaaatctgccactagggaccccgcgtgcccagttctttcccatcccagagacgggaccaggctgattcctctgcctagaatgctcttccccaggtctttctcctggcttgcgcttcctcaatcctcacatgccagcctgaaggcggcctccccttcctcctcctggcccgtttagcagggtcaccccaacccctctatcacatgccatgtgctttcctcactgcattttgtaataatacattcacgccttactggaacactgacttcttaagtggattctaagtctcttaagggcagggagctcgtctgatccatttaccaacagcccccatagccccctcgccctccacaaccccgcacagcgaatgaaaggaggctctcggagcgcaggagacacacgacggttctctagcgcttgggcacggagcagggagctgctgcctcacgcccaggctttgttcatccagagggcaccgagcagcttctgagacccaccctgtgtcactggccgggctgcatatcccagtctgatgcacagacccacgattttttgtttgtttattttctgagacggagtctcgctctgtcgcccagactggagtgcagtggcacgatctcggcttactgcaagctccacttcccgggttcacgccattctcctgcctcagcctcccgagtagatgggactacaggcgcccgccaccacgcccggctaactttttgtatttttagtagagaccgggtttcaccgtgttagccaggatggtctcgatctcctgacctcgtgatccgcccgcctcggcctcccaaagtgctgggattacagtcgtgagccactgcgcctggcagacccacgacttttataatcagctcccaggttgggagaagccccttacagatgaggctccccgcccccgccgggtgcccgagagagcagggcgcggcccgcaggagtcacccggcggtggccaggctgcggcgggtccggacccctcccgctcccggcggatgcgtcacctcgcgcttgaggcgctcggcatccagcagcgcccgctcgtggaggcgacactcgcgcacggtgcacacgctgcacacacagcggccctcggtccggcagaagagctccagcggccgcccgtggcgggggcagcgcgcggcagggtcggggccggggccgggatcggggccgggatcccgggcgggcccggcgcgcaccacctccagcacgccgctgagggccacgttgcggcgcagctcggcgccgtcgggaaagggctcccggcactcggggcacgcctttccgcagcggtcccaccagtcccggatgcaggccccgcagaagttgtggccgcagggcagcgtcactgggtcctggtagagccccaggcagatggcgcaggtcagcttctcctccagcagctgcgcggccatggcccggcggcggcgagagccaggcgggccccgggcgtcttaaagggaccgcgggcctcgcgcgctgagggcgcctgggcgtggctaacgcggggcggggcgagatccgggcggggcggggcgagatccgcgcccgggaaggcggaggggggcggcaggcccttctctgacaccctcgacgagcgaccgccgcaggggcctaggccacccctgcccacctcggcctggcccgctcgaaggttccgcgttcccgccttgcgcccctccctccgttagggtccacgccaccccggctgagagctgagttcggctctctagggtcccagcctggcgggtcc

SEQ ID NO: 65516 - DNA, 2111 bp, Homo sapiens
ggccaggttgggttcttttttgagtcaccctgcccaggcctttaatttcattcagcaaagtattgcacatgtacatccttgcactgttcgggtgcaaggatccaatggagggcaagacaagcaggatccctgtcaacagggcgcttacaatctggggagaggcagcgcacagtcagaatgcagtgtggccagagttacctacagagtatttgaggcgcacagaacggcatcccaatccggaaagtcaggtggtcaagattttaggagcaaatattttaggagctggaactctaatagtagggggagcgaattttccaagaatgaggtgcagaaggtgtgaaaaatcctggggtgattaagctgccgatagcgcacacaggtctgcaggcaggccctcccagcgtccccagcatccacaagggcgccggcaaggctcgcccagcgcccggggaaaacgccggcgggtcccgagttccccgggcggtggctgcagcccctgctccagtcgccccgcacctgtcttctccccgaaatactctcggtaggtccgccaccagtgcggggcctgcgcctcctgctctgctcggcgccggtagcggtcgaagctccggtacttctccagccgctccaggttgctcaagtcgatgtcactgttgggcatcggccccagcgggggtgtccggcggcccaggacggctgcgggcagagagaagacgtaaggccggcgccccacagctcgggcgacagcccccccccccccccccgcagagctgcccacccctcacccgaggtgctgaagccccgccatctccgacactcgcacagcgcggctcgccaccagggcgccgccatcttccctccggcctgcgacactgcggccgccactaggacccgggcacaggtggccagcgcggtgcctgagcgcaccacagcaggccccgcccctaggcccgcccccgggcccgcgctgcggagcaggcctcagacgcctgtcccggaggcccctgcaccgtctgcctcgggcgcaggtggaaggtggccgcggtctgtagacgcccggctccggaagtgcccgttggacggcggggcggagccgagagcagtcatatgctcgcccatggctggccaccagggggcggcacagaccggggtcggccgccggggccctcctccaacccctggacgctgcgtcctgatttccccagggacgcaggcctggttgggagaaggggtgcgagctccgattccggactctgcttgggtttaaaacccagattgagggctgggcgcggtggctcacgccgggaatcccagcactttgggaggccaaggcgggtggatcacgaagtcaggagatcgagaccatcctggccaacacggtgaaaacccgtctctactcaaaatacaaaaattagccgggcgtggcatacgcctgtaatcccagctactcgggaggctgagggaggagactcgcttgaacctgggaggcagaggcggaggctgcagtgagccgagatcgcgccactgcactccagcatgggcgacaaaagtgaaaactctatttcaataataataataataataaaataatagtaataaaaacccagattgtggctgggcgcggtggctcatacctgtaatcccagcactttgggaggccgaggtgggcggatcatctgaggtaattagtttgagaccagccctacgaacatggcaaaaccctaaagatacaaaaatttttgtatctctactaatgatacaaaaattagccgggcgtggtggcaggcgcctgtaatcccagctactcaggaggctatggcacaagaattaacttgaacccgggaggcagaagctgcagtgagacgagattgcgccaccacctcggtgccagagtgagacaccgtctcaaaatgcccctccccccccccaaaaaaaaaccagatcgtgaccttactgtcttccttgtggtttcctcatttgggaaaaagcaggttaacactagtgcttacctgacagctgtcaggatgaaaagattaccctctggaaagcgctcgcagtggtttgtgtgttagctcaactatctccaacttctcattatccacacaaaggca

SEQ ID NO: 65517 - DNA, 1191 bp, Homo sapiens
ggcacgatcacagctctcatagcttactgcagcctcgacctccttgggctcaggcgatcctccaatgtcagcctccctagcagctgggaccacaggcacacgccaccatgtgcggcaaattttaaaattttttttgtagagacgggggtctccctatgttgcccagggtcgtcccagacgcctggcctcaagtgatcctcccgccttggcctcccaaagtgtcgggattacaggcgtgagccaccgtgcccggccttgtttctttttctctgcaatggcgacttcacgacctacaagtccaaatgtgtcccataacacatcaaggaacttctggcatctcctatcgatcctgtacgggcttctcagactatggggattttctaggcttggtttgccaaggccaaagggctacagagtaaccccgtccccacatgtattcagccgactccatgccaggcgttttacagatcccgagaccacccctaagcaagacccctagccggagtcgcccctccgtcccgagactccgcgcccctcaatgcgtcacccttctgagcgcccggcctatctggccccggagcgcagcctgtaacgctctcagccccggaagcctcctgttacgcgccgtgcccccggaggtgcggccgctgggaccagcgccggccctggctccattcgggtcgcccagcccggccaggactggcctcccgcttccagccgctgccggcaccctcagccgtctggcctcccgcggaaaggcgggcgcgaggcatcctgggagtcgcagtcggcggtcgactcacccgccctcacagaggaggtggggacgccatgaagaactacagctcccagggagccgcgcgcggcagttggcggggccgggcttctgccggcggcgggcacgttgctaggagctgccccaacgcctctccgggaagagggcgccaggctcaaaggccctcttgggaactgccgggaagcttaaaagttcctcctgcccacttctgagggctgacacgtggccgacgcggaggcgtgagaaatgtgttgatattgggaggttgacgggtgaatccacaaattcaccggtgtttattccacaccccaaagcttgagggaagtgactgacctgtttaatgatccaatcaaagctgtatagccagaatgaaacccaatactgtcgccccacaa

SEQ ID NO: 65518 - DNA, 1370 bp, Homo sapiens
ggcgggtggatcacaaggccaggagttcgagaccagcctggccaacatggtgaaaccccatttctactaaaaatacaaaagttagctgggtgaggtggcagatgcctcttcacctgctgataatggaaataaatggaaatgcagagagagagagagagagagaaagaaagagagagaaagaaaaagaaagaggaagagaaagagaaagaaaaagaaaggaaaagaaagaaaagaaaagaaagaaagaaagaaaagaaaagaaagaaaggtgatgtatttcacaattaatagcatgtcacggttaactggcagcattctttctttcttagtggtacacaaaacactggtgtgagttataatcgatgagattatataaccgaggctttaactcgatagcatgcgataatttccaggactcatttacaaaccccttctcttacttaaaaactgatctccttgtcatatcctaaggacattggaagtgtgtcaaagggtgtgttaaagtttgtactttaatacttcacatgaaaaatgatacacaaaacaacttcccggtgtccatgaatctttaacccgcataaaagactttgttctatttcattgtgacctcactcgagtctggttcacattatcaacaggtcacaggttatgaaatcatctctatcagctttgaaatgcactgcaccacccattcaaacacacacacacacactcaacccacttttttcctgacgtttcaagaaggaataaaatcttactaattttttcaaatttacaaacacaacacaggtatcagtaacataatcttctaggaggagttactctatctcaatatccccacagccatgagttacaaacttcaaaaacaaaacagaccatttggaagtatgctgatttgaactaccaaaaataaataaacaaaattttttcgtttaaaactgagtggagctctgaggaaagtccaaagtgccagagtaaaccatttcatcttcacaaaaataacccaagtcaagctgaaaatcgataccaaaggcactagaggcagtgaccattattaccataaaggcagaacgtgcaacatgttctatttagcttggttctagtctatacaccactcatacgatttagtctttaccgatgaaaatactggagttcctttaaaatggagaaacctaaaagagaaaatgcccaggaataaatgagaaaaaaatgctataggccaaaataatcttgtactaggatcatgtaatagtgtttgtttaggttaaggcaaaaaagtcttttttttttttttttttttttttgagacagagtctctctttgttgcccagtctggagtgcagtggcgtgatctcggctcagtgcagcct

SEQ ID NO: 65519 - DNA, 2157 bp, Homo sapiens
ttagccagaatggtctcgatctcctgacttggtgatccgcccgcctcggcctcccaaagtgctgggattacaggcgtgagccaccgcgcccggccacacatataactttataaagttgcatgaaaatatgccagtttgcatcttcaaacaccaagcacggtgatgaaaggccaccatagaccgcagctgtaaagtttaggcttaacaacacttgctctgttctaaggcatacctactttttaaaccacataatttcatcagggtcagcgatgccaaactccctcatcttcttcaccatgatggcacttttcctgacagccacctcataacgctggctgcgagtgaggaagttcaagtcctcatgctggaagtctgggtcgttcaggatcatgttctctgaaagggggttaaagggcattaaaaggcagacagacactcgggcctccgttccaccctccctgaatcacaataggcttcagagtcgcggacacacctggggaatggcgatatccccccaccagggacacaggctgttcctcgaagtgggggtcccggctcccctaacgctgggccagagggcctaggccccacagcgcccctgactccgcatcgagggagtctccagcttttctcgggaaaggagggaggtctcgcccgccgccctcaccgatctctcggcggcgccgggttttctcggggctgccgtccaggatgtgtgtaagcagctccgggttgaagctggcggaatcccgctccctgcgcaggtccgggttcatggcgacgaccagctggcagcgaagtaagcaccgaccgaggtggcagtgacaatctaaatccgcagctccagcgccggccggaccctaggaggcagcctcaggacggcgcaagtccccgcctccgctcgcccggcccgccccggcccgccccttctttctccgtggccctttggcgcgtgagtgacagcggcccagacagagggggcgatgtccgcgtcgtggctggggccggtcgcggggcagactaatcccctgctcctggccaggggaggctcccgagcggatcctcgggaaaggggctccgaaggtcaagaaactgccctgctgggcgtccggggagtgggaaaataaagcactttttgtatcccgcccctcccccgtcacgtgaccacgcgaggcggaaagaagaaatccgaggaccggcgacgcctagaacaggttggctggggccttgggaagggggcgggacaacgaggctgaggagggattgcgcctgcacttgcccccctcttaccccgcggcctctgtcacgcttccgggtccgtgcccctaggcctctccgaaatgagagtggtcgggagactctggagtctggggcgggagatggggctttgcggaattgctagggagggtcacttgggcttttgccaaatccacccggattggagaagaatgggacgggaaccagtctctttggggagaggctccagttaccttttgttaagataatggcgtctttactggcagaggcgtgggttccggggccctgggtgtgggattgtgagcgctgttcaaggggtggacggggacttagaatgagaccaagcgggcggtgctgctctaagccttctgtctgggaaaccagacattttcccccgcaacctggcagttactagaggtcttggaatccagacttctttgctttcgccatcaccgtcatcaaagtgggaaatgcacacttactgttaaaacctagtgtagggccgggcgcggtggctcacgcctggaatcccagcactttgggaggacgaggcgggcgtatcacttgagcccaggagttcaagaccagcctgggcaacatggcaaaaccccatccctacaaaaaataccaaaaaattagctgggtgtagtggcatgcgcctgtagtcccagctactctgaaggctgagatgggatggtggcttgagccccggaggtggaggttgcggtgagccaagattgtgacattgcactccatcctgggcaacatagtgagaccctgtctctacagaaaaaaaacaaaaaacaaaaacagttctgcccagtgggattgtagacaagggagattcagggatttgttgaatcatctctagtcattttttttttttttcttgagacggag

SEQ ID NO: 65520 - DNA, 1023 bp, Homo sapiens
caggtcatagaaaacagagtcatttacccccaaagccagccataaaaccctaaatataagctgggtgcggtggctcacgcctataatcctggcactttgggaggccaaggcaggtggatagcgaggtcaggagatcgagaccatcctggctaacacggtgaaaccccgtctctactaaaaatacaaaaaaagccgagcgaggtgccatgtgcctgtagtcccggctactcgggagtctgaggcaggagaatcgcttgaaccggggaggcagaggttgcagtgagccgagattgcaccactgcattccagcctgggcgacagagtgagactctgtctcaaaaaacaaacaaaaaaaaccctaaatatattactcttaactttccctccttcttttggtgtaaaaactggccaaaaagaaattatctgacctagcttgtttgactgtaggccataagactccattccagagagggtcctcccccacacccagaaggaaggaatgcctgttccaagaggccaagaagaatctagacagacaggccttgctgggcctccccactcagtctatcagcattagatcataccttttatgttcaatcatttgcataaaaatgtacaatttcccctgtatctttgggtcttccttctgaaggctcccatatgtacatgttacataaatttgtacacatttttgactattactctgccttttgtaagttgattttttgcagcgaaacttcagagggccccttggcacctacagtagaatgtcccttaattcagatttgtctgatatttcttcatgattagattcagatgatgcatttttggcaggaataccacacaagtgattaataggagaaaaggcatacacatgtatttgatcatagttttgctttgttttgttttgtttgagacaaggccttgctctgtcacccagactagaatgcagtggcgcaaccatagttcactgcagcctcaaactcttaggctcaagcattgatcatagttttatttatttat

SEQ ID NO: 65521 - DNA, 857 bp, Homo sapiens
atttctgtatggattgcctgtagtggaaaccaaatggttgatgaaggaaagttatttcttttttttttttttttgagacggagtgtcgctctcgccaggctggagtgtagtggcatgatctcagctcactgcaacctccgcctcccgggttcaagcgattctcctgcctcagccttccgagtagctgggactacaggcatgcgccaccacgcctggctaatttttgtatttttagtagagatgggggtttcaccatgttggccaggatggtctcgatctcttgaccttgtgatctgcccgcctcggcctcccaaagtgttgggattacaagcgtgagctaccgcgcctggcctggaaagttctttagagaagagtcacagcgaatgaacgcaggagaaatccgtaaattcaaagtcatcactttaaaagccctgacaaaataaaaaatccaggcaacagtcctcgctagtggccaaaatcattaggaaacatcttgatgagatcattgtgatggagggacccgccagcagtgcctaggctggcctgatcaatgtcgacgtgataaaaatcagaagggcaaacatcaggtacctccgatgtgagtcatgaggaagacacacatagcaacacctctgttgggttcttgccaaaaaaattgaacctgggctgggcgccgtggctcacgcctgtaatcccagcactttgggaggccgaggcgggcggatctcgaggtcaggagattgagaccatcctggctaacatggcgaaaccccgtctctactaaaaatacaaaaagttagccgggcgtggtggcacacgcctgtagtcccagctactcaggaggctgaggcaggaga

SEQ ID NO: 65522 - DNA, 2456 bp, Homo sapiens
tgagccagggaggcagagattgcagtgagctgagactgtaccactgtactgcagcctgggtgacagagtgagaccctgtcaaaaaaaaaaaaaaaaagagagagagaaagaaagaaaaagaaagaaaagaaaagaaagagaaaagagaagagaaagggagggagggaaaccttcctgtgtgtcccctgtgcacctccctcttcgagcatccttacagctctgggacttgcccaaacctttctccccaaaccacacacccacagagtctggagcagggccggagtttccccggctcctcgggtgtgtcagcatcacacatccctccctgtctccctgctgccaaccagttccaccactgtgcacctctgccccaattccacctcccacgcctgctgctgcaccttggacttgttttcctgaaattgcatgccatccactctcccttctacttctgctgcgtccctcttgccctatcaggacctgtggactcaggactcccgggctttctcccccatctctcttccccgttgggcctcactaccatttcagccactttcctggcagcttcactcctgccccaagaccccagcctccaccctcctggttctgccaactgttgagtgcagaaagatcacagaactccaaggatttggagctcaatgatttcaggggctcactggcattcccctgctctgcctagaaatccttcctgtgtcctggccacacccccctccccggcgccaccacagctagtccagaaattcccctgcctcacaagaacccacttcctctcctcccctgtccctcccggcttattgctttatgagccagctagaatcgaggccacaggcagccgttcttcctcctaccatcagacactgaaacggccaccgaccatcagacactgaaacggccaccgttagctccttcctctagtctaagaggaagcggggtccctcctacctaaggggttaccacagttcttccctgtccacatataaggtgttcaagcctcctctatatggaaataatagtctcaatgacaagaagtcatcttctacactagagtctgacctacctgcccatgaccttccctccctttgcagacaaacctcctaaaagaacatctgtgctccgtataaccccttcctcttcccaggcctcaccccactgcattctgactgctttttataacccaggcccttcttctttgctccaggttcttaatctttttttttttttcctgagatggagtctcgctctgtcacccaggctgggagtgcagtggcacgatctctgcttactgcaacctctgcttcctgggttcaagcgattctgcctcagcctccctagtagctgggattacaggtgcccgccaccacacccagctaatttttgtctttttagtagagacagggtttcaccatgttggccaggctggtcttcagctcctgacctcaggtgatccgcctgcgtcagcctcccagagtgctgggattacagatgtgagccactgcgcctggcctttttcctttttttttccttttttttttttttttgagacagagtctcattctgtttcccaggctggagtgcagtggcgcaatcttggctcactgcgacatccacctccccggttcaagtgattctcgtgcctcagcctcccaagtagtcgggcctgggtaacttttgtatttttagtagagacagggttttcgcttgttggccaggctggtcttgagctcctggcctcaagtgatctgcttgtcttgccctcccaaagtgttgggattacagtgttgggagccaccgcgccacgccccgattcctctctgacctgtgtcagcactggggctaacagaagctgagacacacaggcaacctcatgtttcaaatgagttcattgcctaagggtagcctgtatagacagctaggcaggatgacaccctgaattctgccctcaggctgtgctataaatgacctagactagaggaaagggcaggcagagcctttatctcaaacagcgtcaaaagaaaacaatgtaatagcctagaacattgaatctatttatttacttattttgagacagagtctcactctgttgcccaggctggagtgcagtggcttgatctcggctcactgcaacgtctgcctcccaggttcaagcgattctcctgcctcagcctcccgagtagctgggtttacaggtgccagctaccacacctggctaatttttgtatttttagtagagacggggttttgccgtgttggccaagctggtcatgaactcctgacctcaggtgatccacccatctcggaaatctatttattaaagtgctcagagagcagaaagagcatgagtgcaaaaaatttttttaacttttttttttctcttgcaagctatgactggggaaaaaagaaagaaaaaaaaaatgtcagcaatgcacagtggctca

SEQ ID NO: 65523 - DNA, 584 bp, Homo sapiens
ctcttggatttttaaaatatgggtgtctcttttccccggttcctgatgacattgtgtcccaaggtgccaagggggcctttccctcagtccagaggggttttctgaccacctgctaagttccagacacgggccgactgtgcatgacaggcccacggttctaggcccaaatactcagttgcctttgccccatatgctgttattgtccacatcacttgctgccaaaacccaggactgagctgtggagggaacagctggaatgcaccttggaggacgttgttgacacgccgctcagtcgccgttcgtgccctggtgtttgtcttgcagacagaggctccgtggtgaaggcgcgcgtgctgacctgtgtggaggggatgaacctgcccttgttggaacaagccatccgggagcagagactgtacaagcaggagcggggcggcagccagtaggaaacagcagcctagcaacaccctcacctgcttcagagcccgaaccctctggagctgcaggagcccgggagagcacagacgcctccccagcgacggccttgtctggagctcgaaagccgaggggcgggtgatgaatcc

SEQ ID NO: 65524 - DNA, 618 bp, Homo sapiens
ggattctgtataacaaagtggcggaccccacaccttctcttcttccccatttcaggtgactcgaaaagccctgtttcctggtgactctgagattgaccagctctttcgtatctttcgtatgctggggacacccagcgaagacacatggcccggggtcacccagctgcctgactataagggcagcttccctaagtggaccaggaagggactggaagagattgtgcccaatctggagccagagggcagggacctgctcatggtaggtgcatgtgggctccagctgctgctccgactacagtttcccctcatcagccagcctcttacataaccctggcactttctgagtccaaggccagggtctctttcctgacctttgtacacaactggcttgggtatactgattgttcaacccggaagcctcccccaggataagtgcagtatttatcttccctgtgaaagtggcgctcattgagttagctctgtctttatgctgtgctacacgccctttttccctagttgtcttgtgtgtttggttattctactttgtggacattactgctccatctaagctgtatgcctccccaggctggggccataccttcttttcttttctttttt

SEQ ID NO: 65525 - DNA, 1638 bp, Homo sapiens
agcttatatgaatgactgtcagcaagataaaatgcctacagaccgatcagaaaaaaatgacacaatcgatattaactacggtaacttacaatcaaaatgggcaacaagcttttcctgagtcaatctttacctccactttcaaagtatcgagctgtaggttttactactcagtctatgacgactgtcagacaagagtattaagccaaatgtcaagactgcagtttcctctccccagttcagtggctcaaggtgccaaagcaaggtgctcaaggtgtcacttggtcacaagccctccaactggacaactgcggggcaccaggggaaacctgcctgatatcccagtgccactggaagaaacggacctagccaggacggcgagggggacacgaggaaagactagtcgagagacagaccccccccggaattctgagcaccaaaaggtaagggcgagagaaactgcaaccctcggcctctcctgccaggacttgtcgggacccgccgcctctcccgcccccagccctccagttcgacacgtaatcattgcgagttaggcccgattactctaggatactctccaaactcaggctatccccaaattctttgtttgccttcgatccggccgaagggcgttcgttttctttattttcttcccctccggcaccacgtccaccgccgctaccgccgccgccactgccaccgccgccgccactgccgccgccgccgccgccgcctgggacctgcttctcagcagccatcttgcccctgcgccgcagagcaagacgggataggggaggcgggacgacctgggcgggtgagagctggacctgcctggccgggctgatgggatagcggcggactccgccgccgtcggcccttgctgcagcagggcgccatgtgctggagcgcgcctgcgcgagggatcctgtcatcccgggtccggaattgtggctggctaggtggggacttgaggccgcagtgagaccgtggctgctgagatctcagggggcagtcccacctcccacccactaagggcggagaaccggaggtggaccccaggtcctgcatcctggactggggatctggttcacgtcctgcccagcagaaagcaggagaccaaagatactggatttcggggtgtctgcatccccagggactcaagagatggggtcctccctaccggaacgggacaccccgtccgtaagggacccgcctctgcctgccctttcctctgaggctggccgtaagaacgccaagccggaggaagcgctgcgcagtcagcagacggtgtcctaacggggtgactttctcagaccgcttggggccgtggaccactgcactttggggccgtcagtccaaagagggagaagtgttgagacatgggaaaatatgaatttttgctttgcaccttctagagtctgagacctgggattccaatccccgctccgtcattagcggcagggacatgttgggcacgtaacttaatctccctgtaaatctgttccttcatctatgaaatggggataaccaatttaagtggttgttaggaagattaaatgacggattttttttttttttttagatagagtttcgctcttgttgcccaggctggagtgcaatggtgtgatctcggctcactgc

SEQ ID NO: 65526 - DNA, 1795 bp, Homo sapiens
ttcgctgacaccagttacctatcaggagccgcacatttaagcagaagggcaaggactagatcccagatctgcctgactttagagctctttctttccctaaagtcctctggagtgaaggctgagtcttctctgccctcaggaatctcaaagtgccaacctcctgggcagagagtccactgacaatgacatatgcccagtacctagcccaactggtcagactcactgagtgtttgcagaaggagagaaggaagaatggcgagcttagacagaaagcagcaagtccaggccagtgggaagtgcagcctcctcagtgagggtacggaacatggggagggggctaggcaggagagatgccaaactgttgctagataaacccacacactgcctccgtcgctgcccattccagaactccaggccgcaggaaccggaaccgccaggtcgcaaggctctcccccagggtccggaggcctgccctctcccccagctgcggggagactcaccatgttcttagtgagctggtcgctcttctccaggctgtctcggatgaaggacagagtctcctcctcctgggggcaggcaaggggaggacatcaccagaaaccagaagctaaaggagaccactgcgtcccaaccccacggcctagcccccaaccccatctcctcgctgggtgcgctccctcccacccctgcctcctccatgagtagacaatcaggccccgctgttggcccctttccctcacctcctccccagcctccccaggcccacgcccacctgcttcagcttgtcctcaatctcccgccgtcgagcggatgcctcctgtgggggaatcatcgctctgaaccccgcggctcccactccccagtatctttcctccgcgggcccaccgggcccccgtccccgtcacacccacttccgctcttggtcccgccccgggacgcctgggcggagccatgttgggaatcgcaggctgaagtgcgcctgcgcggagcccaagaacggaccgacggccattttgagcgtggctgggaagagaagtgtattcggatgctgcaagggacctcgacgcgggttccttgcctcagcagaggttttcgatcggccttatgtcccgcggctggcaggacacttagagctcacttgctgttttcgttgaaagaccgacccttttgataaagactgctggggaaggcgacgaattcctttccccaggtcgcattctatgggcaggcaccaaggccaattgcgtttcccacaaagccccgcacggagcaggtgacacagtagatgcctaacgtgtgtccatgtaatgaaccaggggcttgtgtacttgtttccgccttccaccctgcattacgcaaaaacgtatcctgtgggctggcggggctgctccggagctccaggcccagacccagcgtccaactgcagctccaggggacggggtggggggcgcccctggatcaacttccctgcggggctggatgttgtggttgcagacccagctcctgcaaaacctcgagttactccttcctctaacccgtccctgcccaccctgcctctggcccccagccttgagaaaggacaaggccgaccagcttggttcagtccttctgtggcctcagtgtccagacacccggaagatagacaaggaggcatgtgctggtagatgagaaggtttggggcgggcaggggggacaccaagctttttttttcctttcttttcttttgagagagagtctcactctgtcgcccaggctggagtgcaagtggcacgatcttggctcattgcagtctctg

SEQ ID NO: 65527 - DNA, 614 bp, Homo sapiens
cttagccagggcagaacatcggttacttgtggaagactcaagaatcagatctgaagtctgctctcctggcctcttggtatgctctgtggtgagggagatccggcagcaagcggggggcaccttcccctggcaaggaccctgaggggcccacggcaaagccctgctgctgctccctcctcagcctcattctcacagtaagcctgtctgcggaaagtcagtgtgggtgctgaggggccttccagagcaggtgccgccattttgtctggctgaatccaggcccctccagccaaaaaatggagcacagagattcaaaatccttagagggaaatggataaaggtgctttccgttcatgtctcagtttttgggatatcaaaaatgggagtatgaagagacctctagaggtagattttgggagtacattcaggaaaatttcacaagcccctttcctgcctctacaaagccacttattaaatataaggactgtaatagttcaactgtctttgtagagttgctctccaggggaaggagaaacttagtttgaaattttccttagtgcccacaaagtgcaagtagcatcttagtcttgagttttgaggcctctcaaaaagaggag

SEQ ID NO: 65528 - DNA, 604 bp, Homo sapiens
agggacacagtgaagagtcaagcaaacctctcttagttccatctgtaaaggggcgtcaagcttgcatctggtgccctgcatgcttggatacaacatcctcctgggactgggctgctgtgtctgtcctgaagtaagcctgaatctgagaataacttaaatcccaaacatctcaaacccagaatggaagtagagttgggctcagccagaagacctcttttggtggacctcaggcgtttgctgacgaaggctctgtgtgttacgtgagcaactcctctttggcttttgaccctggtgctcatcagcttccttttaccagcacatcacatcggcaaagcgccacctggtgacgaaagatgaaattgccagaccatgcccaaatgcaggccagaagggtgcacgtgcattcacatacacatgggcacacacgcatttagtctgtgtgtgtgtgtgtgtgtgtgtgtgtgtgtatcaatcacatgtcctagatttttttttttaccattctgatttcaaatattacactactcctacggttgtactatttttgctgtaaaaaaatatggtcacagtacatgtgaaaggacatcttactctgtgtgtaaat

SEQ ID NO: 65529 - DNA, 353 bp, Homo sapiens
tttggctacaaacagccatagctaccccttctccaagaactgggaaccagagccacctgatccaagagtcttcctgattccctatctcactccaggacagccaccaacagccagtgactgattgacagggctgtacaaaaagctggcccctttaccttgagatgaagcaactctgtggtacaagctgtactccaaagctttcccgtgggaccaggccaaaatgggtcttggccaagaccgcactcatgtttggttttgctccactgccccatctgtcttcctcatctctagagagcattccctcaataaacagctttcacaaagatctccatctcaggctttgctcccagaga

SEQ ID NO: 65530 - DNA, 559 bp, Homo sapiens
actccaaccagcatccctcacagtccaatacttattgactactcaccactctgagcgccaaaagcacacttctgcatctttatgcttccttgtattgcttattaattaattctgcctcagatgcctctcctcatctcccctacctaggaaatcctacttatccctccaggttaaaggagtcccctcccagaagccccttccctggagagagggcatccccactggtctgtgctccagggcactctggtcctctctcgtagaacctatcacagtccctcgcagtgggggcacatcagctgccccactctgcagcaagcatcttcaggtcaagggtcatgtcttttcatctctgcattcctagttcccagcacagtatgtgactcataaatacttgttgaatgaatgaatagcaccgggactaacagaatcatgttctctttttttgccacaaagctctataagtgcaaaactctatgttacaaatggatatactaccaagttcctttaaataacttgctcttcctgacacatatgataatagggttcaatttacagaaac

SEQ ID NO: 65531 - DNA, 605 bp, Homo sapiens
agcaggagccggcggcgcgtgcctcgcgcggggagccgcggctggactcggcgcgcgtggacgcggcccagggcctcgcggcgggggcgtgggcgtgggcggggactcgcgacggggacgggggcgcggccgggtgcccgcggcggggcggggcgggaccggccggagctgggaccccaggagacgagcgctgcacccggccgggacgcgtcgcccctccgcgcctgtttatcccggctcggattaccgcgcagggagccgccccctcccgcggtccgcgaggactggccgggagctcgctcgccattgtcctgggcgtcccaaagcgggcggtccccgctccgctgctcccgcgcctggaggaagccttcccaaccccgcccctcagcgtcggccggcggaggtcttcggaaatctcatgcaggggggtagggagaggggtcccacggtgcattcgcatgtctcctgccccgtgttaatgctggtgaccggctaggaagatgccgcctccctctcacgtgcgtctattcaaagcgctcccaactctatacatgctgtttaaggctccttgtagccctaaagttaggagaacatcgactgaggat

SEQ ID NO: 65532 - DNA, 1875 bp, Homo sapiens
attgcttcccatatagaaagtgctcactaaatgaatgactatttagttgttgttgttgttgttgttttgagacggagtctccctctgtagcccaggctgatgtgcaatggcgcaatcttgactcactgcaacctctgcctcccaggttcaagtgattctcctgcctcagcctcccgaatagctgggattacaggtgaatgccaccatgcccagctaatttttgtatttttagtagagatagggtttcaccatgctggtaaggctggtcttgaactcctgacctcaggtgatccacctgccttggcctcccaaagtgctgggattataggcgtgaaccaccgagcccagccaagaatagtcatttttgagcaatgactctgtccaagcactttggaatgcgttgtcacccgagctggagtgcagtggtgtgatcacagttcactgcagtctcaacctcctgggctcaagcgatcctcccacctgagcctcatttaatcttcaaaacaaccctaagagataagtattattgttcccacttcccagatgaggaaactggaactcaagtaggcacagggagcaggaactggccccaggttcttccaggttcaaagtcctacattttacccatggatcatcatctcaccagcctctgtggggaaagcctgcctgggtgccagccctactgcccaccaagctagcggagtgattctcccagggtggtgccagtgacaaagggcaatgcatggggacgtctccatcattgtcacaccaccacctccaccttcactgtgcctctctctaggtttaatctttcttccttttcctcctcacttccctctgtattatcaatctccttcctgtatcgggactatttcctcaacaggcccggggaagctcttgtctatggaagtcctctttggccttaagcttccctctaagagctccagcagatgagtaacctgtcctcctgcaaacactgccatgaagtgcgtaggcagctgcctgccttcagggctggatggacaccctgtttccttgctcaatcccttctgatgactggactctgtacacagtgtggtcagtgggtcagctctgatctggaagctcccaaaggcaggacacaagattttctctgactgttcccaggccccagggcgtgttgggcacgggagcgtgtggcacggatgttgttcgtgatgaggcatattctagtggtttcccaattcggttgtgtacaacccagtgctctagtgttcagtaaatacttccttcctctttaggcagaacactggctctgtgttttattaacagcacctcatgcctggcccaaagaatgatttgtgtggcttgggctgttggggtcagaaatggcattcattcatcattcactctggaggtgctgtgtttctgaaggagaaggggacctatcctggcaaacaaatcaggggctttatggtaaacaaactcctctcttcccagcacttgtttcttgctctctgtttttgattttctctctctttcacttttttttttttttcactatacccgggcttcctgagttcctgacaatttctaaagcctcaagcatgatctcatcagaaactctggcttcttttaacatttctttcccttctgctgagtcctagtccatttaaatttcctctgtgactctgggaattttttttccttgagacacagtctcgctcttgttgcccaggctggaagtgcaatgggctgatctcagctcactgcaatctctgcctcccaagttaaagcgattctcctgcctcagtctcccaagtagctgggactacaggcatgcaccaccatgcccggctgattttgtatttttaacagagacggggtttcaccata

SEQ ID NO: 65533 - DNA, 2134 bp, Homo sapiens
aaatgattatactgccatttcttgatttatcaattttagaaattatttattttcaattacagtagatcaatatttacatacttaaaactgctacctctacatctgcttcccacccaccatcctgcagggcgcacccacggagatggggctgagacctggcctgggcagctgggggcctcttggggcactggtacatgttcgtagtcccagctgcccaggaagctagggcagaaggatcacttaacccgggaggtcgaggctgcagtgagctgcattgcaccactgcactgcagctggaatgacattgagacactcttaaaaaaaaaaaaaagggcgggccaggtgggaaagctgccttgtatctgaagtcagtgcctgccacaacaataggcctcttgtgttttggacatgaagctatagtggcctagctccaggcccatccatttctgtcctccccagagaaagtggctgggagtcctgagtctgagcagataactaaggacccctgagaaggaggaccctccttagaaagcttttacttcttgtcttttccttagcagagaggcaacctcctgtgtccagccaagtgtctctttgaaaagattgccagcgctgggcatggtggctcatgcctgtaatcccagcacgttggaaggccaaggtgggcaaatcacctaaggtcaggagttagagaccagcctggccaacatggtgaaaccctgtctctactaaaaatacaaaaattagccaggcgtggtggtgggcgcctgtaatcccagctactgaggaggctgaggcaggagaatcgcttgaatccaggaggcagagcttgcagtgagccgagatcgcaccactgcattccagcctgggtgacagagcaagtgtctcaaaaaaagaaaaaaaaaaaaaaaaaagaaagattgccagggactcacctaccattagacacacctagcaagcagaggcagggccaccttatcactgggttggcaggtacaggacagaaagtactcaccagtcagagtgctgcttttaggaaatgccattaactgtgctgggagtggtgcggcctttgtcccttgtgggacatgtgacaattggtgaaaaatgtaatctggcataagccagcaatgaattcatcactggggaattggctttcaccatcctgctgcttccaacagcacagataagcttttgtatcttttcagtatcattgagggagagctaagggggactccagggggcggacagggcttacaaagtcgaatgtgatcattaagagagccagctctggaagcaaacaccaagtatctgggctcaaatctcagctccctgagctagcgagtgatgttgggcaaatcacttagcgaccctgacctccttcattttcccttttattaactggggatatgcagagtcccacctaattgggtagttgtgagtattaaatgatgtaacccaggccaggcatagtggctcacacctgtaatcctaccacttgaggaggccgaggcaggtggactacttgagcccaggagtttaagaccagtgtgggcaacatagcaagaccttgtctcaaaaaagaaaaaaaattattaaacgatgtaaaatccaaatatagcacagagctgggctcttagtgtgttcccaatagacagagctcttctcatcacccaggaagactgggatatgcctggagtagaagcagcccttctgctcagtttccttcctctttgaggcaaaagaatagacacacacacacaaaaaatggctaggcgcagtggctcatgcctgtaaacccagcactttgtaaggtcaaggtgagaggatcgcttgaggccaggagttcaagaccagcctgggcaaaaaaaataaaaataaaaatcagccagttgtagtgttgtgtgcttgtagtcctagcttcttagggggctgggctggaggattgcttgagcccaggggagttgagggttgctgcagtgagctactacactctagcctgtgcaacagagcaagaccgtgtctcaaaaaaaacaaacaaactggctgggcatggtggctcatacctgtaatcccagcactttcagaagccgaggcggtcagatcgcttgaggcaggtagttcgagaccagcc

SEQ ID NO: 65534 - DNA, 725 bp, Homo sapiens
gggacagtcctaagtttcccagctactcatctccaaccggattctcagaagccaaaatatggattaagcacttccatgtctcaggaccacaaatcacgggctctgttgctctccttccttcttcctgagtgaccttaggcccacagaagataactagtacctgagtctctctggcttgggggccttgccctccatgccccgcccaggtgcccacagctgggccctgcaattgttaaacattacataaactggataaactgccttgatttccaggaaataacaggtttggcaactttggactcttgctttccttgggaacttacttctgaattaagacctacgggctcataggggacattccactacagccagaaatgtctctccccagggtagaccctcctactcacggccctggcatgtttgacacccgcatgtacttatgaaaacctggagccccacagtgacagtacttccttcttctgggctgcttgcggcctgagctccctggcagtgtatgctgccagctgctcacttttgttttcaccttgcaattactggacgggaaggctgcaagctatactggagtctccagccacacgccaggtcccagcccacgtgtacttcagggccattcccaggaaaaagctgactcctactccttcaaaacaaacaaataaacaaaaaacgaaccaaatggaatgagctcatgatagtacctgaatttg

SEQ ID NO: 65535 - DNA, 3021 bp, Homo sapiens
agtgagccatgatcatgtcactctagccctatctaacaaccaccaccaccaaattttggactttaaagggctaccactgagaaacagtatctctgtagaaacactcactgtttgttattgtttgtttttatttggtagagatggagtctgtgctatgttgcccaagctggtgttgaactcccggcctcaagttatcctcctgtctcggcctcccaaagtgctgggattataggtgtaagccatcccaaccccagactccacccctactgccacccgttgtttttttaaaagatggtagaaattaaagcttcatcttagctttcgtgacaagcaagagaaaaaaaaaaaaagaaaattaaagcttcagttaggtcaaccgatttaacaagaaaaaattcttgacttggcattttggccactgagaaagtctcacttttttccttgcatatttccttgcatatcgtatttattgtacataaatcttggcttccatcttcagagagcaaagtctttggtctaaaaactgagaaaatactgctcgatccttgcggtgggtagtgattagaagagggcaggacgcgggttcctagggtgcaagtaacgttctgttaattgatctgggtgttcacttggtgaaaagtctggaagctgtacctgcgacatcgcactttcctaatgtacgttatatttcaataaaagatttttttaaattggactgcttgaaagttatttttaaaaattacatgcttttgagacttgagcagctgcaaaggctctgttttctattttgatcattctgtttctcgagatgaccacatctttcagaggaaatgagtcaaagccactctgtcttgcttttccagctgagcatgttctgtttcaatgaagtaatgaatgaacttggccgcaccacccccaagcctacaacagcaaacagagggccctcggccaatcagcaggcactccgggttttcaagttgagttcaaacaggaccaccggaggccaatcagagtgcgcggccccgccccgaacgcccggccgtgaccaaccacgaggccggatgagccaaaacacagcggccggccaatgctggggagccccacggcgccgagctccgccaatgggcgcggccgggcgaaaagagaaacagtgagggccccacaggccgcaggattcgaatcgaacgtccttacgggagccgggcgctggcggagcggcgccccggccaatcagcggcagtccccgaacgttgggccggcccagccccgccccgcgctgttgtttgtggtgtcggccgggccgcgggagtcgaaccacaacattcgccgggcgggcggcggcggagcgggcggcggagcggcggcagcagcggtgagcgcgagccccggagccccgggcggccggcctcccgcgcccgcgcagccccgcgtctgcgtccggccggagacgccgggccccgcgccgcgccgcgccatgtcggtgaacatggacgagctgcggcaccaggtcatgatcaaccagttcgtgctggccgcgggctgcgcggccgaccaggcgaagcagttgctgcaggcggcccactggcagttcgaggtgcgagcctggccgccgcggggccgggccgcgggggtcggggacgccgggcggcggcgggggcggggagcgctcctgttgtcggcccggaaggcgatcggcgcccgcgagcgggtcttacgcgggaccggggccgggaccggctcccctctgcacgtggggcagccgagggtcgggggccgcgggccgggcgcggaggcggggagagccggtggggggcccagccgctgcgtttcctgactccgcctggcccgccgtgtcactgccctgtttgtccgcagaccgcgctgagcacgttcttccaagaaaccaacattcccaacagccaccaccaccaccagatggtaagcggcggcgggcaggggcgcgggccggggccgctgtcagcgcggcggtgacagccatgttgccggggagcgccgcgccgcgaatgtaaacaaagagccaaaatgtcttccaggaaagagcggctcccgggccggcgctggcgcctccaactttgaggcccgcctcccgggctgctgctgcttggcctcgggactggtgcccggcactggtccctggggggaagcggcgccaaagttggggggagggggagagggccgggggcctggcgaggggctcaggagctgggggaccccagagccaggggatggggagggggagagggtgatgcccggacgtctggggcactgggaagcccgcgcgaagggcccagggagggcgatgggggtgcttgtgtttatggggaccccctcgtgctgttgagtggtttcccccctccccctccacacacacacacacccagcgctacagggaacaggaaaggcatgaatccaccctggctcaggaagccgggctctacccacaaagatctgttcaaccttccgaagcccaaggggactgggaagttggaaggacatacatcccccaagccaggaggacacacagattttgacccaagataaggccaggaatgtgtctttaatctctgtgttgagctccaccagcccagcacacagagaagtggtccggggtctggatttgctttctttttcattctagcccaggcccaagcttttgccctcctggccatggggtactctgctttcttgaggcccaggacatctctcctgtaccctacccccctagttacctattagccctgctgggggaggaggggcagggctcagcgatagggatcttaaaacattgttccccaggagagctgttgtggactctaggtgcatttttgggatttttaacacttggtgcccttgcctttggctctctgttttcatctagtcacagaggacaagtagaggggtctgtcttgaccttgttagctagtttttctcagaatggctgatgctgtatataaatcaagccaaaatggcatttgagtatgatgggagcatggtgctggc

SEQ ID NO: 65536 - DNA, 439 bp, Homo sapiens
ccagttggaagtggagaaaggcactacagacttgaagtgggaggacaaaggtacaggggacaatgggttttcttgagaactggccgagagggcatatctggttcaaaaccctcattttacaaaagcagagagaagctccagagaggttcaggaacttgcccaagcttacacaggcaggccaccacaggcctgccagccatcatccctgctgttctctggcggctgtttgaggagacaggcctcgctggctggcggggaactggggaagtcggtcacgatgctgtgatgcaattggcctccacccccacccttcattcattgtttcctgctgccgagaagtcatccccagagggtggggggggggcagggagtagtggagggaggaggggaaaggtctgggtggggccaggcctctgcattgggtcctttggcctccccc

SEQ ID NO: 65537 - DNA, 2974 bp, Homo sapiens
catctgtgatcccagctactttcgaggctgaggcaggagaatcgcttgaacttgggacgtggaggttgcagtaagccgagatggcaccactgcactccagcctgggtgacacaagactgtctcaaaataaataaaacagataagataaaacaaaatcttactgagcgacaagtaaaacaggtaagggaagtatttatgaatatgtatcatttatagtaattcaaaatctttcgggaatttgccaggaaagaatctaaaacaaacaaacaaaaaaaaccctcactgacttttaaaatgtgccctgctcccctctgctctccctcaaggtcaggtagggtaaatctgaaccactagatacacacagaagcttcgtttaaagtcagtgttttcgttggcctcagaaagaaagacaaacaatcaggggttagaaatagaaactaggtagtagactgcaaaaggattgatttgtttttttaacattcttccactctccaaaactccaactattaaaaaaaaaaacaagcagagctgaaaaaaaaatgactaaagttttccctttcttctacatttccccccagaagtttaagatatatccctgcaatcatttgtcaaccctaaaaaagtaacgaagtaactctatgaaaactgtttaaaatgtgaaaatggctttaaatattaaaagacgagctattcattttatgtcttagatttctaacaagtgtatgtagaaagggcatataaggctcctcctttatatcagagctctgggattctccaaaagagccaactagaaaagaggccatttcaccgggcgcggtggctgaagcctgtaatcccagcactttgggaggccgaggcgggcggatcacgaggtcagaagatcgaaaccatcctggctaacacggtgaaacccagtctctactaaaaatacaaaaaatgagccgggtgtggtggcgggtgcctgtagtcccagctacttgggaggctggggcaggacaatggcgtgaacccgggaggcggagcttgcagtgagccgagatctcgccactgcactccagcctgggtgacagagcgagactccgtctcaaaaaaaaaaaaaaaaaaaaaaagaaaagaaaaagaaaaagaaaagaggccacttagtaaacaactattcagagggccactatgagcccctactctgctagaaccagatactacttctacattatcccgatcatacaatattctcaaccatgcccatttcacagatgaggttcagggaaatcaagtctcttgcccactgacacagagctagtaagtggcaaggctgggagggcatctcagagctgtcagaccccaaaggcgacttaagaccaggggcttggttgggttaaagacacaaatgactgatcttatcccaagctgatttacaaagcagggtcaggcctgtcatttctaccaccagctccggcccatctgcctccctggaattgccttcttcgcactgccagtccccacacctttgctctgcgaccgcacctgccgcgtcggatcccccaactcacaaccacgcccgcgggtctcactgcagtgagacttgagagtggcggcggtcagattcccaggtcaactccagccgtgggaaaggaagccaagccctgagcccctttccccaagacacgcactccggggctccagaaagctcggcccgccccggggtgtgggactgcggagacgaaaggcaggcaggccgcggacccagtcacggggcggggggctgaggtcaccgagagtccgccccaagcctcccagctgcaaaaccggggagcggggggcggtatccgtcacctccaagctttgtccggctgggaaggcccgcgcctcccgccccaggtgcaggaggtggggcgggtggaggggagcgggtccctccgggcgcgaaggagagctaggcgccgccgcccccggcccggccctcccaccgcccccttactctgtgatgcgcttggccagctccgtgcaggcggccgtggagttggccgagaagactcggtagccggtgcgagcggcgttcatggccggcgggggaacggggcgggcgcgcgggacgcggaaagccgaggacgcggagggcgggggcaacagcagcagcttcttgggcatcgtccggcccgcggcgcggttacgaccggccccgcgcggggctgcactctgagtgcttccgactgcgagaccccggtttgggtggggaaggcgctgagaaactcggcgcaagcggggagagctccgaggtccgtgcccttgcgcaccccacaccactgactacagcggccgagccttcgcagcgcccggcgccgccgcctcagagccagaggcaaggccaccgccccctccgggcatccgaagagcgtcggctagagcgccctcaggccgccatctcggatgagggcagggagcctggcgactctctaaaagcctgttcttccgaggggcatgtcacaggttcgccccgcccctgctttgaccgcttccacgggagctctttcggtctcactttcttgggaggagcagcctacctcggtagtggccccaggtgtttccaactttttggccaggacccaacatgtccgcctccgaggaggtatacgatctagctctgcatgtctatggtagcacagcgcccgccccacgaggcgcgtgcgccggccggagattaatttgaaaagtagagggcgggggttctttccagctggttgaccgcagtactgaagcggccaaaaagtggtcttctcctgagcctgatctttcaggcgtttccgaacagatccccaaccctgtgtctgcgtgtaaggcaaggttccctgaacgtgccaaaggccctcttgccggtattcgctttcaatcaaaaaagccctccttctcctctttccatatgcgccacccctccgagacccactcgcgatgcgtctgttccacagtctttctggtgacc

SEQ ID NO: 65538 - DNA, 3542 bp, Homo sapiens
ggtagaagggacattctgggatgtctgaggctcaggcatgaaaagccttgcagcttcggcctgggtctcctggactgactactcctgggacattccctcctggagccctgccgccatgtcacacaaggggccacactctggccagcagccccagctgagctgacagctgacagccagcgcctgttatcatcgccatggtaaggagctgtctcagatgtttagccccgctgacgctgcaaccaccggagactccaagtgaggaccacccagctgagacccatcagccggcagcccacagtgggggttagtaaattactgcttcaggccactgcactttaggatggttcactactcagaagcagataatgtgaacacttccccagggagtcaagtgctttcagaaacatatgctgttttcttggatgaaaaattgtctttctagtgattatccaggaagggttcacacaaatgggatatcagggctggtggaaagacacgagtcggacaccgttatgagcccaagttccagactgtgcatagagccaactcctaagccaggtagccttgacctgagagcttcccagcacctccttccccttccccactgacccatggcttcctccttcattctcctcttctcatcattcctttcccattccttcacacatttcaagctgctattccaaaactaccaccatggaaacacggtcaggttcttagaaacctaacccatattgggaaataacagtgcggcgagaggtggaggcagcaggaaaattctaggctaacatcctagctggccaccagggtgcggtctcaaagtcctcatggtaggaaggtaagtttatcttcattttacacactagggaaaatagactccctcagtaattaaataccaattagctcttaagaaaaatgcattttcaaaattgtattactgttcaacagggaaataggatttaatttagcttttttttttttttaattcacaagagcgcctgctttgacaccacctagcgggagccactgtaggaacggcaaagccaggcctgaccccgcttctcgtagagcctgggtggcagccagtgctgtcactgttcccacattcccacgccggtgtctgggaggatgtggggagagattataatagtatgtgtcatttctgcagtatgcctgattcatttccagatgtgaaatagtcactgggatcactatagttcctaatgcctttcttttttttttctttttttgagacagagttttgctcttgtcacccaggctggagtgcagcggtgcgacctcagctgactgcagcctccgcctcctggattcaggcaattctcctgcatcagcctcccaaatagcagggattacaggcgcccaccaccatgctcgtctaagttttgtattttcagtagagatgaggtttcgccatgttggccaggctggtctcgaactcccgatcgcaagtgatccgcccgcctcagcctcccaaagtgttgggattacaggtgtgagccaccgtgcacggcctaatgcctttcaagaagttttctgtggcaattacacaaatctccctgaatccttatttagtttgttcatctacttggaaaacagccttcctttatactaagtcagtagttcccaaacttgtctgtaccttagaatcactggggaactctggaaaattccagaccaggctgggtacagtggctcatgcctataatcccagtactttgggaagctgtagtgggaggatcacttgagctcaagagtggccagcctgggccacatagtgagactctgtctctaccaaaaaaaaaaaaaaaaaaaaaaaattgggcacagtggcatgcccctgtggtcctagctactcgggaagctgaggtgggaggattgcttgagcccaggaggttgaggctgtagtgagctgtgtttgtgcctctgcactcccacctgggtgacagagaccctgtctcaaaaaaaaaaaaaaaaaaaaaaaagaaagaaagaaaatgaaaaattccagagcagtgagtgaagtcatagtcattggcagtggggcacaggctctgcaggtgattcctacgtgctccctagttggaaacctcagtgctaaatgaccccagaagtagatgcggccctcagccattccctaggcaggcacccttgtgtgcatctgttgccttctctccagaaagcagcttttcttaagggatagcccgaggccaaactcaggagtcctcttagtacttaccacatccgagcgtggtggcacgcgcctgtagtcccagctactggggaggctgaggcaggaaaatcacttgaaccagagagacggaggttgcagcgagccaagattcctttttaaatagcggacattttaaataataataataaaaagaaaaataaataatctgtggtgaaattcacataacatcttaaagtgcataatcagtggcattaagtacactcacaacgttgtgaaaccactacgtctatgtagttccaaaacatcttcatcaccccaaaaggaaatcccatgcccagtaagcagttctacctcattctccctctccccagagtctctggcaaccaccaacctgccttctgtctacaaatttgcttattctggacatttcgtagaaattgactcatacaataggtgaccttttgcatctggactctcactctgcgtcatgttttcgaagttcattcacgctgtagcatgtgtcaggacctcattcccttctatggacaaataatattccattgtgtgactaggccacattttctttatccagtcatccatcaacatttgggttgtttccacctcttgactattgtgaataatgcttctatgaacattcctggatgagtttttgtgtggacatgtttttatctctcttaggtacagaccagaactagaagtggaattactaggtcatatagtaaccctatgcttaattttttaaggaatctgagtctctcattctaaaagacatttttctcaagcaccggttggtaaatctggcttagttttccacatctgtgaagaccattttcatgggtgacatgccagccttccttgagcatacgtgacacgcaggctgttggtttagaactagaattaggttcctgctgttctgctcagggtccttgcagatgagaaacccctgccacactgccctcctgcagcagccgtcacccagacagccacccaaccatgcttcttttttttttttttctgagacggagtctcgctctgctgcccaggctggagtgcagtggcacgatctcggctcaccacaaactccaccttccaggttcaagcaattctcctgcctcagcctcccaagaggctgggactacaggcgcgcaccactatgcccagctaatttttgtatttttagtacagatggggtttcaccatgttggccaggctggtctcgaactcctgagctcgtcatctgcccgccttggcctcccaaagtgctgggattacagtcgcgagccaccgcgcccggctccaagcatgcttt

SEQ ID NO: 65539 - DNA, 3823 bp, Homo sapiens
agaatgaggggggcaaaggccttggaggtgaggggggcagggggttaggcgccagggaggacagaggacccattgtgcggcctggaaccggggccagagggctttgcccttcgcctccctcccgcggggccttccagagccaggaggggagctggggcccggaggcgttggataaagagcccgtgccccgcctccccttgccaactcagtttgcagtcaaccccgcccccgcccgctccgcggactcaaggctggtggtagtgggcctggaggcgcaggatccgacctttctggggccccaggaggaaaaaaaaaggggggaccctgaaccaggtgggctttatcaccacgaactcacagtgcttccctgtgcctcagtttcccctcttcagactctatggctaatgacagagcttttcagatttggtggaaatgctctccggggcggggagcagacggggaaggctgccccagctaatctccgcagccagtaccctcgaaggctgagatctcggggagcacagcctccgattcgcgttttctaggcaccaaagtccctcgctggaggaagaggaggggaagaaggcagaggagaggggaggggcggacggatctggtcctgggctcccgcgcggagccccctcctcccacagccgccgctcgcgtccccgcagcgcatgaccgcggcactgcggctgcagggctctctcccccgcccgcgccggattcctggagcaagggggtggggggctcggaggtgcaggacccatcattccgacacgcgccgcgacgccaggagtcggggatgacgcccctgctccctcccctcgttcctgtttctcggagtttttcgacccctgagcgcgtcgctgagtcaccttcccggaacgcgctcgggacgctctggacccagcggggactgcccgggggccgcgcaaggcgaaggcgcacccgccgatacgcgcgcggagctgcggccccagggaccccgcgtcccagccagtgccccccgacccgcccggggactctcgggtcccgcccgtctgaccccccaagtgttgggaaacggggccgagctgcctgggtcctccggaagagaagacaccgcggaggcgtgccggagttcagggcgccgcccggctaattggctgcgtgctcctcctggacctgcctcttctcgactttaagaagcgatgagagaggtgtgtgggggcgggtggggccggcgggggcgcgcgagccccgcagcctcccgcaggggcttggtttctcctaactctggccctacctgggcaggtcaccaatgggccttggcaacttcttcctccgtctccgccgtaaccccccagggatctaactcgaggtgctcgcggacacgttctgtggcttgccgcgataagtgtatcacaaacacactgacaaacgcgtccctactggcctccaaagaagtgacaacttctgagcgcgtttccggcgccccttcttcacgctgagccagagggggcggggggcacgtaccacatgcttggctttccaatcccgacgggggcccccaggcccatctacactgtcaagcctcctctccggctcggagcccccggcctgtcgcctgctctacccgggacagcgcgctaggcggcctcaggctcggtagcccagctgcagcgtcgggaagttaaaaataacctccgtgggagcgcgggggaggaagaaagagggaagctggtgggcggcgggcgagacgccccggcctggagaggcgccccgggtggcgtgcgggcctcgaatttcgggtgggctagggcagagcgcgcaaaaggggcgctgcatcccggcgccgacagcacccgcgggggcgaggtcgtggcgtcgaggtgaaaccaagggtcccccgggagagcggagccgcgcgcgcccggcgctcgctccgacacgagttcgcgcggagcccgcgcctccgtctgcgctgcgcggtcgctttcgcgcgccccagacactgcgctcgcggccgggcccgggactccgcgcctcgcggcctgccgcctcagctcacccggccaggtcgcggcgccgccttctagccagacgcctaggacgagcggcgggggcgcgcttgccgcttcctaggacccgggcgggaaccagctcgtggcccggccgtgggcgcgggccgtgccggaggcggcgcgctgaggccggaggcgggcagaggccgaggccgcgccgggctcaggttccacccccgggagcgcggggcggagccaggccggcgccgaggctcagtgccctccccgctccgcggcgccggctgcgaagttgagcgaaaagtttgaggccggagggagcgaggccggggagtccgctccagcggggcgctccagtccctcagacgtgggctgagcttgggacgagctgcgttccgccccaggccactgtagggaacggcggtggcgcctccccagcaaaccggaccgactgggtagggccgcccaccctgccttcgcgccgctcgtggctcctgtgcggcccgccctcgcggggccccgggaactgggccacttgtcgcttgggcgagagcaggcggcagctggtggcccggttcgggcttggctttggcgcgacccgggagcggctcccacgagcgccgcgcgcgtcgcaacggagcggggccctgagaagcgcgcgccgcggctcccaccgctctggagctccgggcaggggacacggcaacctggatggctggggcagggatcctctcccagaacttcgtgcccagcaatgtccgctcaagttctgggatttttacgcagctggactcccctccccctggcagccccgaggggtgaggagctagtccgtcggagggagccacggggctctgactcatccgtcgggccggaaccgaaccccaagccccagggagaaagccccggagcaggcgcccttctcagggattgtaggcttagtcacacggcgggggcgccctcggaggcaccggacctcagctctctggacttcccgggaacctggctccccgcgcgtggtcccgggatttagtcgggcgctccccacctctggcagctgcggccccggactccgccagcgctgtcttctctccctcaggtccagccgccgcagggaatgacgccggtgctcctgcagccacggctccgggcggggaaggcgagccccacagccggccctgcgacgcccgcctgggcagcaccgataaggagctgaaggcaggagccgccgccacgggcagcgcccccacagcgccagggaccccctggcagcgggagccgcgggtcgaggttatggatccaggtttgtggggttcctgctgggaagggctgtagggggattcctgttcctcgccaggaatgatggaacgcccagctggacgaaaggggctgtggacgatcgggagaaacattatccctcacgaggccagaagccggccgaatctgagccaaggaagggggtggcaggggcgccgcgtccccaccccaggtctcccagcaaaggccgctcctctggccagggtcaattaccggggtgtttcgggcaccaagttcccacactagtgccccattgttacccgtggccccctagtggtcggttgcggacgtggcctctttggttttgttttctcagcgggcggcccccggggcgtgctcccgcggccctgccgcgtgctggtgctgctgaacccgcgcggcggcaagggcaaggccttgcagctcttccggagtcacgtgcagccccttttggctgaggctgaaatctccttcacgctgatgctcactggtgagtacctctc

SEQ ID NO: 65540 - DNA, 1962 bp, Homo sapiens
gagatggggaaggtgcaaagaggcctctaatgtcctaaagcaaaaacacacggaaactgaagggaacagaaactgaaattgaggtggaactcagcctctccaaggaatccttcctgaacctgtctcatgactcagcattcccagccgaaggatgacagcagcagagcggacaggaggtcaagttggagctcctaatggagctgaccacttctgaggcaacacagaaatgccagttacgtggagtgtctgcacacttgttttgctctaggaggtggagttggggaataaaactgaactgcagttcagtgttggaatgaatcagactacagaggttgcttcattcaacattgaggggcagtcaaaggttctctagaaatgcaatgtgtttttgacagttattttgagaatgactgaggggtcagggaatgaaaagagtggaatctgcagaagcacaccgccagtgcgaatgcagtgttcctcccgtcctgctccctacccatcatctccctccctcctgcctgcccactggcacaacttccacctatcccaacatcctgtgcctctctccttcctcacttgtagtacctcctattacactaagactttcaactgtttaaagaagggatgattaatgccaaccacaaggcttgtgattcatgttggatcagggcactcggtcacgtatagtaatgatctctgaatcctgaacttaagtattctcaggtgagaacaaagtacatttagttcaatttgtattcagattcctccacttagaagtgtgacactgggcaatttacttaacctctctgttcctcagcttccttctctggaatatggggctaataatagcaccacagggttgttgtgagcgtgaagtaaaacatctaaagcactaagagtgcctggcacacagtaacagtatcctggatcatgactgctcttattaccttaaaatataaagcaatactctatcatctttgtaatttataatctcattaccagtcttgagaatttcaagagacctttcagactctggaaacatacatacatacatacagattcattccatccccctcctggaggacggccggggttactttaaatgtgcattactgaatttctcacaaagtaacagaggtaggaagttcatgagtatttctagaagaggtttaataaagtcaaacctataatccatctggtcactagcaacacgagccattaggaattcctatgcccctgaaacaaccaccttccccacaacccgcctcgtgcaccttttgcttcccaaggtgcctctttggtgcagcatcaccctctttctcatggaagtgatcttctgaaggcacagggctggctctctctgacagacatcagaatgctgtctgctaataaccaagtggccatcctaggcttgacccagctacacttctggttattccatccgagcaggatcatatcggggttaggaagatagacctcttatttcattgcagagggagaaaatgaggcagtgacttggtcaaggtcattcagagtaggtgacagccaggaagagcacccaagggttttggcttccaatcacagtacaaaacacacacccttcatctggggaaagtacccttgagtcaggcagcagccagacagaagcaccatcagggcactgaggcccgagggctagaaggggaaaaatcaagggacaaagaataaaatcacagaacagctgttaagagtctacaagtgctgtgatcctatctgaataaaacgcaatttagattcacttagtcctgcatcttggttaaccttatataacttcttcacattacatcactaagaacaattgcttttaatgggcccagcacccagacaagtgagacaaacttcacgtgccatgatgctacacctaaatagctttccccatggaaatgctggccagcgtaggagccaaaaataaactgcaaagcc

SEQ ID NO: 65541 - DNA, 1063 bp, Homo sapiens
tcatttctggatgcacaatgcagtaccgagctccttgggggtcagcaaaacgccgcactggtgtaacgccgaacgcgccccagaacctgagtccccacgggagtcggtccacgtctctaaatctcgaggccgacaccacagcataacatgtcttagaagtcccctcaagtcgggaagcccagggcccgcccggtcccgggccagcagtgcctggctggcgtgtgcgcccagagctgctgcaatgactttgcatggagtgtaccctccactggggctgtcctcccgcgtcggccactgcagtggcaccgctccgggcagggccctgcacgccgtccttccctggcctcggcccggccgccgaccccctgccgcccgcgccgcccagcccccgcccgccgcaccttggtctccttcacatgctgcttgacgccctccgggtaccactggacgcgcacgtagccgcggcgcagggggctggcccggccctcctcgtggcccgcgcccccggcctcggagcaccccgagctcccgcggccctcctcctcgccctccgagtccgagtcctcgccgtggatgaggcgcaccagcccgaagtgcacggagccacggtaacggcccgacaccaggtcgtgagaaaacagcaggcgctgcgagccggcttctgggccggagtccgaggacggcccggaggccgagtccgaggcgggcgccggcgccgggacgggggctgcggctggggccgggactgcctccggggctggagccggggcctgggctggagcgggagctgcgggcgtgggggctgcgggatccgccataactgctctgcgcgagtctcgggcggcggcggcgacagcggcggcgaacgaggcgcggggaggcgggaccagcgggcgccgggggcggggccatagcgcgctgacgtgtccctgcgtggcgccgtcgtcagggagccgggatgcagttgctaggagccaccgcctcgtcgctaggggacgctgaagatgccgcggggggcgggggcaggatggaatccactaagaaggggcgagaccagtgagga

SEQ ID NO: 65542 - DNA, 412 bp, Homo sapiens
ctcttgccaccctggaactggtgaggggcaggagaaaaagaacgggtgaggactctgagtgtttggggtgctggagtgagtcctgcatgcaaaggcctttgattcatgaagaagggacagcacctaactgcctgggcagcactgctcagcttgcaaaggacttttacagacatgatctcatttagttgaggctaagggtgagaggcggctgtcatcatcctcacgggctggcaaggtcaaaaggggcttaggccagggttcaaagtcctgttcccactccaaaccccacagcagatcctcaaccctcctcttccagatctcttttttttttcttttattttttgagacggagtctcgctctgctgcccaggctggagtgcagtagggtgatctcggctcactgtaagctctg

SEQ ID NO: 65543 - DNA, 4338 bp, Homo sapiens
ggcctcggccatctcccaagtctgtgccatggaccggcagccacgcccctacctgaagccaccctaacaccattatcacgatggctccccgcactgctcctgccatggccgggcactgcactgcaggctgcacacctttaccacgggagtcctcacctcacacaaccctccaggtagattactgttagtgagcccactgtgcagctggggaaactgaggcacagactaattaagtgaactcatcctactgagcacacacatggacgactgtgcccagcagcccctggaccttggcccagctcctgaagtttggaatcctcctccatccttttctgctggtcacaaggttcccctcacactccaaacagtgtctctggcccacctcctgcactgcccacttggctgaaaccactttcctgcaggagccgggcactggggctggaactgccttccagtagcttttggaccacaaacaactcccagctgggcgcccggatacatttgctgaaggaggggccgtggacacggtggcgctttgtacttcccggaagatgtgtttttccttacacccatcctaggtctcctgggaggcaaaacgacgttccgggcaggcttggtttccctgtgaagccgcccgtgccctgagagctgtccctgcctagccaccaccaccgccgaggtcagcctgtacttgggcaggcgcagacgtccccgccactcctcccccagcctggctcagctggataggaaactgggagccgcttccgacagccagcgcttccacagccggtgcagatgcctgagctcactctggaaatcccctggggcagatggggcagcgccgaggcctgctccagagtgcgaggcacagagatctgaggagagtgtggagggggagaggcagccaggagggcacacgtcttccctgtgctgtgccagcggcaggcgggggccaggcccaaagggaagcaccagccagctgagccatgccactcgcacactcacgggcaggcgtgcacagctccttgacttctgctgtcatctgtcaccttgtctggggcagagtttacacagcaaggacagaaaccttggtggagaggccaccacagtatccagagctgaggccacaggaaaaacagcaccactgaccccagagcaggactcgggccccaagtgcgtcacccaaagcatttgtagtgtgatttattcctcctcttataggaacaaaagtccccctcctgggctggagagaaagagagtgtgtgtgtgtgtgtgtgtgtgtgtgtgtgtgtgagtctgtgtgtgtctgtgtgtttgtgtgtgtctctgtgtgtctgtttgtgtgtgtctgtgtgtgtgtgtggttacaccaggtacagacaggtaggagtcactgagggtttgttcgtggggctcttgggtggggcctgagggtgggcaactgggttcacacccgagctccactgccgacttcctgaacaactttgtacaagcctgggtgctcagccctgtcccttgagaggctcacagcaatggaggccacttttgttttttgtgcaaatgaaaaggtgggagtttcacttcagccttttacagtcaagagaccaaaaaaacaaaaacaaaaacaaaacaaaacaaaaaaaacaaaagccaccaacaccaacaaaaagaacccaagctcgaaacctccaccagggttcccaggcaagaaggctgggtccagaagtgaacaggatgggtataatggctactgcaagaaaacagggagggagggcagcgaggtggccccagctcctgggcatggacgtggctgcttcatccgatcctctcccaccgtgccagccacccctccttgttgccagaaaactggaagtacattcctccagcccaatacaaacaactctgagtcatccctactggggggccacctggcctgtgctttgatgtctcccatctctcacctctgctcagctaacaccatgggcaggggtgcctccaccccatcagcagctgggcccactccagggctcgtcagctaacccagggtgccctctttattgcaggacaaaagcagcctggggaccccccaggaattaggagccctgatactccttggatgtcactttcaaaaggtgtacataattggaggagttaggtgtgagttcagaagggaaaattccagcaggtcacatggtatcaggcaaccatgccagcttcagcaatccagctttgggaaaatctatgggaagagagctcgccctctgcccaccctcccagcccagggatatttgagctcaagggctgcctcagcccagccttcctgggagattgccctggggttaagcaccccaggcctgggctgcaagggggtcctctgttcccaacctctcccccacagcacctagaccagcttcctgcagggccagtggagattgggaaaggcggtgtctcatggcaccaaaggaagactcttgtgaggggaataagtgccctcacactgccttacccctcatctcattcaggtttattccaagttcctcccctaaccactctggaaaactgaggtagtttccccagtgagggagcatcattgagaaggaacctgatggaccagctgctgcgcagggtttctcagcctcagcacagcccaacaccttgggctggataattcctcgttatgtgggctgttccgtgccctgaagatgtctggtagcgtccctggcctctacccactacctgccagtaacaacaacactcacttcccctcccaagtgtgtgacacccaaaatgactccaacattgccaaatatcccatggcaggcaaagtcgcccctggttgagaaccacagctctaaaacacgcctccctttccactgcctgccctacggacagtgagggtcgaataaggcagatgctggtctcattatattaccagcaaatggcacacactgggggcctgatgccagccgcccaggcaacagcagcctctccccaagtggggtcagctccccaccgccttctgctcctcagacacacccgctgccaccctctcagtagctccaaccctagagccccctccgttaatctttcatggaatggggcagggccaaaacctaggcttcctttgcgccctggcgtgggagtggggcggggtctgtaccctagggaacttatccgtctctatcccaatgccctgggggaacatccgaggggccaaacaggtaaaaggcaagcccagggccaaccttccccagcccctccatccagaagtcaggactcctgggtccaatttctgagctccggtccagccctgctgtgtgagtccctcatccccacccccgcacctgtttccaccttggctggctcaaccaacaaacttcggccccggtccgcccggtgctcacccgggagaaagtggaggggagagaagggtctgaactgcaggcacttctgggacgcaggcgggactgccctgcgcagtctcctctcttcctccggaggtttaaatctctgcccaatcgtcttgcccctacatctggcgccccgtcgcccagggaccccttaggcgtcctgtccgagccgagccctaggggccagcagaccgggtccagcggccccgccggcgccgtctgagccagcccgggcctccagccgagcccacgtgggacccaggcgctccgcagggcgggcaccgggcactgggcacccttcctggccgcgcaccaccgctccagggcaggctcgggcacaacctcgggacccttccggcgcctgcggctgggcggccgtgagtcctgccccgctcgtcgccccgcgctcacctccctgcggccccaagtccccgggacgcaactccgtgcggcgcctgcgagcggctgggcggtggctcctcgggggcggggcggcggcgctccgcctcttccctacctgcgcgcgggcggccgggaggcggggctgggctccagggggcgtggccgggctcatgggggcggggcctggacgcagtctttgctcagtcggcttcctgggttcctgcctccgccctccacccagctgggtccccgcctgggcagagccctgttttcgcctgagctggtctcttcagggcgccgtcctttccctcttggcgtcctcactccaccccagaccaaacacgtcatctaggtcttgattgccgtcttcaagtcgcccctccccatcaagaaaaagcacccaatctcccatccccttcttccagcgccctcatcctcaggccaagtgggcctgttcccttgacccttttagtctgtagtcacactctctccgggaagctgggcctgaacacctcctctccctcct

SEQ ID NO: 65544 - DNA, 582 bp, Homo sapiens
gcgtccatcctcctcctcctcgtacctgccttgcaaggcaggcttcatgttcactcctgcagtgaacatgaggcaggaagagaccgcataagttagaggtgactgtggctcagaaaggctgcgtgacttgcccaaggtcacatagcagtgagagatggagtgtgggcccagagccagcacgctgtcttttggcattgcctccctggaaaggcggggcccgcactgtcctctctgccctgcactgttttagttcacacagctcactcttggcccgtgccgggtatttgtcttgctttctaagagtgtttatttattgattctttggatttctacttagttcctcccctgtgccaggcccaggagacaaaggcggaggctgcactcaaggagttcatggtctgggagacaagactcttcctgcgtgtcagctgagtcttcccaggcagcccgcaggactcccaaggggcagaggctgtttcctgcttctcctgcagcccacccggggctggtgacctcctggtcccttctcagggagctgctgctgctgccgcctccatcgtcgggtgggggctgggcaggcct

SEQ ID NO: 65545 - DNA, 2156 bp, Homo sapiens
ccgcctcggcctcccaaagtggtgggattacaggtgtgagccaccgtgcccagcctagaaggttctttttttttttttgagatggagttttgctctcatcacctaggctggagtgcaatggtgcgatctcggctcattgcaacctcgcctcccaggttcaagtgattctcctgcctcagcctcctgagtagctgggattacagatgcccaccaccacgcccagctaattttttgtatttttagtagagacggggtttcgccacgttggccaggctggtctcaaactcctgacctcaggtgatccaccggcctcagcctcccaaagtgctgggattacaggcatgagccaccgcacccgcctaagaaggtgcttttgaggtgacaacagtgttctaaatcttaactgggattgtggttacatgggtctatacacttattggactactgaaccatacattgtaaatggttatactgtattgtatgtaagttacacgagaataaagatgatttagagagttagaaacaaaacaagaatgaagaatgatgcttgttttgctcaccatctagcagaaaagccagacatacaaataatcatcaaacagtgggatgagtgttcaaagtatgttgaaataacacgaactcccatttatcaagtgcttaccttgcgccaggcgctgtgctaagtgccccgaagcactgatttaacgaagtcccgtgatgtttggatgatcctcctcctcctcctcattttacagatgagaaaataagactcagagagaagtgaggtgacctttgccaaggttactcagctagaatcagcagagctgggactttcctccaagtcctcctgggttgcagacaatgtgctaatccacctgccaccaggaaggtgccacgatgaaacagctcgggaattgttgcagcgtctcagtcaaaacttcgcaggaagtatttaagtacaagctggaatttgcagagcagagaagagaatgcagtgaagggactttcaaggcaacaggaacaaacaccaccacaagcaaaggttatgcaacagctgtgagaaggcaagggtttctgggcatggagagacatgcccaggaaataacagaagagatccatggagcattatatcgtcttcaaattcatttatttttatttttaaaaaatcaatttttgagtaatactctagaggcagtggctctgccaagcagggaagtcaaatgcatcgctttttttcctgtacactgttggcaagcacagataatccacaactccaacgccatctattctcaatgcgtagggtctgtgttatatttctcctcttccagaaagttaaagctcggtgaaacttaaagcagtgatcccaggtttttaaatttttatatttttacttttcttccatctgcctggtcatctgcatgatcccagctttctgaacaggatttgtgacactgtttcacggtcctaagaactctcaggaaaaaatcctctatattttcatgacaggttttctaggtgggtgaattaaagtctctggagttaagcaaaaacggtccactgtcatagcgtaatttttttaggaaacatggcatggtggctgagaccatgggtttttaggctggattgtttgagttcagatcgcagtgccttcacttatgagttcctttaacctttctgcaccttgacttcctcagctgtgaaatgggaaggtgggggggtgggggataatgacagggctgtcatgagaatcagatgagacagtgaataaaaggtgcttccagagtacctgccacagagtaaacacttcatatacacatagctgttatgatttccggaaggaggcttgcacacatgagctcattttctgtattctgccatgatccattcttctgggaagaattatttttaaaagatatcatttaggatgatttgactgaaacagaacacccaacttaaaatgacttaataagatttctttttaaaatctcactttttatttatttattttttttgagatggagtctcgctctgtcgcccaggctggagtgcagtggtacgatctccactcactgcaagctctgcctcccgggttcaagccattctcctgcctcagcctcctgagtagctgggactacaggcacccgccaccacgcctg

SEQ ID NO: 65546 - DNA, 2601 bp, Homo sapiens
ggttgccgtgagccgagatcgtgccattgcattccagcctgggcaacaagagcaaaagtccatctcaaaaaaaaaaaaaaaaaaaaataataataataataaaaagagacttctgctcttgaagagcttacaatcaaatgaaaggaggtaaacataagcaaatgtggtaatttgaagataagtatctgcaacatattaccatctgcaggacaatataacccacaccgaaggccacagagatcactgttaatgggtggatgagaacagggagactggaatggagaaaaggctctcggtcttgcaaacttaaactagctttcaaataggtgcaaattctggccctgattgttgatgtcgtttttgccttatttttatttcaaaaacgaagccagaccgggcgcagtggctcacctttgtaatcccagcactttgggaggccaaaacaggaggactgcttgaggccaggagtttgagaccaacccgggcaacatagtgagacctcatctctgcaaaataaaaataatcagctgggcgtggtggcgctcgcctgtcgtcccggccactcaggaggctgaggcgggaggatcacttgagcccgggaggtccaggctacaataagttatgattgcaccactgcactccagcctgcgtgccagggtgaaaccttatctcaaaaacaaaccaaaaaaacccagaaacaaaaaaaaatgaagccaaggtgtttgcctgaaaaataacactcagaagagcagtgggtgttacatcattctccgttcttttcgtaattcagctcgtgacacttgcctttttttctcttctcggaatgccccgggcccctgggcagccgcggaggccgagccccgtcgctctccagcgctccttgccgcccgcgcctcggcttcaccggcctcgccccaaacttaaaaacacctgagcaggaggttgaacgattccctcggaatctctcctcttcactaacccagcgaaccaccccaaatgcccctatcctcccccaaataaaatccgcagagcaattaacaaagatactcggccaagccccggtttcctcatctgtccctgccccctcgaactttctgtgcttccccagtctcgaccagggacaaactgtgttgaagctcaatgactttctggcagaagtgaacctccagcttcgttttctgacagccgtggttcttcacaggcctggtttcccactccggaccctccactgcccctggtggcggccaccatcttacccccagctccagggtcgcgctgaggacgcggccagcccccagccgccgtagttttgaactacatttcccaccagccctttctcaacatcgcgagagttccggagagattgccgagaagacttgcgcgcaggggcggtctcgcgttcttttcgaggtcggccgcgtggctggaagacatggccactccagtcggtgttgagcacggcgagcagtctcaggcctttagtgatgatggtaaggctgcctgggtgggaaaacggggtcttccttgacacgacactaacatacttggcttcccttcctcagagacgaagtggtgacgataatctcggtttctccctcatagggtggttaggagggttaaaagtactggatgagaaaatgctttccaaacgttgagaaaatgttactatgtgaagggagagagctcaagcccgtcctcggcgtcatagggccggcttctgcgggggagagcgcctaacaacctgggcagccccgtgcgcctccgccgcgcgtgtgctgagcgtcatgcccaggggtcttcggtgcccgcgcacgggcagactctgacgatggtggttcttaattcagcatcaggagtgttaacgtgtgaagacgtgattccgcttggagtgtcttgaggacggccccaatcggtagttcatatttagctttacagataggagtcaataggattgtaaacttctggaaagccgtagttttaacaacgagccttttttcctcccccagaggcctttctttgtttggcatctgcagagacggtgaaaagcagagctccaggttgaaggatcagagtaatagatggagcccttaacatgagtaagagtgggtgcaggcagggcctgagtggtcactagaaatgagaaagcacagttggtgccatcacatacattcacctcctgctttattctgaagttcaagtatgagaatacgtgttgacatacaagccagctatggtaagaaattactcaaaattcagaatgctaattattttaatgataaaaatgagtagcgtctttgcccgtgtgatttggggccactaggtgtcattgtaaccagcgtggatcctcgttagggcatgcagggatgaaagagacatggcaaatgaattttggatcgctaggatttaggaatctttgttattggctgagctgaggatgatttaaagttatccctgtctgaaatggtatcttttgtgaggaggtctgacttgctgaggctcagctgtttaatacaaatctggagaataaaccttaaggtggtttctgttagaatgaagcctgttatccttctcttttagattaaaggtggtggctgtggcctt

SEQ ID NO: 65547 - DNA, 1030 bp, Homo sapiens
gcatctcagactgtgcaaagccgtgtagtcatcaagacagtaaatcccagggcttggttaagtgctgtgtgataacttgtttggatgagacttaacttaaaaccacttacaataaacttgggaaactaccgtcagctgagttcaaatttactgacgccatgatatgaggatgaaggtttattacctggtgacatcatcctgttggtgacaaggtggtgatacatctctaatgggacttccctcagtggcaggcaggctgccaagcaactaacccccatcaagtgccagaccctcccagtgttctgagagtcatctccatgctaaacagcctgcgttttatatgatttctctacccagccaaaaaaaaaaaaatggtccatcatgtacgcagttatctagtcttaagttatattctggcttttttctcccactttattatggagcagaagtaagcctatcatgttcttagaaaggctcttaagaggtgtcctggagtccttgaatcactttagcatctggggtaggatgtgccaccaggaggatttgggctggagcgtgtgtgtttgcctttgacctggactgctgtctgatcttgctgaacactccaccgacatttcctaaagttgctcagtgccaatccagcaaagcagtccattttcccttggccaagattgagatgtattgttttagatacagaagagttcttggatgagccaaggacaagctggggtgtcctatattgaacagacctcgatgaaaatcttgaattcaccccagtgccctctgttggcaagggaaggtgaagattgaaaagttaaaaaagcttttggccacttgagaggatcagggccgcaactcttgaagaagcaaagggctcagtgcattggggtcagcgctggtacagctgaaggatgccggccttgtgcaggtccctccacagggcagcttccagggacagatcgtggtttgcataaaatatcaatggcttcatttttcgttcgaaatagtggtcggaaaatttccagtagtt

SEQ ID NO: 65548 - DNA, 816 bp, Homo sapiens
agcccctacctggctccggccgctggccccgggtaccgctgcaccgccgagaagtacagggcaaagaggagccccgagcaggcagccgtgagcaggagcagcagccagaagaacgacccgcgcgggagccccatacagccccggcccgcgagcgccccgtccgctgacgtcccaggcagaagggagagaaccgggtgggccgggtggcacttgcggaggcggccgtcttgccctgccccgccctgcccgccgggtgcctgcggcgcctgcccgcccggcagctccctctcggccccggctgagtggccagaggctgccgcaccctcgggagctgggcggcgggtcccccggggctggagtgtcgtcccggcgcccagagcgcgcgctcctttggccctgccccctgcccgggggacttcggcagcggccactcctgccactgcgctctctccagagcccagccccgggaggccgccagtctcgggttgggcagggcgctttcctcgcgccgtccggggctagctaggcgcgggtagacgccgccacctgctgcgctggctgcgctctgccctctgcgggcccggcactcggcctctagactctgtggcgggtgggcggcggccgggaggagatgtgcccggctccctccaaaggaccctcagatctgtcagtctgcggacgccaggacagctgggagggggcgggcagggtggaggagcaaaacccgacagctcagtctctgggctggcggtagaggggggaaaagggggtgaggtggggagcttgccgtgatgggtttcgtgggggagctaaggc

SEQ ID NO: 65549 - DNA, 800 bp, Homo sapiens
accccctatctgtgttaataatccaggtccacctccaatgccttaaatggcagtactcccctcacaccaagatctcctatccacccacctggagttctccttcctcccatcttcagcctcacaggacctccagggtctccatccttcccttttctcccagtgggccaaccctctctcagcagctttctttcctatctaggcaggactccctgggttataatctgagctactcctgcatcagtaacccagattctcttgtgttcctggctttcttcccagcaaaactctgacctggattcactcttgcctctgcctctcctgtgctgcctgtccctggcctggctgagtgctgcaggggtcaggggtcaggtgtagctcattccagagtgtgaattgggaacacaagtttggcctcagctggctctcaacatcagccatttccttatccttgctcagctccagcttctatcctgctcaacaatgattctagaacttacttctttcctcaagcctcctcttttcccagccatacctgtgagaaaatgcagcccatcaggagtgaccttcaacttcccatgcccccaagttcaaagtcatcttttgttaagaactgtgcagattttgctctccttacaagctaaccaatgaaactgccatagttctgtggatgctggtagaagacacaagactactggatcagagacaaaggactttattactcatggtgcagcaagcaacataggcatcatgtttgtgtcacttctctttactcctcaagccccatgagagtgatacagaga

SEQ ID NO: 65550 - DNA, 1195 bp, Homo sapiens
attataggcatgagctacagtgcctagcctagtgtttaatgagtacaaagtttctgttatccatgatgaaagagttctggagatggacagtggtgaccgttgcacaacattatgatgtttgcaattgttgaatacatagagggaagggtccctctcctgccagggaagctgaaggacagatggccctctccctgctcatggcagccagaacacaagcacagggcagagtccgccacctgggtgctcctgggactttgaatattgagagattgatacagagatgcagagataaaacagagtttctttttgtcgttgttgttgagacggagtctcgctctgtcacccaggctggagtgcactggcacgatctcggctcactgcaagctccgcctcccgggttcacgccattctcctgcctcagcctcccaagtagctgggactacaggcgcccaccaccacatctggctaattttttgtatttttagtagagatggggtttcactgtgttagccaggatggtctcgatctcctgacctcgtgatccgcccgccttggcctcccaaagtgctgggattacaggcgtgagccaccgcgcctggccaagataaacagagtttcttacaactgtgcatggatagatcaagagtccactgggctggtggcagatccctggtggcagcaatacaatggcgttgtcccaaatggacagttccagcagcaagatcttggatgtagtctcactgcctggtcacatgaccacttatttgaagtcaactttataccttatgaaagcactcagaactggattaagaaacagaggacgtaactgagactttatgtgtgtgtaggcgtgggtgtgtggtgagggcagtgccacccagtgacctccagctggtactctgaaactgtgcatgcctccccagcctccaatctactctggctgagtcctcttgggaaactcccagaggctgcactttcccccagaatgcaagaccaggcaagctctcctttttgctgctggtccctagtgacaatctctcacctcagcaccaaaacaaagcaagtcctcacctgctcctttccccagggagccctggatctcagatgtacttgccaagtcctgtgtgattgcctccctggctgctgtcttacttcagagaggcagttgtggggacagacagagtcagggacatct

SEQ ID NO: 65551 - DNA, 2309 bp, Homo sapiens
cttcttttagggtgttcaccatagctgctgtcaaagatgtaaaggggactatcatctcgagtgctctccatgtactcgatgtagtatttcatcttcatcttcactgagtagccatcgttatcctcaccacacttgaacttctggttccgatatttcctttttaggcgctccagagtccatttctcctgcgcagaccagccctcttgcgcattcaacaaaaccacgggcttgtaaggtctttcataccgctccacaaattcttccacagacagctgtaaagcatctgccctttccacgttatcctgagggaattaaaaaagacctgtccagttaaaaaaaaaaaaaaagtccagtggcagataagggtgtccccaaggccaactggtaatgacaaaccgaaggaagttgactctcgtctggctcctccggggtgggggcagggcgcgtgcgtgaggccacgtcgttcctagagccaccccccatgagccttgacagccaggtcccctaggggacccgccgcccaaaggagtcagggacgacgggccttctagttgagagcgccacaggcgtgggactcccgtcgtccgccagagcagacgggcggccacagcacgggaggaagcagacccgccccggaatccgcgcctcggggaccccaaactccgcggggtgcgggtgagcctctacgaggtcccgggcgctcggggcgagggcagcctcgggcccagagaaaggtgcgtagcggctggaggtgccgatgcccggcctggccacccccgcccgacccgctcaccgccacggccgccgggctcagcgagaagctctcgtagtagttgtgccgggtccaatccagcgagtccttgagctccggccgcgcactccgcttggcctcgcggatgcgcttcttgctcttgtggttcattctgcggggtcgccagctggttccgctacgacctcggcgcagcccgcttcctgacactaacgcacccctccccggcctgggcggcggcgacggcagtacccaaacgcccttcgctcagtcccggcgcctttaaagtcgccttccagaaaattcactccccagccacctcccgagcctcgggttgggcaagcggccgccgtcttccccgccccgacgcctctcgcggttttccattggctttggctcccctggggtactccttcacatacggcgggcctccgccatgttgggaaggtcacgtcggctgcgtcaccgccccgccccgccccgcccctcccctcccgcgctgccgctgtgcccatcacttccggtcgcgccagccgcccgttgccagttctgcgcgtgtgagtctctttcgccttgctccgggctttcttcgctcgcagcgcggcagggttatcaccagatctgggctttccccttcttgccgtcaggtgctacggccacgtggcccgcggcttcccgctcgcgcagtctggcagcccggagccttccgcggtcccccgcccgcccggggcccaacgacgccctactgggcgagcacgatttccgaggacagggggtccgggcccagcgctttcgattctcggaggagccgggtccgggggccgacggggctgtcctggaggtccacgtcccgcaggtgcgtgcagcagcacccgccaggaggcgcctgaggtcaggagcggatgtcggctgacttggctgggttcctgagggaccgggggtgcggacgctcagctgcgcagcttcctgctttaggttgacccccggagcaaaaacgtcggatatgaagcccttcggtgcattaaatgtctctcagtaagaattttggagaccctgccaagaagtgaccctggtcactatgttggtcaggctggtctcgaactgtaagcttaagtgatcctcctgcctcggcctcccaaagtgctaggattacaggcatgagccactgcgccgggccggctttctccacatcgaatctttcctgccaggaaagtgacattcttgactgacctctaatgcttcttttgatcttgtccaagggtttcttgattcatccttatctctcacttttgtgtgagttttgggatcagggtttccagttttatttggtgcccaaagtgtttcttgggttggacctcgcttcttcctctaagctcacagctacaacaaaactctcaataataattctttttcttttcttttttttgagacactgtctcgctctggcgcccaggctggagcgcagtggcgcgatcacagctcactgcaacctccaactcccggattcaagtgatcctcccgcctgcctaagtgctgggat

SEQ ID NO: 65552 - DNA, 3217 bp, Homo sapiens
tccattagaatatgaagtcccagtcagtacaacaatagttgaactgattgtttctctaagaggatagtgcatctttaacatttaaagacaaacctgctccaatacacgcccacagaaactggtccctggaggatcagccaaatcagttaaaatctgcaatactggccaatattcttttatcaaacaggagaccgcagctttaaagggggaaaatgcagacgttggataaaaacagcaagaaatagtcattttcattaataggtctcaaacagtttacgaaacagccattattatctaagcttcatacacatcctttctgcagacccctctcttcagtattactcccaaaggtgagtaacctccgagcagcactcctaatgataggagtcattcttacattaacacgactcaaaaagacctaccccaaatcccatttatgaattagggttatgtgtctcggattcccagacattaccattttcttaagaggacaccgctccttcctcttcaggagacttggggggactcttcgatcgcgacctggatttggattccctcttggacactgggggaggactcctggaccgagaccgggacctggaccgcgaacgagatctggagaccgacgaggacttggacttggaccttcgtgcggatctggacttggaggtcgaccgagatcgagaacgagtgcgggaccgagacttcgagcggctgtagcgagatcggctgcgagacctggaacgactccgactccgggatcggctgcggcgacgccgcctagggctgcgggcgggacgagcaagcacagcggggttaattccaggcagcggggccggccccgcccgcgcgctcccgcccaggccgccattatctcgccgccagacgccatttccccagtcgcgaggcggggtcctccgccccgcgccgcccacaccccggccactcccgggtcgcagacggcggaagctcgcggggtggccggagggtcgcgagacgcggcgtgcacccccgccccgtccgggcccgcaccacgtgcttcgccgcggacctttgtgaggtcgcccgggcctcccgcgcgccccgccccgcctcccgcggtcccctcagccccgtttacctgcggctccggcgtccgtagccaccgcccccgtacctgcggggtggcggtccccggcggctgtggtgtgagtccggggggcggccgtagcgcgccatttgcacccgcagctcgcggccgtccagcacggccccgtccatggcatccatagcgtcctcagcgtcgcgcttgtcgtgaaagcgaacgaaggcgaagccgcgggactccttggtgtagcggtcccgcgggatgtacacgtcgccgacgcgcccgtacttctcgaagacgcgcctcagcgtgtcgggcgaggtgcggtaggtcaggttgtccaccttgagggaggtcataccctccacatcgggaggggggcggccgtagctcatagctctgagtggcggcccggagccccgcgaactggcgccggcttcctcagctctgggcggtgcgacgccgcgcctctcaggcagttgccttccgcgtggggacactgggaaaggccttgccgcagaacagcacggacgggctccgcaggctagcgcacctgagtaacaactgggcgggcagccggcctctgcgcccgtttatatcgctcctcacaaaatggcgcccgcgccacccggaaatgaaaccttctgattggcccaccgcgccccgcttcgtaacgaccctgccgcgcgccccgcccctacccgaagcgcctgcgcacagcccggcgggcgggccaaaaagcgcggagtcacggctggagggagggggagcggaattagcgggcagttggaaagcccgcgaaacgctttttccgcctgggaggccggacgatcgcgattgggcaggaggaagaggaggtgctccccatctgggcccccacctttttttcatgccaatactccaagttcacgccccttttttgctcagccgtcagccccgtctccgtctgaagagtgcttctgccctcatttgcctctccctgtgaccccggccccctcagactccgctgcgtcgtctctcggccccgtccagccgttcctgactgctcttcgccggagtccgcttcccaaccccctttcgccagagcccgagagctccgtcggctctgcgtcctggcggtggggactccccgcggagcgcttgcgcgtgccaggccacccgggactacgtttcccagcgggccgagcggccggcgccgcggctgcggtcaggtgacccggtcgcctggccgcagtgagtcaggctgggagggcggggccgcgccggctgctgcggctggcacttggccctttaatccccttcgtgggcccctcaacctggagcggataaattcttggcgcttctccgggggttgtgctcttccgtactcggatcgcttcttaggagtatcctaactgccggtggggagaacttcgccctaaacctggggttccgatccaggaactggaagttgacagcttggctgcctggctcctgcatctgccttctccactcaccatctcatttctttctccaggattgtcagtggcttcgccccgaggagagctgactgccctgggctgctgcctccggcagagctgagccaaaatgtccccggaatctaaaaagcttttcaacatcattattttaggagttgcctttatgtttatgttcactgcctttcaaacttgtggaaatgtggcggtgagttggaatctgtcctccctcctttgaagtgcccatcataatgcagtccagaaatgaaaataaacgttcattatatctaatagcgcgctttaattgcatctttcatttttcccacccagacttcctcattttttatgattaggtttgatttcttgtgtcagacatttctcatgggggcgttaagcattatcgtttaatctgatttgattaggggtttggatgttaacctggttattttgtttctcgtctgtattaagcgcttccttagtacttggatggttacagctgcttttcctcccccctccctgtcattggtttgccttctgcagttctgttgtcctttttcttttctcataatggacttcagtattaagtacattatgaacttttactttattctcttgctgagtacttggagtcacacttcccaagggtgggagggag

SEQ ID NO: 65553 - DNA, 486 bp, Homo sapiens
cccaccctcatcggcacactgggtttggcctcaggctgttccctgaggctggcacagaaccctggggcagccctggcctcggtgcttcctggggagcagatcccattactaaggagaccacccacactgtatgtcctttgcttccagaattgcacccaggctgaccctccacccgcagcagcattctcgccacccccagggtccatagttcagttacacaaggagcttaggctttatcctatcccaaactgtgccctggcctggttggctgcggaagaacaaagacgggaacgtaatgagtcaccatgccatcactctcccggagacctcccaggtgggggacgcctgacttgggttcattcattcattcggcaaatatttatcaaatgcttacgatgtatctcgccctattcgaggccctggagacagagcagtgaccaaagagattaataatctcttttgagaagccgacatcctagtgggaga

SEQ ID NO: 65554 - DNA, 1732 bp, Homo sapiens
tctgagacaaggtccagcaattcttccttggttgtgggattagactcagagcaagattcctgttcgttgcttcctgtgcccacagacagtgaactgtcgggaatctaccaggtcttttggagcaataggcttttcagggggtatcccaataggccaggacggcctgcatcttcacgtagcccctctgctcttgagctttctccttcctgccacctggggtggtggaaagggcattgggtttggagcagaaatgacttaggtgtgaacccagctctgccacttcctggccggctgtgcttggaaaagtaaccaagcatctccggagcgccccacttctcatctacaagacaggagtggtctttgcacttaattcagagggttgcatgaggagtagagagataatgctttcacggctccaggaacccagcgggctttcaagaaatgggatgttccttctgattccctcgctccagggccctcccctctggcccaggctctagtccccattaatcacaccgcgcgggctgcgacccctttaagtccggcttggatgacccagatccaaagtcatcgactctctagctgctatctctatggtaagttatcacttccggccggaagttgctgacggagctacttccgcccaggggagtgggaagtaagtggagacacgtgctttggcctgttggaggggaaacccgctctcgcctcctggtggtcgccgactcgcagtccgcaggatgactcagggcagccctgaccacagttccgccgccatcggccctagcctgcggaattgggctcgccccgggacgataacagagctctgccgggggctggaggcactgaccgggtgaccagagacccagagaccagaccccctccacggcgcccgggatttcggggacggcttctcccatcgcaagtagggcttggacgggaggcgacaaaagagaacttggtccgcacacagccaccgaaattggaatgaggagctgtagggaggccccgtagccagcagaaaagcattggggtccctggctgggttagcccaggtttctaggagtgtggtaagcgtcgaatgacttttgtccttttaaagcacattatgttactttttcccccaaggtttcaacagaaaatgagaaatatcccccgacgattggctgaaaacatgcagcaaccactattttcttcctgcccctcgttgatgagagcattcgaagtgacctcagcagggcatccaggtatgtcaagcatggtgacaaagtgttcaggtcagacggtctggggaaaggctcctgtgttgttgagcctgccaagttgtgggtgcagcatggtaccaggcagcccaaccctgacctaaagtaaattcccggaagaagtctttcctgggttttgaatttgcagtaacaggtgtgagcattctagcagcagtttgatgatcatgtatgatactgcaaacaggacctacgtttaaagaaaatggttgtagttagtatcagagagcccttgcttttcaaaacttcataaacaatgttactgtcatgtctttcattcaataaacatttgttgatacattggcctgacatcatgttaaatgttacggatacagagatgaagaaaacagtcatggcccttgttctctgggaactacaacccagttagggagacaaggttaaatgatcacacttaagagggcataattcagccaggtgcagtggctcatgcc

SEQ ID NO: 65555 - DNA, 1235 bp, Homo sapiens
taggcattattcccattttacagatgaggaaacgggctcagaatggttaaggagcctgcccaatgccacacagcctttaacggtgaatcaggagctgggactccaatcctttgtgctcaaagcctaggctctccctagtttgttactttgtccaggccaacgctgcctgcagaaaagagtggaccctcctttccccattctttctgctcctcttgtcttccaactctcagggcccagacattcagctaagcctgaggaacaccacagtttgctcatctgggcttaaaaggctgtgtaaacatgcattagtcagcagcagcccacacactggaaaacattgatatactggggcaaacattcccagaatagatgacaaactaccgagtccaccactcaggggatgggattccaggagctatttgctttctgccttcaacaattgtgctatttgaattttttacacacagtaggtggattgcttctgttatcacatcatatattgcaattagtgacaccaaatcagttgtttaagagagaagggcaggcaagaaaacataaattgtgattatcattggatagtgagattatcattaatttttattttcttcttcatcttcttttttttttttttgagacagcgtctcactctgtcacccaggctcagtgcagtggcacaatcttggctcactgtagcctcaactttccgagctcaagtgatcctcctgcctcagcctcctgagtagctgggactacaggtgtacaccaccacatccagctactttttttattttttgtaaaaacaggatctcactctgttgcccaggctggtcttgaactcttgggtaacataggagcaatcttcctgcctttgcctcccaaagtgttgggattacaggcatgaagcaccatccccaccctattttcttcctttggcatttctgcattagacatatttctaagatgaccgtgtgctctcgttgcttgtagctgccacgaacagataaccctgactcaccctgggttgtgccatgaggacactgataagaacacacaactgcaaggcagaaggagggcctgggcctggccagagcagcaacgccacccaaggccacccaaggcagagatgctctttctgcctctcctctctgcagtccccgtgtctcctccatcacaggttgcatcccctcatgggtaccgcatgtctgcagcagcctgagaatcacacagcatccaga

SEQ ID NO: 65556 - DNA, 2069 bp, Homo sapiens
gacctcgtgatccgcccacctcggcctcccaaagtgctgagattacaggcgtgagccaccgcgcccggccggtggatgtgatttctacaaacaagcaaaagccagtcagactgaatgtagtgaataatgtaggtgacccagctggaagatgatggtttgacgtggaacacaaggggtgatgaggccatgaatgatttgcttgtgtgtctggtaaactggctttgatggaaattcctaaacaggtccaaaaacgttctgtccaatggcagcatgaaatgtacagccactcagggtgactaatgtgaacggaacaacagtgactttgacagtgaaattgcatgttggttataaaaccagctttgctgtgtgggtgggcatgcgaggtgcccctttctagtcatgagctcctcttaaggaccccaaaatgtctcagtggtaccggattgaaaattggggctggacggtgctctcctgctgaaattcgggagctacttagcagccccaccttggcaccctcgtttccgaggggcaggccctgggcgcgcgtctcagtttcaagcccgcggcccgacactagagccgtctggatgtgttgacaaggatgccgctgggctccacccgggctcacccgggccctcccgagccctgggccgcgcagcaccggcgtccgcctcctccccattactcggcgagaatgcggtcggggcactggcgcgagcagcctggtgctcctgaacagtcaacaagaaatgaggaagcacgggggcagccgccagggcgaccagaggcaggcctcagagcagcagccatacgggagggccccggtggttttgacctcccgcaaacttcccttttcccgctcagccgaacccctcccctgcacgccggcagccccttggggcttcactccgcctccgcccgctactcgcgaagcccagcccggccccgcccccaacaagtgacgcaaaactgggaggggccacgaggacctcgggcacatccagcagtgcgacggggccggcgccttctccgagctcctcccacgctcgcgggtcggagctcgcgcctgcgcagttcgggccccgggtgtcctcccccctcccctttcttagcaaccatcgcccgctcccgcccccgctccctcggccgcggccgcgcacgcgcgcccctcccggcgcccggccccgcccaccccgtcacccgtaacaaccacaagtgccgtcgccgcgccccttccccctcccgcctccccggccccctccccggaaccggcggtcgagctacggtcgcggagcagtggaaccgagactgccccgcggagccgccggtatgagcgcccctcgccaccccgtgtcccaggcccggcctttctgacaagaggtaggcgcgtcgtcgcggcgggtccgagtgcgccctcgccccggtcccggtctccgtggagtccggcgcctctcgggcgggccccccggaactcccggccgcccgcttgctgagcctgtccctccccagccccggctgccatcggcccggcacccgaaacgggccgtgcccccgcccccctgctcgccctccgcccccctgctcgcccctcgccgcccctcgcccccctcccccgcccccacccccacctcgccaggcttccagttcccgggagccgctttttgctgagagcggagtttcgggtccggagccagtgcccgcccctctctcccgtcggtcggggctttggccccgtggggctcagccgcgcgggacccctgctgagcagccccgggcgccggccgcccctcgagcctgctcgggatgcgttcagtgggtctggcctttggctcctgtttaaacagcgattgtcatgcaatggaggccgtccggctcctggatgccacttggtcgttgtcactccggatgcccgcgtagggcgtttatctggaccagagcatcggcagctgagacctggctgtggttcacaagctcgtgaattagcaggttcttaagtgagtgtagccagttctgccaggcggtggaatcctgaatggatgttaccgtttcttaaacgagcattacgcttt

SEQ ID NO: 65557 - DNA, 730 bp, Homo sapiens
ccagcttgggaaggagtttggtgagtgggaacatgtatagtgtgataggaatcacacaggaatccgggaattcgagctgggatgggctgagctccagagcctggtagtggagggaggttcctggctgctctgggggcctcagccacagtttttctctaggattttgccctgtgggactgtgcctggctccatgtgctggagccttctaccccgccaccagctggctgctttgctcactcctagttttccatgtggcttcagctcgaggacgtgcttagctgtctgaaagccctctggccccagttcaactctgtggcatttcttgttgcattctttcagtttctaagtgaccaattcctgtcacatttcatagttcacatccttgagagaaacttgatctagttcattccccaccccgacccctgccctggtcctgggtttgaggatattggctagcctgtggattgtttgccttaggtgggaggcctgacccttgttcagtgagctgggctggtggagctggggaggaggcagtgggggtggtaggcagtgggcatcgccaggtaaagtagagtggctgcccacggcccggggtggacacagggcagagagttgggcagggtgggggatgttctccaaaacacttgagtgtggcttaaaaagttcatgcaaccctgatagtttgaggcaaaggctggtttctttgccaaacgttagatttaataaaaga

SEQ ID NO: 65558 - DNA, 674 bp, Homo sapiens
tcagtatttgcttaattttttttgtcattgaggaaaactaacagtaaaatgagttaacctgaaaatgcccttttcagttcagcattcagagtgaggaaagaggtatatatgcagttaaggtgagaacggaaccgtagcttccgccggcggacttgtgagcacgtcagaaagcgaatgtgcctcactagaacgcacggtggcggcaggagtggccggcagtgcccggcacgcagtcacgggaggtgggtcgagtcctggtttatgtgagtcctgtgaggtgagagagtgggagaaaacgcctcactcaacttaatgcctttgtttgtttgttttaaccaagagtttacttgtaatttagtattgccggaaaattgttcaggtaaaaagtgcctagtataaataggtacacagtcaggtcagatatgttaattgcatctcacttgatttaatgaaaatttaccatttgttttgaggtcagtaccattaaaaaaaaaacatgttaaagttctcattaactcgcttgagtggtatttacataagcaaaattgaagtggaggtttttcagtaggcatttgcatggtgttgttttgttagatatcagcccagaaacagaatgtcagagctttcagcgagttggagcaatcacctagctcaaccctcccttggagggcggg

SEQ ID NO: 65559 - DNA, 595 bp, Homo sapiens
cctcccctgccctccaggcctgtcctgcaaccactccacctctgctgctggggcctgtgtgtgtcccccagctcctcctgctggggcctgtctgtggctcctggaaggtgtgacccgggtcacctgtgggcagaggcctcactcacacccccggcctctcatgttgccatccagctctgtcctgctctccctcccccagtgggggtttaagctcctcgtgggctgcctccccgaccccggcgccctctgtctccacggaagcctgtcatttccgaggcctgagtcaccactggctggttgcagccgggtcagcgtgccacccggcacgaggcacagacatgagctactgggtcctgcaccctgtggttaggagctcagaggcctctttctaggggacgttgccagtgaataagtctttcagggcagaggcagggtggagaagaaccactcctctattcccttaccctcccacaccaggaatcgctgggctccctgtgaccagggactttcccagatgcctgggattttggatgaagctggaaagcagagaatgcccatgtgcctactcagtgcagacagggtgcccgacgtgcct

SEQ ID NO: 65560 - DNA, 2360 bp, Homo sapiens
tcgtggagactttaaggatatccaagtagagagaattcttccgtgcaagttttgcatcctctcaccactgcctgcgttacccgagttgtaaagggcggctccctgtgtctgccccgctgcaccgatacaccgagctgcgcacggtgcccagcgcagggagaacaaatgatcatctgtccaacgcgcccatttacaggtgaggaaactaaggctccaactcaatcgacgcactctgcccttttgattaccagaaaagtagcaggacaggtgtcctgtcccgccctaccccggcccactaagccggcaccccggctccgacccccggctgtgcccggcgccgccgcggtgcccggcgccgccgcctcgcccggcggggccgcccggagcgcccgcacctccgcccgcttccacctggccgggcccgccccgcccggactcgggactgggaagtgcggcgactcccggaaccagccattggcgccagcgcggggagctgggggtgcagagctgcgggcgcggcgggccacgcaggcggcccccacccccggcctggcctggtctggtctggtctgcgctgccgcgcgggggcgccccctcccaggcccggcgcccgccagccccgctccgccaggtgcagcgcagcgcaggggtgggcgggggtggggctcggcgcgcacgttcacggggcggggagggggcgggtcaggggcgggaccacagccggctgggccggggttctatgcgcatctccggggaggggcggggcgggggcggggccggggcggggcccggtcggtgcactccagacggcgggccgccccctcttcccgccttcctactaccggcccaggattagcgccctgggagcgcgcgccccgctgcctcgccgccacactttcctgggagcggcggccacggaggcaccatgaagaagtcttactcaggtgggcttcgcgcccggggtggggaggggtcggtgtcccgggaccagcgctgctcacctgagtgcctgcggccgggagtggcgaggcgcccccggagctgagcgagtccccgcggcgggcacactgcaggtcgagttcctcccaggacagggccgctgtcgggccgctttcgacctgagccgaccgtcccctgcgctgtctccagcccttgctcgagtgtcggaggggctgccctgggggacgctccctcttcctcgccccttgcaccctcgcaggaatcgctgactttccaggtcggccgggtgctttgggtccctgtgcgtctgtgtgggtgaatggggtcggggctaggtggaggggtgtccttgggttcagcctctagggctggtggtccaggccgcagcatcctttcttcggattctcttcggtttctcctctacttagtggggcacgggacggcctccagatgggaccgtccagcagcgcccaaacttggcgactcgggttcacgttttgcgctcaggacgccgcccgcggctgacatcctcactccaccctagcagggcccgccttaagtaggcgaagggggcctgacttgggcctcaccatgagccggttcaggagctttcatttcataagaggctcccgctctggcactctgaagttccatttcacagatgggcacaccgaggccacaagggcaggttaagagaaatccagatcttcattatttgtcttttccttccttttttttttcctttgtggttttctccaaaggatccaggcaggcaggatcctttgtcctcctcagtcctcaaattataaatagcgtctcctcttctaaatctagaaaccgtttgtttaatgtccctcctttaattcattcagatagaaaggtacctgccaaggatccatgaattaatttttattgataggagaacagaatcatgggccttagttggaggtgaaggagtcatcggggccatccccctgcctttgggccattgtcggtttcctctggctttccatatttaggaaccaaaatgagtgataaagtaccttgtctcaaagaggattactcagaacttccccgaaaatacccttctgggtcagtagcttagaatttcaactttcacccggttgttgcgaacaagatggccctctacgcacccggagcacagctctgtcaggagcgtgggtgggttggtgtgctggtgggcgggagcgggcttccaggtggcacatgcttggttttggcaccggggcttcctccccaacatgctccaaatacttgagattgttgtggggatcgcgcggtgcatggccctttccaggggatctctagcccgcccagggagggccctttgcccttggtttcttacactttacctcccactggtgggtccagacagtggg

SEQ ID NO: 65561 - DNA, 4540 bp, Homo sapiens
gattctcctgcctcagcctcctgagtggctgggattgtaggaacgtgccactgcgcccagctaatttttatatttttactagagatggggtttcaccatgttggtcaggctgatctcgaactcctgacctcgtgatctgcctgccttggcctcccaaagtgctgtgattacaggcatgagccaccacgcccagcctgcctcatttgttaaatgggacagtgctatgttgttgtaaaggttaaacgagttcatatttgaaaaagctgagaaatgcctgctctgtaacctgttagctgctgtcatgatcatgattgtcattgacaggaggatggagaaggctggggttacgccattgctaggacgttccagaagcctccatgatcttcccttactgtggtcagagcatggtgcagggtctctcccccagcccctcagcactggagccagctgcactgtacccgccctggctctctaggttctgagttttgggactccctttgcatactaggtcacatggaacttgccgtcattcccaggctcccctggaaactctctgtgggtggcagcggcaggaggacttacccgaggccgatgagccacagaagcgggactgaggttgcgtcacacccctactggcacctgggaattactctggagattctttttttattttttatttttttgagatggagtcttgctctgttgcccaggctggagtgcagtggcacgatctcggttcactgcaacctctgcctcccaggttcaagcaattctcatgcctcagcctcctgagtagctgggattacaggcatgtgccaccgtgcccagctaatttttgtattttttagtagagatggggttttaccatactggccaggctggtctcgaactccggacctcaggtgatccacccgcctcagcctcccaaagtgctgggatcacaggcatgagccaccgtgcccagccactctggagtttctctgtggctttcaggagattcctgaaggggcaccagccacgattaaaaagctctatgctgtcgtgacttctgagtcctgggcagggagggaggctgcacccacacaggaagcagcttctgccgtgattcagtgtgctggctcgccgtggtggacagggctgcaccctcacccagcgccccgggagctgacttacgggaagggcaaggaattgcaccctcagagaacacttccccagtcagctaacccggtgacaggcgagcgtgggaagggcacaagcacagggtttcttcctcttctcccccagccccgtctccgcgcctgttctcgctgcctcttgcctcctcacgtccaagcttgtctgctctggcgcattcaggggacctggactggagagaaaaagccacctcgtacggttagtctgtggctctgtctgacttgtgtcctccgccgaggcccctcagttgtgagacagctggctgagcctaagtcctggggccagccctctccctagtctgttgcaaaggtagaaaggcatgcccaggcaggggccacctgccctgcccgctcacgccagaccgcaggcacttgcccgtcagatctccccggcctgcccagagggattctgatagccgagggcaatgcacctggcagcggagcattgcgtttgcgacagtccaccttcttcctggaaccaccccccacaagtgtgaccagctcaagccaggacaggtacagggggacccaggattgccacttaggggcagtggtctggaatccaggtccaggtgacatgggagccaaccctctgcttggagatcccaggtgggtgtttgcagaggacatctcacttgaggacccatggaaggggacacttcccaccccctacctggtccttgggctgccctcctctgacactctcctgccatcccaggcagccctgacagccccatgtgactgggacctagaggtggcccctgtttccgccccagtgtttgtccacaggcagtgttgcgtgggctctgaagtttgcctaagatggacctgataaggggagttcagtacacatcagtgcaggcccggccagggggtgatgatggcagttcctgggcagatccagctggctttagggtaggaggggctccagagagaggctccaggcccctaggggtgtgaacctttggggtgaggcgggaagtgacgcgctgggttcctgcgcctctgtttgttggagctattaccttggaaacatcccagctctaggcggttgccagggatttatggggatcagtgggtgccaatccctgggtgaagccctcggggcttgtacacagcacacagcgctgtggccccatggctcactttgctgtgtgaagtggctcagtctccgggagagtccttagccaggcaggcctgacggcaactgccaggtcatggtgatctggaatcgctgaccaaagggagtcagtcctggtgggtggagggacttggtgggcagccatcgtgatgccaggcatggggatcgtgtgtcacccaggcctgtgggtgccgagcttctgtgggagcagtgaagtgcccccgtggccgatgggctggtcacccctgcccctttcctgatgtgacagttgtgcctgggccccgggaaatttgccaggaggcctggcattggcctgctctactggagcggccctgctgagctgtgagctgcccgtctccctgaggttcctagcccatttcaactctccatgtggatttggtcattcattccagaagcgtctgccgggcgctgctgagtgtcaggttctgtttgcctcctctcctgtacgctggaggctctgggcaccagctctgcagggtggcctggccttgggtctccagggtagagcatggcactctctgctcccagcccagtttctctctgctttatctccctgaccccaccctgggcatgggcccatttgcagcccctgtgaagggagacattgagctgttgctggcagaggaggggcggctcctgggcactgcttgccaatggcctctcggcagctctgtgacagctgagctttgttcccagcctaatctgacctggttctccaaagcatgactgttggcagcctgaaaacctccaggacaggaaacaggagtggcgcagggaatgtaagatgatcccagcttcaagtcactgggcggcccttagacccaggctgcctgctgtctctggcaggaactcaagtcgctggtcatcctcagagcggtgttggcccggggccttcagtggcctttgtgtctgggtgagaggaaccctggatggccactctgccctgagtgtgtgggtccccagaagtgctgggttagggggcacggagggccagaaagtcccctttggagcgctggactctctcgctgactcctaccccaccccggcctggggtttcagagaaggggtccaggcaggagtgtcatcttttctcaatggggatgtggcttcagtctctgtccaggtgggtgcattgctctctttccggctcctcccaggctgcttaaatgacctgtgacgaggcctgcgccatggccggggccctctgcttttcccagcgctgcacctgggaaccaggggttgggccccggaagccgaggatgtccctgaatgccatgcctgggcacctgtcctggccaggcgaggcgtgttggggcagcggctgagatgggagcagcagcattgcctgccaggtttgagatgggccccgggtgagtgtggttaccaggaagggctgggcagagcaggcgggtgggccgcccctggggccttgttccgcagatcaacctgatccgcaccctggggccggggcttcctttcacagccttcccatgaactatggctcctgtttccatcccaaatcagatcccagaagaggaataatgtccatgtaacccaagccagttggaagtgggttacatccaacccctgtcatcttccagcttgttaaggacttgactaactcaacccagagggatttggagggttgtctgcaaaacccactaataacagggaactttagctctgtagccacagggtctacagaggtgtcgggctgtcgggttattgctgggaggtgagccggtggcgtagacaccatggaggcaccggtagtggaagagctgcaagtgcacacagaggccggcaccgaggggcggggaggaggaggtggtggatttctcgccagtgttggcatcatgttgcctccagcatcagagacccaaggtgtggctgaccttggctggggcgatgagtcattggatagcagagccttcctggtagctgggggttaacgctttaactgccgggactttgtattatgccgcttcttttttttgttttgtttggtttggtttggtttggtttttgagacggagtctcactctgtcacccaggctggagtgtggtggctcaatcttggctcactgcaacctctgcctcctgggttcaagcaattctcctgcctcagcctcctgaatagctgggattacaggcacgcgccaccatgcctggctaatttttgtat

SEQ ID NO: 65562 - DNA, 1981 bp, Homo sapiens
agcatggtgatcagatacagggaggtgtctgggtctgcctgatcccttatctcactgttggtgggactgggctggttatgtgtccctgaagctctctgaagggtggctgtatggcattgcccaggggacatccccagagtgccgtgctctacagcaatagggtggccgcctgtgctcccagggccgctcctcctggcagcctttcgggtttgcttggcttagcacctcagcaaatctcctcgagttaggacttgcctgccatgagcctctccaacaagcagccccaggccaaggcctgtgtgtgggcagagggagcgcatgccgcgggaggctgcattaatctgaggttctgtttttgttccctcctggggcaaaaggtaaaaatagcctgtcccactccatccccaaatccagcccggctgcacccagccctgggagtgaagggggctgggtcaggactgcccgtgagttgtagaccctggtgtagggaaaccctgattcataagacgggtggacatggaggaaggaggagactccgtccagcagagacacgcttgggtgcagcccagcttggagtctgatggacgtgggctcacctgtgtgcaactctcattcactgtgtggccacagggaagtgacactctgtggagactcagattccttatctgcaaaacaggggtagtagggcttgggggaggatgtgtgtgaaggtttggcccagggcccctccagcagccagacagcagtggctgtcatccctccagcgtccagggttacctgggggagtagggcctctgtccccagatgggccccgtttctggctctggaactcacagcaggagcaaaggcgaggacattcctggtgttaatcatccacccggagggagagcgccagtggccttgtgtgacctttgccctttgtctctgtctttaggaggcacgcggacctccagtggccggctccggaggcttggtgactccagtggcccaggtaggtggctcgctccgctctggccccacccagctcatgggtgtgtttgtgctggggtcccttcattctggtctgggacctgcctccccacctggcttccctggatgagtggggccacttgcccatttcccagggagacgcagtctttgacggctttggactcaggtggcttccaggcctgtcgacgctgccctgctggagatgatccttgtgggggcaggggcagccacccccaggctcagggagcaagcccgtgtgtgcgggacagaggagagaacaggagatagatagggctggatgatttggtttgagatgctgaggggacagatgtgccatggacaggtggctttggccgtgagcctctcggtgttggttcagtatctgtgggctccctgcaaccttgcaggatggaagatgctccaggatagagcagatacgtccggtgttatctaggaggaaataagtgggcctctggcagtggtcactgtgctactccttgtgctttttccatgtgtttggaaattttccacactaaccagtagggaagggaaacagatgcacccatcagagctctggggctggccgtccaggacacgagttacagcttataggcttgaagggactctaccaacactgggtgcagcctgggcaagggagtgggacagagaggtcagggctctgcctccagcccttgccccccagggctgagtctgcgcgtcatcttctccccactgggtgtccctgatctcccctgcctgaccccagtgtggccatgctagtgcctctgtttctgggagcctacgttgttcttggctgtcacttccagcggccaggctgggacaggtgcccatctagtggcttttctatttggagaggatgatgggtcacagcaatgaatggacttacctcccctaggagacgaggagctctgagaagagcagagatggcgtggtcacctgtgcatatgtgctgggggccaactgggtgcca

SEQ ID NO: 65563 - DNA, 1653 bp, Homo sapiens
taatttttgtatttttagtagagacggggtttcaccatgttggtcaggctggtctggaacccctgaccttgtgatccacctgcctcggcctcccaaagtgctgggattacaggcatgagccactgcacccggccacgaccacctaacttctttctacaagatgccccctggctgacgcaaagcaggttgagtgagtgtgacacttccttcctgtctgtgggttccggcctttccagagcccggccagtgctattggagacaaagtggccttcgctcttccttcccgccctgccaggcccagcctgtgccgctgagccccactttgcaattaagaggagctgtgaaccagtgatgctgatgtcgcagaaaagtggccaggggtctatggggggtgaaggacagggatgccgccctgagaactgtctggaaggggcttttgggtaacagtgcccactccagggtgtgggcaggctggggtggctgggagctgggctcataggctggcacaaccagagtttcccaaagccgtgggcctgagggccctgccttcctgggacagcaacctttggtccaatttgggaaaaggtgggttaaaccaagcccggctccctcactgtaggattactcagtgcgtttagtatgcaaatgtgcctctgaatctaagacaggaccacagaaacctcttcagtgttcctctggagggagggaccgcgggggatccaccgcaggggcctgggtctgcactggcctggtgaagtgcccccttagtgcttacaccatgcgcggtgagaggttggccctcgcctcccccaccctctgctggccttacctcaccacctctgcactcgcctcccagccggctcatgactaactcctgcctcttcagagccaatcggtgctgccaggttttccatttcaagtgatcccccgcctgggccaaaatgtttggattttcaggcacggaggggagatggacctcaggccaaaccatgctgggtaaaactgagggtcaaggctgtgctcagcaagtgctccagccctggccgtcaaacccatagtgtgcacagcgtgcaggaggtggctgggtgaatgaactcagtcatagcccggcccctcactcggggctgttcccaagttcccaccgccagccaggctgggtcagagcctcgtggggccttcctgggcttccctgccccacagcaggagttcgtatggagagtctcgagtgaggttaatgggttttcttcctcttctttttttttttttttaatttgagacagggtctcactctttttacccagccagggtgcagtagtgcaattatagctcacagcagcctcgaactcctggcttcaagcaatccttccgccgcagcctcccaaagtgctgagattacaggcacgtgccaccttgcccagctggggtttctgctttttactttttctcttgtttctaaactcaatacaaagaaagatattacatttataatcagaaaaaccaacaaggaatattatttcaaaattggaaaagggattaaagaaacaaaccaagaaacctctgcgattcctgcccatcggagtcagtggttgttagtggttggcttaacacaatgttttaggaagaaatagaataacagaaagcaactccagtgag

SEQ ID NO: 65564 - DNA, 4475 bp, Homo sapiens
gagctggaagtgatggcaccctcccaggctcacaaaacacgggcttttcatgaactgaacaaaacactctttgaaagcagccagtgctgtgccccagagaccactctgatccctgctgcccttggctgaggacagcacagccagggatgaagcggggacctcccctcgggctgtgccttgatgaaagatgctttctacaaaatcccattcggatgtgttttcatgtaagaaaacgtacatttttagaaactcagttgtaaactggctgccttccgaatgaacacgacagtcccggagctgtttcccttaatgaggttctcgtcctgggcaaactttagcgctggtctttaattgtcactgaactcccgcacagtccctggggaagtgacttccttcctgtccctgctgggtggccttgagcaagccacttggcagctctgggccgcagttccgtcatctgcaaggtgaggggtgggagcggcacggcccctaggcagcgcccccacctcctgcgggtttctgcgcgtgtcctgagttttgtgggcgcctcttccctcactgaggggctcttcttctctgcagggcatggctcacgccgcgttgtcaggctgcaagccactgcgagagctgctctgatccccaagcatgctctggcctgaggaggagccatggggaggacgctgtgcctgtgtgacagaggcctgcccggcagatgccggcccgctgacttccagacgtggctgtgggtgcctcatgccccactgggctggcgtgtgaggcgtgtccagctcaggctgccctacagctgcccaggaagggtttgtgggagggggtggtcctaccctggtgagtccacggtggtctgccagccccagggaaggcttaggagccccaagacctgccctcttgtccctccctcggcagtgtctggctccggtctggtttgtgaacgggggcctgggtactctcccgccctccctgggggctgtggccttcccctgggaaggtgctggagggtttgtcagcagggccggcatgagtcatggagtggtgactggccgctgaggcatggaaggccactccttccagccaagggtcggagctttttttttgttctggaacggctttgtggcttttacaaattaagcagttttatcttgttccaagagcttgtatttcagcagggagagagtctccaagaagggaactttccactggggagctctgttgggctgggaggctaggaacaggccacgagggagggctgcaggcaggggaagtggccgtctgtgcatggtcatgaatgcaggcccggggtcctggagggggcttggccacgctgtcgctggacgtctgtccccaccagggtccatctgatgcagtacggcacagggtaaagcccagctcctcttacggggttcctgggtcatcagtgggcggggaaccgaggcctcctggagggcggtgcctcagccctcacccctccctcctgtccctcgctgtgctgtccccgatggcctctgccatcccctgggagttcttacccctggacgctcggtgcctgtccggtctcaacctctccagctctgcttttccatctccgaggtgagaggcctggcctgacgcgctctgcacccgcttcctgcccagccccgtgggaactctggtccctgtagtggtttcctggggctgccatcaccaagtgccacaaactgggtggctcaaaacaccagacatttcttctctcgccgttctggaggccagaagtccgaaatcacggcatcagcaggcctggttctttccggaggctccgagggggagcctgcttctcgcctctggcagcttctggcggctcccgaaacccttggcgttccttggctcgtggccacaccactcgacctctgcctccgttgtcacggggcctccttctgtgccctaaatctccccctgtctgtctctcatacggacagtctttctcggatttagggcccactgggtaacccaaaatggtcccatctcaagatccttaacttcataacgtctgcaaagaccctttttccaaataggccatgttcataggctctggggtggatgtaaattttaggggccacctttcatccccctgttgtccccgtgtgtctggatgcacagcatggttccatgtcccagactccttgctggacccctctggccctttggggtggcctttggccttttccactcgtttctgtgctcctggtgaggtgtcggggtcgggcttagcccctgcaggaattctggggacagcatggagccggcaactccccaccaggcgtcttcctacctgcccagagctcatggttgtgaggggtctctccttgtggttttgatttgcaattccccagtggttagtgatgttgagcatcttttcgtgtttattgctcatttgcacatattcttgcagaaatgtctgtccaagtcctttacctgtgtttgatttggatgattgttgttgctgagtgttaggagatctgtagattaatatccagatactaatcccatatctgacctatgatttgctgccattccatggattgccttctccccacgttgttagtgccctttgatatgcaatttttttttttttttttgagatggagtctgactctgttgcccaggctggagtgcagtggcatgatcttggctcactgcaacctccgcctccctggttccagcgattttcctgcctcagcctcctgagtagttgggattacaggcacccgccaccacacccagctaatttttgtatttttagtagagacggggtttcactgtgttgactaagttggtctcgaactcctgacctcaagtaatccacccgtctcggcctcccaaagtgccggagttacaggcgtgagtcaccgcacccaggctgatatgcaaatattttaaacttctatgacgttccactttatctatttgttcttctgttgcctgtgcttttggcgccatatccaagaaatcattgccaaatgcaacgtcaggaagcttttcccctgtgttttcttctaagagttttgtggttttagctcttgagtttaggtctttgatgcaagttgagttgatttttgcatgtggtgtaagggctggtccagcctcatgctctgggctcttgattcacttctcttcttttctcacgcccagctggttccgctgggtggcggggaggagtggggaagtcccgggctgggcctgcactcgatcatcccctctcaggccagccagggagtctcagctcctgcccaggacctggctggacgtgctccctaccgggaaagcctgggccgtctttctaggctgatggcagggccagcccggggcgtcctgaggcctgccctgcggacatgccccttgttctaggtggtgtggctgcccggcctgcgtgtgagaccagctgtctgtgcttcaggccatggaggctgagtgtttccagcctgtccccttgctcggctctccctctggggaagcccctgcagcccattctctgcctccgcttctgccatctgtgcctttgtctgcttcctgtttggaggtggtcatccctggggccacccctcatgatctggacacaagtctccatcctgaagccaccacccaaacccctgtgcctcaaacccctcccacccaccacatgggtttccactgtgaccaactcagcagctgatgaagcttcccttggggctctcctagcaacggggagctggctttcccggaggcctggcctctccctaagtggaagtggggcgtgagggtgtcagcctttttctgctgcctggtgctctaggttggcttgtcacccctggaagcacttgccatccttatacagcaccccacacccacctccccgcctcctaccccttcttccaaggggtcatctctgcttccctccccacccaacctcacccatgtggtccgcccagcaacctttgacccccaacatgacaaaataaacctcccttgccggtcactcattcattcattcagcattgggtgctccctgtggacttggcgctggggtcccgtggaggacaaagccagacacagtccttgccctcatgggactgcacaagtgcaagaccacatcagtaaacgtgaaacacaggaagtgacaggtgtgacaaaggggaccagtggcaggacagaacctgcggttcgtaggaccaggtcaggagggctgcctcggggggacaccttcgggctgagcgcagaaggatgaggggagtaaaccaggctcaaacccagcaggcagaggcgatcgctgcaggcaaccggcaatgtgttcaaaggccctggggcgcggggggctgaggccggcagcacggcaggaagtaagactggggttgaaagagactgactgtcatgttgtgaaatatacacttggttttcatctccatttcctggcacacaactcctaaaatccttggaatctccaaagt

SEQ ID NO: 65565 - DNA, 1134 bp, Homo sapiens
cataccttgccctacacatctcttcccctgtatcctttgtaatatcctttataataaactagtaaattccatgagccccaggaacatgtgtaaaagaaaaaaaaaagaataaaccatagctgctgtagcaagttaatcctaccagcactggctctcatctgccgaccttacctctggcaatgcctccctctcctgggctcctgggacccctccggccccaccacccctcctgtagtggtctcgctggctgctgccctcaggttagtttatttttacccggcctgctcccaccaggggctgaggcctccttgctcactccagcttcctggcccgtctcttgctctgggcacccccccactccgaacggccagagcttctgaagccgctcgctgtgtgcccccgcctggccccatgcatcccgcacggtgctccccagggtctcccactggcaagggcattggcatagattctggggctgccttggttcaagcccaccctgacttggagcctgagggtccctgagggggtcctgaaggccagggcaggcaaggctggcatgctctgggcagtgggggctgggtatgggaggggatcgtgggtggggagattcctcttaaccagcggcccacgtttggagactgatttgggctccaggctacgccttgaaattgggacagagagtggcgcagatctcagcccggagactccctctgcctgtggacgccctcatacctccatccgtggagccaccctcctctttttttttctaaatggggaaactctgacttgaacactgaataaacaacacaccctcgaaatcagcgaagaggcactggctctgaaactttgccatgaaagcttgaaaatgctctttggaccgatttgctggaacagacgggtgtgatggggctgcggggtttcaggtggcaggaggcgtccccgtgcctagggcatcccgatgctcagagtttccccgtgcccagtgtgtccctgtatccagggcatccccatgcccagggtgtccccgtgcctagtgtgtccctgtatccagggcatccccatgcccagggtttccccgtgcccagggtgtccctgtatccagagcatccccatgcccagggtgtccccgtaccc

SEQ ID NO: 65566 - DNA, 1029 bp, Homo sapiens
tagaaacacctagagtaggtatagggtaggtatacatttagttttataagaaactgccagatcttttcccaaagtggcccttccatttcacactcccaccagcaatggatacgagttctagttgctccacatcctggccaacatttggtgctgtcactctgtgaaatcttagtcattctggtgggcgtgtagtggtatcatctcattatggctttaatttgctttggcctgatgactaatgcggttgagcacattttcatgattggctcttcatatatttttcctttgtgaaatgtcttttcaaatctgttgctcattttaaaattgggttgcttgactttttcttctggatactgatcttttgtcagatacgtgttttacaaatattttattccagtctgtggcttgcctgttcattttctttcctttttcaagaacaaggtctcgctgtattgcccaagcaggtctgaaactcctgggctcaagctgtcctcctgcctctgcctccccaagagccggttttacaggcatgagccaccatgcccggcctgttcattttcttagtggtattttccaataagcaaaagtgtgtcactttaatttttatgaagtctaatttaacaaactcctttctttgtggttctctctctgtgttctttgtaagaaacctttgcctaccctgccaaattgcaaagatatttatgttttcctttagaaggcttagagttatatagcttttatgaattaacttttgcatatggtgtgaggtagagggtcagggttcattttgttgtcgttttatgtgtttattcagttgttccaaacttcatttttttttaaagcttttattttgtattttcttggtgacttatgaggtcgcacaattttccaagatccttgttggtcatttacgtattttcctttgtaaaattatctgtccacgtcttacttctttttaaaattatgttgtttcaagatcgagtgatttctgaagccttcattttataatgcttgaaagaatgaacacct

SEQ ID NO: 65567 - DNA, 1657 bp, Homo sapiens
tgagacagatccctctaggctgaaagactccccacaagggtccctagaacaaggctccagcctcggcagtccctcccacttctggtgggaggatctccacagagaagaagggtcaagaagcacagctcttgatgctcacggtgtaccaagctctgctttaagcttgtgtcttattttttacttatttagcaaatctgtcgctcttgttttgtgccagatgctgttctcagcactttacaaatattgatgcatgtttgtttcatgacaaccctgtgaagtaggtagtgttaccccgttttatagatgaggaaacaggcgtagagggataaagggacttgcccaaggtctgtctctaccttacacgcacatgaacgctcactcatgcggcaggcgctagtttccctctgatgtgagtcaggccttgagctggttggggtctgggtcccactttggttgtgttttgctgtgggcaccaaggaagcttctagcagcctcatctccctggtatgacctagctccagggactggatttccccaaatgctcctgcccagcctggagcctcctttccagctgggggagggctgaacgacccctcactcttggaggctgccggagcccctcctgcctgcatgcggccgctgccgggtggacaggcctgcttgtgggttgaggctcccagcagctggggtggatcatttctcctcccaagaagctttgggagaagcagctgagggggccagcgtcctcctgaggccaattccctgcctcccccagcgcaggcgcgaagccatctttgcttgtgtgtttgccacagacagtggagggcggtgcaatcgtgacgcctgcttgttgcactttgcgtccttgaggacgttgacccctggccggtgctgggcgcttgctcttcagtcatcttgccctgacctggcgtggcaggcccgagcactgctcttttacaaggaaacaggctcagaggccttgagtcacttgcccgggctcccccagccaataattggctgagccaggatttccatccagctctgtgactccagaagtccaagttcttcccatcacgtcagggccaggaaaggattagaatgcttttctacgtgccgattatttggatgatctgtgcagcttagctcgttgtagttgctcaataaaaatgtggaatgaatgggcctatatgtcccattgtgtgactcagagccaatgactctggctgatcctcctgttttcattccgtggcccagcatctccctttggggtgtgtgaccttggaagcagtgactctctccatcccaccttgaatggtgtctgcgccgcagcaggggagcagctggggattgccagcgcctgttgctggtgggctgtgcgccagatcccgtcttggatgtgtgggtgattgtcagccacatgtgtgtgaagggctgtgcgtgtaggatttgtgcaaatgtgcccctccctgctgccagcccatgggaggctgtcaagattctgcccctgcacattagcccacactctctttgtggcccactgctgtggctgttcccttgtgtcacgtggctgcaggcacagcccccaagtggatggggatcgtgggctgaatgtgcatcagatgctcctgcttcttggtgggtggagaccctcaaccca

SEQ ID NO: 65568 - DNA, 1374 bp, Homo sapiens
gagcgaggtgtcagcatcgtggggatctccgagggtagccttcccaggcccagggcggagtgtaggcagagggcgcgatggcccagcgtgccggctcacatctggccttgcccttgcccacacggcaatgtgggggagtcatcagcctctcagtgcctcagtttcccatctgtgcaatggggacaagagtaaatcactgtcttcaggtatggtaagcactcatacacattgactattgcagaatgaacacagtgagcccttcttaggcttctactacatgccaggcagggtgccaggccctagtggagaggggacaatgatgggcaagctggctcctgccctcaagggctgtcgagcagggaggaaggcggcggctgccctgactgtgacccggagtggggtgattcgcaaagaggctggcgggaggctggctgggggctggctgggggctgctccctctcctgcctgtgttccgtggcagggtattaaactggcttttttcatggatttccgaggccctgactgtgggacctcgggcaggttttgggaccttgtgactttgttcccgcttgtcattcaggcctttgtcctcagcagtgcccagcacacggcgacttctgcatgtccttcagtgtgtgactgaccctggagctgagacttggcagctgaggctggacattgtccttggataactcccggggaggtgggggcagggtggggctgtgagctggcaactccgagtccctagcagcctccgaatggaggctttcctcttgtaggattctcggggaggaaggaggggatgggggagatgaggcttgtgagtcttcaggagggcagaggttcacacctgcagcgccccagaaacactccggggtgcccaggcttacccagccctcctgagccagaaccaccaagagttggggaccagcagtccattttttagcaagatccagaaatgattctcctgaacagtccgagccaagaatgacatatctggaatcagaacatcagaactacagaggaatcgagagaacgggcccaaaatgtgtagggacctcagccacatggcgccacatggaggaaagcacccaacatcatcactgtatgaacctgtttaaacacacacacacacacacacacacacacacacacacacacacacactccccagtaaagagtggaaagacatttgtcagaatattgatggaagttacctgggttgtgggtttatagattttttccctttgtttttgtgcattttgcaaattttcggctttgtgcctaaattccttttacagtcaggaacaaagcaatagatgttattttttaaagttcatgggctcgtgcccgtaatcccaacactctgggagg

SEQ ID NO: 65569 - DNA, 1343 bp, Homo sapiens
aaaaacacatcacccaacctaatctccccctaggattgagagatgaggaagcagaggccggaaagtgtcacattccctggtcgctggcagtcaggggacctgaggcctgggctggttttctcgtgctccaggcctggggtgtcaggtggagcccctgctttgcccaaaggtctaggtgcctctgccagcactgcttgcttctgcatttttggccacaaggaatgtgggccaaaggcagggtccttgacctctgcccaggagggtgaagtgggctggtcctccttgtccctgctccaaggcccctgcggctgtgcctttggaaactgctggcccgagctagtgtgcggagctgggacagacctcaccgtggccctcgtggggtcattccatgtccgggctggaagggatctttcggtccagcccttcctgttcctcatcaggaaactgagaccagagaggtcatctgcctggcccggggtggggtgtagatggcgcttgtgactcctgcatgccacgtgcagacagtccctcagctgtgggcttcccacgcaagcagccatgctggggataacttggctgaaacctgcgatttaatgaagagaagaatgactcctcctgcagccctgtgccccacaggctccctcctgcccccacccctcctgcagaggggcctcatgctggtgggtgggtccctgttgctgcaatgggcccaggcagtttctgggcagtggaggcttggctgtcttcctgcccaatgtcccctgtagcccacgctgtccgggaagggcggggaagcactcagccactggggacttcacaagatgggtatctgggagatgctgattggcaggccaggctcccgtggcccacaggcaggtcagaggtcacagtgctgagctgggctgagttggcagctcagggcagtgggggtgggggtaccttgctcagccatgggcctctctggcacaagggtttggagtttactgtaaacaactccttcagtttttccttctctcataggccaccagcagaattgaggggccctctgttgatgaggtgtggcctgggaggggctagttgtctgtccacctgatccttgcggacaggtgaccacaggcttcctgccccagggggctgggggaaagatcggggaggcctctctggcttccccacttggaaggaaaatacgggcataggggagacactttacagggacacatttcagccagtaccctctggctgtgctgggggcacagtgcctgccctgcccacaagaggggtcagttctctccaggatttaacttcagccttcagtgcagggcagatgagcactcagaggccca

SEQ ID NO: 65570 - DNA, 2790 bp, Homo sapiens
ctccagaaacctccacttaggtccaggtcccaaggtggatggtaagaggcggctgtccctgccacacttgatgggtgagtgtgtgaacggggctgggagcaggacacttgtcacttctgtggacagattccagaggctcatgaatctgctgctggggaaggtgcctgatctagcctgaccctccacccccacctcccccttcccgccccccttcaccagccctgttcccagagcttcacttccccaaaggcaggcgccgtttcctggacttctcagcagctaccccctaccccagacccctctcttgtaggcccctctggtctcagcgcctactcctccctgggcttctgcccctctaccgtgaggcttctgggcagaagtgtggggccccctcgctgtgtctggctctcgcggtataccaggggtcctcccaggggcccgccctgcccgctaggtttccagggagcttttcaagttcttagatgggcttgatggagtttcccaatgcgttgtctcagagcaggaggggccccggctgagtccgagagtcccctcagtcacaccctgggctgtttggggcagccaggcagcccgtcttctggaggtgctgcctctctctggttaccccttctggaatcttctgcgtccagttgcggcccctcctacacagcacacccaccacccccttttacctgtgactcttctttgtcaacctcttcatgtctttgagaatggagaccaggtcctcctcaccctggagttcagcagaacctaaaccaggcagatccgtgtaggttcacgtgggggctctgtggccactgtggctctgccgtcacctccagcccagcttggcgcgctttggatcatgtcattcagtgccggtcctccaaacctctcccctggctctgcaggtctgggaagcagctggctcctgggtgcagctgtgaccggagcctgaactctgctccctggggtcaccgtcccctgtaattaggctgcagctcatattggctcgggcagaggccatcggctgcccgccttggggccacaacacagagagccccgtgattaatggaggctccacctgggccaagtggcccctggtgttaggcgcttttttttttttttttttttttttgcattttttaagtgcttgtaacatttcccctaatggacaatgagacgaggagggagggaggggtggcttctctgcccaggcagatcaggaatggtcaccgcctgtgtgtgcagtgacaggtctgggaacagacaagggagagcttgtccgggaggctggaccctcacaccgatgctgcctgtgcctggcagctctgtcccgggcctcagaacagacactgaccaacacgctcctcagggtctccaggtccgggtcctggtccccggcagagcttcccatccatgggaagaagcaccgagcagccttgctggctcctcgcagggagctgggatgcatttctaagagcagcatgcgtgaagcccggggtctgggcaaaggagtgtttggggaagagtctgctgttgttggagggtcggaagtagaggggaaggaggggcacgcggtaggctgaggaggtggctggcgaccctgtggtggggacgagggggctatgagcagaccaggagccagcatcacgtttctctgtctccagaatcgaggacggagagctgccagagaggccctggcggggtgtctggggccacctaaagggcgtgggtggattaaagctgaggaaagcctcattttgggggactccgtacttaacctttgaggccctcagagctgcagcctgtggtttttcgaagtcaatcacctcccagggcctcgctcctgccttcagcgacagccatttatcagggagtctttgacccaaggagacctgaaaggtcatctggtccctctcctacccccaggcaggccacacctagaccctcccacacagatccgtcccacccttctgctgccttccaccagggacggagggtgggcggccctcccacccaggccctggcggccccaccccagccaggaaattcttcctctttatctgcctcacatctcttcccctgcggcttccgcccatttcccctcaatctgctcctagtggagcagccagcagctggtttagaacccgggggtggggggagcgctagaccagtgcagcacatctgagagtgtgccagaggtgctcccattcccatagctgatttagtaaagaaaagaggaagtccagcaacttagcgccactttaaagtccgcctggaatgaccctgtggctgccggaaccaggggcacgcggtagatgacgggagcaggcacagagaggccttcgtcccggatcagtcgctgttgccctcttggaggctgggctgcctttcaagaagaggacccaaggccctgtgagcggtggcctcctctggagcctttactgtggtcctggttctgctctgcgtaaagagagatggcttgaagcagaagctgctacgtggctgtcccaggcaggcgcccgtagtcccagctactcgggaggcggaggcaggagaatggcatgaacccgggaggcggagcttgcagtgagcagagatggcaccactgcaccgcagcctgggcgacagagcaagactccgtcttaaaaaaaaaaaaaaaaaaaaggagtagagaaatctttcccagaaggcctgcagtcacctccccttcatgtttcagaggtaaaaaaaaaaaaaactgcacatttcgctttttttttttttttttgagacggagtctcgctc

SEQ ID NO: 65571 - DNA, 3259 bp, Homo sapiens
ggctggagtgcagtggcgcgatctcggctcgctgcaagctccgcctcccgggttcacgccattctcctgcctcagcctcccgagtagctgggactacaggcgcccgccaccacgcccggctaattttttgtgtttttagtagagacggggtttcactgtgttagccaggatggtctcgatctcctgacctcgtgatctgcccgcctctgcctcccaaagtgctgggattacaggcgtgagccgccgcgcccggccacacgtttctgttcttgaacaggtggctccctgaccctgggtgtggttactccaagaccttgctctggtggggcacaattctggccccaggtagggcgaccgtataacttactgtcccttgggggacacgttagtgaaagggacccttgaatgactacggtgggacaacagatgtgagctgggtttgtcccaggaaggctggatgtatgggcctcttgagccagaggagacaacagcagaaagctctgcggctgatgggaccgagcaggagaagggccggcggaggctggggcaacaacgcacttgcccactgtgaagggcctgtgtgagctgatggctgatgagagggcagtggggcgaggctgcctcctgccaggctagaccagctccaggacacccatatctccttttcagaaccggtgactcagtggctagaaggggcttcagaattgacgggacactgagggagtcgaatggaatggctggagtggccacagcaggctctaggcctcctcccgtttcttttctgtgttctgttcctggggtctatatcctggggttgctgtaacagagtgccacaacctgggggcttacaaacatagcttccggcggctcctggagattcctggcgttccttggcctgcagacgcatcaccatcatctctgatctctggcccctgtctccacgtggctttctccccctgtctgtgtgtctttctccttttctgtcttttataaagatgctcaccattggatttagggcccactaaattcagaatgatctcaccttgagacccttaccttaattacatctgcaaagatccgttttccaaatgtgatcatgttcgcaggttccaggagttaggacttaagacatatcgttttgggggacactgttgaacccactacatttaataaacccagagttggtgccaatgtcccctgcggacaccatagcagattctggaggttccttgtaaaggaatccgtaggacttcttttcccttctggagggatgagactgtagctgggctggggaaagctgctggttcaagctggggctggttcagctggtgctggcttgccaggttgttagagagctttatccagggagaaattaacatcacaaagttgggggataagagaaggtttggaatcccaagggctggctgttgaggtcagctgcccacccctttgtgttccatcttacagggacccaggcctgccagtgctccgtttctggaaggaatgctgtgggctgctgtgccccataggcagggtggagggtccccttgcagccagcgagctgctcttcctgtagcgtgcagagggaaggaggaggcttgtttatttctcttggcctcagccgaaaatccaaccacaggctctggcactaggcagacctgctcattctcacatcatcattgcagagtgagccaggcctcttgggtggggctgtgatgagcaggaaggacctccggagtgcctgggacttcttgggcccagggttgccagaggcagagagaaagaagcctcctcctaacacttgagcaaagatagtcatcagaatccatcagagtggcctcctgtggctcttccctgggtgctgacccccctggtgcatttgaagttttcagggatactattgacgctccctgcacctccatccaggggttagtggaaatggttcttttcctccttgtccagaggtactgtggatgatgaccccaggtcccagacctcagtcattgggccacgtgtgcagataagcctgggcagtcagtaacctttggccaccaagctggcctcctgcggactgggccggcactggaggcgggtcttagctgctagcactgtggcccagccaggcctggccttgggaaggcagagggggaggggactgggaaagggattgagctgggggtggggtggtaccctggttcttccctcccagacctttggcaggtttgaactatctggctgcggctctctaaggagggagcgcctcctccgccttgatgtggactttgccttctgttcacgttgtccctgtccctaaacaaatgtggctctctgtggggagcctgggggccgccctccactgacactgctgtttcctggcttccctttgcaggctccgctcagcttcactgcgcctatttttaagcctttccttttggacggttttgcttcctgagaacacacccctccccatcaccccaactgtgtcctcctccctatccggagcctgctccacctgccccaggagccacctccctcctccaccaagcagcccaggccaattctggagggctaatttgtgtccctccagaagcaggtcctgagacagggatttcagtgggaggggacaccaggggatgcctgagtgtgggaatgggccaggcagggaatccagccaataaagggtgcctcaccagctcattgtgaccacaggtggctgcccagcccccataccgggcagcatggggagactgcagaccgtgcccccagccttgtcccacctggggttgggtaagggagctggggtttttatacttcagttcttggccaaggactgcactgctcactccttccagccttccgagggcttgggcactaggaaaggctctgggtggagacacggaaataggccatgtgaagtcagtgggcgtgattggtagcagtaaggccaggacagccttggtcaccagcaaggtgaccacacatttcagcatgcacagcccccacagacacacacccaggagatggtaattacaccagcaacagtcacccctgccgcgtgccatgcctgcacccagggaatcttattttttatttatttatttatttttatttgagatggagttgcgctcttgttgcccaggatagagtgcaatggcacaatctcggctcaccacaacctccgcctcctgggttcaagctattctgcctcagcctcccgagtagctgggattacaggcatgcaccaccacgcctgactatt

SEQ ID NO: 65572 - DNA, 4777 bp, Homo sapiens
catgtcctctggccaccctggccttggtgcctggcccctgtgaaacagagatacctgggcagtcccccacttgtgcttgcaagcctgtgtggcttcagtgatggctgattctgctccacccagaggacctgggaatcctcagcccaactgtccagaggagtctttctcagtggggagagcctgagctgtcctcctggtggacagtcctttagatctcaggcggacttccctgccggccgttcctcctgctgcccctgctcctctgtcccccatctgtctcccaccctctcccctgcagcagccagctggcacggggacctccccttccctctgggattgtgaatgagacgactttcctggtccttctgggtctagatctttctggcaacagtcagtgaaacccttgtctcaggtgggaggagaaggctcagtatgtggtcacaacaacggtcctaaccacatcactctcaaacgctggctttcacttaccccttgccctgcccaacagttactttcatcatcccattttccagattaggaaatcaaggcgcagagagcttcagccacttgcctgaggcccccacagttaagtgtctggatttgaaccctggagcagcctggctgctgagctgtcctggagacggggtactgtgcagtggtcggggtaggggtggagctctgccgtcgctgactcccgggctacctggagtgataacacagcccagtgtctgggcccctgcctgagactttggctggatgccaggagcccgagaccttccagctctttcctgtgtaaggcgccatggggtgaaatgaaagaaaaccccagttagaaggtgtccccctcttccttcagtccctcagctgccctggattttgaaataagacaccgcccgtctgtggggtgagcaggaacagattggaaccgcatttctctccccccagtcacagctgccaggagctcatctttctctgtctcctccccctgccgcctctccccacaagactgggctggatgctgctgggaaagtcaacaggaagtcttttggctgcggtggaggtgggggtctgtgcttccctggggaccgagatgagggctccaggttggctccggcaagagcagggaggctcacgtctctgcctgctggttttgcttcctgtcctgggagaaggtatccacatgtcccagaatgcaccctctgcgtgtacagggatggcttttgggccattcacctgaggtttattgatctttctctttggaactggagtggctcctccacggtggattgggctgagctctctgcctcggccgacgtctttccccaggcacttcctctcaccgtgccagggtgcaggttgctagtggatgggtcttcaccctcggggattggcagctgccacgctcatttcacagtcgagacaccctggccgaaggttctgctaagctccatggagtgtagggattttttttgagacggtctctctctgtcgcccaggctggagttcaatggcccaatgtcccgctcactgtgatctcgacctcctaggctcagcagtcctcccatctcagcctaccaagtagctgggactacaggtgtgtgccaccatgcctggttaattttttaattttaatttttttttgtagaaatggagtcttactatatttcccaggctgaactccaactcctgggcttaaatgatcctcctgccttggcctgccaaagtgctgggattccaggcatgagccattgtgctcagctggggttttcctttaacccttcctggcccttcccaggtgcaggacccgggcctcagccttatgtgttcttgaacagctctgggctctgtcctgtacctcctgggcgcgtggtcaggcctctcgtgacatcagcaggagactcaggtgaagaagcaggcagaacggaatgcttgctcacccagcctcggggccaggcggggcggccaggacagtagcagtggctggtgtggcttcctgggaggtcagcccattggcgtggccagcgaatggggaggggagcttctccccttgtctcccctcatttctggtctctgggcctccagggccaggtctccagagttctaggtggaggatggaggtcagggaagctggggtaagagcgggctgggggtgggtggtcaggcggatcctggaaaaccatcctctgcaggtcccgctttccccagggagcactcagggctggtcccggggagccgggctaatggtcacctcggatggtgcaggggtccatccccatgaaaccgggcccatccccatgaaactgggcccacagaagcttttggttccggttctgttctgccccctggctcttgcttccaaagtaggactcaggatagctctgaattccctgccgaaatgcagcttcctgggccctaacccagccctccagaaccagagtctctggggtgggccctctgcttgtctagcagcctccaggggacacttgtgcctgccagagcaagtctaataagcactgctgtaaacccctcgtccccacagccttctggttcgtctcccttttcctgctgggatctgcatcaggattaaatgccaacatcagggatcaggttatacttgtgaaccctgagacaatacctgcatctttttttttcttgaggctgtcttgctcgctctgtcatccaggctgaagtacaatggtgtgatatccactcatggcaacctccacctccagggttcaagcaattctcctgtctcagcctcctgagtagctgggactacaggctcacaccaccacacctggctaatttttgtatttttagtagagatggagtttcaccatgttggccaggctggtctcgaactcctggcctcaagcgatccgcccgcctcagcctcccaaagtgctgggactacaggcgtgagccactgcgcccggcctgatacctatatcttgaccaagctgctgtggaaacattgagttccccttgatagttttgtccacagagtgaatgtttaggaaccggcgaggcatctctcacccccacccagatggcggcctggaggcagcgtttctgaccctgtgatgggatttgtctctcttgtccaagagactttagagatgtggcccctgaatgtgggggcccctgttggggtgggaacgggagctggccctggccattgtccagtgaccccatctcagtgcctcgatcctagcaccctcgatctcagcgcctccccttccccggctccgcgcggagatcacgtggcttgcgctgagcaatcctccactgcccccgtcgcgttcctgctgcagggaagcctttccagggagccagctgacacatttggcctccattatttgtttttgaacaggaatgaaaggagagagtgagtaagaaagtggcaggaggtgggggttgcagagtaggggaaggtcagagagaggggaggaaagatctggaaagtccaggcatgtgctctggaagcaggtgccagcgatgagctcatctggagggtggccgcccgccctgagccctgcctggggccagcagggaacactctgccagggcatgtcgctgggagcctgtccttggctcactttctgctgctttgagcgctgagcagatttgtttccattttagggacaacgcaaggaggctgtcattccacccctcaccttattaatatttcatgaatcataagtgaccacttactgcgtcctgacgtactccaggcgctgggctcgaagctttatgcgcttcatgggatgtatctgcactatcgccgtagaaaacggttcctgttactactgcagagaaggcaccgaggcacagagaggttgaggaactggcctcaggccacacagctagaagcggctgaccctggctgtgaacacagggctgcttgactccaaagcctgagctggtttgcagcgaggctcatggtttctgtgccactgtttgagcctctggtcgagccccttggctcagtggggggcccagtgacctaccagctgttccattatatgttgtggacacctccacggcccacctgggtgggagggaaggggcttcaggaggtgggaggggtacagggaacacagtccagcctgcttgggcccaataccttgaccttcaaggtaccccttgagggtagcatgaggctaagctcttgttctcctccaggactctgttcctgtgagggcctcggggtcccttgcttttttctgggggccttgctggtcaggatcacagagaagctctttgctgttgatctttctgcctctgtatcttttggcaagccattttatgactcagttgctttgtctgtaaaatgggttgaataacattgtcctgcctcggagggtttttgggaggatcaaatgagacctgttgcacagaagccctttgtaagccatgctgactggcggtcgccgggcccccaagtgaatgggcatccgggcactgagtgtgtggactcagtactcggaaggaggggctggggggtacctagaactcctgggaggcttggacccctgctctgctcagattctgagcttctccttggccagtttaattcccatcagtagggtgagggtaaccaggacttacgcatagttgggcgaagtcgagtgaccacatgtggaagtctagcgtccttcatgcaaagtgggcaggcggccaaagtgagctctgctccagtccccccacccccggggctgttcctggcgccctgccctcccccagagccccactgacctgcaccatgtgacccggg

SEQ ID NO: 65573 - DNA, 1966 bp, Homo sapiens
atggggcatggatgagtattggagagtcttgccgtttatttgttcatatgccctctgggagggcaggggacactgacttgtgttgtgggtgccttgcatgtcacgggtgctcagtgaatgcctgttaagcattaggggagcacaaaggagggaagcctctgtccaactggagcagtcagggaagacttcctggaggaagtggtatctggtctgcttagaatgtggcgatttgtctgtatgcagacattagattagagggcaaaggccattatcataacttagcagacagctacaagcagctaaggaattgctatgacatggactgctcgtgattggagctaagaaggagtcagagacagaggtccctgtgctctggcgtgagtccttgggggaggctgagctcccagaatgtggggccgcctgtgcagaggccggaggtgggagacacacctgtgagtgccggtgagtgtggggtgagccactggggctggatcagaagatgggaatccctaaacccaccaaccagccttggtgccctgggagtgacaggagacggggcttctgggggactaacccagcacaagtggacgagatgggatgcaggggaaaggacaaagctctctgaggctttgggaagctgagttagggtagagccatgacagggtgagttccagaagcaacacaagaaaaaatagctagactgggttttcccttcactgtgggagatgccccacctcacttcccccgtcctccgggctctggcaatgggctgggcacagtgaatgggttccatctgcaggagtggtcacaccccttgggcacagctgcctcatacactgtattgagatgggatccgaggccgggaagaacagcttcttctgtaggttgacattgtcagccttcggggagggaaggacggcagggggcctggagcatctccttttgccatccacactctgtgcctgcctgcagggtcttgagccctgtctgttctgcctcagtcctggtcaggaacttgttggagcccataggggcagtcaggctggaacaggaggagaccaggccggcaggggagccgagagggggccctggacagcacccagggctgagtcatcctgggcctgcccgacttgctatttggagctgttcccgcttgctcatcatgtgcaaggtcctgatccactcgggtctgtttaaccagcgcccctccccaggcccagttagcctggttttcgttcgattcatttattgtcatcagtgccatccttgcaccacgtaactagcctttgcagcatgccagccaccaagctcagggccctctgtgcatctcctgtaaccctcacagcaacccgggaggcacagagaggctgagtcgctggcccatagtcacacagcaggtatggggcattgccaggatttagccggatctctgactccagggcctttccagggccttgggtgggacactggcaaggaagcaaggtatgaacactggccctgccttggacagagctcggggacggtggcctggcaggcccagctgacacagtgaccctggtgcaggttcaaccattggcaaagtgttcaagtacacacagaatctcaactggggagacaggcgaagcggtcaagggagggctgtgagtgacaggtggacactgtacctactggcagatcagctgaccttggtgccttctggagcctttcaacttccttatccagaaaaagaggaactaacagttccacccccaaactgggtgggagtaccacattcgaaattgaagcaaagctggtcgtgtcacaggctcggcagatgttagctgtgcaggcaacttagtgaccatttgaagtaggctgtgcggcggcatcctcatcttgcagatgtagtccagagaggttagggcactaaccctgggtcacacagcgacagctcaggctacagagagcagtgctggatgggagggtg

SEQ ID NO: 65574 - DNA, 1757 bp, Homo sapiens
catttggggagggactgagggctgattgtgttgtggggatgttggcagagaatcagagagggcatccaaaaaggccaacagttcggtggggagaggaggcgcaaggctggttcctgttttctgggctttgatcgaaagggaacaggggacacatctggggacagtctccttcctggaggaagaagggcttagggtgctggtgtggagtttgcacagatggggataatgagctggagggtgctgggcaggagctggccagtaataggctgacgagggaggccctgctggctgggcctggttttcaagtgagcatcctgagctgcggggacccagggggtcttagagacctcagagctgagactcgggaccacagaggggtgggctgtgctcagggcaacacagcggatggggcagatgttgcgaaacctgtctctctgcctctctttctcctgctacagaactggatcctcccagctcatggctgtcaaatcctttagatgcttctgggttccatgggcgccttacactggcttccctgtaggacagcagaccctgggggttggctctgatggtattcaccatggggtaccccatgcaagcacagtgctttcacgcccagcctcccagcctgtggagtaggcctgtgtctggccagcctcactttgtggccagaggagggagacagtggttctggagacaggagctggcctggggctgccctcccagcccctgttctcccagctcatctccttgccttgcgggtgctggccaccctccccccgccagctccatccccagctttctctgcccgagccgtgacctgtcagtagggggcagtggaggccttgaaagtccttggagaggactttgaagcagtttttacaaatctgtccctggaaagtctctcctgtcacacccccagcggctccctccctcctaacatttttcctggggttgtcatgcagcggggggtggaggaacccactaggccgtggatagagcagagccatgttgacacaaaccctggctgaacccacatgctccctacagccagcggccgatcactggaaccagggaagtgacctcatagcaagggcccgcagagcagccatcacgcattcccgatcttggtttctggacccagctctggaaaagaagccagatcctagccacttggagctgcctagggaagaccccagcctggtgccggctgacagctcactggaacttttcatctgcttggccaggtgatgccaaggggcagaggttagaagtgctaagaagcaggccgagggtggtggctcacgcatgtaatcccaacactttgggaggccaaggcgggtgaatcccttaaggtcaggagttcaagaccaggctggtcaacatggcgaaaccccatctctactgaaaatacaaaaattagccaggtatggtggtgcacgcttgtaatcccagctactctggaggctgaggcaggagaatctcttgaacccgggaggcagaggttgcagtgagccgagactgtgctactgcactccagcctgggcaacagagcaatactccgtatcaaaaaaaaaaaaaagaagaagaacaagaagtgctaagaagcatctgtcttcctgattgaaaagcaatctttgctgggcgtggtggctcacgcctgtaatcccagctttgggaggctgcggtgggagagtcgcttgaggccaggcgttcgagaccagtctgggcaacagaggtgctaggggtagtggcgc

SEQ ID NO: 65575 - DNA, 3003 bp, Homo sapiens
gaggcccacggggcaggggcgtggtgggagctgcatcctcgaggctttctgttgaccctgacacctggccagaaaggagttccttctggcatcctttgtcagcggtttctggagctgccctttaggggccagtgatgagggtgccctgggctgggctgcagacagtggaaaagacaggctcttctcactcccagtgctggggaaattagcttcttggaggaagggggagctgtattttctgagtggccgcacttcctggcctagacgtgtgtgtcttgctgtaattttggcgactggtgttggtggtgcccattttatggatggggaaggtcaaattccacagatattgagtgacaggcccagggccttggatttcagtgtttgactcagaacccaggtctctgatctgccaccagcctccctcccattcagatgggaacagggactccgggcatgcagtcttctcccagacactcccccggctctggcctggcgcccggagaccagtagcagcagctccccacggccgttcactgtgagggtggggagggccgtgggaccaggaggccttagggggaaagttggccatgaggagtgggaagcgacgggtcagatgccagtgactgctggctggggagccgctggacgtggctggcctgtttggccagtgtggcgggtgccccggggcttcagtcacccccagccacgtgtgggggtgcgggatgggaaaggtaagagtgtgtggagcccagtcagcactcaacatgaggtcccgtgggggctgcctgagggcgtagcttccagaattcagcccctggccctcagaaggtgtcaccaaaggcttctttccatttgagtgaatccctcccagcccccagcaagccctcggaacgagcccactcccaggcgctctctcctagtgtgggagtggccacgcccctgctgggagtgactcacttgggttcagaggtcgtggcactgagatgggtctggcagatcccagcgtccaggcccagcccctatagtgtcagctccctcctctggggacccccttgcttgtgcccctctgggtcccagcacatcccaggcctgcagggagggggagaggaagagactgactcactggccaggtcccccaggggctggagaggctggagaggcaggagctggatcagatctgaatccagaggctctcggaggaagagctcagggtgagctgcgcccccatcccctgcccctcctctcctgctccttctcccttccatggtcccagccagcaagcacctggggtagaggggacaaacccaggtggctgtgttccagccctggctgcaggtctgaatggctttctggggtggctggccatgctccctgagagcccagctgtggcgatgtctgagcaggtaggtgggggagcacctaggaagcaggggtgtcaggcagagcacaaggagagagggtgtccaggtcagtttcaggacctggctgagaggagggggctcctcacgggcaccgcctctggcaagcacagggacaagggcaaggacggcatggccagaggtccctgggagcctcttcccctctcttcttcctagcagctccccctcactcttcccagggaccctgtcactttcctttagcgtgtggcagctccttggcgtccctcccgtgccttcaggttgcttctgcgccgggcctgccgctgggcgcccctatctctgcctgccccctcctcctgctcccctcgccctgcccccttggagcaattccccaccgagcctcccttcccaggcagtcgaggtccctccctacctctgccccgcgctctgggaggctccttgttccgcgaccacaaagcccctttgatcctctgctcggctctgagccatgtgacccggtgggcgggccgcggctctcggcgcgtccagcgcagcccgacgttccgctgctggggtgagtcctgctcctttgttcttcccagccttgcaccactggctcgggggctctcaggtggcgcggccgcgaggcggaccctgatggccatggtggcggtgccgggagccacgctgtccctgggccccggcccgaggccggcaggaccgagcggggtccccaggagaggggtggcggggagctcgatctccacgcggggaccagattttcggcctcaaaatagaagaatagggctttgtgtggtcacagctatctctttgtaaatatttggccaactaagctgagtggctaagttctcctgctgcccggagcttcttggaacatgtttccttttcgcaaggggtttccctggcttccaggagggccaggaagaaattcgaattggccaccgctttctctaaaatcactccgctcaagttatcacccctctgggctcccgaagaccggctggctggaggctggagatagtctcaatgctcgaaatgccgtaaccgaagctccccgcggcgccggcactgggatccagggagctgctgctacagcgcagctctggattcctggatgtgttggatatgtgcagggcgttcctgggaggagcggggagggagggtgctgctggcggggctggtctgcgtgtgctttgcttctctacaatggcatgctgcgtgtcggccatgcagaggcatgtcagtgagcaggggctgagggatctccctaacggacctgctttcagagggtcttttcatgctgggagaaccccagagactaaatcatgcagccaacggggtggtccccggcctcaaagcagggaggggcgaggagctttgtaggcaatgccatctgctcctgaaacgccgtcccagtgactctggggactgactcagcctccagcctgctgcacttcatccctggcccctctctctttgctttttcatgtgaaatctgctgtgttttggtcagaggtttggggaacagctctctgctcatctaagataagtttgtaattcctttcctggagaaaaatatgccacccggaagcaggttgagcag

SEQ ID NO: 65576 - DNA, 2137 bp, Homo sapiens
ctgtaatggcagctactcgggaggctgagacaggagaatcacttgaacctgggaggtggaggttgcagtgagctgagattgtgctactgcactccagtctgggcaacaagagtgaaactctgtctcaaaaaaaaaaaaaaaaagccttatctgggcctgggatctgtcctccgaacactgggtccactgtgctccacaaggactttcaccccggaagccctagacccacttgggcaaccagagtctctgggttgaccactccccagccctggccagcctcctgggccaccgtattctcccaacttcctgttgtgccacggctggtccaagctgctcttatcagacaatgcgaggcacttccacaggaggggacaaccccgtccttaggagccccttctccctgcccccaggcctggtgcagtgtgtggcttccctgccggtgtcaaaggtctcaaggcccctttaagaagcctgtcaccaccaccagcagcttccgttatctggttcttctgtacatgtaagcctttcccatacaccccggatgtttagggcttccgccctctctccctggccgggagtgtgggaagagggctttatttcaatgcttgagagtagggtcaatggccagggtaagctgtgggggctcctccccgccggcccctctctgcagccctcaccttaacacagagcatcgataccacctgggctttgggaagacctggaggctgaccaccctggaggctcccagcgtcccacagccactctttggggaagaggcttcctgagggacttgtggcccttggctgggactctagtcccagagttctgccttccggcgccgagctttgatttgtttattgagtgccagcccggttcccggacaggtagggacctgttcccggagctcagcagagccttgggaagctttcccaggagggctcccgagggtggcggccatgcccagtccgctgtacgtgtgagtttgtttgatgaggaattggctgggaaggcgcgggtctaattacaggcccatgagggtccctctcgcccccacccaggaagcagcggagatcctggcacactcagcacctgggcctgtgcctgcccagctgctggtggaatcatgggagccttgctccggggcctgtagagcagcagtgggaaccttccccacctcagcccctcccagagttggctgttcaaactcgccgccgctcagcctcttcctcctctctttcatcaaccctgggaatcgcacactgcccaccccaccgggccccggagcgggtgcaggaagagagagcttaacacccagaggtctgggccttctgcaggcgcctgagctgctgtggcctgagctgggttccctgctggaaccatcacagtagacctaatgatctgcctgcaggagttgcttcatcccagccgactccggggctgcgggaaggggctgggccttggttttgctgggggtggggggtcagtgcaaagggcctgaaaagtggcagaggtgatggcccatctgtcctccccctggccggccggcctaaacgcgattggctctctttcttttttttttttccctcccttttccctataaataacactaaatgcgatttgtcaatgcattcatttgggttcagtagttggaccatgggcagaagcactccagatttgtcactttccctaagctaagggtggggaacaccctctgtgagatcttggctcctgagcgcccaagactgctcttggaaccccaactctgggtcggtctcaggggactgacgttgatggagttgctgacattgacctccggcctctgcatggccttcaggaagggggcccttcgctctctgtcccgtcgagcctggctggcagcactcccttctcaggcctgtgcccccggcagggcctgctgcccccgccctgctctgtgggtgccaggctccaagcaccaggtgactcggtcactgaatggtcactgaacagtcatccttgctggtgtccccagtggaatgtgcatggacgtcctccctcccccagatccttgtcttttatctctcagcctttgttccaggggccaccacaggaccaggaggtacgcagacgtgggtggcacatccactgggcagattca

SEQ ID NO: 65577 - DNA, 799 bp, Homo sapiens
accgactcggaagttcccaggactcggctgggcgtggtgactcacacctataatctcagcactttgggaggccaaggcaggccgatcacttgaggtcaggagttcgagaccagcctggccaacatggtgaaaccgtctttacccaaatacaaaaaaacaaagaagaagttcccaggactctgcctttaaaaactgtcccagaaccgccccacccccaccctgccacccccgccactccgcctgcccatctctgcagttgctgagtaacagtaaggtcttgctgctgctgctgctgctgctgtcacttttcccttgaaatgacttacagcacttacttaataacaagcattaggggattacatgtccaacacatgctttcggggtcacattcaaaccgtagctgggatgatagctaaaaggcacaaggacttgggttttttccaaggtgatgaaattctccaaagttgacttaagtgatgattgcacatatctgtgaatatgccaagaaccacctgccaaaaacacaacaggtgagtcacatggtgacttcatttgccagggctactataacagaatacaacagactgggtgccttcaaccacagaaacctatttcctcacagttctgggggctggaagtctaagagaaggtgtcagcagggttggtttcttcttttgtttttttttttgagatgaggtctcactctgtctcactggcagtggtgtgatcatggctcactgcagcctcctgctcccaggctcaagcgattctcccacctcagccccccgagtagctggga

SEQ ID NO: 65578 - DNA, 2262 bp, Homo sapiens
caaaattgcattgcgaaagtactagtgtgttattatctcctcttcaagacagggacacgtagacagggaatggcctcttccaataccaacttccaagtagcactgctgatcctccactgaacgatgggggaaaagctagcctgcttctgcgaccttgcatgaaaatggagaaaattcttggtttcaaaatcttctcctggcttgaaccgaaagttaaaaagggacttttcgaattgcacattgcgcctgaccttacctaccactaatgaataatggatatcgaggagccgtggaatggaggatcacggcggcgtacggagcaccggggaggaatcgtggggtgcgtaggcgccggagcgcccgggttcggcccggaccgaaggcttgcgcggtgaaggtgtggtgtctgtgctccggggaaagggctgtctccccgggggactgtttcgcagcgaggcttgttttgctcgcagctgggcgctccctggggagcgactgagcgcaagggcgggccgggaggcgcgaggcgagcacgatgctccagggccccaaggactcgtgtgcgtgtgcgtgtgcaaagtggggcggtgcagggcgtgtgcacggcacgggcgagacgcgcgccggtgcgggcgccgggcgccgccgggcgcaattacagcataaagcccgggcgccgcggggcgctggcccggagaacccaccggacgcgcagaaccggatcggcacccctcccgccagcaccctaacgcggagccacagcgcccagggaccggagggcaggcggcggcggtaaaggacaccacgcaagtctccacgtaacccccccgagcagtgcaagctcccaggactggcgcgcgtcccggccactcggagcgcgcaccgctcgcaccccggcgcgctccccgcgcggtgcagggaaccacagcgcgggcgggtattaaggggaaaggaggaggcgtggcctggccgaggagccaatgggccgggaggggcgcgcgggggaggagctcaggtgcagagtgccgattggccagttcgccctccggtatgcagatacggtgggagtcacgtgctaggggccgggacgacttcctgttggaggccaacgcggggcggggaagggggcgcgagcgccccgtctggctgaagcggggggaggggggttcttgtcagttagagcaacaagatggccgcggtggcagctccgcacctcagcgcgacggccccgggagccgtagccgccgccgccggccccgccgccgcgcagtcttgagcgccgcccgggccgccccctgacagggcagtcccagcgcccgccgcgctcccgccgccgtcaccgtcgcagtagccgcgggcccgcccgagccggaggcggagggagcggagcggccccgcgcccagccgtccgcagctgccaccgccgccgccgccgccgcctaggacccggaccccgccggagccgcatcccgccgggcgtgaggaggaggacgcgtcgcggcgttgccggggccggacctggacctgccgggacgcgccgccgcccactcgcccgcgccgccgccgcagccgccgccgccgcccgcgccgggacctgagtccgtggcgccggcgctgagcgggcccccgccgcccgcgcactcccgaggccctcgggcggttgttcgtgccgccgccgccgccaggcccgcgccaccggagccccgcggagccgccgccgccgccggggacggagcccaggtgagcgcggcagtccgcccgctcctcgccgcagccgcaactttgccgggaggttcgcgggccctttgttcggccgagccgagccggggcgggcgctggcccctagcgacccgcgtgcggcgccaggccccgggccggccgggtttgaggggagcggcgggaagcggccggggccggggcgcgtgtgtgctagtgtgagacggggctgtgcagacgcccggtgtgcatcacaatcaaacgggagtggaatggagggctgaagatggatgtgccccctcccttttaaaactcatgcagcggtgaaattcggtcctttccgggcagccccccgcagattttgcactggtgatggcaggcgcgaacccgccgtgttttggtgcaggagcccggtgccgttgtttgggggaagagaaaaacccggggcgtgctgcgggtgggcggagaaggacccctgggcgctctgcggctctgaaatcaggtggattttctaacggtgctgcggactgcggagtaatgcgtatg

SEQ ID NO: 65579 - DNA, 456 bp, Homo sapiens
ggaaggaaacacattctctgacagtgctggaagctgcattccaagactcagagtctgcagggctgggtcctcccaaggccccgcgggagcacctgctcctggctcctgtcctggtttctgggggttgcctccctcatgccattctcccggtgtgtgtctgagtctcctttcctcttctcctcaggccccaccctaatccagcatgaattactggagttaatatttaacatgagagagggggagccatctgtaaaaacctgatttccaaatatgttcccatgggcaggtcctgggagtcaccattggaacctatctttttggaggacataattcaacccttaacggacggcggcttattcaaagtcagatctcagagcccctccctaggtctaatgagttgcaacctccagggttgggactggaatttctaagcttcctgttgtcacagagaccagt

SEQ ID NO: 65580 - DNA, 1854 bp, Homo sapiens
aggcatgcaccaccacaccaggctaatttttgtatttttagtagagacggggtttctccatgttggtcaggctggtctcgaactcctgacctcaggtgatccaaccgcctcggcctcccaaagtgctgggattacaggtgtgagccaccgctcccggccttgcacaccatcttaagtgtgacgccacactgcccttcacagccttggggctctgcccagaccaggaggaatggggagggggtctttgaccctaccccaggcttagccccagagaggaggaaagagtggcaggccaggcagggaggggctccagggtgtggcctgggtttttcagtgggatgggggaggggttgcttatgagcctgggtgggttcttggtaggtggtgggcttcctagaggaggcggtgggagggcaggggcaaagagggtgagcggtcctcagttcgtccgtcttcccgggggactctctgaccctttctggtccgtgctgcggccggcgtggcccggagactagcccctcaaccccgaggtggggtggacccgggtgctccgcggccacagcccctccccgcctctagaagcgcagtcccgcggctcgcccgccgctcgcgagggccgcactttgccctcggtccctagcggcgcctggccacgcccccggcgggtggagtcgggcggggcgccgggcaggttcctctgcgttccgcggcggcggcagcggcggcgacggcgacatggagagcggggcctacggcgcggccaaggcgggcggctccttcgacctgcggcgcttcctgacgcagccgcaggtggtggcgcgcgccgtgtgcttggtgagcccggggagggcgggccgagggcaccctggggaccccctctccgtcgccaggcccggcggggcccctagcccacgagcgcgacaggtggcggcggccgcgtccggggcctggcggcgagcggggccggcgtccagcgtcccgggccccgccttcccgccctccacagtctgtcccgctgtcccctcccggtcccgggtcccgccacccaccccacccccagcctcgcgccccgacgcggggtgtccggatctccgcagggagcgggcccctgcctcgctggcagtgggaggagtttgggggcggctcccggacaggtggcccgcacgccgcgactcccagattggggagttcaccgggacggggttttccgaagccacgtggggtaagggagggggcggggggcgacccaacgcccggaaacagggtgtccttcccactcggggcaggccacgggtccgccttcccacccgaagttgagggaccccaagatgtaccccctccctgtaaggtgggcaatacctccaaaaccaggttttgtgtgtgtgtgtgtgtggcggggagggggcctgttcttggacagccagccctgaaagctggagggggtggcatgagggggcaggcagaggtgggcctgctgtgcccagaccatgcctgggcctggagcttctgaggtcctccagggcgcccacaccagctcccagccaggctgtgggatctgatcgcctctgtcctgggctgtgtccaagaatcaggtgcccagtgggtcgggatggcagtgccaggagtcctggatgggcaccctgctcccatcatcccggagatccggcttcatctccatctgggggcggggcctgtgactgccagctccagagccctatggagagctccctgggacaacagggcaggactggcaggggagagtcctggggccatcccagagggatcctgatgctcacagacctgtcccacacctgctgaggtggagcaggcgtgggtggtggccttcaagtttag

SEQ ID NO: 65581 - DNA, 2105 bp, Homo sapiens
acacgcctgtaatatcggctacttgggaggctgacgggggagaatcacttcaactggggaagcagaggctgcagtgagcagggattgcgtcactgcactccagcctgggcgacagagaccctgtctcaaaacaaaagaaaaaaagatctggaagaaaatccccacccaaatcaagttggagctgtccatgagacccagggaaacccaggtgaaagagaaatgtgcgtccaccaaccagtgaattttcaattagttaatttcataagctacagcagaggcgtggaccctgccctctccacacttgaagagataagcccctgggatccaagtcccagcaaggttggtgccacccatcttggtgaaagatgctgttgttcctgtggaaaccatcaccagaggtaggaagggctttgagcccaaaaggaaacaagagggcgtgaatccaggccatcctcaggggagggtgggagcccatcccaggcagagaggcctaagcctcagtgtgggccaaggctcaaaggtgctggcacaggcttcccagggagaacagaaactcagcagtgaaagccgcagaggggaagaagcaggctgatgtcaacagcgtggggctctgtccctcaccccaaggagagggagtgtgccagatcccaggccaccaagcggggccagctccagcctgggcgatcgtcccagcagctgagagggaagctttaagcagaccagtgggtaggagaggagggagcatgcggcaggtggggcagccacacaaaggagagttcccagaaggccaaggtgtggtcaccctccacgcctcccgacttcctcctggagtggctgggcagcatgcagggcagcgtccagtaggcggcagtggcaggaagggagcgggcggccctcgcaggtccctcagttggcagggctgcattgcagaatctgctgtggggcaaagagcttcctggcagccacggcttcccctggctttcctggcactgggcagttctctttgttgtccggcccggcaggctggcctgaggccttcttgaagtagcagagccgacacacggagtggtacttgtctgctcccccaatcacctcgacctggccgcagggacaggggatgggtgaagggccaggacaggaaggaggcagagccatacccccaccccgccggcctgcagggaaggcaggtggagctacctccttctctgtgccgagcctcttggtataggcggcttcccggaagcactccatgcacaccgccgtcagcttcaccacgctctcggccagcggcaccaggttcaggatggccccaaatggctgcgctcccatggaaagacagagggcgctcagccaccttaccaggtgggtttttcttttaaaccctctgattcacaagcactgaagccaggagagtttgctctgaccttagtccttcccccaacccccagagcaccatgcccggctctgtccctttgccaattcaaagcacctgccgcaacagatggcacgcagtctgcacagaccatggagtcccttggctcagccaaggcctgagcagctcggccgtaaccctgtggtggctgagccctggtcacccagagctggtgtctctgtgcccatccagaagcctcttgccctcctcaatcccagctccagacctggatcagacgccttaccttcctctggaaggtcccatccagtgcagccacaattacggtcttcccggcgttggccatggcctcgcagaactccacgatgtcagggaactggaaagggcacgtggagaaagagtgtgagagcttccaccccagcagcagctccctggagccccagcgaagacgctgccagatctgacaactccggccatttggcccggagtaactcttaattctcccacgaggctccccaggccgggggactgtgtccacccgcacgccccccagcagacgacaggtacatccacaactgcgcagccccttccccctgcagccagcttccctccgagtccaggtacccaggactcagcaccggacttccacaccagctgtgctgtttaacactgcagtggccaaaggcctgctgccttgggctcggacaccactctt

SEQ ID NO: 65582 - DNA, 1272 bp, Homo sapiens
ctcccaccgaaggccacacgccgggtggatctgttctctgcacagccatagcaactctcggatacagctcccagccagggctctgaggctgaagccctataatgtgtggcacagcatggctttgccactgggtgcccaggtggacaagtccagaggaccaagcaaagcgtctcaggctcagaaacatcaggcccacatctgctgccaaggaagtgaatttaactcccaaactgaggttgcaggcggaaatgtccagcgagctcaaacagctacacataaaacagggaagcgtgaaggctgccaggtgacgggggagccagccaacaacggacaactaaaaaattaaacaaaaatcaacgtgcaggccaaaccaaaccagtctgcagcctgtgtgaagctgaaaccctacggcagagtttctgaacactggcaggctcctgacatttggggccagctcgttcttgcatgggggccgtcctctgcaccataggacccttagcagcagtgtccctgatttctacacattaaagcccaaaagcatcccctcccccctccagttgcaacaactagaaatgtcttcaaacattgtcaaatggaccctggcggcaaaatcaccctcagtggagaaccactggctccagcccagggagtggagagtgtgcgctaccttgccaagcaccttggaaagtgtgctgatttgaatcattcaatgttcaaatgattaaccatccccattaaagagagtcctaacagtgtgtcctgtgccttgtgattttccactggacaggactgcagggggcagggactgaccggtcatgtgtgcagaagctgctgctgtagcgagtgtctttggcatacttgatcaccaggcacttgtactgagcaatctggaagcgacggacgcgtctcatcaactctgtgctgcaagaggagagagggtcaggtgaggtccacggcgggaggagtgggagaaggagacccctccccaacaagcctggctcctcattgtccctagtggtatgcagactgagcccaccacagccagaaaagagcagggcagagcaggcagggtataatatccctacaaagagggttggaagtcagaattctctatggggaagaggtccaggaatggtactcaggtggtcccaggaagtgtgggaggagtaaccttctccaagatgtagtggggaaggcagaagcaaaggctacatgtagagggaacctgcgactgcattccaaagtaacctcatcccagagttgttcccagag

SEQ ID NO: 65583 - DNA, 2141 bp, Homo sapiens
tgccaccttctcagaggacttggtggggaagacagctaagctgtaagcagctgtcaccagctccaggagggagtggcgtccacacaggacgaggggcttggcctgggcagaagagggcagagacttcctcctggactgaattcaagggaggagcaccccaggcgggagctgtaggaggctgtgctggtccttctaggggaagggaaggggagggaagggaaggggaggggaggggaggggagggaaggggaggggagggacgggacaaggggtccccggagaagaggaaggagctccaccccagccccgcgaagccattacctttttcctgagaacatcggcccgagaatcacctaggagagaaggtgaggtcatttgagggcccgccctgcgcggatgcctggacacaggctatcaccacgaccacctcatccccagccacgcgcagggctggcccccgcacctggatctgcccccgggtcttgctgggggagccaggcagcacagtgggcaggttaatgcagctcattgcgcctccgggaagttcacgaacccgagtactctccaaggccgtcccgcagtaagcccctggttcccgcgccgaccgctttaaaccacggcgtgctggccaatcacgagccggccccgccgccatggggccaatcagcgcccggccgctgacctggcgggagatttggccgcagcccgccccctcgtgggaggaatccgggacgtgcgcccagggactgggagggcctggaaatcagggcgatggacgtggctgatcggggtggggcctggtctgagccccgcctcggtccgcccaccaagtttaaaggggcggagcgaggcggggctctggccatataaacagagggacgcacgcccatgcggctgtagacgccatgatggatgtgtctggtgtgggtttcccaagcaaggttccttggaagaagatgtctgcagaggtaggtggattgcagggagggactaaggggctggggcggagttagctcatttattagattggaattccaagaaggaagcttagaagccgtctagagcactcctgtgggcatgcagagcgcctagtgcgtgccaggtccccagtgcttgagcaccatggtgtattttaccttctcctaaggatttttgttaacctggttttcaggataaagaaaattgaagtcctgactatgctaataatatccgtagaccctgccaggcgtggcggctcacacctgtaatcctagcacttttggcggatcacgaggtcaggagttcgagaccagcctggccaacatggtgaaaccccgtttctactaaaaatacaaaaattagccgggcgtggtgatgtacctctgtaatcccagctactggggaggctgagacaggagaatcgcttgaacccaggaggtggaggttgcagtgagccgagatcatgccatttgtactccagcctggaaggctgggcgatagaccaagacttagtctcaaaaaaaaaaaaaaaaaaaaaaaaaaaaatccatagacccgcaggaggttaggggacaaagttctggaccttgatctgaggttacacaatgtttttgggtctgtgcttatgtggcacaggctgaaggattcagaacagctggtatttacattggggttgtgaaggttagaaacatacaggccgggtgcggtggctcaaaaaaaaaaagaaagaaagaaaagaaacccattgtataatcatgatcataaataatagcaacaaagatggtggtagtgatcacagagtgtgccaggtgtggctgtaaggatcctacaggtaataacctttccaggtacagattggacagatccaaggacctctgacaaagagctccttcactgggaggaagaagcaacccacactgactggcttgctttattttactcgcatgctttatctcttttaaccttgtgatttggatacatgccttctttttttgagacacagtctcgctcagtcacccaggctggagtgcagtggcatgatctcggctcactgcaacctctacctcccgggttcaagtgattctcctgcctcagcctcccgagtggctgggattacaggcacactgtagctggtactacatgcctggctaattttttttttt

SEQ ID NO: 65584 - DNA, 458 bp, Homo sapiens
agccactgcacccggcctgcacgcgttctttgaaagcagtcgagggggcgctaggtgtgggcagggacgagctggcgcggcgtcgctgggtgcaccgcgaccacgggcagagccacgcggcgggaggactacaactcccggcacaccccgcgccgccccgcctctactcccagaaggccgcggggggtggaccgcctaagagggcgtgcgctcccgacatgccccgcggcgcgccattaaccgccagatttgaatcgcgggacccgttggcagaggtggcggcggcggcatgggtgccccgacgttgccccctgcctggcagccctttctcaaggaccaccgcatctctacattcaagaactggcccttcttggagggctgcgcctgcaccccggagcgggtgagactgcccggcctcctggggtcccccacgcccgccttgccctgtccctagcgag

SEQ ID NO: 65585 - DNA, 993 bp, Homo sapiens
tcgaactcctgacctcgtgatccgcctgccttggcctctcaaaatgctaggattacaggcttgagccactgcgcccggccggaatctgcatttctaactttcaggtaacagcagcacgcacgcagacggcaagcctatcctgtggcaggtgttcattacacccatttatgtcggaggttgcaattttttgaatttttgccatcagaccttggcgatgaccttgagcagtaggacataaatacctcccagatgcttagcgttccaataatggaacactaggcataaatgggttttaagcgccaagggagccacttcccctgcgtcccagaccatcacggacagcgctccgctgccgcctccacgacccccggcctgcacgccggtcttcgccgtagtcgtcgtcccccacgaccgcctcggccatgacgcacctcatggccggcccgggcctggtcaccttgtcgctgcgcaggcccaccacgtaggctgcgacccccgcgctcccacaccccgcccggagcgccccatgtaccggggccgccgctcgggccagtctgcggagcatggcgcgggcagcgcccgactccccaccccggcgggagctgctgactcctctactccccagcgaaggcggcgagagcgacgtggtcggtgcggccagaattcctagagctgggaagcagccgccctgggccgggggtccagggagcgagccccgtggcacgctgggagttgtagttcgcgctccctcgcggcgggcgtgcgcgagcgtctgcgaacgggccccgtggcacgctgggagttgtagtacgggctgcgtcgcggcggagaaccagcgagcccgtgatgctgaagcagaaggttctgctcattgaaggagaaaccgaggccgagcgagtgtgtgtgtgtgtgtgtgtgtgtgtgtgtgtgtgtgtgtgtgtgacagagtctcgctttgtcgcccaggctggagtgcagtgacgcgatcttgac

SEQ ID NO: 65586 - DNA, 449 bp, Homo sapiens
ccgcccgcctcggcctcccaaagtgctgggattacaggcgtgagccactgctcccggccatgtgccgtctgattaggaacccaagagccccttcctgggaacagaaggacaactggcacctgctgaggcacgcccacttgccgagctgccctgggatccctgggcagagcgtcatcgcttaagaacctaattccacaacaaatatttgtcacgctcctgccagggccctggcaggagcagaggcggtgtgtactgccatgcattcctggtctgttgggtgattgacacatacaagacgccagcggtcctgagagtcaggtgccttcctggaccccttggtgagcggaggtgagttgccatcaaggagggaagattcaggaagataactccaaggtcctcaatccgtccaccagtcagtggatggcaaacataatccatgggcactgatt

SEQ ID NO: 65587 - DNA, 855 bp, Homo sapiens
gcctctccacacccccagttctctgaggcaggcggggtctccagggcaaactcgtgtgagcctcacctgtgtgttgcaccgtcctgtctgcaaacagaaaccctcacgctgccgagccgatgcctctgtccccagcacctccttggggacggtggactccatggtcaaagggccaactcaggggagccacagtatctgtgcttcaggcagcccgagttgaggacgtgtggcattctgctggcatcgttcatgcctcactcttggctctggggctgggcacttgctttctggcccagcctgccgccagggtgaatggcctctggggcagatggcgttctgggaacaggtaatgtcctggccagcgggcaggccggagctggagcctgggtggagggctccccaaggaccaccctgggtcccactcggctttccctgcgtgggggcgacactgttgccagttacagaccgcccaagagtgccccgagatctaagcataggacacaacaggggctggtctcatccacctcggatccacccacctgcagcccagtccggctgtgtccctcaggtcacactcactgtgttttgagaactctcctccgggcctacaaagtttgccaaggcgaatgtcaaagggatatgggggcaacagctcccaagatcagccctaatccaccctcctcatctgccctctccatggggcctcactccatgtctccaacatctcaggttggtgtccaagccacggcctcacatggactcacctcctgcttcagtctctgtttctgaccaggcttcttgctcccagggaggagcgagcttggaccgctgctctcagaagggaccctcctagct

SEQ ID NO: 65588 - DNA, 3731 bp, Homo sapiens
cctgtagtcccagctacttgggaggctgaggtggaagaatcacttgaacccgggaggtggaggttgcagtgagccgagatggcaccactgcactccaacctgggtgacatagcaagactctgccaaaaaaaaaaaaaaaaaaaaaaaaagctgggggaagggtgagcgtagaaaatagttgtagttaagagacggggttggctggttcagcttccaaagtctaggatttggtatctgatagtaagagcagtggccaatgcgggggtctccaggcagggccctaagcaccgcgccaggttaatgctcctcgcagctcttgggcaggactgactgttggaggcttgtccagcagagacaggaatgaggggaccgaggacccaggcatgatggggcgggggcgcggggacctgcagcccagcgggctcggacgacctcggacccccgccgctccacgggcaggaagggagcccggagcggcgcgggtgcgcattgatcgtggtgcggatgcagccgctgcggcgcggccccggcttctctgcgagcccgtgcccgggccgggctgtcgggaactcggcccggctccacttgctcgcgcttactggaaacgtgctcccgagcggcgcaaggctcggcggctggagcccggggcggcccttggccgagggcagggccgagccaggtgctcgggcgccccaggctgccgcgccctgctgggccaccctgggcgcgtgccacccccggggacccgtcccgtcctgagggcgcccagggcctcccagcgccgctctccccagggtgagcgggaggagggagggagctgggggcagcccggggaagccgtggggcgggctttcagcagctgcgaggcgaacccgcctcccttcccggtattctcgcggccacccggtggaaggtggcgccacgccagggccaggcggaggcggggagccaagcccgcagccacgccctgcccagggcgcaggtgggctcggctggaggaggtgctgggggtgggtgtgtctcctgacacaggaagagctgcctcctggctgccccagtcacagaaatgtttattgagcacctactaggcaaggtgcgaccactgcagtgggggtgggggcacttttctccccgggcgtgtatatttatttatttataaaccataggcactttattactgggtttatatattatgtatccatagaagttgagatttaaagaggatgaattaaaaaatagaaacagaggggttgttttcctttccgtatgccagtgagttgtcttatacatgtcccactttggagacctgggtttagtggctgtatcctgctgggcgcccccctccccagagctggagacaaaacccccacccgccccctggttcacgtcatcctgcctcatgaggcccagggctgagctgttttcggggccctggtctcggcttcacagcctgcagtggagtgtagcagatggcagactagggtaagtgaggatgccttgagatctgggttcaaatcttgcgtctgctgctccctggcccagtgacctcgcacctctctgagcctcagtttcttcttctgtaaaataaagggagtggcatctccctcttgcccggaggtgggcctgggggctgcaggctgccctcctgatctgctctgctgccagatgggcacagataggcggggggatgacagccctgagtgaacccagaaggcaaagtggttaggaacacaccccagaggccaggcagggtcctgcagggtcctgcagattcagagaaagaacccatttatcctggggtttggcagagattatggttccggtaaagggtggtcattagtaaagtccatgtcatgcagccgagggcctgtgggaaaggtagggttcaaggaggagttagtgggagaggagagtgaggaatcagagttggtcagtcagacagtcagtcaacaaacacaaactgagcatggcctctgtgccaggcatggttttaggctgtggataaccaaggagcttgctcagcagcctggggttctttgcagcccagggtgtccctgtcaggagtgggcactgtgtctctgaggagcagtggagtcacctgcaggccaaggctgggaaaccctcaggagtgtgggggaggccaccccctgaggtgtggtccccccctgggtagagagtgactcaggccccgcccagcctccccactgcctgggtttggtttgtttaagaacaaattagtcacagagcaggcagctttcccgaaaataaaatgagaatccccaggaaacagggaaaatggaaggcgggcggtgagtcagcacgtgctgccccccggggctccagtttccaaaagggcctcctgccctgctcctcctcctcctcctgggtctctctctttctcttttacttttcctctggtcccctgttgactttttccctcaccgaactcactgaatctcagtcctcacacacgcgcacccactcacttcctgccccttatcgtttccctccctgcatctgtctgtctgtccagcctcgatctgtgcacccactggctcctttggtgtttacagagcacctaccaagtccaggcactgtgcaccacgggagggagtggggaggcagagaaggcctaggtctctcctcccagagccctttcttgttggaaaaggagacttgtgccgggatgtggccagccacggccgcgcctgggtccccttccccagcccctgctcctgtggttggttcccccggatggacagagctgggcccccaacagagaacgatgcttgaggatcccattccaagccaatgccgtctctgcctccctcccggctcggagcacaaggcctgcacgctgagggcgagtgcgtggtggagcaggagcttcggggcggtgtttctcacccagccatgtctcccctgcccagaaccgggcatcaaggggagtgaactgcgggctgttttgaatttgagggacaagcttggttgtcccttgttccctgcctccccattccaagcctcctgtggcagaaggaggccaggccatatcttgagggaggattctgggcgtgcctgcttcaccccaacagcccaaggtcaggggaggggctccaggccgcagggggtacagcaaggggaagccactcaggccccttcccatctggacaagtccctgagtgccagggccctttgactctctcctgtctccctcctcccccatctcccagctagaatccaggctctcccaccaccctctgggacccctggggccgctcactttccagacccctctaattcgggcactggcccctcaggagccggggaggtggccctgtgcctgggtcatggggctgggctggggtctcctgcctctcgggtcactgtccaatctctgtctgcagctctcgatgaataatttagttgttcgaattacaggaaagagctatttagcttcccttcccaaatcgttaagagctgatgatacaagacgtcttggttccttctaaggaaagtccctttcccagtgaaactgagccttgtgggcggggatttctccccctccaactccctcaccaatcattaaccaatatccgacagtaatagggttttttcttttttcttttttttttttaagctcagctatatatattctaaagtatatgtcagttcttgggagcagggaagtataactgatctgaagggtggggtgggggttctgctctggaagg

SEQ ID NO: 65589 - DNA, 523 bp, Homo sapiens
gtcacacagcatgaagtggtgaagtcgggatttgaactcaggccttcctgactcccacgttggtcctgcccatatcccacctcaggatggctgtgctgtgcattttgacagttaatgggcgttcacctcgctggatggcaaatctggcaggctggccaggactgcggcctcctcactttctaaagccgtcctggcagcccctgacatatcaggagtgttcaggcatgactcacaagtggactgagtgcccgatgggttcaaatcctctgcaggtggctctgggcaaagcaccagcctctgcagcaaaccctgccccatcccagtggagcctcctgcccctccctcttacccccacggctccttgtcaacaaacactgggcagatcccttcctccactaccacgtgccggctcctgtctcccggattctcccttgcaggcctcgccgtctctctctggcctcccttttcctgatctgttcataactttcctcctcctgtgtgtttccctttgctcctctctctc

SEQ ID NO: 65590 - DNA, 1886 bp, Homo sapiens
ctgaacccaggtcagcacagggtgttgggaagaccaccctagaaaggaagtgggggccgggcgcggtggctcatgcctgtaatcccagcactttgggaggccgaggcaggccgatcacttgaggtcaggagttcgaaaccaccctaccctggtcaacatggtgaaaccccatctctactaaaaatacaaaaactagccaggtatggtggcgcgtgcctgtagtcccagctacccgggaagctgaggcaggagaatcgcctgaaccggggaggtagaggttgcagtgagctgagatagtgccactgcactccagcctgggcaacagagcgaggccctgtctaaaaaaaaaataataaataaaataaaataaaataaatcaagaaaaagaaggaagtggggcccagggcggacaggctcagggcaaggcacctgcccggagggcactggggtagggcaccggatggccttagcctctggacattctcagcgacctggcactagggaatgttcctggcctaaggaaggacctgggtctggccaaaaaggcgagagagctaggcgcggcctgggaggaaggtgcggcgctggggagggaggggagccctgccctggtgtgccctcggtcccgcgccgcacaccctgccgggaagcccggggccgcagctgctcgggcggcccggcccagaatagcctcccttccgggcagggctgccccggcccgcagcgccagcgcccgaaatagggctcggccgggtggcgggcgccaggggccgccccagctgcaggactcgccggggagccggggcccgcgcgtggaccgggaggggctgcggggtgcgggcccggccctgggacgcgaggacccgggtgggcgggtccgcgggcggggtgggggcggggcgcggggccgggaccgggatcccgggcgcggggccagcccgaggcgggtggagccgggcgctgacctcacagcccgcgaggaagcccgtcggggccggcggggctgatggaaggcctgaggaattcgcagccggcggcgcggccgggcgcgttcccttcccctctctccgttgcccggcgagggagccacagcgcagcggttgccatggccacgggccgggcgtggggctgggggaccaggggccgctgagcctcgatcaccttgtcctgctcgagccaggttggcatggactggaagaaccccgcggcggcgggcgggaggtgctggggccaggggaggccccgagggaccccgccgcccggtctgcgccctgatcccgcagggtcctgtggaaatgcggtgtctgcctccccgcctcctgcgctcacacatgcaggcctggggcctgcgggtcccggggctctgagcctgcacagcccacgggccgcagccgcaggccccgcactggtagcttaggtggacacggaggctgagggggagtttccaaggggcctggcctcacgctctgcccgtcacagccgccacccctcaccggccctccacccacccctaactccttaacctctcccggcctcggtttcctcacctattaactagagattagtcatagctaccatccaggcttgttatattaaaatagaataattatgtaatgtgccgtgtgcactccaaacgcggtcctctttccctgtcccacacctccttcctcctgcatcaggcctggggaggggggcgtgccgatgtcacccccaacccccaggcctagagtcctggacacatggacgcccctgccagagctcccctccccgcgcttggggttactttgaaccccgcctcctacaagaggatggtccagcctattgtcggaacctgcaggaatcccaggctgcgacccaagaatattagcggaggcccagcctggctg

SEQ ID NO: 65591 - DNA, 2890 bp, Homo sapiens
tgtgaataccggcagtgatggtgttaactggaagagcccaacgtcttagcattcagaaccctaatttcttttctgaaaaaaagcctgaagcctacaacccagtgttccagcctgcagcgcagccttccttccaggctgcatcccagccttccagcctgcagcccagccttccaggccgctactgttgcttaaggctgtgctgcaatcagagcgctcaggagtgggaagtccagagttctacccgcttctgggaacagccccccatccccctcccggcaccagcttccacaggcaagtcctcatgacagtgggtcaggctcacccgaggatttcacaaacgcctggcctgttcccagcacagcacagctgggagggctcagtgccggggggaaggagcatcctcctcctcctcttcccttggccctgccgtcctccagctcagggagagggaagggctgcacttgtccatgcttgccgcctacaggcccgcgagctcggaaccttccctccctgctgatttcccagctttggcttagtcaaggtacaaagaggaaatgcgctgtctcacgacaaaaggagcatccaggcttgtctgccctgaaggcagctgcaagaggtctcagagtcacctgaggaggcggttattcagattccaaggctgtcttcaggctttggattcagaagagctgggtcacagtccgggagtcagcagtttcatgcacacctcgggggactggccgtaggtggtcctctgtgctttcagaggccttgaggggcagagaggtggagctccaggcaatgaaaagcgtttagctcatagaacccaggattctaagttagggccaccagctctttctctagctccatgacaaggaaagagctgtccttggatttggggcctcagtttctccatctctgaaatgggtgtgttcggacctgagggtacagagaccaactgtcctagtttgccagactttcagaactaaactgggacaagctggccaccctactgagggtggatgcatgctgtaatgggaatgtgatttgaagatgcgtcttcaaggcacaggctatatttatttaatttacatatttacccgttattgtctggttgctcccacttaacctctggagggcagggtgagcagggccttgtcttgctggatatagaacagtccttgaccgtgggatgtgttccacagagatttgctgaatgaatgaacgagtgaatgaatgagtgactagaaggggagagggctgaggctccaagaacaggctccctgaatagagcgtgtgttgggggtgggtttgctccgctgacctgaagggggttctcggctcccctgggacaagaaaacttgacccactcacggccgggaaagagtccaggctttctgagcagccgcccctgggaggggtcagtgacccccggtgacgaacgcctgactccccccttcccccacgcgcccagcgcggcctggtccaccctgtctcctccctctcccgccccccaccccagggaggtgcgcctggcagcctcccggccgaatttcctggcactgggctgagaataaacagcgctctccgcccgtaatcccgttgccccggcgaccgcgctccgcgggcgggggcgtggcgggggcgtggcgggggcgtggcgtggcggggccgtacccgaggcgcaagctctgcagggcgcagcggcggctgcggccgcggcgatgcgggcccgggaggtgccaccccccgtactcggcgcggacattcttcgcatagctccgccagggctcccgcggtgtccgggaagtgactcttcctggcagagggcggcctcgaggcgacgcgcctgcccgcccgccagcccggcggccgccagatctggaggggagtgggggcggggcgcaagaaggtgctcccagccctggggctcctgtcaccctcggcctcgatcatcccgccccgcgctcctgggaccggagtcccttactcccatagactctcgactgcctctccgcccaacccccgcccggtacccttgcggtgccccctcccaaacatccttactcattcctaagactaggacacatcgtgcaggctgattttccatcgctggctcccctgtctgaggcctccttccccccctcccccagagcaggacttagatttcccattcttggctctagcctcaggaggcctgccctaaaacagcaccaccggagagaggatagggcctcttggggtggagtcttacagctctagaagcaaggtaatagggcacagggctgggagcggggatttctcccctttctgttggccggggaccctcagccttgtttttaaccaggccgaggcacgagtgcctgcccaagccaggagaagctgcccactgcctgcaggacacttgtcagcacatctgggagccaggaatacccctcctcccccagccaggccagagggcccccgactaagtcccttagaggagggtgtcttcccttctgaggattgagaagtgcagaaagacttctgttatggggtatgggatgaggagagaagggagccggtgctgagcagagtcatctgggggagagattctttcctggccttcccagcagcttgttgtgtgggcttgagcatgttgcttcccttctctgggtctcggtttccttgtctgcaaacccaaagggttggtccagtctgatctgaaatggaaagacacaccaggcgcggtggctcacgcatgaaatcccagcgctttaagaggacgaggtgggcggattgcttgagcttgggagttagagaccagcctgggcaacatagcaagatcccatctctacaagtagtacaaaatttagccaggtgtggtggtgtgtgcctgtagtcccacctactc

SEQ ID NO: 65592 - DNA, 934 bp, Homo sapiens
aaacaaaaacaaaaacaaaaacaaaaaactgttccaggtaattccatcgctgctacattcctgtaaattgtcactgatcagtgctatggcagagcgggagcacccggggtggcagcagtccagcctctccaatgacctccagcctcccccacccaggcaggagggagggctgtgcagggctcggggcagtgggacctggtggctctgctctgaccacgaggcgcctgactggccaatacttactgggctgacattcccagtgctcagctgggaggcatgggtttccgccccccctccccacttccctggctgtgggctggcttggtgccctccagtgagtccctcagcctctccacccatccaggctgagtatgtggctttcctatgctgggtccctctccatgggacagggagcatttaaggcgaatctcttagccagacatagtcaggaggcacagagtagaatcccctgtcttctctaccaggagcctgaggtgaaagatgtcccgtctcctccatcctcccgctccatccacccaggtacaggaaggtatagtatgagtaggaaaaggagaccagctgaccagcccatccatcccctccaaatgttgcttcccccttaaaacggaggaagggccctgggctctcaggcaccaggtagactttggaacctgtgttttcggtgactgtcccggaggagaggatgtggggtaccaggatggttcccttcaggtcaccccaagcccttctccccggagccagggagaggagcatgtcaccaggatcctcgcctggggtgggcggggggtgtgaccatttccttcgccagcccgcagccctggggccctcaggacctctctctcttccacctttcccaggctccacaaccagctcaggtttaaaccaaatcaaagagcaaacaagttccgttgga

SEQ ID NO: 65593 - DNA, 2307 bp, Homo sapiens
gaagccgctctcctgcagcttgcgcactgcgttcaccaccagctggtactcgctcttggagctgaaggtcttgaggcgcaggctggtgtccagggggcggctcatcccggcggcgggaaacttgctgtgggtgaccatggcgcacggagccagcgtggatctgcgcggcggcggctgcagctgcttcgcggcctccgcacagcggccgctaccgcatcccggggggctgcggagaggaaggcgcgagcgcgttgagtgcccggaaccctccagcgcgcccggcccgccccggctcccctgccttcgccgagcgactggggcacccactgccccgggggccctctcctgggcccgcgctccgatccaggcgcctcacggagcccgcacggctcccgcccctgccggcagggtggccccgggcagccccttcccaggcgcgcactgcaagggcgcagcgtgggaaactcgcgcgcggaagttaggtctccaggagtgtggccgggtggggagcaggagaagggcccccgggactgcctgggcgccgctcagtccagtagccccgggcggtgtggacggagggagaaacccgaggcacgggggtagggaggggacaggagaagcccgaaggccccagccggagtattccgggaacctgggatctccggcttccatccgctctgcccctacctcgtcacctccctgccgggaatgacccgggaaggggaggggaaaccgggaaaagctcccgggactgagcgagacccctccccacgccgcgctcctccttcctacctggtcccgaatcgaagtctccgtccttggggctgagccccctcgggtccccaaggcgacgcggcggcgagacggccagcggtggcccgcgctgcgcccagatgttggcggccgtgaagtccacaaaggagccttcgcgcgcgcgtccctcgagcttcccctgggcgcccgccctgccccctgcgcacccccggaccaaccgggaggggaccaggagagggaccgcggcaaggggccgcggcgggagctgggccgggcgggcggctggcggctggctgcgtgcggggccgaagcggcagcagcggagcagggagtccaagtcggagccgccgcggaggccgcgctcgcgggtatataggcggccgccgcgccccgccccccgattcctggaactgcgcggccggccttcttgtaatgtttagtcactactcgcagcagagaaaggctgagcgcggagggtgagggaggggccgcgggcgccgagggcgggccgcgagcaggggcagggaccgggagggacgcgcgcggagacaaagcgcgacgagaggcggccgaggcggccggtgggcgcggcgccagccccggcggcgcgttcctggcagcggcccctccccgccgcgcgctccgcccccaacttctcattcacactttccccccacccccctcccttctaagaaggctgatttctggcagaggcgggggcgccgcttcgggagagcgggcagttctaggaggccgacctggagagcctcccggttccccttccccttttcccggaccccgcggggacaccccctcgccgccacccgggcctccccgagggcccaactgcgggtcaggcggcccgggccagccgaaagggaagtggggctaccccacagccaggcagcggggctggggtcagacccgggagccggaggttggagacgtgcgacagtcacctgcgggcagattccagaggggagacccagggctgcaggggacgccccttcgtggcagctacccagcctcggcccactgccaggttctttgccaaccctgacgcgagtgtggagcccccctcccctcccctatgaaaacgctttcatgcactggggtctgcaaacctggttggtccggtgtgggttgggccaggtgctctcggccgggctggagagctcgaggtggaacgatggccccaacctacggcccgcgtccgccagagggcgccctggggtctcctaggggagggcagtttggtgctgcgcggcccaggccttggaataggcacgccagggatctgcgggaatggctgtctccggagctggaaaggtggccgagaagggggcattcacaccccaggctggggtcagacctgggaataaaattctagcaggagagaatttccggaaagcagttttccggggttcaggctactgccagatggcccacaccccctggaatgtgaccccctgcctctcttggggtgggggaggacttgatcactggcggggagggggtagaggggaggagagg

SEQ ID NO: 65594 - DNA, 1074 bp, Homo sapiens
atgaaggccagaggctctcgatgtgtggtttcagaagggactgggtcattccttgatgttatccttagggtaaatacttattagtgtgacttaccatgctatcaatattgctgtctgttgctagcatttctttaaggttgggaattcccagtgagcctgtaccatggctgtttgtctcagtacctcgcacagcaaagcacccatgcagaaaagctgccagctccttctaggatgataaccaggctcccatagcccatgtggcgctcaccgctgagcatgacggtgtagccatacagcaagtgtttactctgcaacaaccgtgggccaggaacagtgcaaaagtggaaccatgcaatggatggcctcattctagttactggaagttaggaaatttgatgattcaccatttctaacttggaagggttgaatcaaattccatgtagtattagtaaagctatctaaacgcaaaagaaaactttaagccaatctgaaatacttgttgattgtcaacaatttggaaactccttaatggcaccaaataaccaacattaacatttgggggtatttactttcagtctttctgtgtacatacacgcatttcctctttcttcctctcctttaatgaaatgagatggtctctacgctactccttggtaatttggcttttacacttaatgtcattaaatattcttccagaacatgttatttttatgattgtgtggtcttccaacataccgatgtatcattatttaaccaacccccctaccctgaagatttgcttccacacttccgatatcatgaacaaggctgagatgaacattcttgtgggaatgtgtagttgatttccctgcataatctgtggaagtggactttggagtgtttttttcagtgtgtccatatcttttttttttgagactgagtttcgctcttgttgcccaggctggagtgcaatggcgcgatctcgactcactgcaacctccgcctcccgggttcaagcgattctcctgcctcagccttcctgagtagctaggattacaggcatgtgccaccatgcccgtctaattttgtattttt

SEQ ID NO: 65595 - DNA, 1858 bp, Homo sapiens
ggctggtctcgaactcctgacttcaggtgatccacccgcctctgcctcccagagtgcagggattacaggcgtgagccactgcgccggccgaggagtcaatcttgacagccagtggtcaggctcggtggctcatgtctgtaatggcaacactttgggaggctgaggctggatgatctcttgagcccaggagctcgagaccggcctgggcaacgtagtgagacccccatctcgacaaaaaagtaaagaattagccgggcatggtggcacacgcactttggtggtcccagcactttgggagtggtcccagcactttgagaggatcccctgaggccgggaggtcgaggctgcaatgcgccaagatcgcgccactgcactccagcctgggacacagaccgagactctgtctcaaaacaaacaaacaaaagcttttttgacagctggtgagttggagccaagcgtgacggtgctagagcccctgcgccgcatcctttcctccgcgacctgtgacgagtgactgcaggaatgcaggccacctggcgcccttacggatttaacgggccggcttccgaccccctcctgcggcgcgaccactgttcctcgcctgtgtcccccagaggggaaactgaggcttgggggcggtgcagcgccgccctccccgagccaggggttccgcgcctgcgcgcctgagccgtgtccgcgctcgcctttgtcaataaagttcgcgcccgccgggagcggaagcggaagcggcgagtctccatggcggtggcggcggcagctgcggcgggacccgtgttctggaggcgactgctgggcctcctgcctggccgcccagggctggccgcgctcctgggacgcctgtccgaccgcctcggcaggaaccgggaccgccagcgcaggaggtgagaggggcggccgggatgagagtgcagccctcgcggctgcagcccggccccccggcgctcaaactcccggccccagcgtcctgggcatccgcagcgagtccctccccggtttccgggcccatttctgcctcccggggctcggcgcctgacctatgtgcttcttcactggccttcttgagggagggtgggcggctcgtgctccattatcggccgggtccagccggcgggcctcctgcgcagcccggccagtccttgctccccgtctacaccgtgcttgttggcgagccccggccaccgtgcacttacacgttaaaagagggactgtgtgtgcgttcagggagcttcggtcaagctccagaggctgtttatatcatggtttcggccccaggatgtgagtgtcggagagttcagaggggtcttttccttaggtaagcctggctgtgagtgaatcaccgttgctgggattttgtgtatagagcgtttctcacatcctgccagaaaaagctgtgaagcaatccttagtaacactcaggcatgggaagaggagccactcgaaacactttttacacatttcaaagggcctgtgttctggaaaagtactgaagttatgtaaatgatgaagtaggctttggagcaatttgttcaggcagtggtcttttaaaataaacatttgccaagaacatgctgacctgaggcttgctaatattaaaaaaaaggggataaataattcttggccgggtgtggtggctcacgcctgtaattccagcactttgggaggccgaggcaggtggatcacctgaggtcaggagtttaagaccagcctgaccaacatggtgaaaccgtctctactaaaaatacaaaattagctgggcatggtggtgcatggctgtaatcccagctacttgggaggctgaccctgaggcaggagaatcgcttgaacccaggaggtggag

SEQ ID NO: 65596 - DNA, 1038 bp, Homo sapiens
aaggttgcataggctcacctggtcttagacaaggacagttgcagcttccgcaccaggcagacctgcagtttgagtggctggggataggtggagcggcggcctggccacagtgccctggacagcagcacatcacatcagttaacactgtttgccttccaactagttattacggtgtcctgtgggacaattagactggaggagccaaaggaatgtgcaggggcactgggtttctgtttggagagaggctctcggtaaacagagttcgcattcctccagattctgtgggaccagagtaaatatcattatgccacagccaggcttaagcaatctatctgcagtgccgttcccgcagcgcacactgctccctctgtctctgctgatgaccttcgaggctgtcctaggcaggttctccctgaggagctccccacaccaagcctccctaactctgcaaagcagccggagcaacagagagcagcgggcggcgggcggcggccgccgcagtcctcccggctttctaggtgcgcggggctgtcgtgttccagtccctgtgttccccgtcgctggagtgcagcttaagtgcgaatcatttcttggaaagtttagagataattttgtcaactacccacaatatgtatgtgtggactagattactttcttatttcaggatctaaaggcaaaatggaaaaacgtcacattttgtggttattaccagggactgaagtgagttgcccggtggcccctggtggctttagctcccctggtcacctgaagggctgcagtgacccctcctggccagcagaggtattggcccagccaggctgggggaggctgaaactgcttcccttctctgcagccacaaagggctggattccttgggcgccaggaggggaggatttttcttttccctccgatagccctactgggcgctaagattgttgtgaatcattaccctcagaatttggactttctagatgcttcttaacccatgatttaggtgagtaaacttggaaaaatgtttttgcaaaacttgatgatcaa

SEQ ID NO: 65597 - DNA, 1717 bp, Homo sapiens
agattgtgccactgcactccagcctgggtgacagagtgagactgtctcaaaaaaaaaaaaaaaaaaaaaaaaaaagtaacgtaagccaaagcccagtgggaataagatattcatcaccagctgttctgagtcatcactatctttgctgctatttgcatgaataatgaagactggcttgaaccatgtctaaatattaaaatacacactaatttaattctgttctgcttggagatcttacaccagaagttgttgggtgacaacaaatgctggtgtaagatctccaagtggaacagaacaggacggcaggacagagatctctgactccctggctcaggaatttatcccaagcacatacacatagcaggtactcagtaagtatgcagtgaatggaagaatgaatttgagtgaatgggaagatttcccaggaagagccacatctctgaaacacacaaacaaacttgacaaaaaaccaaaacaatacaaagctgcatcaggaatagtaccgactcaccaactcacctcattataccagccaacgatgagctccaggttgcccacaaacttccggaaagtttcgttctctgagaacagactctccgcactgtctggaatctctttctgttgctggaaattcaaatacttgacttctctcagaactgccaccaactaaatgacaaacgaagatcaaagaacatgtcagcaggtcaggtcaacagtgcagtgttcaagcaacagaaatgagcatctgccctgggatgttttgacagccgggggggatctcaaagttggtgggaggcagtatttgttggcaggaccaggacgttttcaccctgttggctgatcctgagccggaaagcactgacatcaccctcatgggtggatgacatcaccctcatgggtggatgacatcaccctcatgggtggatgacatcaccctcatgggtggatgacatcatcattgcatgtgtatgacatcattgtcatcaccacgggtgggtgacattatccttatgggtggatgatgtcatcattgtaggtggatgatatcatcatcaccatgggtggctgacatcatcctaattttcttatctctgtcctctcctacctactacccacaagtggtttggagtaagacttcgggtcttcacttgtttcctcgctggaatctaaccttctgttttctctctgctttcacccggttatgacccgagatcaacaacagggacatcccttccaacagtgcttctgtccacaaagctattctcaaagttgagataacctccatattgctgaatccactggtcacatcacgggcctcatctcatgggatcgcccagccgctggcactctttccttctgggcacacagtgtcctcctggcttccaggacactagacattcctggtcaccattattagtctcttttgataatctcaagatgtccatgatggggagccacagaccttgttccttctcaatttaccctcagttgaatgaggtgtgatgtcatccaacgttatagctgccttgaccagccagcccatttgtcatctccgctgaatgaggtaatgagatgtccagtgttgtggctacaagtaccatctctgtgtgggtggctcccacgtttatgtctccaaccccagcctctctcgtgacttccagccttctgtatccacccgcctactcagctcctctctttggatgtccaggtgacatct

SEQ ID NO: 65598 - DNA, 1316 bp, Homo sapiens
attttttttgagacagagtttcactcttgtgcaggctggagtgcaatggtacaatctcggctcactgcaatctccgcctgccgggttcaggtgattctcctgcctcagcctccagagtaactggaattacaggtgtgcaccaccacacccagctaattttgtattttttgtagagacggggggggggtttcaccatgttggccaggctggtctcgaactcctgacctcaggtaatccacctgccttggcctcccaaagtgctgggattacaggcgtgagccactgtgcccggccctggaatatatttttttaaaccctaaactgtattatagaataatctcttcctcagtgacttggtttataatatattgggaaaaaaaaaactctatgatgaaaatcaagtgctgtaagttaaatatctgagtccaaatgatgtcaaaaagcggcaaggcactgggcttcccccattcagagagcaccctccccttcctgccccgcgcttctgttgacctttggtcctgtttgcaggaagctctcaagtttaactctgaacttgaagggaaggaagggagtgaaccacatggccctggggtcggggcctctggccgaagggcgctcagcttggtctgtaaaatgaaatgtgttttgaatgtcatgagtcaggaaaaaagaatttgagcgcagtctggaaatgaaatttcctgcctgtggtttgactcacgtctgtctgtctcgaaatctaccccaaggacatttattccactgtgacagggctcatctctgaggagcaccagactcctgcggtggggagggaagattatccgcgctgcagagactagctggcctccggaagccgcctcctgaccccgcgtcaagcaccgcggtggatggcgcaacccagctttgggaattaattacccaaggcgcgtttccgtgcagtctggcctccctccctgaaggcttcttaagcaatagggaactaggaggagttgagaccagcctggcaaacgtggtgaaaccccatctctattaaaaatacagatgggggcagggcgcggtggctcacgcctgtaatcccagcactttgggaggccgaggcaggtggatcacttgaggtcaggagcttgagaccagcctggccaacatggtgaaaccccgtctctactaagaatacaaaaattagccgggcgtgcatgcgcctgtaatcccagctactggggaggctgaggcaggagaatcgcttgaacccaggaggcggagattgcagtgagctgagatcacaccactgcactccagcctgggtgacagagggagac

SEQ ID NO: 65599 - DNA, 627 bp, Homo sapiens
caaccacctcggaggcagcactgtcatgatttcggctagcacactagcacagcttagtttgcatgttctagatgctcacgcatggaagcacacggtgcccacagtttctttcactcatcacaatgttcgtgagattcatccgtgctgctgcacgctagcagttcattccttcacactgctgagtaatagtctattacctcgacctgtttatccagtcacctgctggcagccattcagggtatttccagcttttggttattttatataagaatgctatagatattcttgtacaagtctttgtatggacatgttttcatttctcttaagtaactaggagttgaattgctgatgaaactgccaaacttctttcccaaatggttatattattttattctcactagcacttgccaacatgaggtaccatcagtctttttaattctagccatcataggggatgtgaagtaccgtttcatggtggttttaaattacatcccctacaactaatgatgttaagcatttttcatgtgtctactacacatatggcttcttttgtaaagtgtccaagttttttgcccattttcttatttgggctgcctttctatcatatattctagatacaagtccttt

SEQ ID NO: 65600 - DNA, 667 bp, Homo sapiens
aaaaacaaaataaagcaaaatgaaacaaaatatgacaaaaatgcaaaaagtaaattaggaaaattcatgtttcagaaatatttattgagtgcctaccaaacagtaagcattccagaaaacaccaaggtagaaaagaatacagcctctgacctcaaggagtttacggtctaggaaagtttataagcatatatgctgtgtgaaaaacaaaacctggctgcctcatcacaatctttcagaacaagtctgcagcttactaaacacaagcatgccagaaaattcagaggacaaagtctcctacccaaagcccaggctgcagagcctgcagtagctgtgccagggcaacaatgccaccaagcggctggcaaagggaatgtctgatcaaatcggctgtgcatccgcacccaccctcctcattccagcacactgttggtcagaatggatgggctctcacggggaagtggggcttaagtggagagctgcttagctttctcacgatctaccagtgaagcagaaatcaaaggatcagggagaactatcaaaatatacttaaatcaactccagagaaagtcaagtctttcctcattttgctactttgggcaacaggattccctccttaaccccactcctaatgtcttgtgaagaattctgaaagaataacatttgctgt

SEQ ID NO: 65601 - DNA, 2106 bp, Homo sapiens
atctttaattcaagccttcattctcatgctgccccggacagaaaaaacatccaaaaacaaaatgcttaatttcatttagcagcatgaagaatcaacactattgctggagagctgaggtgtgattgattcctacagtcttggctagtgtcttcaggacactgcgaaggccacagctggaacaagaaaggtggtggtcagaaatacccatgtctacctcacagcccgggagtttctgggaaagcaccgtccgcaccctgggaaacccgtctattcatgccgcttctctcctgtgtagccattagggttaaactgcaaaagaacggctcagatgggccagatggcagcacaacaaacagctcctccctcccccactgccacgtgctgcagccatgcttatgtgccagggaggcggtgtgccagggaggcggctgaaccccttgctctttaaaagaatggccactggggagggcagcaggttgtccctgccggcagcctgagcacaatggagacaaaccagagggggagccgccctgacacaccacccggtcgctcgccctcctcgcccattgccagaggggcacccggaatccatgcccacaaaggttaatctgcaaggtgtccggctggcagtcagggggacggtccagcatcagccccatcaccattcctttccagggttccaatttaatgaagaggattaaagtgacaaaaacaacaaggcgctattgtgcttggctgtgaataggaaagccacacaagggaagctttcatttatttatttatttaaatgttgctttgcagattttaacagtcggcagaaacccagagctgaaatgggttccagccagtggcatacaaaggaggactgtcttaaagggacagagccctctttccaagccagaggacgatacatgagcacacggcgggctctagtctaaaatcctgcaacccgcgctccaccggccacaggcagatgcccggggatatgccataaagttccacggaaaacgcagctctctgacagcaggttctgcttggcagacacatagcagctgccaggaccacactgtcctaaatccccgtgggtaccgtcaaatgaacgtgtccaaggcatgctttaggaccaggatgtctctttgaggtcatccagctggcaccagacccctctgcctagctttcaaatacatcacttgccttatttttttccactataatgattaaccagcatccttcttacagcctctgcctttcaatggataaaaaggtccatatttaaaccaacaatgcggggaaacattttataaagtaattaaggagtgagccctcatttgcggagaaggtaaatatacaaaaggtaactaccttagtcagagttgctcccaggccaaggaggtcattgccatttccttttcatcccctccagctggcctgctgccaacgggtgccctcctgctaatcacggccacacccctttacagacctggaagtttcataaacactgaatacacacacacacacacacacacacacacacacacacacacacacacacacgctccttctctcttaaccttaagctctgcctaaaacagcagtggcagtaatgaaataaagcacccagcttttctacagcctctacagaaactaccacctgctcagaggagaacaactggctatttacaaaccaggctttgggctcaaaagcgcgcatctgggaaaccatcttgttcctccaacctccaaagatacagtgatcatggcgtgagggctaagaaactccaaatatcctgagcactggttccagtattcagcacttactcgccacatacctgtgtcaatcctactagtcagaccttaaacaaaccagcgtgttcacctccctctgcactaccctatgggtgtaagtcactttgtctcccagaaaatcccagtgacttataatttgaaaaacttcaaaatactggaaacaactcaggctttggagacataccaatgttcaacaaactgctaatctctctgggcctcagttttgtccagctgtaaaatggcactgcagttattagcactgttgtgaggaatgcgtgatggaaaagataaagctgtgag

SEQ ID NO: 65602 - DNA, 3051 bp, Homo sapiens
tctagttaaaagcagctctatggaaagcataactgactcttaacttctgccctcccctgggatctcagggacctgccagaggaaactccatttgtccccctccttttacacctacctaaatgccactctgtctctcacggcaatgtctaagggcatctattttagcagtggtttaaagggcaacactgccttcagtcccaggtgacaacacaaggaaataccatgggagggggtaagggaagcgaagaagcaccagttctttaaggttacttggtcaaagcaaagctgttcagtaattctacctctaagctcccggcccctaacctcatgccccacccccatcactcccactgttgattagggtagttcatgttgacttttgaagcctccaggataaaaagtgactattacacagcacctccggtgggtctgaagctaggctcacccggaaggaccagaagcaagtaagcgtgagggaccatggccaggcccggctcactcctgctgtcccagcatagtcactagtgtcctcttccactctcaaaagtgttccctttggaactagatcttggctagtgtggactcacctttcagttagaaaagcaccaagcaggcagttcagccctggcctggcacgtcccctcactactgacccctcttcagatacagaagtatcgttatggacacctgtgcatgcttccctcccagcgtcccccacgcgtgctgcagctttcagtgtcgcccgtggacactgtccaggatcatttgcacttagaggtggggctttcaaatgtgctttatagtgaaccagagtgggaaaagcctaaagaggacacccaagttttattacaactttcacaaaatccacttgaaacatagccagatatttattccaaacttaaaaatatcacacattaccagctacaacccagtacgcattttactattttgtcttgcagcattacaacaccaccatctgataaggtgccacaataaaatacaataaaacacacacacatccacaaacacaactcctgtgttgacccagggctttaagacacagctcttcagcagaatctcttgggatttagaaggcacagcttgtcatcccattactcatagctccactgtttacagtacaggtgtggagcagataaaggaagttctacagaccctgccctcccaggcttcaaacagtcctcacctaacaaccaaagggagaagaccacatcgtcttttcccttagacacattttatttaacaaaacaagtactatttatcccaaatctcactggttctttcaatccgatctctaatgtctttactttttagtatcagattctttctggatatttgtggaattcccagaagttctgaccaactgttattttgatacaggaagtagacacaatcaccaagtatgaagtggaatctaccaagaaacacccaaggcggaactctaacgaaagcaaagattggaggagaacttctttggtttaaaaacactgagttaccttaatatctctctctcttctcgctctttctctctctctcctctctctcactctctgacacacacacacatacacacacacacacccgagagagcctcagcttcctaaccactaagagactatgcagtctttctcctgaaaacagtaagataaaaaccagagtctaggttggtccttaactcctccccaaaaggctcagtaaactatcctcacaggatttcacatactaatgaaaagagatacctaaaactccactccatataccccaagccgcatcagtcccggccgggggctgcggctttgactcaccgtcctcctcttcggttttaaggaccatcttgtttccttacagcgggacacgaaaagtccgttctgtgcttccaggagagcggtaacttactgggagccaagttttcctgtggggtctgactgggaggggccggggatacctgtgaagctgtccagccactagggcagctcagagctgcttcctgaacagacaggcaatggctggctgcacgcctgggccaatcaacctccagcctccaaagaagcggcactcccagtcagtgccaccacccagttcctgaagtcgagctcaagcaccttccgagtgtgttaaccatctgcttccctgaaagcaatcttacactggagtcaaactagtttagtagccacacttctagtcttttctcaaactcaaccaaagtcatagccaggactcactgctgtttttctcttcactttcaagtacagttgtcccttggtatccaagggggactggtgccaggaactccgatggacaccaaaacccacggatgcttgagtccttaattatttgcacataagctacacaaatccactcatatactttaaatcatctctagattacttctaataccaaatacaatgtaactgctatgtaaacagctgttatgctatattgtttaaagaaaatgaaaagaaaaaagtctgtatgtattcagtacaggtgtgacctttttttattttccaaatattttccatccacaataggttaaatccatggatggggagcccatggaaagccgactacattttcttaaaatggaatcattaaaatccctggtcccctcacaatgagataatagcccatttcccaagagcatgactaagagatcgtaatcattacagcatgttatgaggtcacaggctaaaagcagaaagcagatattagaggcaaaaaaaaaaaaaaaatccaagggccaaactcccaatctaagttcagtttcatctccattatgatttctaatatgctgcacccaaagattcttgcctgcacagtcctatcatgttcatgacacatattcattgttgaagattagaaaatagtaacaaggaaaaaaaacaccttaatcctatcaccaagagatagccattggtgacattttggtagacattttccagacttttgttataagtattatatatattctctctctcttctatagatacacacacacacacacacacacacacgatattttatatgtcgttt

SEQ ID NO: 65603 - DNA, 3600 bp, Homo sapiens
ttttgaacatatatagggagaggagaggcaattcatgttctacccagcgcatgtgccagttcctatgtgtatattcaccagtactgatttcctgaaagggctttgttaatatcaacattggtttgccctttgtccacacacactggctaatttgagggatagtgataataggcttctactatacaggcagacataggcaaaaaactatatacacaataaataataagtaacatgctagaaagtgatgggtgctatggggaaaagagaagtatgtggcagggggtggggtcaggtattgttaagttttaaataagacggtcagaacaggcatcactgcaaagataaaatttaaacctcagttacttcttcctcaactcctccaaaaaaatattcaggattctcttttctaaaattctgaggtatacaaaatacatgtatattcttctctgaacctcctctattcctcaccatgtagactaatgaaattacgcaacacctgcaagattttattacaaaggccactttcccacaaggagacccgagctccaagacccacagtgacagtgcggcgaccgagtttcctacttcctctgtcttcctagggtaaaagtatcactacatggtaacctgagattctcttactttccatctgaaagagcctaacacttttagaatgccgactctcccattttctagctgctcttcacatattgatttactcatcagagtaataatttgaaaggccaggtgtgatggctcgtgcctataatctcagcactttggaaggccgaggtgagaggatcacttgagcccaggagttcaagactagcctagacaacataaacagactccgtctctacagaaaactaaaaaattagctggctgtggtggtgcgtgcctgtagtctcagctacttcagagggcgaggcaggtgatgaccatctgggctcaggaggtcaaggctgcagtgagctgtcatcaccccactgcactccagtcttcgtgacagagtcagactctgtctcaaaaataataataataaaagtgtacactgatttattaaaaaaagatttgactctttaccatgtgttcattctaaatgatgtctgttgaactgtgccaagcactatgttagccaagagctagacctacaaaggtcaagaaaacaaagtatctccctcttcaaaacacaagagttcattggaggacacaggtaatggcagcgccaaaaaaaaaaaaaaaaaaaaaaaaagaaaaaactacatggcatgctaaggatcaggctctgaaggcccagagtatgccaggctcgtagagtaagaatagaaaaagtccctgggaggggtgggaagatagtggcacaggtatactaacgaggggagtgacttttaagaaaatgcacactctcagcagcattctctggtatttaggaagagatctggggagactcaaatactgcactgcggtcccaatcttgaaggatctagaggtcaacatctgcggggaggaggcactgtctgggagaggcaggacatttttagagaatactattcagtgattttagcatgttcacaaagttatgcaaccaccaccactatctaattctagaacattttcatcatccccaaaagaaaaccccataccccataggagtcacccccattcccgcatccccaaacccctgacaaccactaatctactttctgcctctacagatttgcctaatacatggccttgtgtgactggtttctttcacctggcacaatgttttctatgttcagccatgttgcagcatgtgtcagaacttcattcctttttatgactaaagaatcttcccttgtagggacagacttcatcttctttacccactcatgagctgatggcatctggttgtttccactttggggttcttatgaaaactgctgctataagcacgtaaaattttgtgttgtataggatctttaaaactatatctatgttccactttgattaaaataaatttcacagtatttttggcccttgagcccctatgctcgggtccactctcacactgtggagtgtactttcattttcaataaatctctgtttttgttgcttcattcaaaaaaacaaaataaaataaatttcacaatattttctacttttctgaaccctacccattattcaaagtccagctctgcagcctcctcccatcacatggctctctcactgtccgccactgcaccccacacaccggaaacaaactaaagatgctgacccacatttgtggtaagtttcacctctaaacattctctgattctgagagctacgagtcctatcatcaaaaatgaaaactctatggaaccagcttggcgtggttttactggatcactgagtagtcatgccaggtgtcccgtcagctggtgtaagtattgatcatcctgctgtgtgattaacaaatagtttcaacacagtcctgggtcaaaggaaaatgtttacacatccaacaggcccaggttactgtaggggacaacaatgcctaggttatcaggaaagctcactgtttaactggattcaaggaataaattataagcaccagccatttaatgataaatacaattgatctttctagtacttttattacttgagagaatacaggagaattgtctgaagaagggggtaagggagattattcaattaattcattgggttttctgtatacttctaaaccaaattcagttaggaatttttaccaaaaaattccagccttaattcaaggatgtttatgaaagcaaagttctctgatcaaataagagtaagtaaaaacgggtgggcgggaggagtgtgcttgcttttgtcccttgttgctttggagatctactttgatacaggagcactgcagatccccttcctgtttcctttgctctcctgccttactaattatatatcaccccttccttgcaaaaccacaagaccaaatgttacaagttacaaaattggtgtactccacccatcctttactcagctgacacagagcaaactgaaccagcgcggtcctgccacagccctgaagacggaaccatcacatgacagaggagcttgcgagaagggcccaacacacccacatactgtgtgaggcagagcaaaggtggcagcagtaagaccaccaaggtcagccagtccaaacttcttgatacctgttattgatttaaaaacaaactaggccaggcatagtggctcagacctgtaatcccagcactttgggaggccaaggtgggaggatcacttgagcccaaaagtctgagaccagccagcactttgggaggcgaaggcaggcagatcacctgtggtcaggagttcaagaccagcctggtcaacatggcgaaaccccgtctccactaaaaatataaaaattagccaggcatggtggtaggcacctgtaatcccagctactcgggaggctgagacaggagaattgcttgaacccaggagtcagaggttgcagtgagcagagattgtgccattgcaccccagtctgggtgacagattgagactccatcccccctacaaaaaaaaatttaaaaattagccaagtttggtgggtgtgcctgtggtcccagc

SEQ ID NO: 65604 - DNA, 894 bp, Homo sapiens
agaaattcagcattatgattaggggctattttaaagagcaagtcaccagcaaaggcacaaaaatacaaaaaaaaaaaaatgtaatgctaaatagaccacataaaggtcatttgtttacagtatgagggctgaaacaagaaatcagtcaccttgtttcacagtggctggaaatgtgtacactgagcaaactgcatttttcactgctctgtgaatgtccagaaatgaccacgaaaggactacctttggactgatttgcgggttacaaataagctttagtgagtaggaaaattcatgaatacaaaatccacaaataacaaggattgactgcataaacgaagaaggaatcagagtacaggtatctctctgctattggttatatcaaatgataatttcatcttttttgttttttgttttgttttgagacggagtctcactgtgtcacccaggctggagtgcagtggcatgatctcggctcactgcaaacccggctaattgttttgtatttttagtagagacagggtttcaccatgttggccaggctggtttcgaaaccctgacctcgaatgatctgcctgccacggcctcccaaagtgctgggataacaggcgtgagccaccgcgcccggcctcaaatgataatttcaaatagtctagttcaaagatcctattactgggaaagaaacggagaaatttaacctattttactaatttgcaacatatttcctagatgtttgaaataaggactcctccatctccctctcttcgccagttacaaggctgatcatatgatctccatgttcagatttctttttctatttctagtaggtttagagcttgtgaggaaaaagggaaatgttagttattactcttttccactgtaaaggagttttttaat

SEQ ID NO: 65605 - DNA, 3564 bp, Homo sapiens
ttgttttgagccaccaggcttgtggtaatataacaggtataggaaactaacacgccctgcttccacttacctctttcaagtacaagttcatgtcatgcctggtggcaaagcagtcactgtattaaaagcaaccagaccaatagcttcctgcccacggcagcaggcaagaacacaagagaggccacaaaagcctggtaggcaggacactgggatctgagggaaattaaatggcaagaggaggcagagaaaagagcagcaggcaaaactgctgtcggcttctcagcagtgggcaggagtgaaatctggaggggctgaacaatcttttggggccagccagtgggtgatttttcttttaatcacaaaaggaggctgggagcagtggctcatgcctgtaatcccaacactttgggaggccaagataggaactggagttcacaccagcctaggcaacatagggagacctccctctctacaaaaagaaataaaaataattagcagggcgtggtagcccaggcctgtagtccaggttacaggaggggctgagaagagaggtgagaggattgcttgagccaaggaagcagagcgtgcagtgagctatgagagcgcccctgcactccagcctgcgcaagagagctagaccctgtctcaaaaacacaacaaaacaaacaacaaaaaaatgcacaagctgcttttacttgtttacttataaggtaacaagtgggctgggtgtggtggctcaggcctgtaatcccaacactgtgcgaggcagaggtgggaggactgcttgggtctaggagttcaagaccagcctgggtaacatggcaagaccccatcttttaaaaaagtaaaaaattagggctgggcgcggtggctcatgcctgtaatcccagcactttgggaggccgaggcgggtggatcacctgaggtcagaagttcaagaccagcctggccaacatggcaaaaccctgtctctactaaaaatacaacaattagacaggcgtggtggcacgcgcctgtagtcccagctactcaggagcctgaggcaggagaatcgctcagctcacccaggaggccgaggttgcagtgagccgagatggcgccactgcactacagcctgggcgacagagtgagactccgtttcaaaaataaaataaaataaaataaaataataaaataaaataaaataaaaaattagccgggcatggtggcgtgcgtatggttccagccactcaagaggctgacgtgagctacgatcacgccactgtgctccagcctgggtgacagagcgagatctcgtctcttaaaaaaaaaaaaaaaagaaaaatgtcccattagttattaaactagaattgggttccatttggccacagagttctgctttatttgtactttgctaccaaaccacaaaagttcaccacttgttctatttgccattcttccttttaattcctcatgaacaaacttaataaattaactacagcatgtcaaacaaccttttgcaacccttgcaatttcaaactcttggagggaggcacccctggcctgggccagcagcctcaacgcgcgggagcgaagggagcgggacagcggctccgcttgccaagtccccagtcaggggaggagcggcgtccccaccgcggtgcccctcgggctccacacccgcgtctcggcaggcggcgacgcaccggaccggcggctaccgggcccagactcccgcgggcagggccgtcccggagcccgcgcctcgccggcggcgccgctccccgttctcatttctgaacaaagacgtggaccgggcacaactcgctgacgccgagagcggccggaaactgcggggaacgcgggcccggccatccgcgcgtccgccccgagccccgcagaggggcggcagggccagcgacctccacccctcggccccccgggacccggactgcgacccctgccccggggaccccagcgaccccaacgactctcatccctcagagcccctgagatcctgccccgcgaccccaacgaccctcattcctcagagctcgcggcgacccctggccccgcgagaccgcgagcccggcctgtgacccccgccccagccacccacatccctcagcgccgccagcgaccccggccccggcgaccctcatccctcaaaaccccctgcgacccccgccccgcgagggccccgcgcaccgctcgcccgccggtcgccccgggctccgcgtcccgcaccagtgtccccgggaaacgccagccgccgcaagcgctgccggacggccgggcccggaggggactgggggacagcgagggggaagcgtccgccgccggggcgcactgaccgtagctgtcgtcctcctccatggtgcgggagccgggctccgcgctccggctcgccgctcgcgtcccgccgcgccacccgcgcccccgctcgcctcagcccggctcggagccccgcccccggcgccccgcgccccgcgccccgcccgcccgcgcctgcgcctgcgcccgccccctgcccccggcccgaggccccgcccctcgcccgaggccccgccttcctcccgcgcgcgccgcaccccgggtacccggcctcctcccgaggctccggcctgcgcacgcgcgtccacccgaggctcctcccctgcccccgcctctagaccacgcccccgtcccgagacacacacaccccccccccttctcccggtccgcctcctggggccgagcaggtttcggtttctgaagggcggtgcaagtccccggggtggcggactcgacctggcctgcagccaggctactgcacgaaagcccaaggtcgtgtccggccactgaagggcagggtggtccttgctgacgccaacctggaaggtcagacccggccccagcttgccagggagggcccggtccttggcgaaaggccacaaaagctatttgaagtcatttactcctgcgttcagaacctttacatgctgtatgtcctaagtttactgcttctacttctttttatttgtcctgagttttacctgggtcaagattgaaaggagggcacttcaagtcccagcgttttggattttatttatttattggagacgagtttcgctcttgttgcccaggctggagtgcagtggcccgatctcggctcactgaaacctccgcctcccgggttcaagcgattgtcctgcctcagcctcctgagtagctgtgattacaggcatgtgccaccaggcccgactaattgtatttttagtagagacggggtttcgccatgttggccaggctggtctcgaactcctgacctcaaataatccgcctgcctcggcctcccaaagtgctgggattacaggtatgagccaccgcgctcggccttctctttctttatgacagaggacaatcccactgctgcagaatgccagcaccagaacccccctttccccctgcagtcacttgtggctcctgcaccctacacagaacactcactgagaactccacagagatccctggactgctgggaattttttggaccaaccaaaaaacgggagtaaaagccacagaactctttccttgtgggcccac

SEQ ID NO: 65606 - DNA, 530 bp, Homo sapiens
cacccaaaagacagctggccacgtgccacggtttgggcgttcacttcaaatagaggagctagtgctctagttcctgctagacttcaccaaaatgttttcacttacgcagaaaaacaaagggggtgcgggtagggctcagggaaggcaatgtgaaggggaattagtgcagtgtggactgcggagccactgactttgatggacggtgggctggctgttttctgagcagggtccgaatgcagtcacaaagtatgctgccttcagcagctgctccagttcactcattcaacaaatatttaccgggtggctggtaagtgctaggccttgccaagagaactgtagccacataagacagaaaaatggcagaataataccttttttttttttttgagacgaagtctcgctctgtcatccaggctggagtgcaatagcgcgatctcagctcactgcaacctcggctttccaggttcaagtgactcctctgcctcagcctccctgaatagctgggattacaggcacccaccaccacgcct

SEQ ID NO: 65607 - DNA, 2716 bp, Homo sapiens
ccatccccaggtaattctacagcaaatctcagacctatgacttcatccataaataaaagcataccaactcccgaaaaatgtgtaaggaaatgatctcagaataaaagccatctacaaagtgaagacatccagtcgtattaaaaactccccacaatatcactgctttcggttaggactcacatctaccctggaaggtgagaactctgtcatgcacaaccaacgcttgagaaccacttagggaggggataaacgaaccttgggagatgtaacccagtttcactcgagataagtaactttgaacttaacccactccttaatgtagatgcagagattttgaacacaatttttcaagtgggacaggtcaatctctacttcaccaattccacctaaaacattaagcaataacctaaacaacgctcgctcgctctctgacgtgtaggagcccgagacaagtgttcctgtaatcactagcaatccctccgacgcacacaccatccacactctacccaactcaggaaggatgctctctcttgtccaaggacagcacaggcctcatccacatttccacctgcgcgaaccccagccagcaccatttaggctcattcccgctccctcctccttctaaagtcacttttccaggatgaactgcaacggacgctcgcagggtcaaccacgtgctggggagaggagcccacggaagcagcggcctcccggggcccagcgccgcgctccaggggcctcccgggcgactccgcagcgcctgccccgagcccggccgcggacacagcgacccgagcacctctccccgagcatggctccgtggcgagcgttacgtaaacgggggcgcgcggagtctcccctctcgtgtgtctgggtttggcggccgccactccagccccaggcccaggacccccacgccacccgccagaagcagcagcatcggaaccgcaccccgccccgggctccatggcctcctccgcaaccacgaggaaggtgcccgccccggggccgcacccgccccgctgagctctgcggccgcacgcgacgccctcgccctgattccgacttcaacctctccgaagttgacctgaatcctgcacagacagcgggccccggcgacccccatcaccggcccggagcccgggggacggcggagaccggcgaggacagcccggccccggaccctcctcgggaatacccgggctctggagaagcgagctcgcgagcgggcggagcatcccgggtcctcctcggggacggccgaagccctgcgcggacccgcgcccacgttctccctgagcgtcccggctgcgcccgccagcccttcccgcgccccaggcctcgcggaaccccccgccccggtctcgtccccaggcctgcgcaccgccccgacccgaccccagcctaccccggcctctccgcgggcgcgccacaagcctacgcagccctggcgactccttcggcccgcggcccagcacgcgcaccatccgggcctccggcgcctcacacacgtgtcaccgcgacgcttaaaggcgccgcacccagcgttcgcgctgcgctaactccgaaagggttgggaggctttaagaggcggggctagattccgctaactccctgtccccgcccaccgccgcttccgtgtcgcctacgtcacctccccatcacgggaccccgccagcctacgtgatgacgcaagtgcgcagagccacaggcgctcccgcccctgtgccgcggcagggtgacgtctccgcagcgcactagaggtgccgctacttccgggtcggccgagcacacctggcggcgtggcggacgcctgaagtgtgacagtggcgcgcgcccccgccccagaacggggactcgagggactttgcccacccctgcaacagccctcccgcgctgtctcccgggcagggagaaggctgggctcccccacctgcccctggccgtcaggtggctgtggagaagcggaggcgcgggcgctcggccttaacgtcccgggctctggggccatccgtgactcccacacgcggagcacctgcagtttggggagggagggatctgggagcgatcggccaaagcctggggctgccgaggaaatggctcttcggaattagggatctgagagtgtgagatttgacctttgtaggctggtggcggctgtgcaatctctagctccacccactccctccaaaagctttgtcctctgacagctctgcgaaggttttagctgagtatttgtgagcacgtatttcttttgcagtatttttaaaaatcctcttgatctgaggcaacttcgctggcttcctccccattcccttgggcaggttgagagtgttggttcctggcctgacctcagaaactcagagaagcacaggatgggcataaactactttatccaaaaggcagaactttgcaaacacagtcgtatctgctgtgtcttttttgatgtaagtaggaatgatgagtagggtgaagtcacaggtaaacaacccaaaacgaatttccatgccctccccacggatcctaaagcagggactggagatggggagagaggctagatgtacttggaacaaaattcaccttgtatttattacctgggcgctggtgttttttgaaaaaagcaaacaagataaccatattagtctgatgctgagactatgccctatctgtaagaatccttgggctgggcgcggtggctcacccttgtaatcccaac

SEQ ID NO: 65608 - DNA, 606 bp, Homo sapiens
ctctctccgtcacttccatctcctgtcaccccaacctaccgcccctccgcagacaggcacccctcagggcaaaagcagccatgagccagggcacctccctttagcaaacctgcttggattccagcctctgcacaccccttgtgcccggcacaaccttcacagccccaggcagcagccccaaagccagccctgttgccctggtcaagtctctagtgacaccagaaagaaaggaggagaggcagagaggttgtcctggtggtaagcaagaagcccatgacatcactggctctacagactgccacgggtaaacagcttagaccagatgactcaggctgaaagcatatgaacccttcctgcagggaggccgcccggatgcaacagtggtttcacccctgagccgggcagccttggcagaccttgcttcacgtgggctgaaatggcagtgtctctcctctttgtggccaggttttgcctcctctttgactcggaagcatctcctatcctgcaaggacagtttgagcagggcccccgggccctccttccaagaggcttctgcagctgtggacccccaagagtttatgccgctgagctctgctgtctctcccc

SEQ ID NO: 65609 - DNA, 2039 bp, Homo sapiens
gggtcactaagggggaaaggtgtttgggagagagatgtgtctgctgatggaagagtggtcacaggtgctctgtgccaagcctagggtacacagagggcaagggaaagaccattcggagggagaagcaaaggcaccaggcaacatggactggcaaggaggtaccagtctccaaggatgagagaatccagaccggatggcagtaggggtgtgagacaggtatggtggggagggcgaatcatttgcatgcaggaagatgagagtgagctgtgtgcctggaggaaggctccaaattggatgagggcagggagagcaaggactgggatggggtggggaaggttggcctgttacaggtttgaccaagtgccagtcagagggagaaaattcccttatcagtccaaggagaccctgcatagaccagaggaggggtatttgaagtcagaaggtggtgggagggggtcattcccaggaggggtgccccacactagccagagcggggaggcgtcccacactaatcagagggggatggtccccacactaaccagagggggaggtgccccacatgaatcagaggggggtggtccccacactaatcagagcggggaggtgccccacagtaatcagagggggatggtccccaaactaattagaaggggggtgtcccacactaatcagagcggggaggagtcacataatcagaggggggaggtgcccacactaatcagaggggaatggtccccacactaattagagaggaggggtgcccacactaaccagagggtaatggtccccacgctagtcccagggatgaggtgtcccaaaagtcagagggggtggtgtccaccgcctgtcggaagaaggggactttcccacaggtcagagggcagagtcccagcccagtctgcgagtcagggggcagagatcccgcacgggtgggacgggaagggggcctgacgggtcagggggcgggacgcggcagggtcggagggcggcggcaggctccgggacgggggtccgggcccgtggctggggcagggcgccggcggccgcgggcgcagtcactcacccgctgcggggctggctccggtgcccgcgatcggcggggcttggctgggcttggctgggcttggctgggctaacggccgggacggaggaaggtggccgacttccgccccgcgcgcgctcgccccgcctctgggcccgcgttcccggcagcctctgctctgcggctgcgcgcggacggcgcgagggctgctgggagctgtggtttgtgtttttttgggttttttttttgttgtttttttgtgttttttttttccgtcctgcgcctgcgcgctggaggagcggccggctggctgcaggctggaggggcgcgagggtccgcactggcacatgagggccgtcttccaccgcgttgcgctggaacgtgggcccagcagatcttttggggtgggaggcattgaggggggtgaaggctactagggagggaagttctcattctccgagcgagggcccccttacatgggcctcccgaccctcgtagtcttgggaggcggaaaaccgtgggcccctttctgccatcctcattctcaggcagcccctctccttggcccttcaaaacagccgcctccagagtgctgctgaccagttgccaaagccaggatcagggaggtctaaggctgtagtgtcctggggtggggacggtggggtgtttccctgcaaaaaatctgcagttgacaaacctgccaaacaagggtctctgatttctcctttcccctccgtagccctagcccccgagatattttagggcactctgttaaaaggcttccccggccccgccctcctccatcccaaagttctgagaaaggcctggtggccgtggagcctctggcaggagagcttggcagaagggtgcaccagccccctgcccatctgcaccttcagctttcctgcttgataccagctacttcccccagctctctcaaaaccttccgttcagtaaaagatacacaagaggaggaattcaaattatataaatggta

SEQ ID NO: 65610 - DNA, 2165 bp, Homo sapiens
aacctccacctcccaggttcaagcgattctcctgcctcagcctcccaagtagctggattagaggtgtgtaccaccacgcctggctaattttgtatttttagtagagactgggtttcaccctgttggtcaggctggtctcaaactcttgacctcaagtgatccacccgcttcaaccttccaaagtgctgggattacaggggtgagccaccgcgcctggcctccggggcgtatacttttaaccttcctatctggtgttgggaacatggcactcagctcgccaagctgatgctgggaacttctctctcccagctgctaacagagaatgcccaggggcaggaaggacacaggtccgctacccagggactctctacttctcctcccgcctccctctcctcctcttgtgttgccaagggtggtgtccccagtgagctcattcagggaggcaggaagcatggtgcaggaagccctaggtgggcgctgtgcggctacaggacaccactgcccctcccaggcaggtgcagccagctggcgagggacgtcctcccaagtaggagcagagaaagcccaagctgtcccaggaaggccatgggttccctccttgttcctaggaagtgaccccccttttcagggcaaccaggacaacagagtgtttttggaacatgctcctttctgttcttcttcctggtgcctccccccagctgtaattagcatgactcataaaccaaatattctggcattgaactttgctcatcaaaacaaagatgaaaagaatttcatagatacagttgtgcgcagggactggagcttcccatttgtgtcttgtcctcaggggtccctgttcctgggcgggggggggctgtggctgaggctccagaaccttagggaaggggtgggggtgacggacaccaggaagggcaggaagaagtagcaggttacaccatcccctggacgatcccacctctgcctgacaatcagtagcctctagagatgttcaagtgggggcactccctcatgggccacaggttgccatttcccctgttaacctgctgaaattggcctgctggtgtcaaatggcacaaggcagctctctggacaggaccctgccatctccctgaccccttcatacagggcaagaactcacctgcccactttagagagcagtctggaagaaacagcgacgtcagctcagctcaacaatgtgtttccttcaggctctcttggggcagcccagcaagccgctctcatgagccagggatccttggggccctgtcctggggtctatgctggggtccttggcctggaagggccagtcctgagcttaagcagggacatgcaggagcaggacatgctcactcctttcctccttcccgagccccgcagtgagatgctccaactgctgccgctgcagcctctagttctctgggagaggcatgcggtgtgagcaggaagggaggggcttcggagccatgtgggaaggatctttatctctgggtccttgtcaaggtcacggctgtgtgacacttgtgctggggtgatatgagtggctcttggcaaatcagcacccctccagctgcctgttcttgcctacatttgatttccagagctgggcttggcatctgaatgtggttcaaagggggatggtctccagcaggggcacggggacccccacagtccccactgtacaccagggcactgctatcttgcctctgaggccccctggatctaagccgttctccagcttcagatggggctggcacagactgcaggcccctccccgggcccccatcctgtccaggacggccgtcgggacggctgtggccgggccggtgtctgcccatctccctggctcctgtaggaattttccttgacacgagacagagtagagcaggagacggcaggcagggaggcaggagtcgaggggaggaggagaagaggcagacaggcaggcggggcatggggaagtcaagttcttggtgccctgtgctgggtcaaatgttgttcttggccacggctaaagccacacttggtggaatgccccaaaccctatgctttgggttgtacccatccccctcagcaagacatctggataacagccaccctctgccctggggagcagggaagctgctgggaaagctgccagccctgggtgggttcgaggcagatgt

SEQ ID NO: 65611 - DNA, 1374 bp, Homo sapiens
taataggggttagctgcatgagttaaaatctcattgccaccatttgctgactttgtgccctctgggagattgcttaatctctctgggataaacctcggtttgcttgacaaaggaagctggtgaggctaaagagagaactctaagattggggcgttccgaagccttctagagccttctagcaccctggactcatagccaatgatgggcaacaacaagaacgacgacgaaccctgggctcggaactcgcccaggccccgcccctcacagccccgccccgtcctcggccccgcccccggcctgtcgcctcaacaaagtccccgccgcgcggccgctggccgggagtcagctcggagtcccgtcccagcgcggcgtcagcgctgcgcacttcccattggccgagcgcggcgcgggggcgggcccgggcctgcgattgcctctcggcgtgcgcggacagtgtcatggaggccgcggcggtgacggtcacccggtcggctacacggcggcggcggcggcagctgcaggggctggcggccccggaggcggggacgcaggaggagcaggaggatcaggagccgcggccgcggcggcggcggccgggaaggaggtggggctgcggggcccgcgtgaaccccgatccgcggggctgagagtccgtggccccggggcccgaggtttcccggcacgggcgcgccgaggggcggggggccggcgcctgtgtccgctccgtgcacagtaagggacagagggtggcagcgcccctccgccccggtccgccccgccgtcctcgcgccactgccgggcagcggcctccggcccccgtgcgtgacccctgcctatctcagaaatacgggtgcaaacccgagtggccgcggggcccagcgggaatcccgacgccccggccagacccctgcttcccacgtcgctggtctatgcggaagatcccggcggcggtgctcatgcctggctcagtggatgccggctggtggaaggggtggccttctgtaggggtgacactagaactgagtctttggggaggaggaagccttcagtaggtggagaatagggagtagggtatccaactggcggggaacagaaagggccaaagcacagagacagaaagggacgaacatgcccctctgggctgggcttccttcctttggggggcacttgcccacccggtaaactccccctcagtaggttgcagggggagaagttaggagcacagacatggcttccggaaacagcagccgtagctttgtttctaaacccaaagcagtgagactgctgagcatttcagacctcatgaagatgggatgaaggctggctgctgggaaagatatttttggacaggaggaatgtggagatggctctttc

SEQ ID NO: 65612 - DNA, 1669 bp, Homo sapiens
gaagggaagatggcaagcacgatggaaggcaggcttgaatgccgcctcctgcacacctcgccagttctctgcgtgtgtcctgattgagagtctctgggcagattcttctttcccaaacagtaacatatggtggtcactgaggcattaactgccaccaagagcctccggagtcacctggcctctccccttccaggacataggaaattcctctgcagcctccccaccgcagatgcctccaaggaccaaggacagggaatccaggcagcccacccgatggctgccagctgtcatggtcaggaagttcttctttcagacagcctgaaatccatctcccccagactctcctcattgatcttagttccgccatctgaggccacaggcattgtgtggactttcccttccacaggccagcccttgagctttccaagacagatcaaccagctctttcctcctctgggcacacagcgctggtccctggggccatttcctttagggtgcatttgggtctttaccccgtcttgtccacttggctgcgaaacatcccctggcccatagctgggaactccagggtgaaactaacattccaggtggccctgcggcccagggatcccctgaggtgatccagagtggaccttacccatgccatctaaacagagtcagcttggagggcagccacttagctttggagtcatcgtccctccagcttcctggggacacaattggtttacactgtaattattaacagggctgcagtttggaggatgtgtcatctggtcactctaattgtactgaatttgtgatcagtgacagcccctgagtcttctttctcttgtactcatccaactggtgtttttggaactcagagcaagattttacatttagtcttgttacatttagtgaatttcacccctggtgctagccagctaaccaggaaaactattagttattcctctcatctttagaagaataagaatttgatcatcatgcctactaaatgtttacataaactgctggtgaaaggcatgactagcatagggttgagagcccagccttgtggcgcaccattagagacaccccaggagtcagtgccctttgaccattcacacacgtcacctatgcaaaacatgcccctgcctttccaccatccagtcttcagtgaaaggtgaccagcacgtacacagcccacatggcttgcacagtcaacctctctccctctttggaaagttcggctgtctcccaatctcaagcttcctccctgggcatctctcgctggccagtcccctccccagcactgctgtcccctccctccattcttttttttttttttttttagacagggtctcactctgttgctcaggctggaatgcagtggcaccatttggactcaccgcaacctccacctcccgggttcaagcgattctcatgtctcagcctcccgcatagctgggattacaagcatgcaccaacacacctggctaattttagtatttttagtagagacgggatttcaccatgttgcccaggctggtctcaaactcctgacctcaagtgatgtgcccacctcagcctcccaaagtgctgggattaaaggcatgagccatgtgcccagcccccggatcaattctgtaagtgctcagctgctggattgactctggaactcctcacagcc

SEQ ID NO: 65613 - DNA, 1666 bp, Homo sapiens
aggaaagggcgagggggagggtggttaacaccagctttggggtgtgtggggctccctgctggagagaaacagtccaggcttagagaccagaaatacacaggcagcagccgccgttgctattggcagccactggttacatggcctttgtggctgggggcggggggctctgctgatctcggggttaccttgaatgagaccctcacattctgtttgcaggaagacccaggcctcactgtctgactgtccctgtgacacatggctcatctgagtccaggcctgcatgcaggtggcaacacactggtgatattatcacttaaaatcacaagataacgggaataaccatcagcattttctctccagtggttgctgagacaagccattcccctcttctcagtgttacacaggctgccggccggcctggggagccacatggcccctgcccacgcggggccacgcaggtcccacctggctgcctccccaggtggccccttcgtttcctgaggagggggtagggggtctctcctgtcctcctatcagatcgctccaactgccccctttggggacttccctgttgttggtgaaattgtttaagttgggagttttgctcagttccagctctgtcatcgcagataattgtgtcacctggcacgtgttcctgtgtgagtcagtcctggggtgctgtggagggagggctctggatgcaggaagctggggcttgaatcctgccctcttcctctcctgtcccctttcccaacatctttctccagaaagattgtcttcccgatgtgccagctgtgcctgtctgcttgccccgtgtccccatctctagggccaccccagtaccaggagcctccgagggtggtgggccatggcagggaagccactaacctgctaggaatttgaaaaatgttcccacgtttcaaggggcgccatgctggggctctgcctcccaggggtagcactgactccctctggggcttggcttggagccaaagaacagagtggtgacctgtgactaccaggagtccctggcggaatctagccacctggtggacgggtggcactgccctgcctgtgccagcagatccagggtgttctctgagcccctgcagcaatctgagtcaacccttccacagccggcctgaagcccccaggagtgacgtccaccaccagggattgagggccacttgcactcttgtcattttttattggttgtggggacagggctgagaccaaagtctgtattcagagcaatctgcctgaaacctggtgtcacaggaattttccaggatacttcagtccagggctgtgagaaggggagagagtgttttagggtggggtggatggagtcaggttgttggaggaggtgtgcagaggccttcacatagtaggctgccctgtgcccagagtcccagtggtcccccagtgaaatcaccaagccaggcttagcttggcaggctatagggtaaacagtgctctggggggggcgggggcggggtgctagcagatggggctagtcctggggggcagcgtgaggctggccctggtcctggggcacataggtggtcccaagatgggcattggtaccacagagctcagccccattggcagtgatgtccgagcggggcaggtccaggatggctgtggccaggtgccaggagctggc

SEQ ID NO: 65614 - DNA, 635 bp, Homo sapiens
gagggagagggcacgactttcccagtggaatgggctcctgctgtgctctgagccctgggtcactgtccccactctggggagggaggggaggagcctggagcaccaagggcgcggctggcaataaaggcagatgctcaagttgatgccaccccacgcacgtgaggctgggaccaggggtggcactgacacggctggggagcccactcccgaggttcgacccggggatgtgcacagccacattccaaaggcgcacgggatgagatcagcccgggtgaccctgggactttgtcctcctcggcaggagccagccctgtgcaccctgtgtgcctgtccatctggaaggcccagcatgagaggcctggccgtcctcctcactgtggctctggccacgctcctggctcccggggccggagcaccggtacaaagtcagggctcccagaacaagctgctcctggtgtccttcgacggcttccgctggaactacgaccaggatgtggacacccccaacctggacgccatggcccgagacggggtgaaggcacgctacatgacccccgcctttgtcaccatgaccagcccctgccacttcaccctggtcaccggtgagtactgccctgtgacggggcctgggggtg

SEQ ID NO: 65615 - DNA, 1770 bp, Homo sapiens
tggcttaaacccacagaaacggatccgcatgcttctggaggccagaaggccaaacccagggcattgcagggctgcacccacccggaaggttccagcagaggctccctcctcacctcttctggctcctggggcctcggcaatccttggcattcctgggctgacggcagcatcactccgacctctccccacgtctccccagggcctttcccctgtgtgtgtgtgtctgtattcaaactttcctcttctcactagtacaccagtcgctgaatttcgggtccacacttctctggtatacatctccttaccctagctaatcacatctgcaaagaccctatttctaaataaggccacgttctaaggttccaagtgagcatgaatgtggtgggacaccatccaccccaacacaggcagctcatccccacaccagcctttctgccccttctaaccgcaaatggaggtgtgcgggtctcccgtctgcgcagcgcctcttttgctctctgtatcgcagatgaggacgggagggaccttctccacatcatctctccttttgcaccttttggacttagtaccatgtgcacgtgtttcctgtacaaaaataaattcaaaaaatctcctggagctccacgtagttcactgaaattcctgcctgggatctcgtctgatggctgggccatcatttatttaatgagttccttcctgacggccgtggaggtcacccgcaatcttttgctaaagcaaacaaggctgccaccaggatccctgcacacgcattcgtgcctgtgtgcccgtccagctgtgggacaaactgaaagtggaagtgcgattgctaaaacaggtcaaagaacacgtgtctatttgtctcagacatgacctcaaaccttggctcccacggggcagtgcaggaggaagtctgctccccccagccctgccccaggcccactccccacccagcacacagggaaacctgggctgttttgacttcgcctcttccagccctgggtccggccttcgctgtgaccccggtccatcccgccgccctctgcacctcttcctccctcaggcaaatatatcgagaaccacggggtggttcacaacatgtactacaacaccaccagcaaggtgaagctgccctaccacgccacgctgggcatccagaggtggtgggacaacggcagcgtgcccatctggatcacagcccagaggcaggtaatgtcacccccgcccatactgacatcgcagagcacgggggcacctaggcccaggtgaggcttggaaccatgtgagatccacggcaggtcccttccccactccagggtctcggggctcctggcctaccctggcacagaagggtgtgaagtagggccccaaaaggggcaggtggtgggtgctggtgaggactaaccagtgagctacgtccggctcggcccatggacacagccctgcccggtcctctctggggggccctgggagcaagagggattgctctgtccccctagtcggagggagaactgcacccttgggccctgcagcattgggggtgagggtcggacagggaagatcactgtgactcaacaagaaagcatttaacaattagacgactttctccctttccacatccctgtcacagctgaacagctaaattctaaagggccaaagacaaaatgagaggtgggttacagtattgacccaggaacccccccacccacccccagtttgcaatgctctgggggcttcctggcccagaggcgaggcttccagtaaacaaagtca

SEQ ID NO: 65616 - DNA, 2091 bp, Homo sapiens
tataacctacttacttctgcgaccatcccttccatttcacgaggtattccatgcgtccctgcgggtgcaaaggcgataatgtgtgtgcatggggagaaacgcatgacgaggatacaagaaatgcatgcgaaaatgcatgcaccagatgaatgctcgaaaccccgccgcaaaaggcacgcgcccgctgcatcacccctgcacctaatgctgcacaaagtgcatgcaccggcattcattccccaccccgccccccacccatgcaatccgtgcatcgctgcaagtctaaggaaagcgcctgggctcagagctgccgccgccgccgccgccacggccgcggccgctgctgggacctgggggaagggaagctgggctgcagcagggggagggaacccgggccgggaggggagggcccggccgcacggaggccctaggcccgggggcacctactttccgtatgcgccgcttcaggagggcttcggccgcgaacacccgctcccccaccgctgaaagctccatgttgactcgccgcttccccccttggccgcttccaggagcagaaaagcagcagccagcgcacgacagaccataatactctcccgctgacgtcagttctcctccccctcccggcgctctcgctccctcccgcggcccccctcccgcgctcctccgctcggccccctcccctccgcccagtgcttcctcccgccccacgtgttgctaacgacgttgctaaagccgagcggccggaggcctgcgcccccgcacgctgattggacgagctccgagccacgcccctctgcctttctcccccgcgttgctacgtgaccagcgttccaatcgccagggggcggagtccgaggcgactccagagaccgagcgcgcgagtgggagggggcgccgccggaagtgacgccaggggaaggcgggcccggccgctgtcagtctgcggggctggcgaggggggcaggccgccctctgtcctcgccggggcccccctcccccgccaccaagttgtccctccggcgttcggcgtcccccacagctctcgctgggatccccgcggcgatgtcagcccggctccgcccctcggcagaccccggcccgccgccccacccccaccgcccaggactcgcgcggtcccctcccccagccgcccgcgccgcacaatgcacaatgcacaggtgctggggcgccgcgggccgcgcccgaaccccgagagcctgcggcgcgcccatcggctggcttctcccccggcccccgcccccctcccccggagccgcacacccgacccccggtctccatggcaacgtcccccccccccccaagccgggtcccgctaacaaatcaatgtgcatgtgtctcaggctcctgtcgcgcggccctgccctcggccaccctccgggccctgcgagccgggctggctggagcgctcgtccccggctccgaagccgaacacagacctggtggaggccgggctgttccctccggagcccggctgcagcccaggaccccacagaggatgtcgcgcggcttcttcctgccccccgaccatccccgacgcccgcagccacctgcccctgcccttagcccaagctgcccgcccccgccaggcttcggccccgaacctcgccttcccctcgccgccccctgctcggggcctgggtgggctaagggcatctgggcggagccggcagaggatggggcgagcggctgggggtgcgtctggctttccccgaaccccggcgcccggcccgcgcacttcctgtccaccgctcttcccaacgtgggcggcggacatcctgcgagaaacgccagcgcgggaagctgggggacgtcgccgggtccagtgcgggctgggcgagagggtctcacgcgcgaagatggcgggctcctggaaagggacaagggccggccgcgaccgccttgccgtgcgcacacaagcacgtgcaccgccgaccctgccgccagctaggctaccggtgacccgtggcgggggcggcgctggggacagcagcctcactctgggcccagctccctcccaccctgttctcttattgctcaagctccaaatcacaactcccactccttgga

SEQ ID NO: 65617 - DNA, 1504 bp, Homo sapiens
gcacacctctccccggccggcccggcccgctggggcctgggttcctttgggttggggaagtgggggtacgaacccacgcggctgtgccaaggggtcccaactccggagtccaaccccacccaccagtcctctgtgcgcacttttcgtttatttctcagcagtctcagtcctggagctcctggggcgatttcgtcccctgccctggtgcgcccccgggccctgccctgagcccatgccccaggccgggtgtccagttcaccctgagctccccttggcgcccggagaagggtgctcgggcccgggtgctggggagcggcggggtggccgccggcgcctcttcggcgcggatggctctcggcggggccgaggagggggtcgcagagcggctccccgccgagaggagggtgggcgctcggcacctgctgagctacggtggtggctgcggtttatggcgcccgaggatccacccggatcttctccgcggagttccgggcttggctcgtctgtagtcagcacgcacacagctttgttatttgttatttttttaatttttctgcggggagcatcggggctagcccgcccagctccaacgccagagggtgtgggggagactgatttctaaatgggtgggagcgacacacggtcaccgaggtcaacaccccattaacatttccccaccggagcgccgcgacctcgcgagggcaccgggcaccggggtgggggtggggacagaccgagcgcgcccttcctgcgcagtccccggccgcccccaccccgtgccccctctgcccgcaggtaaccgcccctcccccgctcgccccgcggccgcccccgcccgctcccccgggagggtccctgcgcccggccgagcgtccccgggcgggcaccgagagcggggctgggggctgcggcgcccgcccccgccggggcagcgtggcgactggcgccgctttggcagccattttctgcagctgccgcggccggggctctgcggagtgaggcggaggctgcagccgccagacagaggcggcgggggcggcgggcgcggggtcaccggcgggggggcgcccggcggccggaggggggcgggcgggcgctgtcgccggtgcccccgcccctccccctgctgcattgcaggcagagcggggccgctccgcgtggcgagcgcctgcgatcccaccctttccccgccatcttgtaccccggctggcgccttcccaaagcggagctgccgcagacaaagcccgccccgggccggcgggggcccctgcagcccacccgggctgcgcggcctgggggcccccgaggcccgcaccctcgccccgcccctcccgggggccggcgcgccccccctcgccccaaggggggctctgcatgcggcgaccactcacccagccccagagggccggccgggacccccccttccactcccgatcgccagactggacccgcgcccaagccccagcaccagcccaccctggttgctggaaggagtaggggttcc

SEQ ID NO: 65618 - DNA, 2112 bp, Homo sapiens
cctgcaggccacacctttccaggaatggtagtggaacggtttccttccctgttctgcgggagtgccaccctctacctcccctctcccacccccagacccagccaggcagaagccacccacagggtgggggacaccaccaagggctaagggtcactctggtcaccaactgtgggcctgaacaagaggcttcccttcccctcccgagtcttcagttctcctcagctagaaaaacagggagacgacgtccacgcctggcatgggcctttgtgtaccagccggtgaaggacaggcccaattctcgtgcccagcaggcagtttgccagaagcaagatcaccctccttccacccccggggtggcaaaggacattcattccgtggagggggaggggactgtgtaactcactctaaatggggctggggtgaccggggagtgggagggaccactcacaaaagccagggctagaaactcccaacggcttttttttaaagaacttcccttccccctcccctccccatgctgggctcccctcccccacgtccagccgctggtggcctgcagccaacactggccacactgtccgcattcaggcctccccgccctcctggccctcatctctccccagccttccccacactggctctctcgccacctcgccaccccccaccactctgaaccacgttgacctcttccgccctggcgccccgcacagacccgggccccttggtcccaggcgggcaggggaagggcttcggaggccgggagcagccccgcgcccgccaggcccccagccccgcggtccctggccctgtgcggccacctcaaccaggaggaagatcgctgcgtctgcagaaagctggccaccgccgccgcgttcccgggtcgcggcttcctggcccgctgagccgcaccccggagttcggcccagtcccgtcgccccctctgggaccttaaccccttcctcccccgcgacaccaagggccttggccttgccaccctaagggagaagggtgaggagtcccagctctcctcgctaaggaagtgggggtggcaggcctcgctcccccgccctcctccccgtccccatccatctcgcaggaagccccccgccccccaccccggcagcgctcgccgcgcctctagtgggagcctctggcctggtggtttccggggagagagcccgaagagcaagggcctcggcagcttcctcagtggggcagggccggcgatgccagccagggacgccggagaggctgggggtccccgccccgcggaacctgccctaccgggcgcgattattaagaaggaacctccctgccccgccagggcttgcgcctgggtgtgttgagccccaggggtggaggctacgggggaggagagccaaaggtcagccgctgcccagtgggtgccgcgagggagactagccccacccgcgtgtccgcgccgcccacccctgcaccccctcctcccctacccagaacccagggtttgccagtgccttgggcaccgccggccggaaagccctgggggcggggacggctcccacacccacccccccgcaggaattccccttcccagccgggcgcctctcgacttcccagggagcggggtcaccctcctgcgccggcgccgcggcccgcaaaaccagcccacttcgctggtgcaaaggttcagcacagggctcgaaggcggagttggtggcgagaggggtccgctcatctcaaacagcgaaaatgcaccttcaacatctccatttaatatttacattcaagcaggtaatagttggaagcttatagtttagacatttctagtagcagcagtttctagagagctcgtgtagccttttaacaaacttttttttttttttttttttgcacatagaaacaagacatccatgtgtacagtatcaaaaaatatataccaaggttactggtattgcagttcgtggaaggggaagagaggggagaaaatgaaatcaaccgaaatactggatggaggggaagaaaggtcaaaagaaaatagtttgtctgatatagaatataacatgatctagaggaaactccataaatctaggtttttatatttcaatatataaatacctacaaataaatata

SEQ ID NO: 65619 - DNA, 4857 bp, Homo sapiens
cctctgtgctcaggaggcagaagctcagggctgcacctctggccctcctgcccacggccttgggcctgtggctctgtgcgaagcaaagtggacacggggatccagggaagacaaaccagcccaagcgaggtgtgcgccgacctcatccctcccgtcagaagcgcgggatgctaatgacctcattaagattccgataacgagtgcctccggcagaagggagggccctttcttaaaggccaggcactaaacagggggaggggctgcgcccttgtttacacagcggcaaatgagccaattaggggctgggggcgggggcgggccaccaaggccagggtgtggccaggtttgtggccacctggtgaacgctgcgctcctcccagctgagcaggtgggcgtggccggagcagcttagagaagcaccgcctcctcctcggagtctggctcctggctgcctcaatttccaaataatgaataaagcccatgggcggaggcaccggtcactacagccaccaggctcctgcctgcaggccagcctaagggtgatccacagctgggggctggatcttcccaggcactacccagccctccacggacgagtgggatgcctctctagtgtctgccaaagttgcagcccattcctgggccggaaacgggttcctcacagaccctagctaccacccccatgcctccttggaccaaccctggggagttctgacatgccccagggcgggggccggggcctgactctgaagttgcgtggcattgcgacagcctgcgttttaattcttcagggacccattatgcaacgtggcatcagccgctgacatggttacagggtggtgaactcccaggtggaatggggcaggatcccagctacgtgccccccctgcattgcgggagggcaactgccctgccccgccggtggctagctcagagggtctacagtttacagttttagcgccaaacgcgccacaggaaatagtgcaaaataaaagggggaggagagatggaaggcagcggggtggccgagctccaagggccccggctgctcctcccctcctcgcccttcccccttctaccctctccgaaacagagaaccacagccaccggcgacgaacccagctgcagcagctgcagcgtgacaagcaaccgtgcgcacgaggatgagtcccccagaagaagccacccctccaccaccaagcagcgcccaccccaggcccttgggccaagcccccctgccttgagggtgggtggccctgccctgccaaacagcccagtggggtccggggcggggggcaacccagcaccctatggaatctactcctgaccaagcttaaattccctggggtgtgcgggtgcagcttttaaggccatgtcaactttcctccagccgccaacaggttaagttcagttccatgacgtccgggcggtttcacaatgccagctccctcagagctgcaccgcgaggtgctggtgccaagcggccagtggctgcaggacagcaacacctaggctccgggggtggggctcccaggttgcaacaggaggggcccctggggaaccaggcacagccccaagttctccgggcagctgcatggccacccacacacacccttcccaaacttcccccaaaacccaagcctggccttccctggccttgccccgcccccaccccaagctgcagcaaccgccaaggacgctggttagaggagctggggccgcagcgtgcccatccaggccggttggggagggggctcccaccagccccctccacgcccctttcctattgctgcgtcgcccactttgccattcccatatacggtcacgggtggcaggcggtggctgcgtgggggacgctcacctgttctggaaggcgatcagcagcctggggtccaggatgttctcctccggttcccacgtgttatatcttgcaagggaaaagggagggggacacggtgtaaaaaaaaaaaaaaaagccacctttgccgcggcctccaggtggggagtgacataaggccctactctgtctttatgaacatttagccgtggatgtggaaggtagatttccgcaggcctgacgtagtccctgatacacagcccccccctcaaataaacacgcaagggcaggaagaaaggggaggggtaaggaaaatgaaactagcagtttattttgcagttgtcaagaattttaagcatgttactgcgacatgttccaaagccactttgctcaccaggaaccctgcgtgcaaagcagccgaaatgcaaagtcgcagtccccctcctctccccagccccgagtccccgcgagggcttcagccgttctccatttgacccctaatccgatagccaacagccaagcgtcccccccacaccccctcgtggcccaggagcccgctgtcacgggcgagcaaaccccaaatactcagcaacacaaaaatatgcctccgtgtgtgtgtgtgagtgtgcgtgtgcctgcgcgtctatctccatccggtgccttcgcatttcaaattaaagaaaaaaaattctccaccaaaagcgccgcagtgacagttcccaacattttctgcctttcttcttcccctccctgcaccactaggagggagaaggcacacaattgcattttcgtcgctttttaattttttttttttggttttgcaatatggagccgttcggtggagggaaaggggaaaggagccattttctgctgcacatcagtcagtgcctgcgccctccctccctccgccggcctccccggctcggccccgcgtctctccagctcctccggctccttttagtgcataaattagtgatggcatttcccggagagcggagcacaacacagggcgccgggctcgggctcggcggctcggcttccccagtgcctgccaccgacttccccaccccctcctccctccaccccacctccaccccgcctcccgtccgctccccccacccccccagcagctcggcgggtccgcggccccgagccccgcgcctcggcccccgggcccccgccctccgccgcgacttacttgggcgaccagcctctccatttcaccagatactccactctgccctggggggaagagacagcactccatcagcttccgcgggatccccggcccggcccgcagcctccccaccccctccccgcctcctcgcgggccgctccggccgccgctcgccgcccccgcgccgccctaccttgcggatccgcttcttctcgatgctctccaccgcgaagacgtgctcgccaacagctggcagctccatggccgagccggagcgcgccggggcgctggcggccggcgcggctgcagacgctgctagctcccgccggcgcccagctgccgccccggccgaagcgcccccgccgccgccgccgctcgccccgcacagcccggccggcccgccgctgcccgcgcccgccccggctcccggctcgcgctcgctcagacaactgagcccgggccgcggctgcacaagaactcatgcaaatcccggacgtcagcgggcggggcctcgccgggcccagctcggcgtcagggggcgggccgcggcgcggattggcgcagccgggcctaccggaggccccgggcctgggcggcggggggaggaggaaagggcgcgggtgggggacgcggaggggagggcgccggggaggtgcagggggagggatcggcgagcctgggagagggaggctgcagagagggagcgggaccgggaaggagaggtgtgtccgccggggcggaggcgggcggagagcttgacagcccggaagggtctcggcggcgacccctcgcccacatcccggtgcccgggcctccccctcgcggcacgttctcagtgttcacggccccgggacccctgctgggggccacggaagcatccgccgccgctcccagttgcaccgaattgcgtcaccagcgccccgggacgcgcgggccccgccggcagggggcggaatggggcaggggcagctcgcgccccactgcgggccccgcctcgcctccaggctccgggcattttggagcgcgaggagggaaagggacagggcggagagaaggccgaggactgggtgccaaggagagattgaagaacgcacgaggaaggggaccgaggagcagccaatcccggggccctggcgcccaagaacctcggcagaaagggctccaaatccgatcccaccccgatcctcaatggctccgaatttacacttggtcctcttattgacggggcgagatgtcctgtttctagcagcctccagagccaagctaggcgagaggcgtaggaggcagagagagcgggcgcgggaggccagggtccgcctgggggcctgaggggacttcgtggggtcccgggagtggcctagaaacagggagctgggagggccgggaagagcttgaggctgagcgggggacgaacgggcagcgcaaaggggagatgaacggaatggccgaggagccacgcattcgccttgtgtccgcggacccttgttcccgacaggcgaccaagccaaggccctccggactgacgcggcctgagcagcagcgagtgtgaagtttggcacctccggcggcgagacggcgcgttctggcgcgcggctcctgcgtccggctggtggagctgctgcgccctatgcggcctgccgagggcgccgccgagggcccgcgagctccgtggggtcggggtggggggacccgggagcggacagcgcggcccgaggggcaggggcaggggcgcgcctggcctggggtgtgtctgggccccggctccgggctcttgaaggaccgcgagcaggaggcttgcgcaatcccttggctgagcgtccacggagaaagaaaaagagcaaaa

SEQ ID NO: 65620 - DNA, 2342 bp, Homo sapiens
gactggcccgacagggtgcgcggacggggacgcgggccccgagcaccgcgacgccagggtcctttggcagggcccaagcacccctcggggccacaccgccgcccgcagggccgcgcctccgcattgcggcacgctggggtcgcaggcgccgaagcgggacgcgctgttttctacgacgtccgtccctcccaacgtcagggcagccacctcaggcccgcccggagaagcccacccggcccccggcccccactcagtcgcgaggccccgccggcctggagatctgcgcccccgggatccatatttcaaatatgatctttggaacggcttccaccgcccgccgccgccgccgccgcgctcacaacggcctcggcgcactgtgtttttatttgggtttcgtttgctcaaggtcgccccgcggctctcccgtgcccctgaggttcaccccttcacgccagcccctgcgttttcctctcgggtgtccccgtcgcgcccccaaacccagcggggcccactcgcagggcagatttctttcttcctttttccaaccaagagctgctgcagcaaggcagggaatgaaataaaaatcgctaggcggaccccgaagtggtcgtcagccgaagcgcaactgcccccctccaactcgctcccctgcgcccctccccctcggctactcccctcccagctcccagcctcgcggcgcgccgagggttaagcgcgcgcgcgaggtgggggtatttggcttgggaggggggcgagaaaagggggcgccgagcgccgctggcggagaagctgggctcgctctagttccctctccccaaccccggagccgaggggcggcccgatcggaagggcccggcgcgtctccgcctccccggctggcctgcagcctggcctggccgcggcccggaaccgcgaggacgctgcttggaggccgcgtcctgcgtagcccgagagggggaggggggcggaggctccggagccgcggccgcgcgtcgcccgccagccgatcgatccccaaaggcgggagcgcggtgaaccccgccggacacctggggggtcccgatgcctctgcaggactgaggggcgaacggagaggggctcagggatcctgtggccgtgggatggcggccggcagggcccagccggaccgcagcttggcctgcactgcagggcgggtggtaacacctcgggcacccccaaaattccatattgtctgcatggggcccaggctttggacacttccggagccgagtccggtcgcagtgcaacttcatccctacctgtccagcccccaaccccacccccatccccgatgacgaggtcgtgggacgcggtcaccccagtctatctggtcgccccgccctcctgaatcctggtagaaatgttcgggtgtcccctcgaccccacctacgggaagataacccaggtgtgccctaaaagtccccttccccagcttcttccagaaggccgtttcctgaagtggtccctggggatggcccctgaggacctcccccagcccccccgagcccccaaccccagggatcccccttggctcctcgcctgccagtcccgggtgcccaggcagggcccgggcaggggcgcagaggagcttgcactcgccacgccctcccctagggggcgggctccccctggccggtccggcagcccctccgcgcctctcccgcaggggggaaggaggtccggacgcgggcaaagcgggggtctcgctgcaatgagagatggcctgaaaagccccgcacccccgcctcctgcacaccccgtcccttccccctccccacggcggccgggctgctgctttcgtagccagaaacaacccgctccaggggactttgaaccttgggagcccctgcgccctgagcacggaacaggccccaggggtgcgggctattgtccccgacgcgggcctcgtgctcggggcccttccactcccagcgggaagtccacacgagcagcacacacatatctttttatttgagagtttaaaaggaaatctgaggtccagaggatcacagagcctcttgttctgctatcaaaggaccaataagaagcaaactgatattacagggcaaatgttcccagacagcccagcctgctccccttaggaatgagtgtccctggagggggagagcctggaaccaaagccccgccaggaactgcttcccctaaactgaggttctctgaaaaaaatgttcgcctggctgataaagccgcctcttaacagagcccagacacttctgtgcttcccctgggttgctaattgaggacactaaagccctaagagataccccaggtcgggggaaggggccccaagacctagacct

SEQ ID NO: 65621 - DNA, 611 bp, Homo sapiens
aatcaggaatttcaagacagtgacaggagagcattaaaccgtgtacggggccctttggagccaggctttgtggctttgcaggtgtcatgctcatgaagccaaacctgtctgtccctcaccaccttggggcttctccaggagcagccagtactctctcttctgtccctgttcacagatatcccatgaatgcgcaatgagtgtgtggatttgtttactttccccttgccctgcttacacaaaccagggcacgcaaacctctgtacctggctgcttcaccttgtgtccttaagcattgctccatctcagaatagaaagggcgtcctcatttctctgacagctcccaaatcgtccattgtagggagatgtcacaatttattaaactgtactaccactgatgagcctttaggtggtttcctacttttgataacacaaatgacgtggcagtgtctgtaagtgcacaccagctgcaggtacacaatttctcagtgtgccggcgcatctaggaaaaattcctagacctggaattgctgaatcaaagagacaatttaaagaagttaggctggatacggtggctcaagcctgtaatcccagcactttgggaggccaaggtg

SEQ ID NO: 65622 - DNA, 884 bp, Homo sapiens
caacacttactcccaatcccacaacgctgtcagaggactttgcatttcatcgcaacaggattgagatgactgaaagttgctgagcaaacctcagatgaatgaataatcacagaagggttacttggtgactttcacgcagtgtttgtgggcacagggttcctgaggttttgcagaacaccccagcaaggatcttgttgtggtgtcgatggctgcaggccacaggctgggaccccctgtcacacagggcaagagacctcccctggcagcctgtgctagccccccaggccaggcctgcagggaaagggggctaggggctggaactgatctcacgacagcctgtcctcggctccagcatgtggctccctggcttctggccacggctggctgggtcccctgtggcaggagctggccatcctggagttcaagggcccctgaagcactgcccacgcctgatcttcctccccagtgttctctccgctccaggggaagtgagacagcccagcccaggcaaacaggtccagctgcagctggcagccagtcccaagaacgctgccactcggccctccccgctgacctctgcacaccctcgcccggcgccctgccaggccttattcatgggctggcagtgccaggacctctcccggaggcggggcagagcagcagcttctcggccctgtgccgagcccaggcctgcaccctaggcaggcactgctccgtgatccaggaaccacctctctctacagctgggagtgagcagtcagagagggagacagccttgcccggtgctacccagcaagctagtcaccgagtgggcagagggaggagcggccctcaccggatgtcaagcagcctgggtccccagtccagctctgcctgtccctcgc

SEQ ID NO: 65623 - DNA, 980 bp, Homo sapiens
gggggtttgtccctgctgtgggcacctggagcgacacctgtgggggcagctcctcatctgacctgcactaacactaatctttagtcagctccagggactcacccaccctgaaagaccccatcctcaaccctatcaatagctctagttgcatttccggcaaaatctgcaagagctcggttctttgtctaaccctccagggaaacaaacagttcacctcccctggaatgtcctcatccccttcccggggtcccaacaccctccccagcccccaccctactccatctcaggctggctgcctctgaccctaaaagtccaattctgtttgtctgccgggttggggcactcatctgtggcccagccaggcagaaagacagagaaccgggggaaactcccgtctacatgaatcatggggcagaacctggggatttatccaacaaccaagagggcgcctggactttgaagaaaggcagcacttgcccagaggagactgtttcaggagctagaccccaccctgctcttggggtgggtggtggcatttcccagggggcacctgggctcttgcctagtggtctggggtccctggtactttatttctaaagttgtccacatcagcaggaggtgagtggaatagacagtggaggccaggtacctggaaactgctccaggggctgtggtgggagggtgacccaggtgccacccacctgagatgtggtcatggttggttttgtctgagctggttgtttgcttgcagagagggaacccaaaggtcacaccagaaagcaggcttccagtgcagtgaaggcgagggctggaaagccgcacccacccccgcacccacccctgcacttgtgtagtcctcacgtgtcctctacatcctgggccagagggagaggccccttcagcagcggctctcccaacaaagaggaaggcccccaccaagagcacgcactcagaaccccagagttctaggaggcagaatg

SEQ ID NO: 65624 - DNA, 3187 bp, Homo sapiens
acgtgaggactccctaccccaggaccttccaccagaaaaggccaaagagagaccacacgtgccgccccctgccgaagcctggcctttgaaggatgaacggcaaggggtatgtctgccctgacagagtgaccagtacccgcagcacccgagttctttgcctcttattaaagggcagagccaccatggtgggtgaacgggcttcctctcggaaaccaacatcctggttgggttttcccttccaaggaaggctctacacacccggccctcctcagagcctcagcccgcagcgggagatgacacctccgatcaggtccacgggaagatgggggtgaacgagaagcctgaggccgggccggtgggagggcgtgatgcatgggaggagctggactgcggtcagccgtcccctcgcgccctccggtctctgctgctgtgtttacttggctcccttcccgggatggccttgtagcaaatccatctgggatatgttttgtttccacagagggaccctgaattttgaggtggggccacagaacctcccttgagagccagaagagatcagggccaggatgggtcacgggctgtgcccagtgtcgctgcccaaggcagaactggctgcccaccaggggcaggagactggatggtctttccaggccctcatcccaaactcaagcactggagaaaattgttccagagcgtctcggtctgggtgggagcggggaataagcatttctttaaggaattttttttttacttttttttcagactgggtcttgctctgtcacccaggctggagtgctgtggtgacatcacagctcactgcaacctccgcttccacctcttgggctcaagcgatcctcccacttcagcctcccgagtagctgggaccacaggtgcacgccatcacgcccagctaaattttttattttttatagagatggggtctcgctatgttgtccaggctgatcttgaactcctgggctcaagcgctcctcctgcctcggcctcccaaagtgctaggattacaggcatgagtcatcatgcctgacctatttttaaaccagaataagcaggtacagaagtttgcctggtgaccaggagtcatgactctttccgaatgaaggtggggatgggggtagggaatgtccccatgaaggtagcccctggctgggcattttccactcccagccacagcctccctctgcgggcagaaccctgggtgctgcagggagctggttctcagggaaaagggaattaagtcagtactgggagatttgggttccacagagtttaggggctcctacaaacagcggcttacgggctggtgaggaatttcccatcctgaagcttttaaagcagacaaacacatgagtgctgggtgggggcggggtgctgggagatgcagaggctcagaaaaaccctccgaggctctcggattttacgcctgcatgagatttcgagggaagaatcctaaatgtggggaaatgaggttgcccagcaattctgaatgtggtttaaaaaaaaaattaggtgggggagaatgagacgatattcaatatttccttctgattcaaacgaaatacttctaagttcttctctgtgaaagcgtgtgtgtgtttagaagggagagggggatgatagcacgtcctgccagaagccgttttatttactagtttggatgcttcccctgacgcctacctgggaggtgcttgcctggccaccagccagggccgtggctcctcggcaagtgggcgtccgccgagcctttgatgcactctccaaagtcacagagcaaaacaacacgctgaacaaacaccaccaccctgaaaagtcaccagcccatgggcctctccctggctccagctgtggctgatttacccaaactgaaacattttccttttgtcgactgtagagagctatgagtcaggtccaagctccactgggcgtatgcccaaggggcagagggggcagcaaccggacggaagctgcccaatcataagaccatggctgaaagtcaaacgcgcccagagtccacagtcgaccacctcccgctcggcaagccagggtcctggtgaacgcacgtgcctgcgttctgtaccaaacagttgtcaacacacaccagcaacttaacaaatcaactccaacaaaggggaaaaaattaacattaagggcaaaaagactttttctggagggtcctatgcaccagatgttggctctttaattggcagtcaacctcaaagcaaaacttagaaggcccctgcttgttttatcagttagagccacagaaaatcaaagtccaatcccgctaagcatggtgctgtgtagcccggccagccccgtggaagtcctcagcctggtcccgtcttctgggctctgctgggctggacggtgccaccctccccaacccgcacctgcccgccggccccaggccctccctcaggacccagcaccttcagtcctcctgccgagaagaagcctttcatcagtaaaagagaaaacggcttctccaaaggaagtttcttaacttgaaaaaacaccatgattagggaaactcctccatcgtccaagatacaaacacaaactcccaaacacctgtcaatccttctcagggctccacatggcccaaaggacaccccaaatgtggaggaccactcaagaccctcaaatgcagcaccgtgtgccccctgaacagggatccccacattcgatgaaaacaaaattggccagcgcaggaacttttgcccatgacttaagcacagcaaagtccccaaagccagaatccctcccaggacctgcccgacgggttttatcactggacgcatcaaagcccctctcactggtggttggttcagcagagccctgggcctcgggcctgccctgctctgacagctcccacactgtggccttgatcgggcccttttccactctgtgcctgctttgagtaacaggctcccacaaaaacactgtgctggggtatttccaggatgaaaagccacggttcgctttgcctgccatggacagagtcataaatacgagttgtcgttgcctcttcccaacagtctggcatggcaaactggccttgtggagttcggaattgttctagatactgctcatgtattctccagcagctctagctggttctgcccagatacctggcaatgccaaaggccgagaggccaagacactacaa

SEQ ID NO: 65625 - DNA, 1020 bp, Homo sapiens
aaatacacgaatgtcctctctgcacaagcagagcagcctcagcatcggccctcgcaagtcccaccagagaacggtattgaaaagatgactggggtcaaggggtgcggagagggacccactgtaccctcatggccactctagcgccagcccttctgtaatgaccccctctggattcccaaaagtcagccgaggggtccccaccctcctggggtggctggggtgttgctgcccacccccaggggcaggcctgtgtgcagcatccatgcccagaaacctgcgctcagatttcccagttcccagaagacaacagggagagtctatttttctaagctcactaggtaaagtgttacttcctgatctaatcttgccaggctctggaagcttccgtcaaggttttcccacactccatgtcaggtctctgacatgaaccagctttcagagtctaacgactagatttgactttcagctgctcggacggaggcttcaactcagcctgaactagccgcgtggacagcagccgtagccctcacaaggcgtgtgcggtgacgggtctcgggcgcccagccagcgaggggccggctccaggtggtgggagcccacgcccccggccagcactctggccacagcgcagcacctgccccatgagagcctcctgttgcagcccgggcagaggtgagcctgggcagccacctcccacgtgatttcccaatgcttgaagttcacgaccaattgctggggtggggacaacctacacaggcttacagacctaatccaagaaggcagttctcaaaaggatgggaaaacgtgcaccagtctcacagtcccagtcaccttaaaaggtcttaactgatttttccttctctctgtttattgtggtaaaatgtccataacataaaattcaccaccttaaccgttttcaacgtcgagcccagtggcattataccattcctatttttgtgcaaccatgacaccacccatctccagaactctccttcttcccaaactgaagctttgtctcca

SEQ ID NO: 65626 - DNA, 3771 bp, Homo sapiens
ctgaacgttccgctgggtgtgtgtggaacatgtgtgtgaacacaccgcgtttctctagtcacccgtcgggggaacttggacgctttcaccatgggctactgtggacggtgctgctatgggcaggggtggtcatgtatctgagctccttctctttatttctgacacttctatataaccatgaatcatctatgaaataattttgacaagcaagaggttcacaaagtaaattccagacaaagccaccctggagacccagctgggctgtcccgggggcggtccctgcgtccacgccgggagagcaggaatgacacaaagcaggctgcatctggctgtgtcaggcctcccacccatcccatcagccaggcatctctgctttggggccagaggtcaaacgtgtctgggttccgtgtagtctcaggggaggctgaggctgacgcgaggtggggtggggtgaggttgtgctggaggctctccacctctccacccaccagacacccagagaagaggcggaaagtcagcagggaaggcagaaggctgctaagagtggacaggatgcaggagtggcgtctggctgaccctgaccagggggacctggcccaagtgagtgtgcaccccagcccggccctcagaactgcttgcaggcacttgcgagttaatatccacgtgatttaggattcaccaaaatctgcttggaaggaggcagggaggcaagagggaggtcaggtggggaggcgcgcaggcagtgctgccctccagccacaggcaggtgggggtggggcggggcggggcggggagggggagggcgggggcgtgcaccgcaggcagcggccagccctgggctgatctaggggaagcctgccatctgctgggcaccgggatccctcccggagcaggagtgccacctccacgcagatggagtttgcaaggggcggtgccgccatcttcacagaggctccgggcagctggcgggggtggggggatggttgggggggccgtgttggccaagcccaattctggggtgggagaaaacgagcaacactctgcaaagggccgggggcctggtggcccccccatcctcgccggacctcaatgtcctgcgtacaagcctgtcccggccgtggccaccggctggcttgtgtgctccgcctgccgggaagcgctttccccctcgtggaccctacaaagacgcctctctgcaggctcccctcatgctgcgggcacacaatgcgtcctttcacccggggtgggtctggcggaggcggcccctccccggggtgccccccgctgggcccctgaccccacactccgctgctgttcttggcctgcgtagacccgtccctttcaaccgctgtcaggaaactgtgtggacgaggaatccctgctggtcgcgcccgagaccatctctctgcgtctcctagaaggggaaaccgtgacccacatcaaactgtggccgttggaaaggtgaacacacggagcctggggccggtggggccagggggtggggtatccttgcacccgatgtcacttgacacccgtcccggcagcccgccaggctcggagagagaccgtagctaccaaaaataatcctcccagtgtttaaatatttacagaagcaagacagatcctgatgcctttacaatctactggagtctgccctaaccgccagtccgaggctcccaggagaggccacagcgaccacccacccggttttcggggtcccaggtcgcctctcctctccctgtccctgcctgatatatatcgcagggctcctcctccggtgaccacatatctgccactagccctctccctccttccagaacattcccacttccaactctgctctcacatcaccccagccccagcacctaccttgagacagctctttctgctccagagcccctcggggaaagcctgctttctctgcagagcctgcacctcattttgggaaccagtgaacaaaatgtaacaagaggcatttgtccatgtaaccccattgtccatgtaacccctggggctggtctcgaccccactcccctcctggggacacaagggtgagacggtacagtaccaggccaacaccagtcccagcggatggcacagagatgggcactgctctcagggcctgtccagatgctacttctcatgacagtctatggggtggggagcactagcgccagccccattgtgcagaggggaaactgaggcaatgagggtaataacccaccagcacacagccaggcagagctgggatgtggccaaggacttggctccaggctcccacacttaaagatcatctctgtcaccacctgggggtaataaggtcagggatatgccccaggccgcctgcttccaccagccagtccctttcaaagggcggaggtttccagaagtgtggctgagtgtctgtctgttcttgatggtcagggaaccttactttcaggtccccaaagcagattccctgaggccaggaggcacttaggtggacgggcaccaggagccctgtgtcctctgccttgcaggtgtttagggaacattgttcagactggaaggaagagccacgtgaaaatgccctttctgtttactctgctgggaaggatatgaagccaaacagaaccagctacgggagtctttcgaccgcaagacaaaaggtcctttgcccccactacctgcaactttcagggaagatttcatcaggtgctgggttacattgcaacagccaggcgtggttccccagaggtacggtgtgagctccccaactcaccgggagacaggcgctgccacatcactgcctctgggagcccgtgacctcatgctcagagctctcagaagctcacgtggcctgtgaggcccctgccagggctgttgatgcaagagctggggctcgggagcctcccaagggcagctctgtgtattcagagcagctcagcccctcgagagcaccaggagcccccagcccccatgcaaccaccggccggggttgcgtcaaggcctcccggagcagctgtcaatggtttctgagctgcggtggaaaaggctgacaagtttcatttccctgaccttggacagccctcctgatgcagggagcgcccatccctggggagcactgcctctccaggagcctgaacttccttctttttggttcaggaggtttgaggcacttatttcctccctgtcctgacagttttactagaaaggtcagctttttaaagagctgtcagtccttcggaagacagtcaataacagcatggtttaagacggcccaccagatgcactggctccgcccccatctctttagaatccagctcccttgggggacatacctggctggtgacttctagaatcccagctcagggccgggggggtgccagggctgtgaacccccgacaagaggcaatgaaaccccctcctcctagaggctgcccaaccatcaaggacaaaggaagagggagtccatgaagaagggctggccagagaatattttgttttgttttgttttgtttatttttttattgagacgaagtctcactcttgtcccccaggctggagtgcaatggcgtgatcacagctcactgcaacctctgcctcctgggttcaagcaattctcctgtctcagcctcccaagtagctgggattacaggtgtctgccaccacgcccggctaatttttgtatttttaatagagacagggtttcaccatgttggccaggcttgtcttgaactcctgacctcaggtgatccaccagcctcggcatcccaaagtgctgggattaca

SEQ ID NO: 65627 - DNA, 781 bp, Homo sapiens
cacatgcagccaggttgaagaaccagcaaggcgaagggcggggaaaagcgaaccggggtgcattctcacaatacccccagaaagtggatattaccagcctcatcttacaaacagggaaaccgaggctccaagaaaagaaagaatttcccaggttcacactaaccagtgatgccaggactcaaccggcactcaactccctaactcctaaacttgagctccctacgagatggggctgcgggacagagagctgaccggccagcttctggttgtggttctgccacagaatcctcagccccaagaccgtgggccaaccccaccacctctctgagacacaactgggaccttcccctcgcctgggccctggggatgcagggacacggggacgcctgcaggttctgctgcactgttggcctggcaccaccagggggagctccgactgagtccggcctgcgggacccaggccaggaccagagttcgggccccgcctcccccacacctcctcgggttccctggcgcctgacgccacccagctcagcaagcctcctggcacctggagtcctcagttacggctcacggcttccttttatctgcactctccaataactgagatgaatgttatcggttcaccctggggctctaatggactgcatctttactggagggataaaatcagggaagaacccgtcccacagtcacccctgctgaggccagcaaagcctgtgtccttacttcatgccccaccactccccggcttaatcggcctggggtgaccttttatgct

SEQ ID NO: 65628 - DNA, 982 bp, Homo sapiens
atgtgctggaagctttaaaggagattccgaaatacaagtgttcaaaatacagcattttctcccataccatgacaggcagaacctcactgtggctctgcgaggtgcgtcccaacagtgcagctttacggaggagaagacaggttctgaccactcagggtcatttcgtgagcgggaaaccctgcagcgtgagaccttcgtcccccacgtgcagaactccggctcctccatcacccgccacctgggacaccaggacaacccccccccgcccctcccagattgttctggagagactgggctctttttggagaaatggagcatgtctattaaacattagacaggactgtttgctctctaaaaacaattctccttatttgtaaagtgcatttgctgtttcgcaagaggctatttcatcgaaatccaacctagttcccaacctctggtcaccagcaaactagaagtggagaatccttggcccattttttaaaacttttttttagttatgaaacacactcagagaaggaaaaggaagaatacgtgtcccttaaatcacataatcctaagacatttatgtattctctactatattttgtgccctataatgaatgagttaatgaaaaacccactccttggaattatatcatatcttgctttcagttggatcataaatatattttcccaggtgaagtatacttatgatataacaaactttagggttgaagtacatcccctaaaattcctgtgttgaagtcttaaaccccagtacccaagaatgaaactgtttttgaagacagcatctttatagaggtgatcaagttaccttgaggtcaatatgactggtgtctttataaaaagaggaagttggtagcaggtgcctatatacaaggagagtgctgtgtgaatacaatgatgccacctaccagcaaggagcaggcctggagcagcccctccctcacagcctcctaaggaaacaatcctgccgaca

SEQ ID NO: 65629 - DNA, 742 bp, Homo sapiens
cttcgtgtggccactgctgaaagagacgctcagtgccacttagagcgcacagcccactggtccaggctgtgcacacccagggacccttccaggcattcctcacctcggtgcaggccaggagcgagaactgctgccgggcccccccccaccggctcagggcgtggctggggtggccctgctcctcggtggcccgcctggccccgctgtgggcttccctcccaccaccccggccacagtcacagcgggttgtgtcaggccgccctcatctcccacctcccaggcccagctggcgcctccagccctggtgtgaatttccattcagggtccaaaatccaccttggcagcgccctcattctgcagctccacggagccctccagccagagaagagaaatctgagtttaacccgatcctgtcagaagagcgggaggaaagagctccggcggacagggctcccaggcccctccaggacgaggttggaggaccaagcgcagaaggtaaggacgcagccctcggcgagtgcgggcggggcccaaatccctcgccggccggctaagcagaagcggcttttggctttccgcgacaaagcgcagctccgggccagacggtcctgcccggccctacccgcagccccggccccaaccagaggccccacttcagcccaccaggcaggactgcagcggggcacgccccacggaccccagccccttggagatcccaaaccccatgcctgctgctcccacc

SEQ ID NO: 65630 - DNA, 2319 bp, Homo sapiens
taggccattgtgtaattcgaaaggaaagaacaacttggccattcctcaacaaaaatacacaggctcataaaacaaaaaactgtgcagaaactcctccaccagagagtcattctttcccagaaacctgcaactctttaagaattagagcaccattgagaagcatggagtcgcagcacctgcagctggcaggggtgttaaactggtgataaaggtagctgaagtctgcttccaggacgagagcgctttgagggggctggagtagggggagctgcctgcaaggtgaagacgtgggaaacctcagaagccctaaggagagaggggcgggcaggggaggagaggggcagcagatctattctttcacaatgctgttgggaactggccaggctgttgggttggagctgacacagggcgcagctgtgagcctgctgttaaccacacatgttcccttcccgtcccctaggagccacttggccactgaaacttggcctggaacagccaaagatttggtgactcactgtgtgagcagtgggggtgggtcttctctagcaaatattcacagggcatgaggttaggacatctactacccaaaattcactgcccaagatttggtgacttataccctagaaaagagagtcctcctcaatgtagaaagtggcaaagtcaccagaaaaccagaaatgagcaaacacagataaagaaatgacacaaccgtctcccctcttgtctccttttgaaagccctcattccacgcgtatgagcttcctacggctgctgtgacaaatgacacaaacttaccagctacaacacaaatgcataaccttacagtcctggaggtctgaaatctggaatgggtctcacagggctaaaaccaggtatcagcagggctggttcctcctggaggctctaagggagagtctgttttcttgctttttccagcttctagaggtcacccacactccttgctctcgaccccttcctgcatcttcaaggccagcagtggccgatcgagtccttctcatacctcatctctctgaccctgactctcctgcctgatcctgcgattgcatcaggcccactcatataacccaggatcatcccccatttcaaggtcagctgctgagcaaccttaattccatccccaacttgaatccgtggccacgtaacataccatatttacaaattccctggattaggacatgggcatctttgggggccattcttctgccaaccacaccaaaccgaggacactgtaaggagctgatttccaactcgcagggcggcctctgacctgctcacccactgacggtgaaccccccacgcagagtgactactcttttagcagtaggatgaggaccgaggcctagaacccaggagaggagcacgcctgggccccgacgtccctgtgagggcagcgagaatggacacaggtgggctacaggttcatgaccaggacctgcccgtggaggctgcctccacctaaggtcttagtttcctgtcctggcctaaagggcttcatcagttcccaaacaggaaaacaaaaagaacagaggtgcaaaagtctcttccagaaccctcctggaggtagcctggagccactaggagagaggtatcaccccagcctcttctcttgctcactctgtgccgtgcaccggcctcagggccaccttgggttaggggccaggatgcagcagtcagcaggacagacctggtcctggaaacccatggagctggcagttcccactcaccagagggacgcagcccatgcccactagtgacaggcaggggcagaggcagaggcaggcagggtgtgggggccacgggacgcagcccaccaccgattattcccatggccatgtcactgccagactgctcaggagcaacacgcactgagcccggtcacctggcacatggccggcagaaactggttcatctgctttgccctcaaagcccaagcaacaaagaacagggaaacagcgacaccttattaaacacgagccagacacacgcaaacaaggatcgcgttgcccccgctgcagaacgtctgctgctggcatgccttggatgaggccccagcttcctccacctgcccagagccaggcaggggccctacccatcttcctgggaacccctggctttgcgggtcaaagggcgatatggaatcttgtaggcagccaggatcaggacccagtccccgggcagcaggcttggggaaggtagctccttcagtctcatcaggaggataatcccctgcggggccgccgtgatttctcctcgcagctgcgctgaacttcaagttacaggatgaattgagaaaataaa

SEQ ID NO: 65631 - DNA, 2132 bp, Homo sapiens
ctttgtggccaatatacgacaccagcttccgagtgtgggaatcacaggatttcaggattcagcggcttccggcaggatcccctaggttatgtttagcaatcttcagttgcctttcctttttttctttccttcctttcgttctttctttctttttctttttttttttttcccaaaggaaagaacaagggagcccaggcggaacggaagtgagtatcccgacacgcggatcttaaacagcccagaccaccaagcccgacaggccgggaaagctgagcgcgcgctgctggggggacgcacactttggaggctgtgtgggcgcgcgccggcaccccacaagttctcatccgtctgctccgccgattcagccagacaaagaccgcaagttccccggtccaccgctccagacaggcggggaccagtctccccgaattaggcccattccgggcccgggcgccctcactcgccgcggggaaaagtccccaggtgcccctccgtgatccaggtcctcccacaacgctcccgctcctgctggcgccccgcaccccgaggacggcggccggaccccggcccctccccggtcccgcggctgcaggcccacgcgccccacgcgccccgcgcgcccccgccccagctccgccgagggggcgctgctcgctgcgcggtggacccctcggaccccgcccccgcggccccgtccgggccccgatacccacccgggtcccgctgcgggggccggattcgcgccggctccgagagccgccaccgtcgcctccgccgctgccgccgccagtgaggcgcggcggggcggggacgcgcggggaggcccggcccccggcccgcccccgggcccgcccccggcccggcccctgcctgcccccgccggtctccccgcccaccttctggcccagccctgggcccaagcctctagttccctgctggccctccctcaggcctcgccgcgtcccggcctcggggactgtgccccgtcccgagcctggcgtccccaaaggaaaggcagggctcctcggacgctccgcgtgcgcgctggccctccgctgccgccctctgcagggagatttctcctatttcggactaggaagggaagatacgctccggaagaccccccgggcgtccatgcaaggagtctccgtaggacccctggagaagggcaccggagccccctagggcaggagatggaaaagcgctcgccatgcgcggggtccccggcccccggtgcccccagcccgcctgccattcccgggcgcttagcagtccggggtccccaggtgcccggcaggtcccttcgggacctcgagccgcccgctgggcacacgctgacgccgctgtcgctttacagaaattgagcgcagccgaggcgggacccgggcgcagagagcgataaaggaaaagcatggtcgtgctctaatcattacagtctaagggacgacacgtcgagacggcgcgcgcctctgcgtgcgtggagatggcacaaaggccgcgccgcccccggcggcccccgccctcgcagcgcgcgtggtcccggcccggccggatgttgacagcgtcgcctagcaacgggaaatggcggaaccgggcggcgcggcgggccggtaagccgggccgaggggcagcgggtcttggagtcgccaggccgcgctctccgttcaccgctccaggtggcccccgcgtcggctcctgcctcgccccttcgcctccactcccccttcctctcgcctgtgtcccttctctcgccattttgctggcctttcccgtccactgcgttcagcccctcacccccccgccaacccttctcacttctcccctcctgtccctttgtcctctctcggcctccctctttcccctactccaagcgcgcgactccctctaaaacccgggaccgctcactctgcagtcaccatggcaaccactctgcgtggcggtccctgcgcgcagtcctcctaagagtagagggctctgcagggcgcggggctgttggataccgcccctgaccttgctccggggccactcgctgtggccggagaccagcccggccccgcgcctccctcctgcaaggacagatcccctctcgcaggcttgggggtgacccgcgatgggaggggtccctgcggtta

SEQ ID NO: 65632 - DNA, 595 bp, Homo sapiens
aggaccccctggcccagaagcttggttttgccatcacaccgagaaggcacacttgtcctggagttagtttacatgaatcgagctcaccagagcctgacgtgtaactgagtataatagcccatttatgtgcatgatgaaatataaacaccaaagaaccgaatgctccacgctcggactagcagattcttatctgtgggggaggacacaggagcggatgacacagacccctgctcagggaccggctagagggcggaatgcctgggccccggccctgtctgcttcctgcttcttccccgaagttcatggcctgtccgtccacatgggcgggaggtgtcccgcgagcagccctcaccctgaccttggctgctttctccattccattccccacccctcctccctcctgacacccatggcattttttcagataagttaatacctttgattaggttccagccaaacctcaccctttctctttccccatgcctttgtgtctctcttcgtctgatgtcgagtctacaacctaatgctttgaagacagactgacttccccgtccttggtcagggggttgctgctgcgtggggggggcggtaacca

SEQ ID NO: 65633 - DNA, 1370 bp, Homo sapiens
aacagagcaagaccctgtctctcaaaaaatttttaattagcggggcatggtggtgtgcacctgtagacctgtagtcccacctactcgggaggctgggtgggaggattgcttgagcccaggaggtcgaggctgcagtgagccgagatggtgccactgcactccagcctgggcaacagagccagagcctgtctcaaaaaaataaaaaagtgtccccagacacaggggcatgggtgaggcctgtcaggactgctgtggtagctcatggtgtcctgtcccttcttcccaccagggaatgaccgtggctgtgggcacaccccctgtccatctgggcctgcctgtgggagctggacactgccctccccagcagccagaagtcctgaaggaaccgtgtgtgaccctcaagaccagaccgggcctgccacaccaacccttcaaagaccgcagcggtccaggcaatccaacgtgggtcccaaagctaggtgaataaccacgaggagcccacggtcagccccttcccatcacatacgcagggaaatgggtcactttcactttcagaaaacaaagcctggaccgcacttaacttggaggcagataacctaatcagaattcacacacgcctgggacttggagccaaaagcacccgtgctcttacctgcctttgtcctatttcctggcgggaaatacagagggcagacaggtcttggcccgcagccacagcccctttaccccaagatgtgactcggtcagccacacggcctcacagcctcctcccaggccctcagctgtggccacggcagccaggcaggccgacccaaggacaaaagccacgggcagtgtcctgggagagaacccggccttgaccacaggctgctggacacctcctgtgtcccccccttaatcctcagaggcacggtgcccaatgcctgggccatattccagattccatccgttctttttgtttcatttacagacagtccccgacgtcacgatttttggactttaccatggtattaaagcaacaggcaggcaacagaaactgggctttgagtcccacacaacctccctggttttcagcacggtattcaataaattacatggatgccccacactttattatcaaacaggcttcgtgtgagatgattttgcccacctgtaggctcatgggagtgtcctgagcacgtttgagggaggctgggctgagccggggtgcctggcaggaaatctgcaggaagtgcattttgggtttttcagcttttttttttttttttttttttgagatgaagtttcactcttgtcgcccaggctggagtgcaatggtgcgatctcagctcactgcaacctccacctcctgggttcaagtgattctcctg

SEQ ID NO: 65634 - DNA, 1768 bp, Homo sapiens
acaacacctctgtgttttggtgtggctccttttgtatttttctgcacatacattttattaggcaagttaaggttatactgtgtgttttttgtatctcacatgtaaaaatgtgctcctcttaatgtaagcattttctcattttatgaaaaaattccccctgtgtcagtttaatgttttctcaattgtcagttttatgggttatcacaatgttttgattattcctttctggaataactgtgagttatggagcacacttaaggactttccaaatgttggctgtttctaacttggcgctgagcgcctttggccgcctttccgatgatgccctcgggacgcgttggcaggaggaatccctgggcgcaaggcgcggctgggccagccccttacaaagccctacgagctgcggggacccaggccggggcagcgggggccacgccccatctccgaccccacggggaccgggccgggactgcgccagcgggggcctcgccccgtctctgaccccagaggaaccggcagcgggcagcacgcgtgggcctctccccgcgggacgccggacgcgcagccagacgcgctccccaggccccctccgagagcgaggacgcgcccaggcccgctctgccggagccgccactggggggcgtagcgcggacgcgcacccttgcctcgggcgcctgcgcgggaggccgcgtcacgtgacccaccgcggccccgccccgcgacgagctcccgccggtcacgtgacccgcctctgcgcgcccccgggcacgaccccggagtctccgcgggcggccagggcgcgcgtgcgcggaggtgagccgggccggggctgcggggcttccctgagcgcgggccgggtcggtggggcggtcggctgcccgcgcggcctctcagttgggaaagctgaggttgtcgccggggccgcgggtggaggtcggggatgaggcagcaggtaggacagtgacctcggtgacgcgaaggaccccggccacctctaggttctcctcgtccgcccgttgttcagcgagggaggctctgcgcgtgccgcagctgacggggaaactgaggcacggagcgggtgagacacctgacgtctgccccgcgctgccggcggtaacatcccagaagcgggtttgaacgtgcctagccgtgcccccagcctcttcccctgagcggagcttgagccccagacctctagtcctcccggtctttatctgagttcagcttagagatgaacggggagccgccctcctgtgctgggcttggggctggaggctgcatcttcccgtttctagggtttcctttccccttttgatcgacgcagtgctcagtcctggccgggacccgagccacctctcctgctcctgcaggacgcacatggctgggtctgaatccctggggtgaggagcaccgtggcctgagagggggcccctgggccagctctgaaatctgaatgtctcaatcacaaagacccccttaggccaggccaggggtgactgtctctggtctttgtccctggttgctggcacatagcacccgaaacccttggaaaccgagtgatgagagagccttttgctcatgaggtgactgatgaccggggacaccaggtggcttcaggatggaagcagatggccagaaagaccaaggcctgatgacgggttgggatggaaaaggggtgaggggctggagattgagtgaatcaccagtggcttagtcaaccatgcctgcacaatggaaccccgtaagaaaccacagggatcagagggct

SEQ ID NO: 65635 - DNA, 359 bp, Homo sapiens
attgtgccactgcacaccagcccaggcaacagtgtgagactctgcgtcaaaaaaaaaaaaaaattgtgatggtgataattctgtaaaagtttggcaggattcacaagccttggctttcctttgttgaaagtttggttactgatttaatctgtttgtcctaggaatttctccattttatcaaggttcatctgttggcaaacaatccatggcactgatactttgtattctgtacagtcggctgtgccatcacctctttcattcttgattttagttatttgaacctatttttccttagacttgctaaagatgtgtcaattttgttgatcttttcaaagaatgaaccgttggttttgttgatt

SEQ ID NO: 65636 - DNA, 2040 bp, Homo sapiens
cctctctgctttactaattctctcctccttcccagtcccactctattcaattaccccgcttcaggttcttcaggttgcctgggcaacctgacagtatgctttccccccaaacgaaattcaaaacccgtaaaggcgcaaacccttccggtttaccgccaaaaccccagtacctagaaaagctaataggtagaaatcagttatctgctgaatgaaggacgctgaggtgcctcgaagcggctgcagcccccgacagacccagcgccgagctctgcacgggggacacacaccgaaagcgccgacacagccaggcgtgagggcgaggacgggggtgggggtgggggtcggacgtcactggcccccgagcctcgaccctgaccacgacctccggagcgcagggccggcccgggagtcaccagtctggccctcagcccccggctcgcccccgactcgcccccggctggcccccgcggcccgcgcccgctcaccgtaagcgtagatgccccgcagcaggtcctcccgcaggcccatggtgtcgaacgtgggggtcacatccacctcctcgctggtctcgaattccactttagtcatgtcttcctctttgagcagccgctttcgcgccgagcccgaggtcgccatcgtggccgtggtcgccatgattcagagtccgcggaagagcacagcgcgcgccgctgccgacctcgctgccgctgccgacctcgctgtgccgctgccgacctcgctgccgctgccgacctcgctgtgccgctgccgacctcgctgtgccgctgccgacctcgctgtgccgctgccgacctcgctgtgccgctgccgagaacagacgccttaagtatgcgaaagcgagagacgtgcgtgcgtacgtgcgtacgtgcgtacgcgcgacgcggccacgcctctgggggacggggcactcttcgtcacgtgaaagggaactgggcgtttgccgcagggaaaagtaaggtgtttctgctctcgcgccatatgcagttcccgcgggatctcgttgagggcggggcacccagttccttacgaaagggatggagggggtggtacttctaaagttggcggtgtttcgtaccggccgcgggatttcgcggactggggcgctgaggttctttgagcggcgtgtggacctgaattccctggaaacaggctggggccgcgaggggcctccgctccgggcggggtccccagatagccccgcctcgaataaaaatgacgagcacgggtcctctctcgggcccgcagtgggtggactgcgtcgcagacccgtagtggaggcgcccagctcgccggggagattcgagtggaaaccctcacggccgccggtggtgggccccggcgcggcgctgggctccggcgggtctgcgctggggagggccagggcccctgaagccggcgtccctcttaggggacgcgcctgggtgtgtcttcaccgtttgcctggtgagttggagacagggtctcgctccgtcgcccaggctggagtgcagtggtaggatcagggttcattgtagcctccgcctcagcctctggagtagctgggacctcaggcgcgcgccaccacgcccggctaattttttaaatttttttgtagagacggggttgggggaggcgggggttagggttgtcctggctggtcttgaactgcggggcctcaggtgatccgcctgccttggcctcccaaagtgctgggattacaggcatgagccactgtgcccggcaagcagctgttataaataaaatacatgctgagcctgcaatttgctcttaatgaaggccacttgtcagtagacggtgctgctaatgcgtgtcctgcagcaaagataacccagacgggatcattttttaattgcccagcagaactttaaccagttgtgcatcttaacctgctttttgtttgttcgtttgtttgttttgagacagtctggccctgtcgcccaggctggagtgccatggcgcgatctcggttcactgcagcctccacctcccgagcacaggcgatcctcccgcctcagcctc

SEQ ID NO: 65637 - DNA, 638 bp, Homo sapiens
ccgggagccctgccgggagctaaggcaggcgacccacacctggattatgagctcctagacacggcaggtgagcacgcccaaccctgaacctccacagcagtccacctcccctgggcagagcagggagctgatgagaaagccggggcctctctccagggaaagggcagatagaagcagagctcaacttctgccctgggccttgaccttggcctcgaccttgcactttgggaaagtcccgcctgccagccagcgtaagccaaaggccggctgcgctctgtctgctggtgtccttgtgtttttccctagagccaggggagttgtgtctgatccacgccctgctcagcacccagccccctgctctgatctgtaacgcttgggcttcccagtggtttcagaaggcagcaggcagggtggcttagtggtgccaggctgaggcgaggcacagcgtgacatctacctgcggggagcatctctcctctcaggcgctggccctgaggcctcgcgcttctcctgtagctcatttctgtttgtgattggaccggccctctctgcttcccaagtccatgggcccgtcatgggtgggtgccttaatcctttccacctcggcgcgaccggctcccagccttgggccttgcaca

SEQ ID NO: 65638 - DNA, 1826 bp, Homo sapiens
accaagctggcaccctgaccttggattttcagcccacagaactgtgagaaatacatttctgtttaagccgatccatggcagtccgtgctaagaaaggccctagcccaggggccgcatagcctggactctgacagcctcctgtaggaattctgatccgcaggtgagggtccatgcagattctctgctgtgtttctgggaggcgaggagttggcaggagagctgtttatgttacagtgagccgaacccccgcccagagaccacaaaattaatcagaaagagggcaactggcagggcgccagacctcagaaggggaaagaatcgcaggccttgggtttggccttgtcacttgtcatgagccagagccttgattacctaaaccggaagtcttgtgagcagcacggtgcttgctctggaggaacctggggtttctgagagggactggggttgggggagacggtggtgggtgggtggtggagggctgtgcccttgggataagggaaaagacagctgagacacaggctctggggtcggaaatgagagccaggagggcaccctgtctgcagtctctggggaccggagcaccagcccctcctctgggatcccctcccaagagggatttgagatccgtggacccctgagccctggctgggcagggtcagaggagggtgggacaggcggcacgaggtaagtgtaggggtgctggatgctggggctcactcctccagcctttgctgccctctctggggagacacccgtgaagagtctgggggcggcacagagaggaggacgagagggaatggcagcgggggatacaagggcagggcacactagggtcagcattgaccacgggtggggaggaggccagtggccacttccccgggccaccgcaggtgggcgtgggggggcggcgccggcactcaccgaggagcagcagtgcgttccggggacgcgcccggcagagccccaggactagcagcagcgcgcagcaggcgggcacggggcagctcatggcggcggcggctcggactcgggatcgggatccggctccggctctctggtctcccgctcggccccgccccctgccccgaccccggtcacgtgcgcgccagaccccgccccggcctgtccccggcgattcctgcggacccagctgcggcgacgccaggagaccccaagctgcatcgccgagtgggtgagtccgtggcccgcgagggcggcgagcggggaccaggggcagggggagcggacagtggccggggtcgccgggggcagccgacgcgggggccagcgcggagtcctgaagtgcgggggcctcccgtggggaccactcccccgccgcgtccctacccgggtccccgcggccctcggccttgctcggggccaagggaccgcggacggtcaggtggcgcagggtctcctccggagaccccaggatccggagccagcggccttgtgggcggggccgggggccggggagtggattttgcccggagcggagcggccgggggcgtggggggctgggggtgagggtggcggctctgcgcgcgggcgccggggccctggaagatgctgcgcacctgaattaaccgggcgcctctgatgtcctcccagaagcaactagaactccagggctgtgaaagccacaggtgggggctgagcgaggcgtggcctcaggagcggaggacccccccactctccctcgagcgccgcagtccaccgtagcgggtggagcccgccttggtgcgcagttggaaaacctcggagccccgctggatctcctggctgccacccgcaccccccgccagcctacggtgcgcccgcgggcc

SEQ ID NO: 65639 - DNA, 748 bp, Homo sapiens
tcagcctgaagtgctggaattaaggtgtgagccaccatgcctggccctctctcattcacaagtgaaccattcacccctgccctccaatccatgtcgtttctgacctcaggcagcttctctttctacataaagtgaacctgtcccaaagctgtgctcactgggcccccctgccagggctggaagaggcagcagttcacatttggcttgcactcacataccaagggcatccatgcttgaacctagacatggttcattcacagggatgggtgaaggtaaacagactgtggcgggcactaggcactatcagtttcataaatctgcataccacctgtgactcagcagttatgcttctcggaatctactcaaacatgcttgagtcagccttccaggaagcaggcacaaggacgtttgtgacaacttggtcagtaattttaagaagtaggaagaaacctgagtttctctgaattcggtaacatcttgactgtaggacacacgaataatgccgtggaatattgtgcagcagttaaaagaaatgaggtgaaggccgggtgtggcagctcacgcctgttatctcagcactttgggaggccgaggctggtggatcacttaaggtcaggagtttgagaccagtctggccaacatggcgaaaccctgtctctactaaaaatacaaaaattagctgacctctgtgacagagtgagactctgcctcaaaaaaaaaaaaaaaaaaaaaaaagagaaatgaggtg

SEQ ID NO: 65640 - DNA, 3229 bp, Homo sapiens
gcttgtaatcccagctactcgggaggctgaggcatgagaatcacttgaactgggaggtggagtttgcagtgagccaagatcacgccactgcactccagcctggggtatagagtgagactgtctccaaaaaacaaacaaacaataaataaagtgccaccctaaaattaaaaatttatcctcaggttttgtgtgtttgttagtttttgaggcaagatctcactttgtcatccaggctggagtgcagtggtatgatcacgactcactgcagcctggagctccctgggctcaaacgatcctcttgcctcagcctcttcaggtgcaccaccacgcccagctaatttttttaaatgattttttttgtagagatggggtctctctatgttgcccaggctgccatcgagttcttctagggaaacttgccgtgggcaccgtggggagtggggtaagggcagggtctgtgtcttgttcccatggctgtcgtgggcagttgtcggttaggaggggtggctgtcgaggatgttggactaattgttggcgaccccccgccccaagcaggagcattcagctggggttccgcgccgggaattgtttcaggatgagggtcccctctggaatgcgcagaggggcgcagtgtccagagagggacgggatgaaggggtgagaggagaaggaagaaaaagaaagtgggtgattttaaaacggaggtccctggtcacaccatgagcctcacagatgggaaaactgaggcacgggggatggtgcggaccgccgtggcccctccatcatcagtgacagagcgctccgcgcggggccgcggaggtcccttaatctgcaaaggcccccacgcggcgcgctgacgacgtccactgcacccgccgggcgccctctgggccgctcccaggctggccgccggctctgcgcggccgcagacactgtccgaggtgctgggcgccggggcggggggcgcgcctgtcccgccccactcggctgctcgggcctgcccggggtctgggcttccgggagacccgcatgcgccccacgcctggcgggaaccgaggcccctcccgcgtctgtacccggcgcgcagcggcccgaggcgcctcccgggggctgggggcccggagtcactgggaggcgccaccggcggggaattccgcacacgcctgcgcggggccggcggcggcggcgggcagggcggggccggcggcggcggcggcgggcagggcggggccggcggcggcggcggcgggcagggcggggccggcggcggcggcggcgggcagggcggggccggcggcggcggcggcgggcagggcggggccggcggcggcggcggcgggcagggcggggccggcggcggcggcggcgggcagggcggggccggcggcggcggcggcgggcagggcggggccggcggcggcggcggcgggcagggcggggccggcggcggcggcggcgggcagggcggggccggcggcggcggcggcgggcagggcggggcccagggccccgtgacccgaggggcgacagcgcgcggcaggcggcgagctcgggggccgcaggtgcgagcgggcctggagagtctcccggggcggggagcgggctaggatacagtgggccccgcgggccggcgggccgggtcccggggagcggcgcctgcgtccggatgcccctcccggccgcctcttcctgccggctccaagtttcggtttcgccgccggggtgcccggtccagccccgcccgcggcgcccactgaccctgttccccggctgcgggaggggtcggggtgggggcagcgggcacgcctgggaccccggcgacatccccggagcgcagagcgcggaggaggctttgcgccccggcagtgctgcccccgggaagtggccggggcacggggggtgtagtggaaggggacagccggacccgggcctgcaggtccgcccgggaatcctgcgcctgtacgaatggcaacaacggaaaagtgaagttgcaaaaacagactcctaacttttacgagggaggcatcgccccgtctgaaccgcaccgcgcagcgtccttccgacttggcgaagtcgcccgagcgcggggctcaaggccagggtgggcacccctcccggatggctgcctgcaagccggcgggccgggccctgggggagtccagggcgggaggggaaggagctgtgcaaacatggtggtggcccttccctgcccccaccttgttgactttggttgtggttgggggatgggctttgatttgggtggcagtgtctgtgcttgggaaaaaatgtcagagaaaagacaggaagcggattgaatgcaacagtgttgggtgcctggggctctctcttgtgtcttccggcccctagagcagatggaacaataagatgctttagggggccgggcgcagtggctaatgcctgtaatcccaaaactttgggaggccaaggcgggtgggtcacctgaggtcgggagttcgagaccagcctggccaacatgaaaccccgtttctactaaaaacacaaaaaattagccgggtgtggtggcgcatgcctgtaactccacctacttgggagactgaggcgggagaatcgctagagcccgggaggcggaggttgcagtgagctgagattgcccactgtactccagcctgggtgaaactgtcaaacaaacaaaaaatgctttttggaggatttttcgagttttctggtctgtggttccccagtgtagcattggagaaggaaacacttcgggtggaaagaaagaggcctgggcggtggggagtcattgaaggtgtttgagggagggagtgtccactggtggttgtttcaggtagagtgtggaggggaggaggtacggtgggagccagggcttggctgtggcaggggtaggggagttttaaactctccttctactctgaaggagagataattttagtctctggaataaaagggcagcagacctggagaaaagggatgcaaattgtcccatacacctattgggaacctcatcaaagagaagactgcagaagacagatgattgatgtttttatggcattgggacaggggcttggggctggagaggggaggtgtgcagggttgtcttgttgtgcagataatcactcaggtgatctcagagctgctctcagaggaactggcgaggccgcaggcactcctcttgtgtgtccctgggaccgttcctagatccctctaggcagataatggggcctca

SEQ ID NO: 65641 - DNA, 1961 bp, Homo sapiens
gccagggcagggagggggcctgagtgtcctcctggctgctgaaggcaccagtcagctgccgctccagccactgccccagtggagttctttggttccaagccagcagaagaaggtggtgggtgggccagtgtgccctgaggcttcttactggggagggagagagtcaggtcctccactgttaggtggccaagcgcccaaacgccatctccactctcaccctggatgcaagaagtgaccccggaggcctgagtcctggccttggtctggtttgatgccatccaccgcagaggctgttctgagggcaggtggtcagtgcagagtggcgcgctttgtggatggcagcctccccccattactaggaatctgactgccagcccagtagccctgggctgcctgctcaggccccatcacctgtggggcaggtgctttagtccccttaagaggatgaggagggtgaggcatcagcaggctgagcgccttgctcagggcaggccgtgggaccctgccgaacagcacgtggctgccccacgcctgcctggagcatcccctatccccacccagcccaacccatgttctcagcagcagggatggttctaggctggctgaatgagggaccagggcagagactgcaaaagcttgagagccaagggggcagcacagagcggggaggggctgggcttgggctgtgctcctgttgggtttccattaaccaggggaccagctgggctgctgtgatttcactttcgcagaaaatgaaactgaagccgtggtcacgtgacaggacatgtagtatatagcaggctgccagcgactcctgctcttgcttctggatctgcagggcagtcccagcaggacccatggagtgtccttcgtgccagcatgtctccaaggaggaaacccccaagttctgcagccagtgcggagagaggctgcctcctgcagcccccatagcaggtgaggcccaggggtgctggtggaggctggggcagtggggacccctggagatgtctcacctcccttccaggaaatggaaaccctgggcagcaggcagctcaggtggggccgaggtcctctgtggctactgaggctctgtggctctgaatagccatctcaaaagtgaccacagagtctgttttggggtggcatagattagtctcccacacaggtcaagccaggggaccaccacccagtgcttccgtccctcgttcaggcccggcctgagtgagcccacccgagtgggaggagagggcagggccagggcagggagaggacaaaacaagaagttttgtcggggtctttgctggaggttcctgcttttgaaaattttcagtttcatttcctagagagagctcacggtttttcttccccttgggaatgagaagtgtcgggctgagctgagggcttcatagagagtttcagagaatgctgcagggaagcagagtttgaggctctgcaggggttgagagctctgcctgggttagtttttgaggggccgtgagggggccccaggacctgtccaggcacctccctggctcgggaggccagtggagagacaggagcggggcagtgtcaggcgggccttgcctgctgagcatcttgagtccattctcaattttgttggcttctggggcctcagactggttcccctcctcccgggttttaaacaccaaccctaaaactagcagcccccagaccttcagcctttctgtgtccaaagcccagccccacctccactggtgagggcacctcattcttccagctgcttctatcggacccatcaccccggggccctctccttcctccatgacccacatgcagagggccctgctggtctccccgcctccacgctgcatgctgccttcctgcttcctgctcagcacagcagacagtcaaaccacagacccccttacaagatccgcccctgcccccgctgtaactcaggacaagcaggagcccttacg

SEQ ID NO: 65642 - DNA, 1511 bp, Homo sapiens
ggggcgtcaacgacaggcgctcagtaagtgctcctgaggcaactgccgggctgtcctggacctggtgaatcctttcggggttcagcaaaggcggacgctgaccgggccaaggagtgggacctgcagtgctggaccacccttttccaagcgcagaagtgccgtgcccgccggctctcaacagggcaagaggcccctctcgccgtgcagagcgcagcgcttgcggcggggacagcagaggcgggacgggcgtcacggagttcccgggtcctcgcgcggtcacttacctggcctcagctatccgctgaaaaaggggcggacggcctcccgggatccgagccgatatcgcgcgcggcgccgcggggcaacctgaagccgtgtgcgtgcgtgtgcgttcacgcaggggctcacccagcggccacgggcttctgaagacccgggtgggaagtgcggcccgggaaagcgcaagcgtctccatggcaacgagggcggacggcgtcagagcgagtcgcttccggaagtgacgtgcggaaggggtgcccgggacgaagccatggccctggaggcggcgggagggccgccggaggaaacgctgtcactgtggaaacggtaatgctgtcaggcgacgcgcaggaggcgggggccgaggccgggcggcccttcgcggaccctccgagctcatagtcttcaggctgtggaatcggagctgccaccgcccgagactccaaagcaaagcccagtttccggcgcggaagcggagggatctcaggaattgtagtccgcggggtgggcgcggttctcgcttccggccagtttgtctggcctgcgcttgcgcgggtctccgccgcctgggctcctagggactgtggcctcggcggtatgtcccttgctttcccttgaagcgggagaagacccggcagaggcgctctgtccgctgcagccgcgcgggtggaggaggcagagtctgaggtgtgaccccgaccaagtttgacgcttctgtcctcctagggagcaagctcggctgaaggcccacgtcgtagaccgggacaccgaggcgtggcagcgagaccccgccttctcgggtctgcagagggtcgggggcgttgacgtgtccttcgtgaaaggggacagtgtccgcgcttgtgcttccctggtggtgctcagcttccctgagctcgaggtaacctgggaggacgccgagctcgaggcgggcccctcggtgggctcgggcgtgcggtctccgggacagggagcagtgcaagcgtagaacccggcttctcgttttgtaggatgtcattaatagtctggggagttggccgggcgcggtggctcacgcctgcaatcccagcactttgggaggctgaggcgggggaatcacctgaggtcgggagttcgagaccagcctgaccaacatggagaaacccggtctctactaaaaatacaaaattagacgggtgtggtggcatatacctgtaatcccagctactcggaaggctgaggcgggagaatcgctt

SEQ ID NO: 65643 - DNA, 2437 bp, Homo sapiens
gccaccgatcgctgctagaactggagcagagtcctcaaacaacagtctgcacacagacaagacccgggatatttctttgatccagctcctgccttacaggacttcatcttcacccattcctgaggaaggagagaggaaaaaaagacctctcatacaccccctcagtctagtgtttactgagcacacactgtgatctggataagagagaaactctgccgtcttggtgctttcagacaatacacatcaaattacattatcaacgatgctggatggcgctaagagccggggagggaaagcaagggagtacaggccacagaccgtcctggacttcgagtttgacttacattttggctttgccatggtacaaacgccatacacattcagtatactcctccgcttacagatggggttacatccggataaacctaccgtaaattgccttacaatgctttaacctatgatgggttgatggggaatctaaccccatatgacaggagcatctgtataggaagggggcacggttttcaacaggtggtcgcctcactaagtgggagtcacagggtttcaggggaggagcgttccaggccgcggtaacagcaggtgcaaaggccctgaggcaggacggggcagggaggtccagagtccaccgcgcagagacccgggaggccggcaggcacggtgaggaccttgacttaaacccaggaaaggggaaccacactggggcatgacctcctgtactttccgagatcgctctggctcctgtgttgaggagactcaggaggggaaggtggaagcggggagacccagctgagacgctactacagtcatctcggcgggaaaagacggctcggagcagggtggtggcagaggtgggagaagaggtcaggtctggggaaatttcgaaggcacagccaacaggatgtactgccgggctggatgcggggtgttaggggtcagggaggccgccaaggctctgcctgagaactggggagggccaggggcaccatttacggagctggggaacagcaggagctcgttttgttagcaggtgcgaggcgccgggcatttaaaggcggcctgacgggaccggccgaggcggaagaacggacagggccctgcgggaccgcgctcggatccgcctcctccctgacctcggcgtccccggctactgcctccagagccgcttcggggccgaccccggggactcttcccgcctgcggcctcgcgccagcccggccggctcgcctagtgcccggcgcccagaaacgcgtggagctgggagaggccacacaacccacgccggaagcctaaccccgtcggcccccgcggccggcaccggccggaagcccgcgaagcctaactctcgcgagacgcctcctgagtcccgcctctccgcggttccgccagtcgccgcgctcctgtctgcgttgctgtggcagccccgccgtgcgtccgcgttcccggagccagcgcggcggcgcgcctgtgctcggggcttggccgtagcttttcctcaggtcccgcgcggcgcgcccctgtgtcgcaggcgccctgccgctgcccgcagcttttggggggttcgggggcgggggaagcagggccgcagaaggcccaatcggagccttctgacacccgccccggcccgccgccctcccggagcttccgtccccgccgcctggctccttactgacacgcgcgccgcccccggtcgcccgttttccctgggctccggcctcctctcgcttccagccctggcctgaggtcctgagggctccctggagggggcggcttcccagcacccagcgtttaacagggccctttcggcctccctgtcccccaagctcagagttggggtctgcagcaggggaaagaaggagggagactgggcagctcaagttccccagaccgcacctatcagacggagggcggcccgctcccgtcagagcccgacctcggcggacaggggaggggatgggttgagaagcgggagaaggccactagctggaaactccctgacgacagggacaccgttctcgccccagccccagcgctcggcctccgcagagccggcccaacgaaggaagaatgaaaatatgaacgtgacatgatgtgggcttgagaggccgccttgttctttggattcacccagaaacctgactgaaaggaaagttactgcaactggggaaaagcacagttggctggagaatttggtttaaaaataaataagttttaaattacgtaactaacacgtgcttggtgtagaaaatttggaaaacatatgaaagtacggtataaaaatcctcgatcccactgccacatagaaccactattaacatgtcagaatcgtttcttcgggtgtttttttttcttaatgcatttatattgcatatacattttttctctaacaatatattgatgtgccccagtcccccacaga

SEQ ID NO: 65644 - DNA, 1627 bp, Homo sapiens
aaaaaattaaagagaaaatctgattgacactgtggaggacactacactccaaaaaaaaaagtactatattttctaatattatcagtgctttttaatattttctaatattatcagtgaagcttttgccgctttttcaaaatctggaagaaacaaggcggttgattcctttaatttcaggagcatgtaacttcatttataatgacaatgtttttgaaaaaataaattaaaccgacagtttcatttgtaggattgactttaataacacgcctctactgaacaaatggcgattaactggggaaaacggaattatggtaaccgaggtaacggggtcggggactctttctccttcgctgcatgctgggtggcggggagagaccgctctgaggaggtttggtctgtcggccacgccgtaggccgcggtgcattctgggtcctggcaatatggcgtcctccttgatgggctgatgagatgagtttcactgtagctccaaaccagagggcaaagctcccatgacccaataagcccacattgtccctttcctccgtggttccgtgtcgcccgtttctcaggactcgttctcaggcaggagagagcctcggggctgaaggccaggaccagccaggccgcgcggacctgaggttgaggaaccgggtgcaggcgagcacgatgggccggtcgtggctctggttgcagcagctcagacgagtgcgggacccgcagggctgagagtggctggaggagacccagggccctttgaacccgatcccttggccggagacctcagcccagtcggcccagtgggcgaaccggcaccaagagcggcctgcctgtcttcggaactgctgaggcggtggaggccgagagcagggtcatcgtgaggcctgaagtctcttacgcttttggcagctcccctcgcagcccctctggaaacgtacagcctcaggagcagccagtggcttgggacctggggtggtgtgtgtctgcggagcttcttgggctgccccatttcctagcggcccccacctccccacttcccgctcagagttagagataaggatctcagacttttgcctgagtaagggtctccgcactctttatccatttggttttcgatttcccgtttttgtttcttatttcaccaattctggtacacgctagtttttaaggctggaggttctcgagcgcttgctgccaaggactcccccaccccctcccccactgatggagtccgaaatgctgcaatcgcctcttctgggcctgggggaggaagatgaggctgatcttacagactggaacctacctttggcttttatgaaaaagaggcactgtgagaaaattgaaggctccaaatccttagctcagagctggaggatgaaggatcgggtaagtggattctgaaggcaccccttgaacttggtagtttccccaacaaagaaagtttacagcccgaaaagtgtccttgggaaagcgccgacatttccccctagccacacgttgtaagtcaactagaaagcaaaagccatttcagactgcagtttttggttgaaaatggaaaatgctgttttggttagtcattattcactgggtagtgttaattcaattccaactaagttctaattcagataa

SEQ ID NO: 65645 - DNA, 989 bp, Homo sapiens
aaaatcctttctcctgtcagcgtggggggtgatcctgcccaattaaaggacgtcttttggcccttctttcccttggcagcagcatggaagtgggtgggggaggagaggagcatgcttcccccaacccctggggacctgtgagcgcagcctgcaagctccggctccaggaggaagcgtgctcaagtgcacctctgaccacgtcacgctgcgagaacgtgggcgctacacctccgaccacatcgtgctccgagaacgtggacgctgcacctctgaccacgtcacgctccgagaacatggacgctgcacctctgaccacttcctgctccgagaacgtgaactctgcacctctgaccacgtcacgccccgagaacgtggacactgcacctctgaccacatcatgctccgagaacgtggacgctgcacctctgaccacatcatgctccgagaacgtggacgctgcacctctgaccgcatcatgctccgagaacgtggacgctgcacctctgatcatgtcacactccaagatcatggacattgcacttctgatcatgtcatgctctgagaacatggacgctgcacctctgatcatgtcacgcttcaagaacgtgaacactgcacctctgaccacgtcacgccccgagaacgtggacgctgcacctctgaccacatcatgctctgagaacgtggacgctgcacctctgatcatgtcacactccaagatcatggacattgcacttctgatcatgtcatgctccaagaacgtggacgctgcacctctgaccatgtcgcgctggccagaatttggctgcaggacagacttcactggaaaggaaactgggccatgtgctcagctacaactgctttagaagagagagaaaatcagatattagcctagcagtctctaccacactggcatttagataattttcagcttttttttttaccagtcaaaacatctcatgtacaaatgcaagtatttctataggatg

SEQ ID NO: 65646 - DNA, 510 bp, Homo sapiens
gcacccatctggcagggggcagggcgctcttgcaggttccgccgtgcagagaagaagccacaaggaccgagggaggcctgaaggagatgtctaacctgagccgtagaacgtaagaagttgccagcataaagacaggtaggaaaggcatgtcagtgacagaggcaggagaacacgtgacccacttgtgtggggagctccagcagcgcgttcggagtgctgggcattgccaggtctgaaagaggtcatcagttcttgggaaaggtgcctgcgtgggctagaaatcatggaacaaatcataaagccaagtagtaatttaaacccagatgctactttaattaactcactttgctactttgccctcggcagcaagggttgagggcacagccctggctactagcacagccctggctactagcactgtcctggctacgagcacagccctggctactagcagagccctggctactagcactctcctggttactagcagagccctggctactagcacag

SEQ ID NO: 65647 - DNA, 1280 bp, Homo sapiens
gcatgtgtgagcataggcagcataggctgccgtggccccaggtgtcagggtgcaggcggctcctgtcttggaggcttccatcccccgtggaagctcgtgctggccactggagcaacattcccgcaggtgggaaggccgcgaggagtggacgaggcagctcaggcctgggggacagacttggagctcacatgcccatcgcccccctgtcctgtggcagtgtctggtccagcctcatccagggagggagggaatgtggcctccaccttgagtggcatgtcccagctccaatgctgttccttaacaagggcagggagggaggcacaaaggagtgaggagtggtttcagacgctcagacggagaacattcggctcagaaacagaatcgtgctctcctctgttactagattttgccaactgcaactgaggactgagctgctgtggaggtgggctcctcaccatgggagcatcaccgggggctctgcagggctgtctgccacgaaaacaatgcccagagctctctcctcccctcatcaatagaccaaagtgtgtacatccccagggagcacacaggaaagatagcagaaaagagcatttggaataaataatgtacaatctagctattatactccttgggtggtgatggagaggttgaatttttagcaagaggaaagagggaacaaagcctaacaaacattgaggttaaaacatgaagtcatctgcatttacactttgcttcaggccgcggcagtaatgaatactcagagccggctttctgtttaatgtttgatgcaaagtcaccggggagtcattctccttcactttcaatttcaggggtcctgaaaccctgcgtttctctgcggtaataacccgtgctttccgttcccggggcgggcgcgctctgactgatcagcgcagatggaggctgtgcggacttggacttggacggttttcctccagcccacctcctgggcacccgccatctcagggctgtttcctgaaaacccagctcttgcctggatgacatgttttccaggcgagtgactcatcagaacagccaacagcttagaaagtccctctgcccccagctgctgggggggaggagcccacgatgcagatgagctggtcacagctaatcacagcctcctcccctcagatctgcactccagcactccagccctgcttctccaggcagcttgatcgcaggctgtgggaagtgctaatccagacaccttcccggtcccctcccaccttctgctgtcgtgtgctgccaaacctcacagg

SEQ ID NO: 65648 - DNA, 787 bp, Homo sapiens
tgttttacaatccttaagaaatgtaaaatccactcttaactcaaaggctgtacaaaaaaatagattccaggccggatgtggcccgcaggctgtagtttggcaaaccctggcttacatgctacaagaattcagagatatttcagatagatatcgcggggaacctggggagaacctgcgggagtggattcgggggggttggaccgggaacaccgaatcggaacactagagggggctgaagtccctgatatgggggccttgatcgctctgccgggtctgcagctgcagccacagctaagcgctccctcgcgcgacggctgaagctcagacccagaggcccgcaggtcacgaacccaagaccccagaccctccatggcctgctgtggaggagagaatccgaaggtccacggacaggcagtccgtgagtgtgacctgcacgcccacacccagccacgccctgcaggctcagaagcaccaccttcccggacgtgaggaacacccgggcgaggggagcccctgcaccctgaaaagtcctgctactgctctccttcgtaggccaagtgtgaccgcggggagaggggtgccccggcagagatgcgctccttgatctccatggggtgacacatcccagagcagcagcaggacagggggcaaccgccgccgtcaagtcccacgcgggctgtgtgtgccagcggcggcagaaggaactggcgctcgggatgccgtggcctgcagggtcctccggcgaatcacagtgcccagggtgaaacaaagggttggcagaccagag

SEQ ID NO: 65649 - DNA, 1911 bp, Homo sapiens
gggaagatcccagggctgaaaggctgggtggagggcgctgctggtcgcatttcagggaacattttaaagtgcaaagcgggccgggtgcggcggctcacgcctgtcatcccagcactttgggagcccgaggtgggtggatcagaaggtcaggagctcaaggccagcctggccaatatggtgaaaccccgtctctactaacaaacattagccgggtgtggcagcaggcacctgtagtcccagctactcaggaggctgaagcaggaaaatcacttgaacccgggaggcagagtttgtagtgagccgagatagcgcccctgcactccaccctgggcgacagagcaggactccatctaaaaaaaaaaaaaaaaaaaaaagtgcaaaacgttggatatcacatcattaatgcggcattttgtgttcagagccagtgggacagtgattcctgcacaagattcctgaaagcctggggagactgaattatgttaatctaaaaggatcccacctaattaggagataagaaatttttgccttcacctgcacaggaagggtgcacggaaacacgtcatttagaacatcccgggcccgaacatcgcgggccctaacatccaggtatccgtgccacttctccgtaccggtccaaggaggccgcggtgttcgcggcggtcgccgagaccggcgggctgtggtttcgaacccgcggcaacggcgcgcggccggaggcggcgctcggccttcgcgttccgcggcgcctggcccggcgcggccgccgtagcgggaggacccgagctacggtggccgcggggcggcggtggcgattggacttggtgggtcccgggccaggggcgggcgccgccatgggtaacctgttcggccgcaagaagcagagccgcgtcacggagcaggacaaggccatcctggtgagggcccgggcccggggtcagggctggggccgggacaggcgacggggccggggcgggcggcggggccggaagagccccgcgccctcggccccccgcgttcggatggggaaactgaggcgcagcgcgcagccgggcccctcggtctctccgccctgcgtccctcctcgcccgcggggcctcgggccggggtctcctgcgcggcgccgtggctgccgtcttccccggggcccgcgcgtccgcctctgcgagccccgccggggtgggcgcggctggtgactgcgggattcgacgccggcgttcggggctcggccacagcctggcggcccgtccgtggggtccgcgcggcgctgggctttccctggctctgggcccgcgggagcaggtcccggctctcccggagtcgctgcccccgcccccgtcccgcggctcatttgcctcctggtgccctgggccggagccccggcggtgctgccggcttcgcgaggcagcgcggggcatcccctctccctcaccccatccaggccaggactggaaggaagtctgccctggtccgaggagcggccgacaggtgcgccgaacgcctgccggggtcctgccggggtcctgccgggcttccgcagcgcctgggtacgggaccaccgtgtttggcgcgtttgtttgcggcgactccagactgaccccccggggcacagccgggccggtggtggtgccttttcccatgtgaaagttagcttctgtaggaggaggaatcgcctggcatgtcagggacagggcgggttaagaatagtccatttttgtaacgagataaacgtgtcacgaaagagaccccgaaatgaaagcagggctagctttttcggatgctttcttttctaaattttgtgcaacagaaataggttaattttatactaaaagagaagcgaatgtaaatgaaagagggaatcttacgttggcatctgagtccataagctgtgaaaagaaacaacgggcacat

SEQ ID NO: 65650 - DNA, 1765 bp, Homo sapiens
ccaagtcgtcccccactccagggccgagctctctccagggtcctcctgcagcaccccctcccccagggttctcctctctgccccgaggggccggccggggggtcgccgcccgcccggcgggcttacctgcgaagcggcggggtcggggcctctcccacctgtaagcccggcccgcggcgtcctgcgtccgagccgctccccgccccgcagcgccaggccgcgacccggcgggccgcccgccccgaagtgccacttcgcgaagtgccgcctccacgcgcgctgccgccggcgccccccgctctcctccccgcaccttctgctccttcttcctgcgccaccccgcccccgcctccccgcccccagcccggctgttgcccgggccccctcaggctgctcccagggccccagcccgcgccgcgcctcccctctcctcccccaggatcgacgccgccgcagaccaatcgctgcctggagtcggccactaggccccacctccgatcccgcccccctcccccttctccggaacccaccaatggaaagggcggtgcgggggcggggcctggcggttgcctagcagcggcagcgccgggcgggggcgggtggtcgggggcggtgatgcgggcgcaacgggggcgggacgcaggggcggggactgccgcggggcggggcctgaggcggctataaaggtggccgccgccggacgccgggctctgtggttcgggtccgctttcgtctccgtcctgctgccgttaccgccgctgctgccgccgcttgcgtcccccgctccggtctgtggtgcagccgggacccaggaccatgtctctgtctcgctcagaggagatgcaccggctcacggaaaatgtctataaggtgagcgccccccggcgccgagctgagcccgctccgtgtgcgcctgggtcgcgcgccgcccgcgcgcccgagcccgaccagggcggccccggggccgcgcgccgggccaggaggctgggactttgggggtcttcccggcgcggccacccgggacccgggctgctggggtggtgagcccggcgccggccgctcacaggtggccacccccgcccgggcccccccatcccatgcgcgccgcggcccggtcagtccccagccccaggcccggggagcactccccgctccgacggccctgctcggcccccgcgcgctcgccttggcgtcggcgggaacggagccgcgcgccgggccccggaagccctcggaccggtcggggtcgtagcacacccgggcagggccggggcggcgggggcggcgggcccaggggttgcggcggccaggacggcatgggggctgtctgaaggccgcggtcggcgcggtggcaccgtggggctcctccaggcgcggttgcgcgagcctcgggcacttcattctcaacaggctttcccttcccacaactcctgcccggcgcccatgctggggcctaaggtgggaggtcggagcgcgggcaggctggatgggtggacggataatctatcatcttatgtaaccgcggagagagaagactaattgtgtaggaggctgacgtgcctgcctttgcttcagatgtgttaagagtggcatccacgttctcgtctgcgaaatgacaggttcacatccaagggccgcagagcaccgctggaagcctcccctgccgccccctccccagtcgtttttgtggctgggataccgacaaacaggcccttggttttctctttcttcagcatccgttctcggtccagacccccacgcctga

SEQ ID NO: 65651 - DNA, 2041 bp, Homo sapiens
ccacgtcggagccactgggaaacaggattcagggtgacctgaggagtcggcttgggaaaggcacaggccctggggttgttaggtttggtttcacagagtctgtggcatacggttctggccttgttgctctgtggaagcacatgttgtcaagggagggaggtttattaaattattagtcattagctccattacgacttgtttgtgattgcagagggtggaagagaagtaccagcggaacctttttcctattttttctccttctgcgctgaaaccagaaagcaggaactttcgtggtgagagttggcagggggtgagtacatggagtggttttgctctgggggaccgaccccgtgatcgtccttaataaaactctcctaaccgggcagtaggccttcacctaggtgaagctgtaatttatctgcaggtctaagtgaaatctgctggcaggaaaactcttaggactgagtgtttggggactttgagcccctgtggacgcagaccagctggtctggagcacgtgaaacacacaggttctgcgttttgtcttccacgggtgggttaattggtgattttcccaagtgaagatgtggcggttgatgatttgatttagcacggcaggacgcggtgggccgcaggtgtctgaagggtcgatccactctggaaaggctttgccctggtgacaggcttgcgctgctgctgctgcacacaggcggggttggttttgtaggtaggtggctcctgctgccactccgggagcctgactgctgagtctttgagacctttttgtgctttgtcactggggagctcaaggtgccttggtagtgccggtactggttgggcagcttttggcaatgtcagccaggcagaaactcagcccacatggagacatagtcaggagaccgctgaggccaccggtgtgcactcctgggccggtccagccggtccaggcagtgctgagctctgtcctctcctgggacggtgctgcctctggcatcccttcccggggccgctcctgtgcctgggttggcggcttgcagagccctggcagtgcctcttggaacggctgtgctgtggcctgcttagtgtcacccgcgatgcggctcagctgtttggtttggtttggacattgcatcgccttaactgcagttctgagtggtgtttgccttggcaaaggaggacgcttgtccttggccttggtgattaaaaatgcgagaataaaaagtgcagttttgattttcttccccgtaagaatccgtaacgcagactttgacctcttttctggtggctccattcccttgggagctgtgtcctcggggaatttcatggaagatgaaggggaggggagtggaacggcttcccggtgtttgccgagaacataatctcagaccttctgggggcactgcgtgggctgggccctgcaggtgttgggagggcaaggcgcggaagaccccttcctccacaggagcccgggcccagcgcttgctcaggttgccctgggtagtggcccagatggagggatggagtgctggaatctgcctcccccggtggcctttggaattaaggctactgaagctgcagccctcttggggaagccccgtgcatccctgtgtgctgaggggctggctccctggctggctgtgtctcctggaatgccaggagaatgtcaggtgggtgttttcctcaaggtctcgtgtccgcagagaagccctggctcccaggtgacccatgacctggagtgtggcggctccaccaccttctctgggcatagtgccattggcccacagcctgtcctagaatatgtgaggttgagagagcatctggggaggaggaggagtccctgttgcagacgtggccatggccttccttgtgccgaggctcttggccctggctggtcactctagcagctggtggggaagccagcctggcggggccgcagccgtgcttcgaggagacgggtgccacagggttcctggagccaggagccagttgggtttgccgcctctggtgtgattggtaagggctggcgccaggtggtgggcgt

SEQ ID NO: 65652 - DNA, 686 bp, Homo sapiens
ggctgagctcattgaaactgcagagccaactccagggccctctggctctccagccgcgcgtctgtccttccgttcgggagttcgaggagttcaggaaggcgttctcgccgcggggtctctgttttctcattaattcagtgagacgatagcgtatttcctggcacagagagtactgggtaagtggtggccacgatcgctagcttgtgggacagaaagttcttcagagatcagaggtcagtggtccagagcaggaaagccccgccccgaagctgcttgccactgtctgctttcctgggatcctgtgttcctgagtgtggccacagcccccgggctggcacctcccacctgcctgacctgaggttggcgggaggtggggccgtacaggcattcctaagctgcctccctgcttgctcagccacggttgctcctccagccgtgagcccagcccgaaagaccggccagtgccttcacagggaggggatggatggggcagcggcctcggggattcttgcaggccaggcggtgaccagacttgggtctgcgattggcggtaatgagtgacctagtgaccgggcctttccacgttggagggggaccaacacggcgccacagactggtgtgcccacaggacggccgtggcacctggctcgtccctatgttatctgtgccctctttcttgtaaggcg

SEQ ID NO: 65653 - DNA, 606 bp, Homo sapiens
cgagtctcccatgttgcctggaggtgaccacctgtctgtcttcaggctgattgtattacgagcctatgatggttttcccttccaacctcagtcagatcgcagcccgcagtttatgacaacaggaaggtttccatggggacagctgattctattggacgagcagtcagctggcaaggcgccagctcagtgctggccacaggcgaaaggcagccggaatgcaccgtcccgtgtgggccggacaccccgtgaggctgagcagttgctaagttctgtgacccgggccagggtggctggacattggaaggtgtgtgtaaggggctctgtccccattgaagctgggataggcaggatgtgcctctcggacaggaaggaagtggccagactgcttggtgctgtgtttggactttgctgggctgcggctcctcctgcgtgggccgggtcatggtgtcctgcgtgcaaggccccacgtgtggcttttgcccttgtggacctctgctccttgggacctcgttcaggagggctcagacttggggcccctgagagttgaggacgccaggggaaagctcgcagagggcgtgcaggtgtccaaggcccatggaaagggag

SEQ ID NO: 65654 - DNA, 1098 bp, Homo sapiens
gggcacctccctggaggctggcaccaccaggggctggtgtggagacccaagggtggagggcagggcaggtgctcaccatgccgctgggccgtgtgggtgcctgggtggacgtggcactggttctttgtgcgggtggaggacagctgtccagtctgcctcaccgacagctgtggtttgcagtgtcctgtgactgcactcctgagcacacccctccacccccttgctgctgacagctgcctatggcccaggccctctcgctcccccacccgaggctgggcgcacagagctgggctgagcctgggtctatgctggccaacgggagaggcagatgggaggagcaggccagagtcccagtgacctggggtcctggtacaacgtgtacacctgggcaggtggctctagcactgtgtgccagaaccgtctgtatgaaaagagggtcacgtagctgccctttggcctggctgtgcagggaggctaaggtctaatcaccctgtagagagttgtcggctcttcaggacggtgccctgtcttcagtgaggggggctgtcattgcagtgagcggggccgcagccctccccagcagagagcactgcacttcctttgtgtggtcagacccgcatgtccagcctgtctatctggggccctgagcctgttgtgtttcttgtccaactgctctgtggccctgccacggaacacctgagccaggctgttttgctcagccctttcccatctctggaggcctctggtgtgtttttgtcctttgaagaggccgctgtgtacccgctggtgcccacagcatgcttgtttgtgatcacagggcgtgtgtgtacctgctgggcgcactgggcctgtcctctgccagctgcccggcatccccaggtgcccgggagagtggcaggagctccctgttgggccagcctcagaatgaggatgttagctggcagggggcattgtccctgcctgaaactgtgggctggattttggtcactgagtcactgaattaaggtgtggcctggaaacttcccatagctgttggctgcagtgcacgcctcgttgtccagagtgaggcaggtgttctgaatgcccacctgggagagc

SEQ ID NO: 65655 - DNA, 958 bp, Homo sapiens
cctccactccccagtcacacatttgacgacttgtctggcactgggccccgtagaaacagacaggacagggtctcagcagccccaggggtgatcccggtggcaggggctgggcttagaaggatgcgctgggtcctccggctgtccccactgtgcttgtttgtttaaacgtctgaagggcaaacggcagagcatcaacttctggtagctccgaatggtgggtccacgggcattcgtgacggtctcctaggtacagtttatacattggaagcatttttgtaattgttaccagcagtcacatgcaggcggtcacatcactgcagggccaactggactgtgtcccgggcagagactgaacacgtgcacacacccagccagagcacgcacgcgggcacagatagtcctggatccaagtaccgaggggcggcgctcatgccatctccatggagtgctggaggggtgacagggagagtggcccctggcaaggtggtcagagaggctggggagtggtccacggggcggccggtctgaactgcccacctggcttctcggcggcccccgctcatgccatgggactctgggcagctggggtccagggctggcttcaaggacgcctgctgggagttctcgagtctgttccctgcctctgcagtagccccttccttttcgggaggtgtagtctgcgaggcccctggaaaagcctggcggggggcgtggttctccatccatggcagctccctctgcccactcgggggactctcccccgccaggactgtccactcacgagctcagtctggccagtacgttcctaggcaaggttcagttcgcctcccagccttcctcggtggacacctctggtctcgccggtcacgtgggagccatgcccagggcaccttgggaggatgctgtgccgtgggacctgaacaggcagcagaggtgaccagggtctttggagatgcac

SEQ ID NO: 65656 - DNA, 2599 bp, Homo sapiens
ctgctcacgtccaagtggcttcccttcagccaggctcctttataccaaattctgtcctctttgtccttgatcccttccctgcacaccttgaaccctaggtcgagtgagcctggggtagggcccatgtcctctcctgccgaggctggtaaaccttagacttgcccccaccccacccgtctgtgtggtttgccgctgatccccagaggtctcgacttcatcccgaccgtgagaggccaccgcagtggtgcagctccctcctgaccgcagtgcagccccagggggccatcgctgggccctgccccactccacagggccacacagcagggaccaggcagtcacacccatggttggagccggtggaagtgatttccaggcaggggcaggcccctgggccagggctggggctggcatccgtggaggtactgggtgtgccagggcgcgtcttaggtggtttgtgtgtggcagggcctgggctctggggtctgtgtctgcctgtcctgctccctcctggccccggggccagcgtggtcctggagactgatccagcatgacctacctgtcgtccccgtgagccctgtggttgtggccagagtgggtagcggcatccagggcggctgtgagagtggagggagactcgggtcacggccaggcacacacagccacacacacatgctcacccgcataagcacacccgtgtacggttcacgcttgtgcgtgcccactcacataggtagacatgcacgcacatatgtgctcatgcccgcacacatatgtgatacctccccggggtctgcagtgctgctttcctcacgctgaatccctcttcacggtggccaggcccaggcatgtcatcttcgcaggcagagggtgagcaactgtgtgccaggcagcccttccgtatcttcccagaaagggaagccaagcccggggctctgtgcgtcccccacccctgccctgcggtggatgggatcctgccagccctgggcactgttctctggagaagcagccaggcctagcactacttttagcgggacacgtgtcacaggagccaggtgactgtcacctctgggtcccctcaggggtgcatgaatccctttcctcttctccctccacagaaatctgtgcccctgacacggagcgttcggctttgggaacaggcctagcagttgccagcatgagggcgggaatgacttgggagtctgggtggccaggaggtgcctgagatgcctgggatagctcgagaggcagccctgtgtgtgctgacccgggaggagggcatggctgtgaggtggaggctggcacaggcggttgggccctggctttgcggccactcaccagccgctgacgtggcctactctgtctgctcatctgggcggccttgtgggttgtgctgattaaagggaggtacatctgtgaagcacctggccctggtcagtgctcagagggtctgtggtcatggtgagaagaaccccgcagctcctggaagggcgagaggacccggagaggcttcctctgccagactcagctgtgctttgaggaggggaagtgacccaaggccagcccagccgtggtcctgggaggcagcatcgcccggttagggcttcctgcgtgtcaccgggggccttgctctggtttctggctgaacttgttgggcactgggcgatcctagtgggggttctgctcgctggagcgagaggaccctctggggcgtgggaccggcggtggcctggacgtcagcagaggaggaaagtcctgcttcaggcagccattcagggagggacaggaatcacccgagagtgacctgccagcagcaggggcggccctcctgctctgtttgtgtccgcagcacgtggtcagtgcctggcactggaaacagtagctcagcaaatatttgtccgtcaaaggagtacgggggccggaccacccagttccggcccctcctctgcagaccaggaaatggagccatttgccgcaggggtgggtctctcgtaccaactccagggttagcgggaggacagccctgaggggctgtggcatgcttctgtcccatgtggtgctgatggggggtgggtctcgggctctgctgatgagtatcagggctgggtcctggaacccaggctggctgcactctgggggcgcttctggggacggctagccagccccctgggctgatggtgtggtcgcacctgctggccttggcggtcatgtctcaaatgggatcacagctccgagggagctttggcagaggaaggtgggaaacatctgggtgaaaaggaagtgggccgtgctcctgtgtcttcgaggcctcggcccctcagctcctctctctgtgcccctctctttggtggaagcaggtagggatgcagcaatgtggtgaggcccttacagagtgggggactcagacccacatcagggtagcccagacacctgcgcccctggggctgcccccccgcaggtggacttgagccgggtctcgttgatgtccaggctgcaaaaggcctctgacggcgcttaccctgtgccgccacgattttgatttcttaatctgcattttgcacacgggccgaggagacatcagtgtccccaagcgctgcccgtg

SEQ ID NO: 65657 - DNA, 768 bp, Homo sapiens
ttccctcccaaagatgccaggcgtgctgtgcatttgaggtctggagtcccttctcattctagaattttctgtttccttttggtgtcccctctccgccctcccttctggccctgacaccccgggggccctgctgcctgtggtcacagggcttccctgggtggctgtcagcccagagtgggatgacggtggtgactgcgagcacctgactccctccccttccttctgctgttctgcttcccaggagacgttctcttccagatggctgaagtccacaggcagatccagaatcagctggaagaaatggtgagtccacccccagcgtggccctgcgaggaggggcaggtgcgacgggagagctggcgccacaccttggccgtgtgtccacttgggaacagtcccagttgtccagccacactcggaggcagggagggaccctggctcagcacacaagccacactcgaaggaggacgtcggagaaaagggcacaggccagaccgcggccgcatgtttcactggctgcagtggcagccatgacacgctgggctccagggagagtcctgatcgcagccccagccagaccccactcctggggttcacaaggttgcaaggcacacttcccctggcctctccgactgtaggcagaggcagaccccacacaaccagagcacgttgctggcggctggtttgcagcatcctgtctaaagccaggggtctgaccctggtgtcagttcaggcccatgggccctgcgacctctcagcctgtgtcgc

SEQ ID NO: 65658 - DNA, 1614 bp, Homo sapiens
ggtcactggaggttcttgggagcaggagcaggaagccctggtaggtgcatgttgcataaccagaggaaaagtacttcgcgctccagctgtggaggaggaggaggtggaggagaaagtagaggaggagaagaaggagaaaggagaggaggaggaggaggaggcagcggcagtgggggtggcggcagaggcctcagcatggagcagagcttgctggaaagtctgcttaaggttgccttgcagggcctctcacctgtgatcaaacttctcacttcctaaatgccatctcaggtcccctttaggtgaccctgtggccaggccctacagcgcctctggagggtcaaggcctactggggataggagtagcaagcccgttgttttgaggggcaggtggggtttagtgtgggaaagcagggtgggctgcaagggcaggggagcgccgggctccgtgttgggggatgtggctgggcaggctctggccttggggacagcatggtctgctcacactggccagcaggcagagccagtgcccggtggtagtgctgggaccgacccacaccctgccaggctggttctcacccctgtagtggaggcttgcgggggtaggcagccagggaacaggctgctccgctcccctccccgccgcccacccggcccggcactgcccacccacgctgagtcagagctgtaggcggggcggccgcgaggctgagtcaggcaggggaggccgcccccttgcggaggccgcatcttcttaagagccgattctgaactgaccactccttgacgggcaatcccggtggacggggggtctgagtcctgctgtggagggtctgcctgaggccggtaggggctcagcccaaggtaggtaggcacaggaggagaggcgagacagaggagagctggaaagaccttcctggcagaggagaagctggctccctgctgaagcagctagcctcctgcggcctcccaggaggggcctgggtgtgtccctggggacagggtctgtgcctcgggtgctcctcccttgccctcaccagccacccacagcctcatcagcgttttgggatggaaagtttccagcctacaaaaccggagagcccttgacatccagggtcccagtcgagccctcccactgtcgggctggggttctggaatcgggaaccccgggtgccgggtgtcagctgtgccatagggctgtggtgtcacgcgctaccccagacctcaggcacatgatccccaggccagctggggtcatggaggggccagcggggggtggggaggcatgctcctcccagagggacagaggcagagagccctggggtttggaactgtcacttccacctacagccctgttggtcaggtgagtcatacaacaagccctgcacccatgggcaggctgggaggcgcctctgcccaggatgggagcacagtccggggcctgggaggcagcggccgccctcagcttcttcgccactctctcccccaaactccccctctccagtttcctcccgaggctcacgttggagaggcctgggctcagctacagtttcttggtctggctttgcttgcactacttcttttaaagttttttttttttaaattgtgataaaatac

SEQ ID NO: 65659 - DNA, 848 bp, Homo sapiens
cattctggaacatttcaagagtttcgaagatgtagttccggagccaagcccaccagggaggccctggtcatgtctttctaaaataaagggttgcagggatccacgggctataccttgacacttgttccccccacccaccacactctcatgtacgtgcgcgtgcgtgcacacacacacacacgcacgtgatacagaaccagtgctccagtccccacagcctggggacagccaggagacaagtgctcttccctccctggagaggcccctcctgccggcctgggcctgctgggcactgtgggcaggtgcaggcaaggacagcagcagcacctttgacccctggaggcagcctcgctgctgaaggactcagcggtgacaggctgtgctgccacagctgccaggcagggagcgctgtggagcgcaggcctcccgcctgctagacccaggacagtggcgggcgtctgcgccctctggcgggggccaggccccatgacggggccagggagtgagagcggggctgtcagtggctggggtgctgcctgcagggatggagggcggggaagccaggctgcttgccgcaggtctcccaggaggggttgcgggatgtgcctgcggtggcagcagctgacctcctgggctcgtgggcccccgggcgtgtgtggaagaggcctgtgtcccacagacccacttagagacgagcctctgggctgggggccagggtgtgagggcagcctcccagggcagttcgtagtagctccctggtgcttgggtttgggcctgcctcggggctctcagggtgcgggggtgacgctggctcgtggccgctgtgtcagggccgtgccgctgcgagg

SEQ ID NO: 65660 - DNA, 756 bp, Homo sapiens
acgccggcccgcctttcctgcgcgcgccgactccggattggcccttcacgctcccgctcaggccgtcccgggagctcattgggccgctcggctgtccttcgggaagttcaagcgtgggaggagcggcggatggctgagggacgcgactacagagagcggccgattggacgcggctggaaaggggcgggtcatatagggggcgggggaccgagggcggcgggaggagctggccgggcaggggcggggccccagcggttgtgggcggggcgtgaggtgggggtgtgatgggcgagtagggcgaggcagatgtgggcggggcaaggcaggtgtgggcggggcacgcagggcctggggaggagacaccagggagggcgcgaggagcacgcggcctcggctcggctccccgacacccccaggccgccgcactcccgcggcccggggctcccccagtgtcctaggccgctctgtccccacccacgtgcgcgactcccctcgttactcagtacgactgcgagggcgtgtgggcgccttgctaacctccctgacctccttcccttcgcgctgctttgttgttttttttccttctccaaagttttaacgctgcgccccgtgcgtagccgctctgtgactccccctctctccgggagccctggggattccgcccaggtcctctccagggaagccatccttcccctaaaagtcacagcacactggtctcccctgcccccgctttttaaaaagtccagtgctctgtaa

SEQ ID NO: 65661 - DNA, 2236 bp, Homo sapiens
gacctgaagtgtttcccgaggctgtggacacgcatcactgacactgtttgcccaccacgccctaaggggagctgctgaggtttgcaggtgacagctgacaactgcagaacgcagcacagaacgactatgtcgaaaccttgcactgagagccttgaccaaccctagcgtggcttctggcagcccaaggtcgcgccctgggaccacccagccccctctgaggtccagcccaggaaagctcagggctgacaaaagagggcagtttgctcaggacgacacctgggaactcgccccggcctctacttctcagagggtttactaagaggggcttacaatggtgcgtccttctctgtcccttcgagacgtctgtgttctctgcaacccaggggtgcctctccaggaccggagtcctctgaaacgccaccgtcagggaggacggcgggctgccagcccacctgggcgccagcagcacggacacagcggctccacgtccaccgggtccgccgctccttccctcccgtcggaggccactgaatgctggccgaggcctgttcgttcccccagggtctggctgtgcccatcgcccttgcgctcggcgggtccggcttggaaggcccggcttggaaggccccgggacggcgcggcgggcgggcagctcaggggcgtcggcgcgggcgaaggggccaggagcagctacccggcgcggagacgcaaggtcaatggctccggcccggggcgagtccggggaatgcggcgctcgagaggagccgtgggaccggggcccgggcggaccgccctcactcacccggtgtagaaagctcaggcggtcccgtagcggcggcgcggcagccatgatccaggtcccctcccggtctgccccgcttccgccaggcccgggccctccaatcactgcgcgggtctgggtccgccggccaatccctcacggtagggcgggccctgaggttggcttcgtaaacaattggagcctaggccaatccgaagtcccagagcacagacagactaggacaagagccaattgcgggggctcgaggccaggcaaagcctggccaattaagaagttcaggaaaggttatgggcggaagcgccgacctatcaagctgtttgacaccggaagaggacggacctaagatggcggcctccagggggctgggaatagccgctcatgtcggctaacggagcggtgtggggccgcgtgcgaagccgcctccgcgccttccccgagcggctggccgcctgcggggccgaggtgaggagccgcgggcgggccagtgctgcggggcaggaggagccgcgcggggaggtggctgggagggaggacggtgacggggtcaggggaccccacgacccacgcccgtcctttccgcaggccgcggcgtacggcaggtgcgtgcaggcctccacggccccgggcggccgcctgagtaaggacttctgcgcgcgggagttcgaggccctgcggagctgcttcgccgctgcggtaggtgggcgcgggccccttccccccttcccagcccttcccctccaagagccagcgggccccggctttcctttgctttcccgttggttcaaggtttgagcgcctgccgcgtgctttagacgccggctgacaaaatcaccgagccatcgacgagcccgcgaaacctcggccgtcctgggcttgtccctgcatgtttgtaaagcgggactggcaccaacctcagaaaggatgggagatgtgtgcaaaaaagcgccttgtaaaacgcgtaagctttcgtgttagcactgccgccggggggtgtcatgccaggattgacccaacacaggactcccggaaagtgcccagcaccttccgggtcttcacctccctggcacttgcagcccctgtgcacctgcagtggtggattccttcagcacgtgtcctgcggggaacccccagccaccctcacaactggcacgatagggcttcttgcccgtggggctttaagtcattctgaggctggttccctaagtgtcagccgcaccgggtaccacctcagtgtatctgggtaggccttgatgccagtgctgactctgtttactgggagctgttaatccggagatttggaccagagaaagggtatttgaacaagagttccacggccttcatccctacccggccccagcagccttggatccaggggtggacaactcatcagaagttgcactttttgctgggtgtggtggcgcgtgcctgtaatcc

SEQ ID NO: 65662 - DNA, 823 bp, Homo sapiens
tttattcaagactttctaccacactgtgggaagcatcgataaacagtcataataattatcattctgagtcactgcaagcgtggggttggatgctggctctcacagtagcctgtgttgggaccatgagcagccatgcgcacctccacgcacggccgagctcaacccgaagaccacgcgtgctccctggcaggagcaggaggcctgaccacagacgcagcagctccccagcctgagcctgggagtgcaccagccagctcgcagcggaggccgtttctcctcacaggctggagtgagctcagagtctagaggtcagaggacctcagactaagagctgcaacagaacgacagcaagaacattctggaaacgatgccacagtgaatcttttatactgtcactcacacttggtgagggcctcagacatgaaaccctggggagaggcgagtgtgacctccagagtttggctgggatgcggctgagacagacctgctgctggccgaggagggcagtggctggcgtggccctcatggccagcaggtgctaggactcctctggaggcccaggcgcctgtctaagctgccggctgtggaccacctgcagagctccccccgcagcctggcggagctgggcatccagggcgccacggaggtcgttcacctggacatcaggcagggggttaaggccaatgatgaccccatccctcggggccagctgaccctctgcatgagggccaaggtcccgccgtcgcctccggaggtcggagccagcctgcagtttcaggtcccggttgggcttggcattgtccggcctctggccccccgggac

SEQ ID NO: 65663 - DNA, 632 bp, Homo sapiens
tgcactttgtgatcagtaaaggtggagacagtcacatcagacggcccccagacgaagtgacttttaaacacactcccggcatcccacggacggagtgcctcatccactcaagtgccgccccaagttcaggaggaggctcgggatcccagggcgccacactcgcaagaggtgagaacaatggccgctgacgtgacttcaaagctagtccctgcttttaggcaacttttctaagagctgatttctgactttcccttgatgctgccatgagaaagtattactcatgaagggcttggctttacagcccaatcttgagcacacagctgaccaatgacctcatggtctgatctttgcgaatgtgagggggaatcccaggctatctggctcctggtacccgggtgtctgggctggcaacacagccaggccctggtacagcctccggcaggcggaacctcctcaccactgcttttgcctccgccgtggctggcaccactgctgtctcctgggaggcgggagaggctcccagttccttccacagagcaccgaatggtccgtgagaaacagggccacatgcttctcccttctctcctctgactgtggggacaacgccaccctgctggagctctcctgcatgc

SEQ ID NO: 65664 - DNA, 2058 bp, Homo sapiens
cacccccggctaatttttgtattttcagtagagatggggtttcagcatgttggtcaggcagttctcgaactcctgacctcaggtgatccactcgcctcggcctcccaaagtgctgggattacaggtgtgagccaccaccccctgccaaatgtgcggtttttgtgaaacgcagatcttaggtgtataacctggtggatgtttttaatcaccttgcaaccaaggtccctatctagtgtcgaagcctgggagtggtgagttgtgtgcttctgaagacaggtgcagttgggtcagagtttttaaaaacacgataaaatgtaaaaatacggagtcccaccgttcccttccgattctggaggatcattttgctttgttacactttgcttcggtatcgagtttttgagtgtggggaactttccggcccgggctgacaagggctgccagggccaacgccgtgcgcttctcatccacggattctctacgggaactgcgccgggacccagagggtcgccccgcccgcggccgcctgcacccgcccagcgaagccctgccccggcgggaactttaaccaggacgacccagccagacgccccctctgcgggggaggcgagggcggtgatctccgggcccaccggactcacctgtttgaagcagaagggcatggtgaggacactgacccctacgatgctgttcacgatgttcgtgatcagcccccagttggaggcggcggccgcggtcatagtgagaggtctaggggcccggggcgagaggcctcgggggtcgccgggctgcggccggctttggaagcccagcccgaggccacggtcacaggtcccaacgtccgggacgccggtggggaggggatgggcagcctgaacacgggagcctgagcaggcgcgggcgcgggccccagaggctgcctggaggaggcagcctcgaaggccggctgcgggggcgaggtcaacctccggaccccgccaagccctgcggccgcctcagggccatgcgtccctcgctcggcctcgcgggccgcctgtgaatctccgagcccagacccggaagagccgcagagccagctagggacacctcagcccaactcagctgccgccgcggcgctcacacttccgccttccacgggctccgttgcccggaagtgacggccagggggtagggtttggtgggacgcgagccaatgagaggcgggcccggaggggcgggcggaaactgggccggtgggcacctgagggtctcgcagctgtccggttcgccaagctggtccagccgacctgtgcccggggccccagttcaacgagctggaggacaagggactcgccccgcgaggcctcggtttggatgggcagtcgcgggctggagagaaggggaggcgctgtgccttccggggaggagcgggtttaagggttcctttttgacctttattcccaggaccgattctggggcgagtgcttggcgccagggcacgggggcgggggccctgactgcctcagccgaaaaatagtctgttgtgaggaattagcacctaggaggtaggaatgaaacgctgggcacagagaggctcggccactccgctaaggccacacagctccaaggggaggcggtgccctgccgaactgcgcccagatcagtggcaatgttgaacttcaccttttcacacgaaaagagcaagggacattcctggaggggacaggagaggtggaggcttacatgaacagggaaacccgggagggcttccagaaggaggtggcttctaggctggagcttgaaggacaaatgagaattcctcgggtagaaatggagaccggggagaggagagaacagagaagggtcccgatagatctgtggattcctggcacctagctgctcactctgagtctaatgaatgagcgcgtagaccgaatggctgggaagcagcaagtgattccaggctgctgggggaggacggcggaggaaaggaggccgtgtctgcagcacctgcaggaccaggtgtcttagaacagaggcccgttcctcaggcactggcagtgcagccaccaagtaaggctg

SEQ ID NO: 65665 - DNA, 741 bp, Homo sapiens
ggaatttagaaatagctgtcggcagagccttggtaggcaggctccctgtacccaggaccctcacacccacgtcccaattgccccaccaagggggcctgtgacttcccaagggacttccccccagggggactccacgccccccttctctctctgcatgccagggtagagttgtggcccccaaaattcacatgttgaagtccaggacctcagaatgggaccttattgggaaataggatcactgctgactatacttagttacgatgaggccgtgttgtgtggtgggccctatcctcgacgacagttgccccacagtagaaagggcagatccagacaccaacatgcacacagggaggacccgtgtggacatgagggcagaggttgggcgaggcggccgcaggccaacagacgccaaggatgatctcagcctgtggaagagggggcggcccaggacagtccgggctcacggcctcagggagccaccccgatgggctctggcctcgggaactgcgaggcagtttctgttgtgtgaagctccccagtctgtggaccttgttcctgcagctcgggaaactcacaccgcacatcctggcgcgcaggccaggccgccgcccgggtttgaggccttgctgctcccttgctgcccccagccacccgcacactctcacggagcccagctcacgacacccatgtagtgtgcgacacttttggagaaccacaggaatgtccttgattaaagcgtgc

SEQ ID NO: 65666 - DNA, 1509 bp, Homo sapiens
cttttttttttttttttttgagacggagtcgcactttgttacccaggctggaatgcaatggtgagatctcagctcactgcaacctccgccacctgggttcaagtgattctcctgcttcagcctccggagtagctgggattaccggcatctgccaccacacccagctaatgtttgtatttttagtagagatggggtttcgccatgttgaccaggctggtctccaactcctgacctcaggtgatccgcccgcctcagcctcccaaagtgctgggatgacagacgtgagccaccgcacccggccaaacaccccaactctttctgctgcattgagtccagcagggtgccctgagggactggccccggggacattttcagccactttagggaaaagaagacgtaatgctcacactaaccgccccacacccgactccaggctggcctggcgccataccctcggggtctccaagagaggcagggctggtccccacccaccacctcccctcaccttggtcttggtgtgtggagcccttggccaggtcccaggcagtcgtgggtaacaccgcagacgtgtgttacccagggcggggcccctgagagctggggtggttcagagcccgtccccactccgggagcaacgtcagggcggggcggggctggacggacaatgtgacctttgcaatgtccccgaacaagaactgcagatggtaatcacggccaccaggaggaaacttcctctgaatcttccactaccgtggtgtaactagggagggtgttggagcattcagcgagataaaaagcctgcttttgtctacactttttccgttttctaaaaattccagacacaaggggagagctgcccaaacacagaggtggagaggagcctgtccggacacagggacacaggcagctccggcagtgaccacttgggcctcagagaaactcacaggtggccactactcctgtttggagctggaggcagatcatctggggcgcctcggggtagggaggagctggtggacagcacgccccacttcttccccagcccctccagggggagctgccattccgcagctggtccacccagccccaggaagggggaggctccccaggacagtagcccaaagagcagagggtctccccgagaaggtgcaccccaggcagggcttatccacataccactaggctgggggccctgctccggggggttggggtggctggaaccttagatggtcccatcctgttggggggcttcctgggccgctttgctgctcccaactgtggaaggttctctcttgccttccctttcctgctgttagaagcaccccagcccctccaggcagcccccagggcccgagtgatgaatcactgacttcttgccaggctccggtcgtgatgcggggtggcagagggatgtgggcaacgcagctgggagtcccggggcacagccgggctctctccaggctccccatccagcagctgcgcacccccccaaacacacgccgggctccc

SEQ ID NO: 65667 - DNA, 868 bp, Homo sapiens
ctgttgtggtttttttgtttttttggagagtctcactctgtcacccaggctggagtgcaatggtgcaatctcggctcaccacaacttctgcttcccaggttcaagcgattctcctgcctcagcctcccaagcagctgggattacaggcatgcgccaccacccccagctaattttttgtatttctagtagaggcggggtttcaccatgttggtgaaattggtctcgaactcctgacctcaggtgatccacctgcctcagcctcccaaagtgctgggattataggcatgagccacctcgcccggccccaacggacccatcttcaagtgtgtaattcaatggcatcaactccattcacgatgttgtgcaactgtcacctctattaatagttccagaacatttcatcatcccaaacagaaactctgtactcattaagcaatatccctcccaccctccgcccccccgccagtccctggtgaccccaaatcttctgtctgtctttgtgaatggcctgttctagaagttgcacagaagtggaagcacacaccacgtccctttctgtctggaattcctcagttagcataacgtccctgaggtccatccacgcagtagcgggtgtcagatttccttccttttccaggctgaaccctgttccacacgtggctagaccacaacttgtgtgtctgtccactcatgggtcgacggcacttgggtgcttccacctcctgctggccgtgaccagggctgctgtggactctggcgctctcgtctgcaccagctgctgccttcagttctctggggtctgtagccggagtggcatcgttgagtcacgtgggaatcctgtgctctgctttttttcttttcttttctt

SEQ ID NO: 65668 - DNA, 2998 bp, Homo sapiens
ccccagggtctccagggcaggagcagggctggcaagggcagggctcacagccccatagggaggacacagtgcccgcaagagggactgggcaagaggtggacaggcagggggtgggggcattctgtgtgccccagagcctgagttcgcaggctctcagcagcccgtgctgggcagcagtgtgggcgtctctcccgcagggcaccctctgcactttcctgcagacctgcagcagccctttcctgagggacacctggctccgggcccagggtgggggcggggcctcgcgtgtctcccccttgatttgtaagagtccagggctgtcggccatggccacactgagcacccctgggagccaaggcagcttaaggacaaggtgtgtatgaggacggcggggcccagggaggagaggctagcccagggctacccgggtccccggagtaggggcaggggacttgaaaatgagcccccaaggggctctgatgggggcaattccaggagaggcgtgggcaggtgtggggctggagagaggcctgtcctttttcccttgccctgcacactgtctgcagggtggcagacccaggctgcctggcgaggctgcttctggaggcctgaggaaggctgggctgaggactccgcctctcctcaaagccacagcctccctgctctggggctacatgtcgggaaaatccctgcctgggttaccccagctggggactcaagctctctttggaccctacagaaagagctggccagcccccaggccagaagggccgtccgtgacccacagatggccccaacacactgtaaaacacgcatgatttattttagtgtgtgttagaaaaataaagccaacacatcaagcctgcaatttcgcagatactaacacttcggaccaggaaaaaagaagcccatgacatggcacagcgctgtggagcgagcgagatctgggatgcgtaggcctggacggctgaggcttggaaacccctcccctccccaaactttcccaccatgcaggggcccagcaggccctcagcccactcaccccgccagaggagggaggagggaggagggtccgggccaggtgggagcttctccccggaggcctgaggcagcttccctcctctcccaggaaggggctggcccaggcccagctaggatgctcccagcccagctcctacccgccgggtctttcccgtttgtcaggcaggccggcaggctgggctggtgactcatgactggctgggccatctgccctgcacccctgccccgggcgaagtgagaaacctgaccgggctccagcacagacaggaaaccccaccccagggcctgcagtgggacaggtgtggccgccctccacccccacacaggcctcggggagggtgtctgaggccggcctggccctctctgcagcactgaaacaccagctgcctctccccagcccggaactggggatccagtgtcctccgcactgaccccaggctctgctctccctgggaagcacccgctttgacagtggggccaaggactggggttcccaccctcctctgcccagtggactttgtggccccaggcaggtggcatcagctctctgggcctaagcttctcatctctgcagggttcatcagctcaacaagcatttgtgggttcctgagacctgaaggctccactcccccacctaagcacacaacagtccaggcaccacccacatctccctcttacctggagcagaggggcgggtgttcggagccttggggcccagggtcatttgcactggagggggccaggaacgctcccaggagtgtggcagtcccttcctagggggcccctcctggagcagctgccttgagagcccagcctacagcagagcctggtggggtggccgggctactgctacctggcttcactgctttcttctgccattcctcccaggctacccaggaggacgagaggggcagggtactggcggcagcaagagagaacccgcccaggagggcccagcacgggaactccagcctccagagccagcagagccacgggaacaggagttcctcctcacagaggaggcgctgttggagggccaggagcaaactcccagcagagcaaaatgcagaggtgaccagcccagggcacaccagccactgaaaaacccaacagtgggggctgccgtggggatccagggttgggggactctcagacggccccccaggcttgtccccatgcgtattctttgagctgatggggacgcagtgttcacagtcctgacaggaggcaggcgtgaccccagtcggggagtggacttggccctcttcacacccccagggcagaaagccctgttcagaggtaccagggagcaggcacaggccagggtccgaattcgtaacaagcatccgggactccacatgacgcaggtctgagaatcgatcccgggttccagcccagccatcattttcagagaatacgggccctgtcccgagccgccagccattgccaatggctgcccggaggaagggaggaaggggtgcccccagcttgtggaaccaacaagggcttaatggtagggcacgcccaggggcagacgccaagaaaggagaggagggggcgggggctccggccagggaagccgtgtcctctgcaccaggcagaacagggggctgggccgccctcagcctggatctggccagggctgggatgccagctctgagaacagggcccagccctcacctgcttggtttgcctcttgccaggggaaggggctcaggaaggtttctgagctgccccatgcccctgcctggagttcctgaccctcgggggaagctgaggctacagagagcacgaagtgcaaaaggcctggtggttggacccagagcccctgtccctgggtccccgctcctccccaccaccccgtcccagctctcccacgctcccacgaggccacatcatcttctgctcctgctgagttccccttcacgcatatgaaaagcaaattacaggagggaga

SEQ ID NO: 65669 - DNA, 849 bp, Homo sapiens
cctgatcaaggagggcccatgcaggagaaggagatgcaggcgcaggattggctgtatggtgcacacacacacacacacacacacacaccctggacccccgtgacagggaagcagaacaggaggccaagaccagccacacactgcgagaccagcggccaggctgcccagagcccttcctgggttcagcctctttcctgggcttctcgtcccactggaggaagggccaggagggcagaggtccttcctctttccacactaagcacccacagtctgcagggatgtgtgagccagaagctggggtcacccctgtgctaagcagccagggctccccaactgcccttgccagacaggtgggcccagcaactgcttcccacctgaacccactgcacagcctggcaggtgggggcaagctggaacgcgggcagcagcactgggggggatgggctgtgtgcagagcccagcagccacttggctgccagggaatggcccaggaatcaggcaccacttgtgctgcagccccttcccctcccctccccctcctcagcctcctcttctaccccagggcccaggccggttaatctttaactgcttctggactagcactgaccccaaaagcaaacacagcaggattcctggggaggagacatgtcttccaagtacggctgggcagtggtgtctttttttttttttttcagatggagtctcactttgtcgcccaggcttgagtgcagtagtgtgatctcggctcactgcaacctccgcctccccggttcaagtcattctcttgcctcagcctccccagcagctgggactgcaggcgcccgccaccactcccggctaattttttgt

SEQ ID NO: 65670 - DNA, 6630 bp, Homo sapiens
ctccatctcctgacctcgtgatccgcccgcctcggcttcccaaagtgctgggattacaggcgtgagccaccgcgcccggcccttaatttttatatttttagtagagatggggtttcaccatattgtccaggctggtcgcaaactcccgacctagtgatccgcctgcctcccaaagtgctgggattacaggcgtgagccaccgtacccagcctgcagtggtgtcttaaaggaggcactgggtgagggtcactggctccaggtgggtggggtgtccaggcctctgcctcgtgcccctcaagcctcattcgtgctggagactataagcttctccccagttcagagctgcaacctttcccaggcgtgaccaggggcagggacggcaagcagaaggggcccgcaggaccccaaggccacgtacttaggagcctgatgtaaggctctgaaggccggggagggggctatagggccagagcaggggaggaggtccccactgcagctcgagggcagaagtgtccccgcagaaagcagaggagggggcgcttcctccagaaatccgccaggccattgttacactttctgaggccagggaatttttccaggaggttgtgacaaccaaaaataataataacgcccctcccccagcagcagggattctggaaaaaacagctgctgcagttatcagggccgaggaaaaaacaaggtcaggcactgcgaagatttaatttcaagcgcgtccccgcagcccgccggccacgcaccgcacgcacgcgtcctccccgcgcggggtggcggccggcgggagccacgtggagcagccgcggtgcctccggccacgcctggctcccgatgccgcgaagggggtcttggggcaggccccgctccccgaagctgtcgctgcggctcctgccagccgggagacgacgaggggaaggggtgggccgcgctgggccttccgtccatccgtccttccccagctctgcgggggctaaatccgtcttcaacaaacctcgcgaaaaagccgagggggggacgcgccgttgctggagaataggtcagaagtgacagcagaatgggccgctgagacccccgtccccgccccggtcctccgtcggcctggcgggcggcgacgtggggaggggccgctcagaagccggggtcgcccgggccggggaacttcctcgcgccgacgcccactccccacgggccgcactcgccgaggggccgaaaggggctccagtggaggacgcggtgggagctgggtcccgctctagctgccgacgccggcggtgcccgggtctccgggagcgcagtttttggcacaaagtagcgccgaagaccctgccgggtgtcccgccgcggctgccgctgtgcccgcgcagggccggctcgtgaatgcgtgcgggggctttcgagggcgcttcctctaccctgcgcgcccgggggagctgtccggtcgccgccggcaggcagaggcttcgggccccatgggtgcccccgagaccccggatcgtgcgctgagaatgtcgacgtttcaaacgagccagcagagcgggccggagccttggtcgggaaccggcgccgcgtgcgcactggccggcgaggcctctggcccgccggggaaggagcccagagcgcctgtctccccggtagaaaccaacacacacaaataattatccgtatttcccacactgggggattgggagtaaggagcaaggataggggaggggacaggatccaacccgctggttttttactttaaaaattatatattttatgtcacgatcgcttttcgttaagaccacaaacatccaatttggcttggcgtaataaaatcagccggagctcccttaaacggagccattccggtgaattaagttgtgaaatctaatctattatatccataaaggagaatgctttcattgtaaattcaggttacaaagaaactatacctgggccgccggcctccctttcggatttactacttgaaggcttatcaaattacttcaaaatgctgggctaccccctccatatctcatggcaacaaaaattaaacgtggcaacatttcttttaatagtaggaaaggtcaaaaacaaccgccacaacaaggggatataatttttaaaagacatccttccccaccccgggatgtcttctccgcgtttggaagcgcccttcctattttcccaattaattcgagtttttaaaatatctaaacgcgccacgacttccttcaggttctcccccgctccacgaggcgtctgaggcgcagctcccggatggatcgcacgtggggccgcagaccctgggcgcccggacgtcagccggaggcgcggggatctcgtggctccgctgcgaacctgcgccccaccgcggcccgcacacctgggccgagccggggccgcctcgggagcccctcgctggctcctgggcgccccactcggctcagcaatgtccgggccagacaaaggagtcgccagggaggggttaatccgcccctcacccttctccgtccttccttccgcccccttctcaggcggcgcggaggagagaagatgcggcccctaataatgtgtttggtttaacctgcggggtgtgggtatttgctgcgctttcttgggtgagggttgggccccttcccttccaccttcctccactcctgtgcatgataccctggctggggcctggggcgtcctgcgctggccagaagtcagggtcaccagggactctccgttctcgctcccgaagaggggacttgcgcggacggcgaggaggatcgatgcgttcctgagttcccagggaaacgaggccgcggctgttgtcacgtcgcgaggaagatttatgaggcgcgggccgagcatggcccggcccggcggaggccgcccgcgcacccaggctaatctttgatttccatctgattattttttttttcctgccatctccaagtcggcgtccggaaaggcgaacaaagggaggaggatgggggatgggggcgccaagcggtggcgagggctcggtccggcaaccttcctcctcagtgggggcccttgggcgccccaggctcgcgcccaatgcggggcccaggagggcgcagtttgaaaggtgaccgggctggggctgtcggagacccgctctgcggggtggcccttctagccgctaggcccacgacaggacttctagggaggggtccctgcaaatgcccttgggcgaagagaggacggaaagaatattctcccttaaattgcaattaagggtgtgcggggcgggggtgcttggggggtgctgcggcaggccgggttcgctcaaccggaggcagcagctcagccctgggccgataaggccgagggaaacgggatttctttgcttcccgcacggaaaagatccatccaagcgggtaagagggaagcgaagcttgcattttttatgttgaaaaaaaaattcaaaatggaaaatcattttattggtcaccacccataagtaaactaaaaacagggataattagagtgtggggatttggagggaccataaatctgcggcgccttttccactggaatcaggagcctttatggcttgttgttttattttgagagaaatgagatccctggctttggtgcaggcgggtgtgcgctccgagcgtctttcggcgggggggaggggggagcaggaggggcgaggagacttgcgcagtcagggagccgcgaaccccgagtctcggtcctcgaaggcggcaggagaaaccgcgcgctgtgccccgacctctctcgccctggccaaccgcgacttgggacgagctggaggagcttcccccgggctccggacgcccgcgccgaaaaccgggccatgggtaccaaacccgactctaggcggtcattcactttgtccccacccaaactctgatgagctatttgggagtgcgcggggactgggaagtgagggacttttataacattcttctttcgactccggcttccgagcccaccacccatcttgcctccttcgcctccgccctttgttctaaactggggaggggggaggggggagagaaaaggacacaaaatcaccgcccccccgtcaaatccttaaatttccaatcttccgcaaaatggcctggaatccatttcactccataggggttctatcccccaccgggtggaggccagctttccaatctcccacacaagcaggatcctttcccacttctgaaagtcttcaaacccagtcaccccaaatgcaaacatcgtgtgaaaccccattaatcaggtaagaaagtagggagagctctgactcagctgcctctaattttgggaggagaaagagaaagtgagtttctctttcatcaagtaccccaaaataacagcgctccttcccttcagcccgctccaaccgcagccttgcctttgttgaaagacccctgtccttcctaggaaggggggcggggaggacaggctcacattccgaagagttctgtccccaaaactgttcgaagattcttttgtttgacgtgcacatgggggaggggaaggagcccgctcaggccacccggcctcctcggaccccgctcaggccacccggcctcctcggaccccgctcaggccacccggcctcctcggaccccgcccaggccacccggcctcctcggaccccgcagaatacccccaaagcccatgggcgtctcctaaccgtgtaagtccggggctccgggggctaggaggggctgctccaagacaagggaagctgcccgccagattggggccaatatcgggctttcccaacccaagcttcctccgaaaacaaccccctcaaaactgagcatccctactagaaaaaatccgcattttccaggaggacggggtgggagagcttcggggaacaaagcccggtcctcccagctctgaggccgaggcagggcgcacctcctcctgggcgaattcaatcggagctgcagaagagacaagcatttccaaactggcacccgctccgagcccaaggtgagggtggagaagggtccctggtggaagctgcaggaacactttgggccggggtctaccccgcgttcggcggctccccgaatcccgcagaaagacacgtttgcagcgaaaggctcttacacaccagccgggattttattcgttccctaccgagagtgcgctctgggagcgcgggaaacaaggaaaacgcacgtacctggcggcgctccgagggcggcctcgcgggccctccgctggcgaaggcccccagaagccactccccgcccggctgctcgccccacggccagtccctccctccccggcgacgcaccccgccgagccagctcacaggaagcgccaggagccggagacctggctcgcctttccgggcgctgcgtccgtcttcgaccgccagggcccgcgtcctctccccggccacggcccaccagagggaccccgcggcgggtcctggctcgggcgcgtccttctgcgtccgagttcccaggttcccggccgagctgcggagacggacgcggagccctcggggaagacgaggcggcggcggccgccgtccgggcaggagccccggggcgggaggggtgcagggcggaggagcgggcgggatcccagcgccccgcgccccgcggccgccgccctccggggcgcccagccccacccacgtggaaccgccccgcccccgccgccccgcccccacgagggaaggcacccgagcctcgccgcacacccgcgcctcccggtcccgggcccgaaacaccgcgcccctcccccagcgccgtgctccccgcctctccagcgcgcggctcccgcccgacccgcgcgcccgcccgacccgcccccaaccccgcccaatcaccgccctccgcggctgctccctttgtctgagcccccggcgcaggccaatggaatcacgcggaggcgcgggcggcttggccaatggaaggcccagggggcgtggctggcgggaggggctgcgggcggccgggttctatgcgctgagacccgagactgcgtcgccggcgggtgcgcccaggtcgcccagctagagccggcaggatcccgccgccgggttgtgggtttttgactctccctccgctgtcgggagaagcgcctgagtggggagggaggtgggaggaggtggccccgcgtcgggggtgcggggagcgggacggcggcttggatggacacggtcagccccgggccggagagggttcggctcagagcagcctgggttctgttcagagccctactgtgcacgtttccgcgaggatctgcggagagacgtgcaggcgacgcaggccccgggaaggaaggagggtacctgggctcggacgagcgataacgctgtgttctgtgactccgtacaaacggatcctggagtccagggaaagcgtcccaggcccccagcccgggcagggttcgtgggattggcgtccgctgccccaggcttaccccgaatggaggagtgacccctgtcccctgagctgggtcgcattgaggggaaatgccaggacacccgcaccagggcccaggcactgaaatctggagcggagcacagccaggcggcttggcctgtgccccgcgccctccccagagggggtcttcttccaggctggagcgcacatctcccctggagcagggggtgag

SEQ ID NO: 65671 - DNA, 2374 bp, Homo sapiens
tggggcctcatcccagagaaacaggctggccgggagcattcggaggggcttcccaggaagagctggaccctgacacatctttccgtgggtgctgtggccaagacgcccaatggctggtcatgaggcccattttgttctgctcctggtctacaaggcagaagtcgggacgcatcatgtctgccccagccaggagtcttagggttgtcccaggcccaaaagtcagccaaccctagtactagttttccagaagaatccagagcctacgcacccaggccctcagtgtgaacaagggcacgttatttgctctcacagtctccttctgctcatctgtaaaatgggcatggccaccatgccctctgtgtcccaggctgtctagagggttgagcaggcagggtaggatctggtacccaccatgcccccgatgcccacgcaggccagagaggggagaaatggagttggctgaggcctggccctccaatgccctctctgggctctgaaccagggctccgtccgtcccctggggctgcctcccgcaggccagggctcctttatcctccccgttgagcacctggggcgcggggatgacagcctcatttccccaagcagcccccacagggctccctggattcctctctgacaagcacatgcgccggctctggtcttggctccgtgtgccccagcacgacagaacaagtgcggcaagacccaggcctgcagggcggcggcaagtgcccggaggggcggaggcgggggtagggggtatgccggcgcccggcagtgtcgctgtccccgcgccaccgaccccaccccggcgtgaccttccctgccgcgcgcccaaaggccagcaaagcaggcggcgcttttaaggacgcggcggcgcggcgggttcggtgccaggaggcgccggggggcggagggagggggcgctcgaggccagaggagcgacccccggcagccacccaggcgcgccccgctcgtcactcgctctcttctcccacttgcgccggccgggggcggggcgcggcggcgagggtgggggctgggcagccggggtcctccctcccccgctgtgctggaggcagcggggcgctccccggagctggggcgcggagggagggccgagggcgcgtcggagcctcatccggcctgggccctccgagcgggagcgacccgggtgcggggccccactctgcctggtcgccccgagcgcgtggaacgcgagccgaggttccgcccgaaatgcggccggcgaaggggtgcggtccgggcggggtcgcgcgcccccagcacgctgcctgggctctggaatctgggagaagcctccagcacgggctcccgagcgcacaaactcagggacgcccttcctcccgtccctggtcccctccccgaaaagcgagggggacgggcctggagggaaacggattcggtttcgctccgctctcgtcaattttctgtttaatgtcaccgggccccactgtgggagtaggaagcgcgtcacccgggccataaatttgcggtgatggcgcctccggccgcctccccagacggagggacagggccgactccggagcaggtggggccgccgagactcgacctccgcggtaggcgctgcgcggcttctcccgacgcgggtcccgggcgcgctcggccgcccctcccgccgcatccgcccgcgcccggccccgccgcgggatttccaaagggcttttgttccgggcttggatgtagaggctttgatttttttaccacccgcctcaggagactttttgcttggaaaagtcctgctattaaaacaaaaacaaaaaccaatcaattccggagggaagaaaatgcctccagtgtgtgtctgcgcttcccccgggccgaggacggtggtcggggctgcgtattgcccggaccccgggtaggggaggcgcagagacccggccctaatggacttcgctcggaaaggccccggcggaagtggccgggagagcgggcggctgcgtgggtctgggccctggcccggggcaggctcctctggcctgcctgccttggctgcttggaaagggatttctggggagtctccctttgggggcactttccccgaaactcctctcccgcctggggaattacccctgcagcgggtactgatgcttcatgaattgagatggaatacgtatttgttcaggccagaaaaaaaaaatgaatctattgaatgatttttaatttaatggatcaactgtcctgttaacaaaagaggcggtggccgtgtttggcgccaggcgggaggcagcagtcaggtggtccaggggctggaggtgagggctttgccgcaggcgcatgctgctctgtgagaactccgaggaataactcactggagggctataaatgc

SEQ ID NO: 65672 - DNA, 1836 bp, Homo sapiens
tgggcaagccgagggcccatcattcaggctccaggaccctcgaacaatctgcccacgggggaggggaggctggtttaggggctctgaggggcctttccagcggctgtccttccaacacactctagaggagaccaggactcccaggggcttggggcctcccgttcccccacagggcggttagaggtggagcacctgccctgatgcgaggagctcagagcaacttctgggacaccacgggtggccacggtgttctttttgttgcatccaagatttttctcgtatacgtattttcctatattaaaaaattcaaatgaggctttaaaaattaacttgaaaaaggttcctgatccggaaacaggctcatcggaggcagtgatgggaactcggttccttaggagagtaggaaatgcgccgtctgcgaggggcgccctgcgtggacccggggcctcggggcgcgtccacttacccgagccaggagagactgggccccacggtgttagccccgcgctcgggctcgcgcgccgcttccagctcgcgcctcctccatccccggagggctccgcgggtccccggcgacgggtccctgcccagggtccgggaaccttcccctcccctcctttctcaagcgccatttctccggagccgggccggccgtcctcggtgtacgcgggaagcgggcagcctccgcctgcacccgcggggccgggacccggaggcacccgcttccccgacacactcgctggggccgctgctcgctgctccagcctcccgaggccacggcaagagcccgggggtcggcgccacacacccccagccggcgaccgcgcccagggacctaattcaatcgcccccagcctaatgaatagccgcgcgctaatcggatctccgcgcgcttcggggatttacgcttcccggctctccccctcgtgccccgcggcccgccagacgtcgcttccgaaggcgccggcctggggcctggccaggggctcggccgcggggggtcccggccgccggagccgggagacgccggagacgggagccgggcccgcgcgaccgccactcccgagccagccggggtgggccccgcgccttgtcctgcgtccccggcccggcccgcggagcgccggtgcttacctgcgagccccgggctctccggagctcccctccgggccgagccgcccgaagcgggcgccggcgtaggccccgactcaggcaggcgggaaatcccggagtccccgcccgcggcccgcagccccccaccccaggtcggcgtggcctgcgggggggaaggccggccggggccggccgcccgcttcccctttctctccagattcctttgatccgcgggctctccgccgcacctcggctcccgggctgccccggtcggcccgcggggatcctggaaacggtccccagcttatctcctttcatcaagcggccttgggccgccttgaaaccgcggagccagtaattgcttttttcaggaggcccagtgcggactggacaacagccaatcagcgccttgtttacactcggtgatggacagtccactggcggagtgccaaccaatcccagcggtcccgcgggagcgggagtgggggcggggaaacagagagacaacaggctttgagtttaactctttcgtgtccctgccggaatgagacggtggagaatttcgaatgcgtgtgaatctgtcagttggctcctagtttaaatatccttttttcccccagagggggaggcagagattcacatggagaaagaggagcaaaaataaatgtatccatcgccactaagacatcacctcgactccctgagaataaatagcatttgggt

SEQ ID NO: 65673 - DNA, 2975 bp, Homo sapiens
ccgccgggacacgcgcactcgctcgctccagctccctctcccgccctgcgccaccacattcccattcagcagcaatgatctgcgcagaggagctgcgcagtcgccgggcttgaattaggcgccatcgggcttggtagtagccccgctgcttcctgattggcagttccctggcccggcgccagcctattgggaggcctgtttacgccgaatgagtggcacgagctcccggccgtggagggctgcgcggccaatcagcgcgctggctgttccgggctgagtggcacgagcttattagtatgcagggcccgtggctcgccgcgccaggctgcaggtttgagagccgctctggatgggctcgctagagtcgttgttgtggaagcggtgcatttacagtgcaacagtcagcacattgaaaataccaataggaatacaaaacaaagtcacatttactgatttaattgtattgcattcagttgtatccaggaaacagcctccagtaagtaactgaaattgctttcattttttttttgtttttgtatttttattattattttattttttattctggctttggggttttacattttttttagcaaaagaaattcaggattgtgatgttaagaagtatatatcttcccttttaacaaaatccgttaaaatgttgaggcttttttttttcttaaaaaatatggactatgagcgatttttttttctctgaaaaatcttatcgatcggtttaaaattacccccgtaatgcatccttgctttgctctgagcgcttgttgtctcgatcgacacccagcattaaaaacaaatactcgaagacaggacagggaccgccaggctgcgtctggcgcgagccgcgcgggtggcaccgggcggacagtaggcgaagtccgggcgccgccagcgtgcgcccagttctgggtgacccacgaacgaaccccaacattcgctcccctaccctgctcccctccccggaacagtcctgggttggccctgcccggtcggtccgcggcgaggggaactggccgggtcgtggtacccacggccgctgccctgaggggccttccgggccgaagctaggggccggggaggggaatggtcatggcgagtttttcgggtcttcgttcccaattcagaattttttttttccggagaagtgggggtggaggagggggaccgagcaaggccggcgcagcggggcgttttcaccgcgcgcgttcgggacggcgcgcggggctcgggtcacggcccgtgtggcggggtccgcgggctggttttcttcgggcgcgggggtcaggcgcgaccccagttctcatgactctcccagggagcgggtgcggctgtttcgcagggagcgggttctgcggcgacggccgagccactcgcgccccaaggcgcgcctggtcccagcccggcctgcaggccccaccgcgcccgcgctcccggagacgacgccggagggaggcagacgggccagagtcctggtctccggcaggcgggcgaggagagagcgggtttttagatgcaaaagcaggaaacaaagcaaacttgtagaagctccagatcctggagcgcgccagccacgcctggggccgcggcaagagggaccggcggctccagggtcacgccctgccttcccgggagggagccctgtgctcctaggttcagttccttccgaaatgccctcgtcagcgattctccgcccgcccggggccctctgcccgccgccacttttcgctccatttcctcccttacctcagcccgacctggcgctgcggcgccgtcctcgcggtcctccggcgcggcctctcctggagctgggctgggagtgggccccgggcctcggcactcggcgggtggcggcgtcgccgctgcgggactgtgggactcccagctcgggccgtgtggccgcccttcctcgccccacttcctggccgcctcaggctccccaggcccccgaagcccggcgcgggcagacgcggaggcgcggcgcggcctctccccgggaggagagaacacaaagaaaagctctctccaatccggtcagagccgtggcggcgcaggcaggcgacagtaatccacctcctgtttgcttaaaaagtcgagcaggctggtgagaaaggaacaatcgggcctgcgatccgcccgcagggggtgggagattaaaattgttgcttcgtagccgagcccgcgtcccgagaatcgccggcagctcgcgctttctcaactttgaaatttcttattggagagaaaaaaaaaaaaaaaaacaaccacaaaacaaaagcacagcacacacgactccctggaggccgccaggaagcctggcacccccgcgtgcgcagcccccggcccctctccggccttcggcgcctttgaagctgcaggtttctgacctccctccctttccttctttccctttgtcccgcccggcgccctccggggctcgggaggcgccggccggggctgggggcccccacgtccctagtccagcccgggcagcccctcccctgacccctgcgctcgcagccccctcgccagagcactctccgggccctggcggccgggcgctcgctttgcaggccgggatcggggcttgggagccgagctatttgttagacccggggagagagctggcgatccccagagggaagggagccccaaacgcctttgtatgtagttgccagacaaagagaactctttgtgtagacccatttatttacaatgcaaaagctctccgaataaatattaaaaaagcttatcagctgagcaaatatgtattcacttaatacattatgttttcggttatagattaaatcaaacacaaaatagtctgcaaataagacgttttagaacccggaccataaaatatcgcaatttaaaaaggtattcagtagatggaaaacatcttaatcgctttgttgtcatggtggaatggctacaaaaacacaaggttttccgcaaagttccta

SEQ ID NO: 65674 - DNA, 2639 bp, Homo sapiens
ggagaccggcctctgctcgcggtccccggcaggcgctgaaggaagaaatcccagggccgatttgggccgttgagagagagcattctgactctgaaagcaccccccccacacacacccccaagcccccaatccgcagaggaagatcctgggcgaatttgattggggggcggggtgattgttacagcctcaacaggaagctcccggctccgggacagcaggccgggcactgcggcgtggcggcccaggtgatgccggtggcggttgcgggcctccggggctctgaggagccggcctggggtcctagcgcgatgctggggacaggagctggtcccgctggggctggggaggggggaccacggtggattcagaagaatgggccgaaagatgcatgagggggatgggagtggggagaaaaggaaggttattaaaaaaaaaaaaaactcttgagttacaatcaataaaattactcgcttaattagcatggttattcggttaagcggaatgcagtaaaagctggacctcggcatgaggtggggagagggggagagctagtgtggaccccaggccttttcctccgagacacctttgggcagcgggggaggggagagggtgtgcgtgtgagtgtgtgtgtgtgtgtgtgtgtgtgcgagtgtgcgtgatggcttcgcagatttgggtttttatcacccagcagagccagcagcctcttcgccgcggcgccctagctgcagggacccgcggggacgagaacgggaggcggcgagcagtgcggctgggttcccccggctgccccgggccaagcgtggccgggacggtgcgtgcgcgcgcggggccccgggtgctgggctgcgcgcgcgtgcggcggggagacaccgagcgccccggccccgccacccggcctggccgccgctcgctcgggccggcgggggtggggggtggggggagtgggtgagcgggcggggcggggacccccgggcgagccgagccccccagtcacccgtgtctcctctgcttttgcctccacagaccatggacccgcacagcggccgctggctcggtgcgcggccgcccgccgagaagcccagtcctcccgcgtgctgaccggccccgccgccaccaccgcctgtgaccccggacgccgccgcctctgcgccgcccgcgcgccgagccgcccccgggccccggccgcgctgctccgaggaagcggcggcggaccggggccggggcccggcatggatggccgcgactttgcgccgccgccgcatctgctgtcggagcgcgggagcctgggccaccgcagcgccgctgccgccgcgcgtctcgccccggctgggcccgccgcgcagccccccgcacacttccagccgggaaagtacttcccgtcgccgttgcccatggcttcgcacacaggtcagtgctcggccggggcgggcgcgggacgggagcgttcgagagcggaacagggcgcccacccctccgctcccgggagcagagaagctttggtttcatttcccggccccggccgcggtggctgcctgggcgctgagcggggccgcgcgtcccgccagccccccaagctgcgtcgccgcggcttagagaggcccttccctggccaccctcccccgggggtctcggaggggcagccccggagccggctgaaattaaagcctttccgcgcctcgccaccctcccccgccccctcctgcagatctaaattccacggaaacctcttttctgcattctgcattcacctccctaagacgttccggggctgggacaacgaggcgctttctgcggaaacaaaacggctgttgtggcggggggaggggaccagggtacgccgcggcctcgcggattagagtggtgtgtgcgccgggcgagcgttaatagggactgctggtgtaagacgagcaaatcctgtttctatataaagccttaaagtgtcagggcgagaatgggtttgcagggatgcatttgccttaacgagtgcctctggtatcccgctaaagccggacaaagcgtggccagagtgcggcccagcctctcagcctgcggcccggggaggagggcagcgcgggcgcgggctgggggtggcgcggggcggcgctcaggatttcggtgcaggcgagagtgcggcggatttgctccaagaggagagcgaggcggatttgctccaagaggagagcgtggggcgccgtgctgggcctcgcagggacggatcctctcgggcggtcccctctgactccctgcccgagaggatcagtccttggcagagcgggcccaggcctccagggcagccctcttcccggtggctttgatatgagtgtcgagggaggtcagggtaggggcagctaccacgcctgaagccctagaggtcaccaggcggcgcgggtagattcgggggaagcgcgcagggctgcgctagggacccgccgggtcaccctggtacatgggtggcttttgtttacagtttgttctaaacatcagaaatgtttgtcgcttttaaaaacaaaattggcagtaacagttattattggtagcttgatgaactgtgaatactaataaaattatatctgctttaatgggattacaattagtgtgtggattaaaacggatggcagagacggggctagaaagga

SEQ ID NO: 65675 - DNA, 1125 bp, Homo sapiens
cccactgagggccccgtgggacaccggggagtgtcctgcccccacctgatgtggtgtgggagagctcaaggtacagggttctcaggccaggatcctggagaaatcccttctccagacccaacttttggacttagttgcttcccaccatcccgaggaggaaaaggcgggagggacttccccaggagggtgtgggggtgggaaggcctgggggactcgaggcgggcctgggcgaggcagcggcaagcttccaactccgaggggagcccacactcaccccacaggcatgccccagtgtccccaagcaggggaagccagcacttcccttcccaacccagagtcccctccctggctgccgggcctgtggtctggccccggcccatggcagtcccagccttgtggtccgggaagcccctggctcgcgggcaccttcaccccctgccctgggcctgggcctggccctgctccacagtcccttgggccggctcttcctctccacccgcccacccgccgcagaggccagctcacagcccacgtcccccaccagcactcacagacccctcctctgctgccatgactgggagaggccccttgagtccacatggctgcgttcgcacacgagaggggaaggggccttgggggccctgggctgggaactggctcagcacagcaggagcctgccagggccgtgcagggcagcccccgccgccccccttgccccaccgcctctgctgagtcacctcatgtctgggaagttcccagggccaagccaggctggatgaggcatcagaaattcacaaattccccctgcctcccgggcaggggaatggctgtcctgactcacctcgggctgggcccccgcagaccccactatccccacgctcagcctcatacccctctttcccgagggggcaggccccccgccccaggttcctggaatggtcccaggccaggcttgctgcccgtgggatggagacgacaaggtgccagggtgcctggctggagtgggggccgctcagtgacagcctcagaccacccacggagcagcagggccaccgtgtgcagaaatctgtgtgtgctgtgtcctccgtgtgcaggagccgatagtcatggcaactctgggaggct

SEQ ID NO: 65676 - DNA, 852 bp, Homo sapiens
agggggctgccggtctgggccggcgcgttcaggccccgggcggtggggcggcctcggcgtgcgtggctcggttgcctgcaggcaggcacgcggcgctgtgagaaacgaacgtccgtgacttagcccacgggaccgtttctgcattttcaccccaacctggagagctgcagcacagccgcgggacaggaagtcgccgccaggtgggtcaggactgcgacctgaactcggctctgcggcctcccgctccggccgccggttcgcaatcctggcgtgaaccagcagatcaacctccggcgcccgccacaggcgccctcccgcgggaaccggcaggcaggagcggtgcgggggcgccctccagcggccgtggccgggatggcggcctcctgccaggctccaagcgtggccgcgtgggcagcgcgcgcagcccgccacggaaagacaggcgctcctcctgggtgggccttgggaccccttcgcgccctgtgtggccgcctcgtggtgagcacccccgcccctccctgcaaggccggtgttcccagctggaagggcaggcaacctgggaaccagagggagctgctctggttgggaggaaaaagccagctcggttcccgcctgagccccgaaggggcggggctgggaagggggcctggccagagggaaggagcactctgggttgggggtgctgggggagcacaaaggcaggaactggggagcataaggccaggagataggggagaacctaggcaggagctgggggagcagccaggcaggaactggggagcatcgatgcaggagctgtgtcgcgtgttatccccgtcacgtggagttgtgtgtcctgcgaggagcacagca

SEQ ID NO: 65677 - DNA, 1390 bp, Homo sapiens
ttctgacccgcaggatgggagcagggagagcgtggctggccgggggtccaccgggaggccctgcgaagggcaggccccggccaggcggggcgcggctccacgtctcagccggcgcttctgcgcacgggctcactactgggggcggccgggatcacggactcgctggcctcgtctccggagcggaggcgggcagcttgaaggagcgaccccgtgggccggcgcatccctccccaggccccgagacccggcgggagacggaccctccccatgcctcgccgcggaggcccgcgccgagccaggagccgcgcatccattggccgagagcgcggccgcccgggccaatcacagggcggccccggcgcccccgggcgcgccgtggggacagagtcaggcgcgtgcgcactcggccctccccggcggcctccaggcgggacgcggcgtcggcgcctgaagttggggctccgtcctgcctccctgcgggccgggaaaagggtctcgcacgtgcgccccccgcggtccgcgatccccagccgtcggcctagccccaggcgggtcgatcccgctgtccccagccccggaccagcctcctccagctgccgggtggagaggctggggggcttttcccgaggtcggcggcgaggctgagagccccggccccgccgcgcccgaggagacagcccttcgcgggctctaaaggccccggggcctccgggatgttccggggccgagttgtgcctgttgccgtttccggcgcccggggcctccgggatgttccggggccgagttgtgcctgttgccgtttccggcgccgctgccctcgggcaccgtcccctctggccctgccttggtctgggaggggtcgctaagggggcggagggcgctcctagggggccctgcggatctcctggcctcggcccccccgggtggccagagcggggctctgcacaaaggcctcaggtagccgcggcctcggttccgagaaagcccctcgcactgaccgggcctcagctgacccgggcagcctactgacccgaccctgacgcccgggccctccaggcctgtcagagcctccaggaaaggaaatgggctgcggggcgcagcgaggctggacagcgggcgctggcccaggactccccttgcccagaggagaaaatggaggctgagcctccggagagcccagctcgatgccaggagcactttgcagagggacacggatgggggctggcagcacttcacccctgtgcggtaacggagtaaccggagcgcactgaagtcagcagcacccccacccacccaccaaggccaccgccacctcccaccatcccgaccgtcctttgctccctcaacccttgttgctgtggggcttggggatatgttggattctcactgg

SEQ ID NO: 65678 - DNA, 1439 bp, Homo sapiens
acccaggaggcggaggttgtggtgtgagccaagatcacaccattggactccagcttgggcaacagagggaaactgcgtttcaaaaaaaaaaatttgtagagacaaggtcttgccaagttgcccagggaacctgcactgggcagttccggaagagctgcagctttcaacgcttcgagagtgcgtgactgtccctggtccccatgccctggccagtgctcagaactacccatctcctgatttctgctcatctgatagccacaaactggcatctaatttgttttaatgtgcatttgctgatgcccagtgtccatgagcatctcacagtttgtcctgtaagtgcaatgcttcacaggacaaagagaatttctatcttttgcaggtatcagagtcgctgagaagagtcatgctgtgatgtgaggtcacagaacaaggtagggtgggagcctggagctcagtaagctctctgcaatttatgtttgcctccaccccgacccccaccaagcttgagcctcctctcccccatccccatatgggagggggagctaggaagcaccaccacctctgcttgagtaaaatctcttccaacagcagaacgatcccttgacccgacttaacatgaaatagttccaaatctcttttcaactggtagagatcttccttccctgtcccaacctccaaatgacttctgcagctgtaagcagttcagaggagctatgcattggactcccaatcccatctacagaggctctcccctggcacctgcggggagaaaagctgaagtacaaagggcactggctgagcctcttacaccaggtgaggccctcgttattggtagatactgagttccaggattcagtaactagccaactccatgactgctgcgctctttacacaaagtaaaactatctcatatcacacgtccacctgagggctggggggaaactaaggcaggcccctgctgattcaggtggttattttatgccaaatatttacccaagatgtcaagtcatctagtttttcctaaataatggaaaaagccgtctcaggacttccctcccagcctgcttatgatgttgcttcagttatctccaacacccaaacccactaggctgccttgttcttgcactttcgatttggaagaaatcgaactgctcagtttattgttaagccgttttctcaccagcccacgaagccaagctgagcagcacccaccgcccccacccccaagactacccaatacttccaggttggtctgtctttcccagcccacttgctacttccccaaacaggagccattcattggttacggcagcacttttatttttccttacacaatgacgtgttgctggggcctaatgttctcacataacagtagaaaaccaaaatttgttgtcatctcttcaaagaatcgagaattgcgtacaaaaaaaaccttacat

SEQ ID NO: 65679 - DNA, 4073 bp, Homo sapiens
catgacaatgccagtggtgcgcccagaggcgtagagggacagcacggcctggatggccacgtacatggccggggtgttgaaggtctcaaacataatctgagaagggacaaggggcggcttagtcagggacagagacccacggccaccccatgctcacacgccacaacatgctgcatgccagtgtgatgtgtggagaaaagaaaagaacgcaggcagaaaccaaatgagaaacctggaggcttcagggaggaaatgccgggagaggaacagagcctggaacagcgaaagaaacacttaaatgtcagaaatcaagccgggcagaaaatgactggggaaaggacgggaggagcacgggcgtcggccgagcctcacctgagtcatcttctctctgttggccttggggttcaggggggcctcggtcagcagcactgggtgctcctccggggccacgcgcagctcgttgtagaaggtgtggtgccagatcttctccatgtcgtcccagttggtgacgatgccatgctcaatggggtacttcagggtcaggatgccacgcttgctctgggcctcgtcgcccacgtaggagtccttctggcccatgcccaccatgacgccctgcaggggacgacccgtcagcctcgccggcgacaccgaacccaccccgcaacgcagaacccaggagccccgcggcgccatccactcacctggtgtctggggcgcccgacgatggaaggaaacacggctcggggagcgtcgtccccagcaaaaccagctttgcacatgccggagccattgtcaatgaccagcgcggcgatctcttcttccattgcgacctgcccggaaaaggatggactcaggcgggcgcgtctgtaacacggtcccctccccacagccacctaatgccctcccgcggggaagcctcggccctgccccaaccccagcggccgtggcctccaagatcgcaaccgcctggaaccgaaggccgggccttttacgtaacgtccacggctcggaagtctgcactgcggccgggccccgccctggacccccggcgcccccccagccccgtccgcctgacccggcccaccccgccttttgttcccggggaaggcgcgacgaggcctcggcagctggaagcggggccagccggggtcggggggcgcaggcctgcgacgtccagctcaggccccggggcggggcgctcaccggcagagaaacgcgacggcggagcggcggaagaacagagtgcgagagctggcagcggcgactgagaccgaccgcggcctcccccgccgttatttaagcggaagcggcgcgcccgcgcggcccggcggcgcgcgcggccccagaacatgtccatatatggcgatctttccgaaagccgggcacccattggcccgccgggcagggacacgtggggccccggcccgccccgcccccagcccgcaccgcctcccaacggccccgcccgcgccacccccgcgcgctcgcgaccctgcgcgggccggcgggcgggtctgagttggggcgccctccgagggtcgccgggagggccgaagggctgacgggcctggcccctccccgggactgccgcgccgtggggagggccctgctgcgccccgaaactgcctgacccggggcggggccgcgccggagctggggtgggtccccgagtccccggccacgctgcggggctttgctccctgggacgtcccttgcaatctttcccctcgggctccacgaggatctcgggcgccagtgccgggctgaggaaggggcgcggcgggggtccgcgacgctctgcgtccctgggcgcgggggagctctcaggagccctcacctcgccccggtcaccataggaaacagcccgcccgtccccaagcgcagccaccaccatgcaggtccctccacggggcgccctgccccggatctccgttcgtttgaagaccgaggcccctttctacccgacccgacacatccctgcccctcaaatcacaggcctgattgtccccaggcgcgcgctccgggttggggctaccccgcccccttatgtgctgagaaggtggtgtggagtgaggcctttgtttcattctggtcacctgtagacattatagggaaactgaggtagacaatgggagccctgacttttttgaaggtcggctccccagcttcgggcggtcggggggataccctcttctgtttacgatgctagttaagagcagcgatcagggctggcgtgggtttagccacaggcttgtccagggcgctcactcctcgccaggagcggcgccggtgctttggttacaccccgagaggcgcccggcactacggtttccttgtgcgctgctggaattttcagggttggagcgccggccgcgtaggggtggcagtgaggccgcgcagtgaggggacggactcgcccgaggtcgcagagcgttcagattgactcgacaggctggggggcggggccggggtccccacgcggagtccggggccctgcaacgttagctcgcgaccccgtgtttgggagtgacaacagcgagtcagggcaaggcggccggcccagctcacctgcgggctgcagtcagcccggacgccgagacccgtgcctaaggcccccgtgccccaggcctcccaggggtgctgagcgcccccaggcccagaatctccgggggcccgggcaaggctgtcaggtatgttccctcccgtggcgaagccggggctgggcctccaacagacccacccggactcgcgtccctgggcagaaccacacagcctgctcgacccccgggtgaggacttccacttggggggtcccaagatgcgacgtcacacaccgagggacacgaggcgggtggggaatagccacaagcccctccatcctgcgttcaccccacactacgttctgctccgggccggccggggaccctgcccctccgggtctctggtctcctccgaagcttctttgtctaggaagtgcggggaggtgccggccccgggcgcgcgtccccgtcccccacctttcttccccacgttgcggacccgaggccgccagggtcgtgggggcgggggcgaggctggcgcctcgagacccccgggttccccgccacccgcagggcctgagccgcggggaggggcggggaggggacgccgccgcgggccgggggtggagagcgacttcctcctccgcggccgcgtcacgcggcaggggtcaaggtgtggcccaggtacgcggcggggggcggtggcgcggccatatttggcgacttcggcgccgccggagccccgcccgcctccgccgggaagcccggcccggggcagcgccatccccgcccgccgccgggcctgagtcacggcgggcggggggcggaagtaacggacggggggcgcccgcccggcgctcctggccttatttagtcaaggaggccgccgattggcgcgcgggacagaggggcggcggccgggcagcctcggggcgtaggagtggcccggcgcctccgaggggtcggggcgggagccgggcgtggggggcctcggagcctggggagtcccgggaccgacggcggcggggatgcgggtctgcctgtccctgggatgcgggcgggcgggcagggcgaggcctggagcccgcggggcgcagggggctggaccgcgcgctgtgatttttctgtttagcagcggggcctcgcccaaggtcgcgcggggcctgtcctggatatgctctgggaagccagtggcgcagggcagccgccacccttctggaaccagtgccggagagggccgggcagctgggcctggggaggggaccgcatggatggagctgggggtagctgggcggcctccggagccgggagagtcggcagctgcacttccgccagaggtgggtgtgtccttcacatttcaggaagggagacttggggcctggagaagcgatgtgatttttcttttctagttcagtgctggttttgatggctttttatcatgaccttgttatgtcttattttagtttcggcccatttagtggatacgacaacagtggcccagggaggtatggcagagctgaggcttaacccaggg

SEQ ID NO: 65680 - DNA, 1348 bp, Homo sapiens
ggcgggcgtggctgggagaccggctgtgcctcgccgccccgcccgtcccaggccgggaagctgggacttgagctggtctgcattcgggcaaggtgagccccgggatgtttctcaggcagggcccagggctgcacgccctaacttggtgcggggtcgcggcggtccagcccggctgcacgtggtcgcgcgctccttgcagctcccagcccgccggcccgcgctcctgcgccccctccccacgcagtcgacctctcctgaccgccaggtgcacgcagggcgcgggcctgggcctcagctccgcgcactccccccgggacgcggcaccggggcttcgggtgggcccaggacccgcactcagcacgcacttcccccgccgagcactgtctggcagcggggacgcacccccaggaccacgagctcggaggcctggggccgggagatggcgcccgtggagtgggtcccgcgagaaggccgggaatggcgggccgctgtcgttcccacctgggccgccaggtgggtgccgctatcgccgcgaggccgcacctgtcgcgctgccggagcccgcgcctgcccaggagcgccaggagggacccccgctcctccctccgccactgggcggggccggtcgctgagtcacggccgcacaccggacggtgacagaggcagggctgcctggggaggggccggtgacctcagtcagggctgacgcggaaaagtgggatggggtcacccgtggcagtggatgagggggtggcccgggcctccactcactgcccacgctagatgtccggggtccctcctgcgaccgaggacaggaggcacccacagaggaccccaacacgaggaccctggccctgggtgcggggcgtttttcccgcactctgctcccctagcagatggcccctgctaagcaccagctcccagaaaaggaaaggaaggggctgagaggctggatcgaggcaacccagcaggaaaaggtggctccagggctggaggggtgggactcagagatctcactacatacacctgctggggacagaggcttctccggccttcccagggctgggccaggccgtggcaggggccgccccagacctgtgtcccaaggggccaggttgtttgcggctgggctggctccgggaaagtcagagggggcactgccggacaggggatgtccagtgccacaccagggcggtcacacttcctcctggggccgtggggacacaggaaggcctaggggaggggtggggggagaacacactcaggaggtgaccctgaaggtggagaggcccgagctggggtcacaccatgcccagggaaggatcatggttggcccaacccatgtgtc

SEQ ID NO: 65681 - DNA, 454 bp, Homo sapiens
aatggcctggcctggaccgttgccacccgaggacactcacacccaggacgaccccacacagggacgctacctcccaaggatggcagcgccagcctctacccggtccgagctgagctgctcacctctcagagatgttgccaattccagacagcagctcctttattttctgacctgcactctctgtggtcatcctggctgggccaggcatctcagagtccaggtccaggctgcaggtcatcaggcggcctttggcggacagggccaggagcttggtgccacctggtgacagacacacatggggcctggtcagcggctgggaggggcaagcagcatgacactcggtggtgtttccctggactccaggaaagaagttggaagacggccaaggccagtgtccagtgaggaagagaaagtcccaaggcaaatgcactgtcccgaccctgggcttctgtca

SEQ ID NO: 65682 - DNA, 2095 bp, Homo sapiens
ctcagcagtccatctgccacatggcctcccaccttccccacgaaggatactcttgacaagaagtaccaggcatccaaaaccagcgtgaaccgacacctgtcagcatagaaccgtcaggctgaggcccaggctgcaaagtgcacaggctgccccctctacagcctgggccgcggtcagcagctgctggctctgcactgaagacaggcctggctgcccggagctcgcttccttccaacccagatggtgtccactgatcactgactcggggtcacggtgcctttgctgtctcctccctccaataaagacccaacctcgggggcgtgtctcaccagacagcaccgggccaccagggcccaaaggacaggatcccgcgccccgccgtgggcttaaccatgtgaaccccacttactaaggactgtgagcaagacacttgcagaaagagtgctgggggcaggggctccagataatcgggcagggatggcggccgaggcttcagagctggcggcagcccgggtccccaagcgcgatgaggtggggctgctcgctctgaagcagtccgggggcagcaggagtgtgcgggagggaggccgcgggcccgccctcacctgctcctgcccgggtggtccagcgacaggcagtagaggcccctccgggcgcacagcgcgtacagcaacctgcgcggcgccagcagctccaggtgccacacctggtcggggaaccggaacgccgcctgcggaccggggcgcgggtcaggccgacgcgacgcgcgggcccgcggtcttcattttcacgcgaaccgccgcccccgcccggtccctcccgcccccgcgggccggcgctcacggtcagcagcccgccctcctggtcgtacacgtagacgagctcgctcccggtggacaggaagacctctgcctcatggcacagcacgcggggcttgcccgccgccaggcccccgagagggcagcagaagcccgccaggtagcggacccgcggcgcggcgccggccatcgtgcgcgcgggcccgtcagagtgagaagccccggccgcgcggcggcggctccgcctcggagcgctttacggcagcccgctgtgcggcgcgacctccgccgtaaagcggtcggcggtgccgggggcgggccggaaaggacgcgctgcagggactccgggagctggggcggtcgctggtacccacggggagcaggggagccttcctaggggccgcggcaccgtgccgcaggtcgaggttgacccggccgggctggtgggagccctcggcggcttcatggccccggctgctgcacgggttccccagggtggggaagcgggtcctggccgagcagaggttgctcttgggcggggcgtctccccggagcaagcgctcagctactcgggcttttgcgtaaacgcctcgattctctgggctctcggagagcagctgggtcctgccggagcgcactccagccggggtcggggtggggcagcgccggctcttgtcgtcctagggatgggtctctgccctgtgctctgcgagccgccccggccgcccccgcgttcagggcccagcggagtgagccagcttaggtggaagtgcgtccctccctccgtggctgaacacgtggggacagggagtacaccaatggggtttctgggttgggggcagaggacaagaaaatgactgtgagccagggcaagatacctccaccctctccctcctggcagctctccacttcctccaggagagaagtactgaccagagaacgcccgtggaggggcctgcagtacggacacctgctccatgcccggaagagagcggaaaccaggcacaccattcacaagtaaatgaccaaggaaccccgcccccggcccgcctccctccgtttaagaagccaatctgaagagcgctaaggccagacaccctcgagggagaatctaggggcagggctgcaaaactgggcttggaagttaggcagacatcgtggagtccgggtgcacctgctggagcacaaagcaccacttgcagacatcctgaccgcccccctttgaggttggggtggggactgaccccaaggcaacggggatgtctgattctgaatgt

SEQ ID NO: 65683 - DNA, 751 bp, Homo sapiens
caacctccccgagcctcctcacctcagctttttaaattttttttcagacagggtctcaccccgtggcccaggctggacttgcgatcacagctggctgcagcctcaacctcctgggctcaagcgatcccaggagctgtgggtaaatcgagtgaactgcactgtgttgaaggtgcaggattggagtccgggtgctgggggactcaccctctcgctcctggagtccagaagccaggacaccttggtcactgtcctgtggcctgcttcaccccagggccctccttcagaaattagttggagttttttttagtaactgctcaagtcagctatgagtcactgaccaaaggacaaagtggtgctgaacagtgactgccaggctcctatctgaggctcagagagcacttgttctagacgctttctgttgtcacagggaaagacagctcaagcaggaacacaggcagtgtgtcacccccaggcctcactccttgctgcacctgtgcagtctggccttcctgggctttgtccttcacctgctgtttgaccacatgtacctgtccacaaagcagtgactgtggggcagtcgcagggctgacaggtgcggcagaggcagaagaggcacccaagggcggcggggccgtcaaacactgacgcactctcctcctcccccagatgttagcactttaagaaacttatcgaggagccaaggttgggagggatcggctggggaagtgggatccccacctttaaatggacc

SEQ ID NO: 65684 - DNA, 667 bp, Homo sapiens
ccttcagggaaaagttctgagtcagtggcggagcagctcagaaagaatttgctcctttctctttggcatttcctgttggcttgaacagtgaagaaaaagccaaagtcggacccctacacacggcaagaacctcctgggggctgctgcccactggcccccactacccagagcagccacttctgcaaagcactcgccctcttctcccccaacggtgtctcttaaaaatgccaactgtgcagctgtgagcttggggtctggaagctggccaagccttctgggccaaggcaataaaaccagagttgatttaggaggaggggagatatgagtaaaaagcagaggctgtgactctgaaactgttagaacaggaattttttaaactgtctaactctaatgctggaggcagagctaaatcacctctgcttcccattcgattgtaacagatgaaaccgtacttcctcacagaggtgcagacactcaatggaaatgctaaaggtgaaaaaattaatctttctatcaacaagcttcttgtgaaaagctgctgcctacactctgcccataggacaaatgagggggacaacctgtgaccccgagctttgacccagtttcccaatcatgctctggtctgggaggaaagaaagcaagacacaggcgtctctttgcagccaaa

SEQ ID NO: 65685 - DNA, 403 bp, Homo sapiens
tgcagcaaagtgcaaaaacttcgcagtcagcttgaacacttttctttctttttttccaaatgttttatttatttatttttgtagagatggggacttgccatgttgcccaggctggtctcaaactcccagtctcaagggatcctcctggctcaacctcccaaaatgctatgattacagatgttgtaatcccagcactttgagaggccaatgagggtgactcacctgaggtcagttcaagattagcctggccaacaaggcaaaacccagtcgctactaaaaatacaaaaattagccaggcgtggtggtgtgcacttacaattccagctactctgaaggctggggcacaaaaatcgcttgaacccaggaggcggacgttgcagtgagccgagattgcgccactgca

SEQ ID NO: 65686 - DNA, 2059 bp, Homo sapiens
atggaggcaccaagagggcccctgactggagagatgatggaaccaccagagaacagccttgcaaataagtgctaggttctcctggagacccatttgtttgtgtgtgtgagacagtctcattctgtcgcccagggtggagtccagtgacgccacctaggctcactatgttgtccaggctggtcttgaactcctgacctcaggtgatccacccacctgggcttcccaaagtgctgggattacaggtgtgagtcaccgcgccgggcctggagacctattctagacaacacctggcaaaactgcagagactgtcacaatgctacagtatgaacattactcttcacccaatactgctaagcttcccccagaaatcccaaatcttccttaatattaaccaaaatgctcctgtccaatggtcagttagtttttttcccatcacatttacttttgggaagaaacttctcacaacttaacgagggactggttttctgatttgtcactgatattttttacgttaaggaggagtgtgtgacaattttttttttttttttgagacgcagtctcgctctatagcccaggctggagtgccatggagggatctcagctcactgtaacctccacctcccgcgttcaagcaattctcctgcctcagcctcccaagtatctgggattacagtgcgccatgacgcccggctaattttttgtatttttagtagagacaagattttgccatgttggccaggatggtctcgaactcctgaccccaggtgatccacccgcctcggcctcccaaagtgctgacatcacaggcgtgagccactgcgccgggccgacaatttcaatttcaggtaaaaagtgaaatcaacatcatttacaacattccttttaaagaggaattgtcaagttgtccttccaagtaaggagcaaagccggcaagttactgtgttttcattttcccaggtcttctggtggggagggagctctgtaacgtccccgtctgcagagctgctctccttagtgactcatgacaaggcacttgctgggaagcgggagagcaggaggagagaatcagagggagattaggataagaggtgtccctggctctgagaggggcaggactggctgggagtccctggaattagaccaggaagtctcctggagccgggaaacgggtggggaaggagggcggtttctcttcgccacagtccattctccctgcttagaaaggctcggcctttccctgcccagggcggggaaccggggtcgtaagtcccctggggagggacacggacgggaagcagccgaggggggtgaaagtccccgagaggggcccagccactacagagaaagccctggcgagagaagagaaaggggccgagtcgcggcgccggcaggcccgcctcccccacaggccgaggccggcaaatctgctgcctcatcccggcgtccccgctcccgcccggccgccgcactcacgatgctctcggccatggcggctgctcctgcctccgggctcgagccccgggccgccgccgcctgccgccccaagggcctcgcagacccggccgcggcctcagccccggccccggcctccctacgccgccgccaccgccgctccagcttcgcccgcccggctccgccagccgccgacgtcccggtgcctcgctcaatacgctcccctcgggcgcgaggccgggaaaccaggttccggccccaccaacggctcgacgcatgcgcagggcggcgccgctgacccgcccccgccatccctgcaactggaggaggggattttggaaagttgcgtctgagattacttctgctcgtcctcggaaacccaagcggcacaggaaagtccaaaaaggaagcaaagacgagcatccgaagtctcacccaaaaataactactgctgcgtattatagcgtattataattggggaaacagcattccaaacttctctccatgcacaggtaagtagagaaacaatttcaggaaggcaggatcacaccttcatgtttttttttttaagtattttttaaatttaacataagaaaaacaaacgagt

SEQ ID NO: 65687 - DNA, 1983 bp, Homo sapiens
ccctgaggatgcagacaaacatgtgactctccaggaagctggtgaggcccggtctacccccagcagtgaggacatttcagctctcctgtcattgggcaactggctccatgtcctcagctttttcacttcctgtgactttagacatgttatttcacctctctagactcagtttccccactgtgcaatggaagtcatgggtatgacacggtgtgattcacaagaagtgccaggatcagggcctggcgccgggtgtgcactcaagcacatggtggggggtgggggaggcactcgacacctccagctaagatggctgctctgtggacaccagtatgcgagaggtgtaaccctgtaagctcctggccagcccagcacctctaccagtataaccaagccccaccacctctgagggaccaaccggaagaatcgcaccaccctttatccaagtttccctgtcacaaagcccaggcctctcaggcccctctcatcccagcgtgaatgtcctataggcagtcttccgtcgctgccctgctctatctacccaggatcacggactgacacgctaccaacttcacttatttaactagtcctgcgaggggcatcatccgctccatgtccacggccagtccccagagcccaggagggctcgcacacaggcgctcggcagatactgagaaacaggaaagtggccgttcaccgggctgcttcctctcccaaggctaagcggcccctccacagattccggggcggggactcggtaagagccgatggaggagaggagcgaggggtccttcggcggcggccagcgcgcgatcctcccggctccgtccccacatgcgggtggaggggccggggctcctcccggtacgtgcgggcccccggacagcggcctctcggacgtgcccttcggcgctgccaagacccgtcctggtacttgccgagccacggaccgcggcggctaccgcccggcctccctcgaccaccctccgcagcagcatcgcccgcggacgggatccggcaacccctgaccgtgagcggcgggcgctccggccaatcccggaccttcaggaagtcgcgccgctccagccagcgtgaggctgagcgcaggaagcggaagtgccgatcggtggggcggaaccatgcaggaaggcggaagtggcttcgctagggagcctcccggcgtggagatggcgggagctggtcgcggagcagcggtgtccagggtgcaggcgggtcctgggagtccccggcgagcgcgggggcggcagcaagtgcagccgctggggaagcagcgcccagccccgtggcccgggcttcgcaggtgactgcgctgccccgcgaggccgccacacttccccagagaaggggacgccttgaaggctccgcccgggaccccctagggagcgttcgctcggaccccttccccaggtcgggctcagtgccctcctctgtctgtgcccgcggcccacgctccgccaggatcggttgaatgaatggaggcgcgagcgagtccttggttttgcctttcccgcgtcccagtgtcccgtctttgtggttctggacgaggtcagggcggaaaggcctcctgggctttcggagtgcctttcggcctcgcgtcccgtgaggaaggggttcagggacagccactgagtgagaccgagaggaaagatccctgctccctggactgctggaccggctcgcaccacagaagccagatgtggcccctgtatagatagattctttttttttttttttttttgagacggagtctcactctgtcgcccaggctggagtgtggagtgcagtggcgcgatctcggctcactgcaagctccgcctcccgggttcacgccattctcctgcctcagcctcccgagtagctgggactacaggcgcccgccaccacgcccggcaaattttttgtatttttagtagagacggggtttcactgtgttagtcaggatggtctcgatctcctgacctcgtg

SEQ ID NO: 65688 - DNA, 2510 bp, Homo sapiens
gtagacacacttccctaaaggaagcccatataggattacaacccaccaggagagaacggcagtttccatagtaactggaccagatggggcccatgcaccccccaagctcccggatggtgatctttctctgtgccacgatgtcagtaagattggtgcccacctataggaaaaaccacgatgcaaaaagaacaatacaaccgctgtcccgttgtgaactcctgaagagcaccgtgcccacaccttacacggtggcctgaaccccgcagacccattctccctaacgcaggaacggcgagcagggaccgacgcccatcagtagctggactcgctgtgggggcgaccagccacaggaagccgttgcgaggggagaggaagtgcccgtggagggcggcaggccccctcatcccgcgccaattatcctcagctcgggccgtcccccgctcccgaaggctggccttaagtcacgacctgacccgctgcgcctcggcgtgcacttagaggagcccggagctcttcgccaagcgcagaactgaccccccgcaactccacccgcgggggcggacacctaccgtgggccgtgtcgggggcggctcccccaggtcgcctttcccatcccgggagctcacctgtgcgaagcggtcaaggacccgagcagctaaagggtgagtccccgccccactccgggtgccccccgcgccccggtcccgtccccgcgcggaaggatatcctgcagccgtttcaccagcagcgtcttcccgacgcccgtggcccccagcaggagacacattccgtgcttcgctccacccggcacccgtagctcggcgccgcggctcaaggcccgcccaccggccactctcattggatagttctcaccttcggacttctcattggttcttagggctcattgttccaagggcgcgtccaattagcgcgcagcgttagcgggagagcggaagaccccgcctcctcgcggctctagggccggcgcggtgacgtgcgcgtgcgcgcactggagggaaaaggcggaagcggaagtcggggggcgcgccagctcgtagcaggggagcgcccgcggcgtcgggtttgggctggaggtcgccatggggcgaggcagcggcaccttcgagcgtctcctaggtaacgcgtccccacccgacggctcggccttggtcagcccgcagcctccgcccggcgctgagtcagcgcggccccgagggcccgaggggcgcggaccggccgccctgcccgcctctccccggcccgctgtcctcccgggttcggagccgccgatcctggaccctcggcgcggccgtggggtcggcgtccgtcgggcgttggcaaatggggctctgcgagggtccgcgcagggcgccaggggcgctcggcgacctcgctcctccgcgggcccgggcattcggccgatttcctcttgaccgacgagcacccggccgagtgggccacaaggcctgagtcatgaaagtgggtgactcagtcggatgttaggctcgcacttgggcttctgacccaaaacactgggcctcgaagggtggagccggcagtgttctctctgggaccttcgagctctcttgggggctgcgggtcccagacccaccttttgttcccacactggcttcgggaagtgcctaatggtttaggaaggcgttttctcacgtttttggaggtgaaagctgatcctatctgagcctcctggaattgacgcgttttgggagggaaacgaatgttgatgtgcacgtgcccagcagcacgtggaaaatgcgtctaatgtttgggggtaggagcttgggtggtcgaatgggctgcccaagcttgcctttttgtcaagtagggttttcaaggagacttcaagtgagacaccttccttgccaagggaaccagcaagcagactgagtatctcagccacacaggtagttcagtgcttcagggatgaatccagaggttaactactgaatcagtatagaaagtggacgtggcttggcttgttagatcgtttctgtatccgggaaaggcgatgtgggcagagctggagctgcccccccagaggggccagttgttggagacagcagtgatgtggtatgatgacaggtatgctggcgagtcctccttggagccccgttctgcccttatttccaaagcacttggcttggagcaaggggcctggagtctacactgcaggcctctctagcccttgcccaagctaaggtcccattgaaaccgggagcatctgggcgaacggggactccaagggacgggtgatagggttctttgttgagaagcagccgagcctgatgtttaagagtgaatcagcctctgtctctggtgagctgtgtgactcacggcagtgccctcgcctctctgctgagtgtctttacctcgctcgcgggttgtgggagggcttggaccagcacctggtgtgctcttacgctgtttgctgcttccctggggaggatggcacttccctgcccatcagcacgctcaggaggattctgtca

SEQ ID NO: 65689 - DNA, 2539 bp, Homo sapiens
gcctcctgggttcaagcgattctcgggcctcagcctcccgagtagctggactacaggtgcaccccattaccatgcctggctagtttttgtatttttagtagcgacggtgtttcaccatgttggccaggctggtcgtgaacgcctaacctcaggtgatccacctgcctcgggctcctaaagtgctgggattacaggcatgagccaccgcgcccgacctgcatcaacgtttgctcagggggcaggtggtcaggctgatggcccagctgcaggcagggtcatttccagcctgcccctccctgaggctgcgtgccagggttcatgtgtgccctccgcggctctgcactgaccccgccggtagctggggaggagtttgggcttggcgcctccttcgtgtagtggctgaagcttcccgggtgctcctcattcctgggaagggagtcgggtgatgggaacggtgggagctcagcgctccgagtctgcggccgggggccagcggggctgaaacgcgcctcctgagtgttgaaagcggcaggcgccggcctttgcacccagaggccagggcgtctcactcaccttcacatccaggcctcttaggggagcgcggctttggcttttccaggaaggaatggactccaacggacagggaaagaagaagtgtggagagacgggcaggataagcaggcactgggcccaagccgcccttggaggctctgcctgttctgatctgaaggcggaggctcagccgtgctctcccaggaagccacctgggcgtttggggctttagctaggaaagaggatgtcgcctgcggctgcgaaggcgccaaagcccagacctcgcgcctccgcccgcgacggcggcactgggggcccggagcgggcgggagacgtggattactgcgggcttcggggccctagcctcgaccgcgacgttcgctcgcatcgcgtacggacagaaacccgtgagcgctgaagaaagaacacctgaatccggagccccagcccccgtcgctcgtttgcgcgaccccaaaacctggcgggacgagggtcgcccgatgtctagctgccgccacagacgacgcttttgcgtctgcgcagcgcgccgccttgtgggtaatctcagggtgagacgaggctagcgcgaggtacggctagagcgtcatttccggctcgaatgcccggcagccgtggcggctagagcgttcctccccagctcgaatgcccggcggccgaggcggctagagcgtcgcctcctcccggggaaccgcgtgtgaccttccagcccgcggaccgatgctgccggcggccgctcgccccctgtgggggccttgccttgggcttcgggccgctgcgttccgccttgccaggtacgcgggatcctggggcggtccgggccggcaggcgggttagggggcagccgggcactgaggggtcgatccgggcgaggagggcggcggggccggcctccctgcagcggccaggccgggcttgggggtcccatcgggggcgcggggaggaggcctcccggtgcgcacgccccttccctcctgggccgtggaaagcgccggggtcggccccagatgaccttggacgattccctgctcctcccttggcctcagccttttccgcagcaaaggcccatccgtgggtgcggcgttttgcggccaggggcccccatgttttgggaggctttgcgcaggaagatgcacctaagtaatagtttcgccaccgctgggttgatgtagttcattcaaaccagaaacttgaggtttgagtggtatggctgcaaataaacacgtggctttctaaggctctttgaagaatttaaagtaacttgcaaatcttatcaatacggaccccttgaggtctgagaaccctggactgggaccaaggagctaggtaatttccggccctagtgattaccagcctgagcttatggcacccaccagtcccccagttgtcctgcccctctggtttctgcagccccttccattccaggactgacaagtctgttttaattgggggtgggggctaggcgacaggtgccatgtgtctgtgccgtgcgacatatgaggagcagcggccatcagaggtgtgaggccctcgctggtgcacccctggataacgcccccaaggagtacccccccaagatacagcagctggtccaggacatcgccagcctcactctcttggaaatctcagacctcaacgagctcctgaaggtatcgtgagagggtggcacagacccaggggctggaagtttcagggcccctgtgttttgttcctggtgtattttgggagtttggtaaattgtcaaaagtgtgtttgtccaggtgcaaggtccatgccaggctagttgcccctcctcagtaggttccggctggtgtgagggccagctgtggacactgttctctatctctgcagaaaacgttgaagatccaggatgtcgggcttgtgccgatgggtggtgtgatgtctggggctgtccctgctgcagcagcccaggaggtgagtcctgggcagaatgaggcatttctggggt

SEQ ID NO: 65690 - DNA, 4272 bp, Homo sapiens
ctgtgggcacagccaagtctgcgggactcagtcaggtgtgagcctggatggccccggacaaggaagcctgtcctcttgctgggaaatttccgttaagatcgggccacttcccctgcttcctaacggttgagtctgtttgctctgggccttttaagcccagcgtgatccctctgagtccctgcggtgcatttgcgccatctccacgcttcctgttgagccccagcccaggcttggtgcgggcagtgctgcactgcactctcctggttgcctcctgagcacctccacccgcttccccaccaggcgtggctgtgttttcacccccagtgtccatctggcacccttctcgattgccaggtagttacggtctgtgtgggcaacacctgagggacccaaccaaaccaaggtccaggacacacttccgggcaggggtaccgcctctggttagctgctcactccccagcccaaatcttccgctgatgacttctggggtcagaggccacctaagggtctagaaaacagtctcctccagttggctacctgcctacgttggggttacggcccaataaacccacagccaagctgaaaatcctaagtgtgcgtcttgcgcttccgacacagccagggcatcgctggatgcgcagaggcagggctggacacattctggtgcttgaggggttccagggaccacgagttgtttttccggtgctcctcacccttcgccctggagggtgggggaggccggacagcagtgaccaagctggagctgcaggtcttcatccctgtggcccagccctaaagcagccttggggacttaaatttcattttgcccagcaggtgcacctgggccaggaacacaccagcgcctccttgttcttcgcagggaagtggaatccaagcaggggcccagatgcaggcaggcatctcctgggaacaagagccccagaatccaccccggggccccacttccagggtggttgcctggggcgtctggtcagagccagaccagaactgagcaggagcttccgggcatctgtgtgtgggaagggagaggcaagtccttcctaaccgccttttttcccagttttcattcagtctggccccaagcaggttctttttttcttttctttttcttttttttttttttttttttgagatggagtctcgctctgtcgcccaggctggagtgcagtggcgcgatctcagctcactgcaacctctgcctcccggattcaagcgattctactgcctcagcttcctgagtaactgggattacaggcgtgagccaccgcgcccggctcccgaagccggttttctgttctcttgcagctgggccggggctgagccctcggtgggggcaggggttgcagacctgtggacgcagggcccacgccgcacacacgtggcccccgccaggtgactcacgagccagcgcctgcgcggcggggtggccaccgggtgcaggttcagggccaggggccgggcctcctggggattggcagggcgcccgccgcggtcccatgtgcctggggccggtccccgggcggtggccttcggccctgcgctccggcctggagaagggaggacgccaggggcccgggggagtggaggcggccacgcagcagccccggagcacccgcgcgtccgcaggccgggcccaccgcgctcggcgcccctcgcggccgctttaaggcgccgggcccgcctcaatcgcagggggcgtggcctagcggtcccgcccccggggcgcgcgcgcgcattggctgtgcggggtgcgggcgcgcgggcggcgctttgaaccgggcgcggggcgcggggcgcggggcgctgcggccggtacacgccggggtagggccggggtcgggttgtggtcgggccgggattgggctctcctgggccatggcagccgaggcgcgcgtgtcgcgctggtacttcggggggctggcctcctgcggggccgcctgctgcacgcacccgctggacctgctcaaggtgaggccggggcccgggacgcggggcggatgggaccctggcgccgccgagacgcctgcaaaggcagcagcccggccccacgcacccggggatcgccgcgcccggggctccctcctggagagcgcgaggaggcccccgacgcccggatggccgatcccgggtggccctccagtggtggccgccgagctcgaggcctgcagggcgcagccgcgctccccagcttcccagccggcttcccagttctcggcaggtggcgatccagccccagctctacactttaatacctggtgaccttgggggagtcacttggcctctctgagccacccacccccatacattcaagaacgctccttccgcctagttagaagttgtggggggagttctgtgaggtgcacaggtgttggcatctagagacgtgctggctgtagcatacccagggtgtgggccaagccgccccccacccaggggtgtttagcacaccgccggacgtgtccctgggcaagtggggtgacccgatgccccggctttgggctgcttccttcggagagctgcgtgggcactggaagcgatgttaggaccagcacacccccaggagagatgccaggagaccctgcacgcgtgtggtcctggccctatgaaagcgggcgtttctcagcacgagaagcagccaccgtttttttactttttttttttttttaatgcttatggggcaaaataagacagagctctccttgtttcccagggacagccaaggggcgttgttttctgaccgtgtcttgccacagagaacaaagaagaaagggcctgaggctttgcacagtctgcccagcaggccctgccctgtgaacctggctgtggtcactgggcagccgcctgtctaggggacctttattttagcagcctgtccaggggacttgtattccagcagcctttgaggggactggctttactaatgagcaacaatgctggtcgctgcgtgaaggccaggtgagcagatgtgggcgtcttggggcacctgagacctcactggtcctgggagaggccttcagagctcccaggccacaggcagccacggccagtgagatgcagccacagcgacaggaaggcgctggcatgggcagaagaagcgagcccctccttggcatcgggctcttcctttcctcctgggcgccgcacaggtgcccctcccccagggcctctcccacgttcatctgggtgttgaaggcgggacctgcgtgctgctgtcccttgtccggggtctgagccccactgccccttggccctccccaaccaggcgctctctggctgcagaacaccgcctgggggaggcgggactgccctctggcctgggagggcgggaggagccagctgctggcagcatatggcgctgtggtcagggtgtgctcctgaggactgctcaccaggcctctctgcctggccgtcggaaagatcttttaaagcttcttgagcactttgtcccatgtccctacagtccctaccgtcgcatctggccgggacgggggctgctacctgtgtggcccagtccctctgttctgctgggctcgcacaatgggaggcccctctctgtccccacccatctttgccgacccctgggcgtgcgttacggggccgcgcacgtgcaggtcacactgagcggcggaaggacttctttggggtcagtgctgggggtgggacccaggagctgggatcctgggccaggtgctggccttcctgtctggccctggccaatccccctactgccgggagctctcagctggccaggcgaggaggcagaggtcctgtgagtggtggaggccaacagaatgggaggttgtcgggctgacagcccccgagtgcctgcccacagctcctaggtgctttgcagaggaggccgctatgccctgccgccagccacaccgtccccttgtctgctgctgagctcctgctgcctttcaaggccttctatggctacctcctcagtctcccatggtcctgcaggctccctcgccgtttctgagcggccataaacgtttgtccctcttgagacgtggtgtggtggataaaaagtagggctctggggtctcctcgctgggcccaaatcctgatggcaccagcgggtgcgttacctctccatgcctcagtttcctcatctgcagaaggagaatggcgagcccctgcggccagtgcagccaatactcaggtggtacgcggggcgctcgcggggctcgcggacactctcagctccatgtccactggtgtggttgctgttggaaagcagtggtg

SEQ ID NO: 65691 - DNA, 1058 bp, Homo sapiens
ttgtgaagagctggttttgtttgaactggggaccagtgggagctctgaggtttgtacatggtacccagtgcccaggttggaaattcacacccagggagtggctgggtaggttcagggggaaggctgctgcttcctgagaaaccaggtggttcagaaaggcagctctagccagcaaatcccaaaatctgcagatggagggaccacattctcagagctgctttgatgggagccctggaggaagcggccatcatgacagggcaccggggccaccccagaggctggcatcacccccagcccctccctgcagtcagccccactgggacagtgccagtcaggggatgaaagtgcccagtctggtttggcagggccaggcctggcagtgggccaccacagggcagggtgcagagggtggggtgggagaggaggccagtgggcagggctccttacccaccctccacagaagccacagctccccaggtccagggcacaggcccagggtgggggtaggtcagaggggatgtcagtcctgtggtttcatggcccttaacccacaggccctgcaggccacctggtccgaaggccagaagccagtcagtttcacgcttgggggccagggagagatctggaccctgctgagtcagcatttcagcagtcacctgctgagtcagcagtcatttccgtgcttttttttttttttttttttttctctccttttggatggatttttgctctgtcacccaggctggagtgcagtggtgaggtctcagctcactgcaacctccacctaccaggttcaagcgattttcgtgcctcagcctcatgagtagctgggactacaggtgcacatcaccaagcctggctcctttttgtatttttagtagagacgaggtttcaccatgttggccaggctggtctcaaactcctgacctcaagtgatccacccccttcagcctcccaaaagttctgggattacaggcatgagccgccgcatccagcctccatgcatttttttaagtgacttcatagtttacaaaaagttacacaataatcatttattg

SEQ ID NO: 65692 - DNA, 866 bp, Homo sapiens
aaataaagtaataaaataataaaataaatagtcacgtgatgcttcaggtcatctgacatcctgccccccaccccttagtaaaatgcctgctgttttattcaagcagctaccaccccaccccagtccttgggcctcaagggcaccagggcctgaccccagctcccagcatgaatagggttggtttaaaccagtcggcatggcccacagtgactggtttaggcatgggcctgtcacccacactgggccaatgatatgtaagatgtttattgtagcttccgggatggaaacttctctgccagcttgtgggttgggcaaggacgacactccgggccctaccggcggaagctctgctcctgtcgtgcgtggaccacgcagcaaatggccttggaggctgctggcagccatcttgtgaccatgaggcaagtcagcgcaggccgaagctgacgacgcgaagacaatgaggagagggagaaagagccgatctttggtgtgtattggctgtgacgtgctgccgcctctctggagaccgggttcattatacttttcctggtatcttctcatgtttgctctgctggctttgggcccgagttttacctcctgggtgtattgtgtgtgcctgttttgtggtgttggttttgctcctgggtttgttgacccttgggtgtctgctcttttttttttttttttttttttttgggacagagtctcacgctgtcacccaggctggagtgcagtgacctgatcttggctcactgcagcctctacctcctgggtacaagcgattcttctgcctcggcctcctgaatagctgggattacaggtgcctgccacggctaatttttttacttttagtagagatggggttt

SEQ ID NO: 65693 - DNA, 1082 bp, Homo sapiens
agccggaggggagcagggctgggtgtgtcttctctggctgcgtccctgcggccacaaggcctgttcttcctctgtgccccgcctgccaaggacccagccttgtgaaggatggatgaatgaatcattgagcaaatgaatgagtgtgtgaacaggtgagtgaggagaagccggcagaggcggtggggtggatggtccacccggctggccagcggcctgtcactccctgagtggcctctgggtggcagccatgtggcgctgtcggctcaggaaggcttggtgctggaatggggctgggacatggccagccaggcagggtgaggagggtggcagcgcccagtgcagcctggacagatggggttctgcccggcagggctggcatgggggcttctttatgccaagccagccctgggggaggcctcggctgtccagggtgaaacagggtcagggtgatcaggctcggtttgtgggggcggcctgtcctgctggagggtcctcctcacccaaccccagcctgctgcaggctgtctgcaggggagatggcaaagacggtgttgtccagtttgcttgggacatgaatggtctggcaaatacgcaatgacacagctctggggtccagatccggcccaggcggccgcctgacagaggaggtgcccacagagcttccgtgagagggcagcccaggcccaagcagcactagaaccccggctttgggcttttggggacttagccggccccggggccaggggtaggatcaggtttccacaggccagacggccccgcacagtcaccaccgtcaccgtcaccatcacccggtgctgggcgggcaccatgtggactccacttggcactgggccgatgggcggatgccagagccagagcaaaggcctcgttagcccctcggggagggcacggcagggccgggcgactcaggagggctgcggggtgacgtctgattgagcctggaaggacaggccgaccacaggatggaggccacagcatccttcccggagtctgaccccacgctggagacagaggggctgggctgggctgggcaacctagacccgggagcccatctgtccag

SEQ ID NO: 65694 - DNA, 1448 bp, Homo sapiens
cccgccctcagggcacaaaaggggtccagctctattttccagggacaactccagacccatgatcccagaagcttggggcctgcctttatcccagcacccaaccccgagagcccccagtgatggaactggtgcagcggccaccactgcccggacccgggagcaacaccgatgccacacctggcggcaggaacagggcagtgatgggctgtctgcaaggggtccccccttccgcagcaggtctcttggctgcagctcagccccagcccctgcggtccccagagtcccggtcactgggggctctgcaggccacccttccaggggcatccacccacccccgagtccgggtcaggcagaacccagggcccgccgtcccctcctgcaggctcaggacctcctggggggagttccctgtgtgatgcagagggcacgctcaccctgctgggaaggctcactgcttcccaaggggtctgagctttactggcacctcactgcagtcccttccccggggagactctggggcttcccctgtgggaccaggcacccggaaaggcagctctgtccctgctgagtcacgcgcaccatcctgcagacgggagggcatcttcctaggctttcctccagccaagagtggagctgggacctgggaacctccctggaaccacccctgctctccggcaaggcgttccaccagcctgtgtctacacacgtagccccgcagagcaggcttcgtgatgcctggagacacccacttccccttccttctcctgggacttctcagtcacacgggctgagctgcagagggtgcgtgacctgggctgagctggtctttggcaactggggactttggtttgacggttggtggaggggagactctcctaacttccaggggtgtgagtcgcaggcggtgcagatgataggacagtggccgttgcctagggctgaaaccaacacagcggtgggcggagcacagggaacttcggagagggagcccggcccccgagtcagctgctcctgcgggtgctccccaaatcatctagtgatgtgatccatttgtctttccagcccatttcagttgagtttccaatgacttacaaccaataatatctcaactgatacttgggctcttcaagcactagaattgtggtgacggcaggagcgttaacacactctggggcggggcagggactgcagactgagcgggctccaggtgaatgccagcttccagccctgctgagccaggctgggacgaacatgctcactaggtccgtctccacctactgtgggccagcgctgcgtggctcactccagggaagacagcaagttggctcagccgctgctgtgtggctgctgctcccctgagtttatggctgtccatggcatctgccagggtccatctggttttttgtgggaattgtgcccgtgaatttaacaaggattgatgggcattg

SEQ ID NO: 65695 - DNA, 1591 bp, Homo sapiens
gcgcgcccagaggacggcggggagccaagccgacccccgagcagcgccgcgcggtgagcacctgggccgcggccccgaggggacgttggggagtcgacccggtggggacagagaccgcggggcgggcgcggcggggccgggggcgcggggagcggggagccggccgggcggtctccggggtccgggctggtgcgctcctcagtcccgtcagacacccccgttcccaaccccggctcggacaccacccggtcctgcaccgtcgggcaggtccaggggtctcagcccctcccccgttctctggtcctggggggcgcggctgggggcgggggtgtcgctggccgcctggcgccctgcggcggccacactgcagcggccacactccccactcagggccccgggccccgccgccctggggagcgcacaaagcgccgcggacgcgtccccgaggcgcggggtctcaccagcgctgtctcccctcggtgggctcctgccccgaggactgcccggtggcaccggcgcggcccaggatggggtgaggggtgtctgcgccccgcctggccgctcctcttccgcggcccacactggcgactttgaccccggcaagcgggtcactgccctgcccggctccggcccccccggcgccccaccacccggccgactcggccaccgggcttatgctccgactctgaaccgactgaccccggccccctcggcgcccgcatcctccaaggaccggccagggctgctctctgcccttggtattggggacatcagggttggggggtctgggtgcacccacgcctgccccgcccccacggggtgagggcgcagggatagggctttgtcaacagcctgtggcccctgatcccgccccggtgccctgaccttccactaccttctctggtttcacaaaaacatcccggctcccatcccggagctcctcaaagcgtctgagaggccccttgcggacgccctgggagccccgctgccttcctggaccagtggccgctccacccatcctgggggcccagctccaggtctgcgggtccctcagccgcccccagtgggaatcggtggagcctgacgcagccaggagcgcccaagagtcacgtgttctgccagggaggacatgggacaggacacggggtgccagccctgcaaagcggccggggcagtggagctcaggtggccctaagccctggtggtggctggtgtggcccggcaggcagctgtgggagggaggaagggggtggcatgcggtgggggtctagagaaggcgggcagggcacctcgggagcccccccattgggcacctcgggaaccccccacattgggcacctcgggaaccctcccattgggcacctcgggaaccccccacattgggcacctcgggaacccccgcattgggcacctcgggaaccctcccattgggcacctcgggaacccccctattgggcacctcgggaacccccacattgggcacctcgggaaccccccctattgggcaccttgggaacccctcccctaattctcagctgactccaaggcctgagaaggagcttggtcacctggactgtgaaggtggagggtg

SEQ ID NO: 65696 - DNA, 1367 bp, Homo sapiens
aaccaaggctgactccaacctgctcacagccacggtgtagcaatggcctggccagggctcaagcccacccctcctcctcctgggaatctgggaaccccatgtttgagtgggccccccactgcaggacctctgctggcccttgcagctaccactgtacagaaggtgcacagggcagggccttgtccccaagaggctcggtgagtggaaggcacatggcatgaggaccgctgtgagccgcccgcccctcatccccgtggtggtgttccccaggctgcatcggctcaacagggggaggcagcctgggtcaccctagcctggtgggcactcgaaacgctcctcgaaggactcacaggccccatgggggccaggtaaggccgtgtgtttacagggagttggctcggggctgggtactgctgtgcacactggctgccaggcggcagctgggctggtttattactggaacaccctcccctgctcctcctccccggggaggccagccctgcgccagcatctcctgcaccagcccacccaccaggaggcgcctgtggggccactcttctgggaaagcgtgttcctggaataaattctggtttcgcttccaacaggaacaggaatagagctccctgtctggcctgccagggcagcttgcaggtttgaaggtcaagtgcacgtggctctctcctgggcccagcggcacccccttcttctggacaggggaggagccagctcctagaggggccacagtgccccagagggtgggttcagggtggtgcctactacctctgcggccccctgggcagcccctgtggcagaacaagggtagtgatatcaggcagcccagcctctccctccagaatgccctccctgccaccacctgccctaggagacctgagcacgcccagtggcttagactgagaatttctgggcttgagaagccttcgccatgatctggggtttccagccctgcccgggagctggctgtgcatgtgtgccgcaggggcagaggcctgacagaccaccaagaggccacgcccagtgccgccgcctttattcacagaccctcgagctccacagccacacagacacttagctttcagagggcacaggaaggaaaagggacctggtgaccctcccagcacaccccagagccaagacagacccagcagcagcacctcagggtcagcctgggtgcccctgcccaggggccactgtgaccgcagacaccaggaggccaggcctggttgctggggacccccttggggggcccggcagtatcctaggcccaaagagctggtgccatcttgaagctgattcagggaagaggccaggctggacggtaggggtaggtgtgagaagctccccagcgt

SEQ ID NO: 65697 - DNA, 2014 bp, Homo sapiens
acgaggctagaaaatgatctattgcccaagcaggcgcacgaggatacggctgtcacagctgccacactggcacctcgtggtcccttgaagaccgcccagggaaagcctctaagcgctgcaccacctcctcaccctctcccctgggtggtggcagcaacagcctgagcgtgtgcgccctcctccccatcctgatcccactcaaaccacaacctcccctgactcgccccaaatccagccctgttggctcttccttcacgtcccacttcccaccctctctacacgttctcgccacatcccacccaaagtccactcactggtccctgtttacacctcagggcctttggtcaagctgtcttctctgcccaaaactatcctactcatccttggggatccagctgaaagaccaccttcctgcgacggctacccaggggcaggagggagagaagcacagcccgtgccccgtatggctcccgcccccgcggtcacaaccaccgcccagtgagtgcctagaaggcaggcggaggccccgttctccccgttaggcccagcatcaccgcccggggagacgggaaagagggcaaggccgaaaaatggacagaaaaagaatgcggacggccgggcccgcggcgctccgagaatcggaggcatcctcaggcacggtccctccaggagaccgggaaagcggggctctgtcagccccaaagccccgacggcggcagaaggctggcccgctgcgagcgtccggcggcgctgggtccccggcacctgcccctgcctgggcgggaaaggcgctcagtccgagccgcgccctccccacgcgcgctcccaggcgccccgcgggccgcgccctcctgcaggtgccgggcggggaacgcgggcccctccctcggaccccggctgcccggccactcccccgcgcccggccccgcccggccctgcagggcacccgcggccgcgcggcgacaccagggcggggcccagccgcgcccgccccgccccgccccgtccccgccgcccggcgccgcacccgcctcacctcgccccgacccgccgccaccgcctcttccagctgggaggccccgccggaagtgacgccaccgcgggctgcacaggcgcaggcgcagcgcgctctcacgtgaccgcccggctggcggagggcgggggcggccgggattcccgtgcggggttggggctcgtggcggaagctccggacctccctggcccgaacggtgagcgccgccggccactgggagcggccagagcccagtaatcaggacaccaccacagggaccacgtgtgtagacccaggccccctcacctgggagtcacgtttattgaaaaagtaaaaagtgtcacagtaaaaaattcacctggggacaaagccaggcctaggaggggtggcggggtcgtggagggacgggtccggccgcccctggcccacgggtggggcacgtgctggcccatgggcgacgcgcggcttctccagggaggcggccctgggcgcgggggcgggcgggcaaagctggctcagtccatcgtggtccctttgaagagctccaccagctccttgtagtccgggtcgatgaggtcggagggcaggtcgccatcgtcgttggttgcatccctgtccgctcccagggagataaggtacctggggtgtaaaggtcgctctggctgaagcggggaggagccaggagagtgctcgccccaacccgggtcagagggccagagtcctggggtcacctgtgtgtcccccaccttggggtcctaaggtccgggtagggtgaggaggaagaaacctgaccctttggaagctgtggccagcttttcaagttggttctattgaggacaaaggcagaaacaggattccagaagcctctagggtttgcagggttctttttttgttttttttgttttttgagacagaatttcgctcttatcacccaggctggagtgcaatggcatgatctcgactcacggcaacctccacttcccgggttcaagtgattctcct

SEQ ID NO: 65698 - DNA, 1199 bp, Homo sapiens
gccagaagggcccttccctccctgaggtcagaggccccccggggtgtggtacatagacccagcaatcactgttttaggctccaggccggtggcttcctggcacctggagagacagagggttgggaagtcccaggctgctaagccctaaccacctcctcccagagccttcaaagtctccccactaatccagcagcccagtcagagaggttttggacactgccccaccacctcccagccacagccgagcccaggaatgtgctcatcagctgcctctgcaaaacgggaaaggtatcagtgactccctcccctttccagagcacatgacaccagtgctgcgggcagctgtgccatgtcccaacgttctctccagagggccggctccccgcacagctggtccacagggtcactgcaccccatcccacggccagggagcacaggcacaaatacagcccacccctttagctgtgactcaggacagcctccctcagagaccctgcaaggagccacagccctcgggcctctgcccacatcctcccacggcacctccagatgccgttgcccacttttccgtgagtacgcggctcactgtgtcgcaggacccaggcatggcacacaaaccctgctgaggccctggagctgaactagccagaaaccagccccagcacgggctgtctccaagacccacagagctgggggccggggcagacggcagcacccagactgccgagctggtgtgagccgtgtggggccaaggacatgtgggcaaaccgggctggctggtgctggcgacgtgttgacacaggtcctcgcggcatgctggccggatactccacagcctggagcagaggcaggaggagccggagcggccgagtttgtgagggcctgtggggccggcaagggaggtagcggggagaacgggagaaccgcacccccggcgaggcctggtctggcttgagagccgtctctggctccagcagctgcagccagcccgcaagctcgggaactgggaggacacccgggaatctcggcagtgcggaagctcctactctaggaagcacatcaggatgtgaagttggcggggctcacagagtcacaggcagggctcctcaaggcagcctggtgagggtcgtttgttccatccgaacttctgagggccgagcagcctccctagagctgcagctccacccccactcccacct

SEQ ID NO: 65699 - DNA, 1152 bp, Homo sapiens
tgttgacctcctgggatcaagtgatcctcctgcctcagcctcccgagtagctgggactgtaggtgcaaaccatgcccagctaatttctaatttttcctagagacggggtctccccgtgttgccccagcactgggattccaggcgcgcgtccctgcgcccagccctgccctttatcgtgtgaagggttagtgataagcagggccccctgttcctctcacccatccttgaagcctgagtccacctgatttctcgtcactccacggcggggatgggagggaatgaccaggagtctgagcatcacatggggctgggtggctccacccgtgtccacatccagggtccagaatcacagaagccccatcagagtccaggtaaagcagcctacaggcagggaaggcatcctccccgggaatcgcaagcctgcacagctctgctggggagactggggcctgtttctgcatctgcacctcgtcccaggggcgaggcctctcagcaccagtaaccccactaaggcctggcagatggccttggcgtccgcattccagcccagctctccgggcttggtgagatcataaacccgaggcaaggacaggtggtaaaatttcaactttatttggccaatgtgttcaattcgattgtgaaatagaaatgcctgaagaactgtcagcgtctgattcagctccagcatccttggccacctccccacccgggagtcaagggtcgtggttctgccttgaacaggccacaggccgtgctgtagagaggccagtggtcacaatgagcccacgacaggaggaggagccctggcttgagggaaggggaaggcccaggcctgtgccgggccccagggctggcagccaccagctcctcttccaggcatgggggacaccctgacaggatccggaagtctccatttacccaaaaatgcaagagccatgatcagtcatggcgacactgcaggcggtactgagtgaccatgtccagtccggctccgtccctcccacacgggggacaagcttctccgaggaggcctggccaaggtggaacaaataccctgatgtcgaaaaatgtctaaaaatcccacagacggaattttcaaaaagaggagaaacctcccgcgggagggaggcagcgagactccgaacacggtag

SEQ ID NO: 65700 - DNA, 576 bp, Homo sapiens
gctaacagtcaaaagcagttctgaggcggctgtggcaggagagtggccagaaagcccacagctgaatgcgaagaccaggccacaggcatcagcgcaacaccccaacttggcaaagctgcagaacatacctattgggccaaaggtgccaggagcaaggttcccttaacgataaggagagcaacgccaccctctgcagaccaaccccagaactaacctgggcagagctgcctggggccactcaccttcttaaagaggacaaccccatctttgtcgagctggtatttggagaacacgtcactgttggaagtgatcccaaatggtatgtcatcgatggcctctgctgcctgcaaaaactgcttggcagagtccgactccacgtcctgaatgaggagggagaagcagaggtcgtcatgatcccgcagcaccaagcagtagggcagaccctgtagagcccaggccaggggggacacgtgcagaactgccagctgcaggctgtggacccctcctcaatggatgacggaaggaaggaagactggaatgctctggtctctaccttgaagaagccgatgacagcca

SEQ ID NO: 65701 - DNA, 3633 bp, Homo sapiens
ggttttatagacgagttttcttttgccaccgtcactgatctggctacacaggggctcggcctccactacggcagcttcagaggcggcagacgagcagctgagggcccgtgctacagacggagcagggcgggcttggattcgaggtctgctaccgacaggctcgatgctgttactcagctgctctaagcctcagccctttgtctgggaaaagcccgcctcacagagaggatgcgaggagaaatcacgcaagcacgtgacgcggcagctggcacgctacacacgacagctagcaggtgtcaccccgagagctacagccatgctgctgctcctaggaacagggggcagcacaaacagcccatgtggccagaaaggcaccagtctccctctcctcgctggtcagtctccaaacagacctcagccagccgcccccaggatggcaccagacaagacaggttctccattcgaaggttcttccaggatgaaaactcctcacaagaccctcagggcacaagtggacagagaacccggcctgaggaacgggatccctccaagcctctggaacccggcctccccaccgctcagacagctgcccctgcccttccaagtcggcaggccagtccctctctaaagacagttcaagggcagtgccacagccacacctgtatattccttgggggaagccgtgtctccattcctgaagaacttgatggtgggatagccgcgcacgccgtactgctgggccaggtcagactcctccgtggcgtccaccttggccaacctgatctcggaaccttctgccttcagcttcccagcggctttggcatactcaggggccagagccttgcagtggccacaccaaggggcatctggaagcggaaatgagatgctagaaagcagccttgatccctaaagcagccttgatccctcagcagtgcttccctttttcctctggcatttcccttcataaaaaccttatctactcaccaagataacccctcctaacgcacaaggctgagctgatagcctggtgttcttgggcaatatcaggacagaggccgtgaacgacaaactaccaccaaccaacaccagcccccactctgctatgtcaccatcagcacagccagacaaacctttcaatggttgctgacttcttattccccacaggcaactaaggcaaggatctcccctagactttccctttaagactacagacaaaagtgaagaagtgaccgtggcggcctgtaccagcactagctgtgagtatgagatgcacatccgtgcacacagaccctgagttgcttagggtgagaataagacgatctgtcaatagagttagcagctgtgtcaggcacaaggttcccaccccagggacagagctcaaatccttatggacgtgaggaaggcttgggattctcctctgagacaccatcggaaggactgctgtggcaagctgaaggtggggtgggcaggagcggggcgccttccgggtcggcccccggggaggactcggcaaggctggacactggcttgctctgtttgctcacacaggtcgatcctgttcttctcgcactaacaggaagatcctgccgtgcgcagggcgggcatcgggacggccccccggctcccagcccggctctcacccccagggagcccctgacatggcccccaaggcgggcagcaagggagcccttcagttccgggcgcgccgggggtcccgaccccgggggctgccgggccgtgcctgcgtcccaagagcctggctcagcggccccgagccccgcccgcccgccaggcccggcgctcacagaactccaccagcaggtacttgtgggccgccagcgcctccgcgaagttgcttttccgcagcaccaggacgtggtcctcctcctcgggggcgtcggcgcgcaccagggcggccacggccaggcacagcagagcgcggcgcagcatgtcggacacggatcaggcggggcgcttcggttggcgccgccgggacagcgggggcgacgagagcgcgcgccggtcccggcctcgcctttataaatcctgggtccggggcgcgcctgcccccccgcccgcgcgcgctggccgcggcgcgcacgcgccgctggggcccgccttcgattggccggcggacttcgaggctcgtctttgccgctctcggattggacactcacaccaggcctggccccggattcggaaacgctcctgagtgctccctggccttcgttcgggattggccgaggacctcgcgctcgctgtctttcttagcctctcattggctcccgacaagaactttttctgccttggcttctaattggtggctttcgcctgcaccttccacgggtctggaatggctgcccctttcggtagcacggactctgcgcctcctgattggccaagggatgcgcgcactctgcgcgttccttcgtcgaacgtggcagtggggaggagttcccagtttaggggcggagctgcggctgcgcttccgaaacccctcgtgttgcattctgactggaccgcgtacccaactggcacgccccccggcccccggaccggaagttggggtgacgcaatttccggcgcgcgtgtcaagcgtgcggcggcggccgtggaaggtggggttggccgcctagggtcggcggtgggctcggtgtgggatagccggcccggtccgacgcgctccgcgaggtcacgcgagacactcaccgaggcatggcggcagggcctgggcatgggaatcgtgcgcacagtgcgaggaagcctcggaggggatacgagcacagggcgggtggttaggagaatggggctggagagacgggcgggaggggcgggacctgggccccggggacctgccggctcccaggccccaggaagacgctgctcatgcgtggagcggccgcaggaaaggtactccccgctaaggccttcagggagcggccctttgccctgtgcgatctcttccttcctttcccacgggttgccaaatcctgtgacgctgccccttctctggtgcttctcagatgctctggtcggctcaggagacctcgcagctgttacacagctgtggaaataccctgggcgctgcttcactccgaaggcagcagctgggtttgcctcccgactcgacccgccaccgaggctcctgagcacttgaaatatggccagtccacctgagacgggctgtgagtgcgcaatgcacatcaaacttctaagactgagtgtgcggggccgagtgcggtggctcacgcctgtaatcccagcactttggaaggccgaggcgggcggatcacgaggtcaggagttcgagaccagcctgatcaacatggtgaaaccccctcacctcccgtctctactaaaaatacaaaaattaacagggcctggtggcgcgcgcctgtaatcccagctactcgggaggctgaggcaagagaatcgcttgaacccaggaggcagaggttgcagtgagccgagatcgcgccattgcactccagcctgggcaacagagcgagactccatctcaaaaaaaaaaaaaaaaaagtgtgcgtgtaggggctggaggacagaaggtacagtatttcgttaataactttacattgactactacatgttgaaatattctgtatgcatatgttg

SEQ ID NO: 65702 - DNA, 959 bp, Homo sapiens
tcgaactcctgacgtcaggtgatccacccgccttggcctcccaaagcgttgggattataggcgtgagccaccgcaccaggcctcctcttctatcttttaacgtggcttttagaaacttttaaaattacatagatggtctgcattttgttagtgttggacactggcagccctccgtctccctcactgcctggaatctgctgctctccttttccccaggtgcctgccctctccattcctcctcactttcctccgctgggaatcggcaccgccactgattttaaagttgaaacttggcaggcaaaagggaggtactcccatgttaaatgtatacacattgactgcaatagtatcctgacttttgaaatggtaaaacgtagagtaagttgcttttgtactttgagagtttctgtttgttgatcagttgttcctgagaacatgcttctccttccgacagggaactccctccactagaatatgagctccttgtggtcaagactgggtcccctgttcccttccccccagtgccagcggagcaaaggtcagtcagcggcataagttgtacctgctgggagaactgtctgcttcctccgggtgacttttctggccaagaaggaatatgagtatgtgcctccctgagcactggcctggagcccactcaggaaacaccatctcttcataaatggttttgattgcaggcattgttccttctgctctctggatgatggaaattgcttcaggtcactgcactatcttccaacgtttttgtggttgccatgagctgttgtacagaccacagtttggggcctgagacaagctgggcatggtgttgcatgcctataatctcagctactttggagggtgaggcaggagaatagcttgggcccaggaggtctaggctgcagtgagccatgatcataccactgcacttctgtctgcgtgacagagaccctgtatcttac

SEQ ID NO: 65703 - DNA, 7600 bp, Homo sapiens
ctgtcacctaggctggagcacagtggtgcagtcatggcccactgcagcctctgccttgtagcctcaagtgatcctcctgcttcagcctcctgagtagctgggactacagttgtgcaccaccatgcccacctaatttttatttttttaaagatggggtctcctgtgttgcccaggctggttttgaactgctgagctcaagtgatctgcttctggccagctactactcttaaaagtagagttctcagagcaaaacagctccctttcaaccttcagtccggtcgaaggtgtggtgggggtaacaacagcaggctcatggatacctgggcagtgctccgaggtccctcctgtgttcccactgagcagcagcctgctgtgcccggagtggaggtgagaaatccagcagcagcgcggtggtgagtgtgggccctgcggagtgtggcaggcgctcattatggtgcagggcagtgttgggcacagagaaggttctcagaaaccacagtaacccatggttagttggtcacatcccagaccctgacctagcactggctggcactgtgacttgtcactctcctgaatggaagaagtgtccacctgggggtggctgaggaggtggatgctaggggactgctgggagccacggacctgtggaggttgggagaggagactgcaggcgcaggctgctggaggcgaggaggcctctctggagcgccaggccatacaaacaggtcccaggtggggccacgaggatcaggttagacttgggacccgagagacacgtcatgcccactgtgcaggtgccacctcatgttatcctgcaccaggggaggggccagcccaaagtcctggctgctggcagcatgcccgtacagcttggcacctgggtctgagttcacatgtctagcaaagctgggaaaatccaggagcaagaaggtgaagccctttggctcagcccaagctcagaaggcccttgcccgatgagccgaactgctgacaacaccctggcactgggcttggggactcccctggagcatgtaagaagtgaactgggagcgtgggagaaactgtctggcaggggctgctgcctcggagctcatcctccctggctgtgctggtgtctgtccagtgggattagcctccatcctgtggtttcaccaccccaccgcctctctcccccacagcacaggcagaagcagcaacgcaacacgagaccacctcgcttggggctagtagcagttctgggaaaggctcggtagggtctttgctccctgcggaatcaagggctgggggctgacccaggctttctctatagctgcttccagatctgggtctggaccagcttctgcaggaaggcaccattctgttggggtgtctgacacggtcagctctaggctcagcctctgcggcccccacaaaggcctagcaaggatggggcaaggtggcagtggtgcccgcacgcactgccctggcacaggtgtgtagttagtgacctgaagcatgagggcatctccctgcccaccccagctggagataagccccttgcggggcccaccctgctgataaaccccagagcagtatggcctgtgtcagaatgaccagtaggagggccccggggtagcagctgcccagcccagctgcgtgtgtgtgtgaagtattttcctcaacaccttataccacagaaggcagattttgaaactcgcatcaggccagaaaaagaatttctgaatggacacttctaaggggtgcctggttactcatctgcctcttccccctgcagggtagaggggcatgggtttgaagttcccgggggctcttggagactgcagacacggacgagctggggttcctggatgctgcagcagttggggcccctggctgagcgcacctgccccaggaggccctgcgtggttcccccagtagccccttcacaccacaccgcagtgaggatgccctgtctcctgccgatcccatcacaccaagccttttcgctgttgggctcctggcactgcccgatcctggagggcacttggctgcggctgtggctgtgaagggctggtgctctaggcgcctccgtggcccccgttgcctgggcacctacttcctgcctcagccacagctgcatccacgtgcgccaggggccacaaggccgaccctggcttgggcctgttcctccctgggtttccttgggatccagtcattggagggcccgcgcacagctgggccaactcgacacctccaagcccggccagggaatcaagcagctctccctctggcagcatgagctacacaagccaggcccgtcttcccattcccttagcaaggaggggcaaccccagccaaggccttctgcactgttctagactgttgctgcctagggctactgtagctgggagtcacattcctttctccccagatagttgcaaggggcccagcagccacagcacttcaagggggccctgcccttcccctcccaccaccccaccagggtccccatcttcccctttgtctcctaaagcccgtgaggcagtagaggagccaggccctcccctgccacaccctggagaagccaagcagcagacacccccagctccttcaggggcatttatttcccggtcagaaaagaagcagggacaggcgcctctgcctgagcctggcagacacaacacgaagaccggggatggggcgggggaggcacaggagacggctctcagcaatgtgtgcacttggtcccttgtttgttcctggctgggtcagggaaggcctgccgggggtggtggcactgagagcctgggggaacaggcgccaggccagtggcccagggacggcacggacggaggcaataaatactgatggccaggcggggctcctggctgggcccaggtggggtgagtgaggctgtccatcgagggctcttgggggggtgtgggctctgggcactgcccgctgagacagaaaaggcagaggcaggacaatacccagcctcctggatggtactgaggtgacttgagttttggcaatttggctttccccaagccgccggagccatctccacagccctgtccagggaagggggcaggctggccaggcactggtgggctggggagcagcagcagcacaccccacgtgtccctgggtcactgggttcgccaccggggaagggacggggaggccacatgctcatgcagacacagggagttagaggctagtgaggccccacggtacactccacatgttaaggcatcatggttagacgggaccgacagcgacaagggggctggccagggagcagcggggctggaggacggcccggcccccacgaggccgtgcatcccacaccccagctccaccccggagcagcagacgcacacgtccaggggcaaccacggggcctggagaatggctgctccgctccctcctgaagccaggcctcgggtgtgacggggagatagaacctggggggcacagaaagggcagcagaggcctggctgcggcctctctcccccacagcacaggcagaagcagcaacgagacaggagaccgaggaggctgggcctgtgggtgggggagggctgaggaggggggtcggaggcactcggttgagccaggccagggaggcggaccagggtgggaggggcacggagggcctgtcagcactttggtatggggaggggaggggctgggggggacacatccgcctgtccgtcgtccgtccgtcagtctgccctgcccgcctctggctgggctcagtccttccagtccttcttgatggtgagattccactcccaggacaggtggtcggtcttgtcgtcgtctgtgaagcgggacttgatgctgtagctgccccgggccagcatacccttgggtgcctcctccacgggggtcaggaactcgtactcctcggcccggggcccatagctgcctaccatgtagtcagtcttgtcaactgcggcacaaggaagagggcggtcagcggccccgcttccccgcctggcagcacgcacccaagcggccccctctgccctgcccggggccccactcactcttgacgcctttcctgtacgtatgctggatgtacttcatgccggacactatctctcggttaacctgcaggacccgaagcgaggatcagggaaggtcggtccggaccccagccccagccccgcctccattccctggccacagcagcctgtagcttacccggaaagagatttttatccggtactccacaccctccttcagcacaaacgactgcttcttgaagctctccaggtcgcctgttggggggacctccccctcaatgactgcccagcagccctgcgcgaagccccagccctgcgcggccccctggctgcacttcccgagatccccaccaggggccgcccggacccccgcggccgcagggcactcacccgtcaggtccagctccagggggcccggggccgagctgcacaccagggtcaggccagtcaccacgacgttggggacgttggggtctggggagtgacagcaggtgagggccccacccccaccagtggaagtaggggctggggagcggcaagacagctggagtgaacgggcggccacccggctcccgcagcccagactcacctgcggaaacggccacgcggcccagcagggcctccttgtactttcgcaggctctcgtcgtccttgtccagctcctggatctcctggatgctcttctgggccgggggcttgtagttgaccgagtgctcatcctcctcgttctccgctgcaatctgggccagctgctcggctgtgggctcctgctcagccatgctcaagcttagcctgggtcgggacacctgtgggcgggacggtgacaggccttggacctggatccccaacggaggcgcacttctgagcaggagtgtgggctgcagccggagctccaaaagggctccaagggggccaccttcgctcctctccacccccgcgattcctgctcaggggcatcctctggggcagtgtgaggtgcccccaccccaggtataacatctaagacaaaatgggaactgcagccgatcatggggagagaggacacacctccccctccacgatggaggaggcagcagccccctgtatgtgtggggcggggctagcaggccccagaatcaaccggcggggcccacactaaaccctctcttagggtcttgccgctcttgagctgcccaggccctcgccctacggggtaacggggctcggtatccctcagtagggttgctcctctggccgtggtagtcacatgtaaacgtgtgtggtcggctcagcgtcatctttcaaacaggatgcccctggagctcggatgttaggggcagctagaataccgcacggggccacctggacacggggatcctaagtatctgcggtttctccacaattgtgagggtctgtgacctacaacttgggagctaccacagccactcagtactctcgggccctcttgtagatggtgggcccggagtgcccggggcagcactgacccggcaggggatctgtcaggctcagatccttcccggcagcgtgggaggtgggtcagggagcagcacacccgggacacccaggccggggtccaggccgccctgcttcctccaggggctggggcctccgcgccgcgcgaggatagccgtaggcgccgggatcctagggcgcggcccgcacttccgcagggcccgcaatccgtgccgggcgtggcccgggcgctgggggaggccgcgccccaatccccgcgtcgcccccgaacgcgatggaccgcggctgccggcccggcgccccccgcgtccccaaggaggggccctcaggtctggcccgggccccacgcgcctcggcggccatgaaagaagctccggaccgctcgggaggggccggcactcccctggtccccgccgcccctccggcccgggacccgcacgtggggccggggccgccgccgcccggtcccgccccggccccgccctagcccgcaccgccctggcccgctgtcaccgcgcccccgcccgccgagaccctgccgcgggctcagggcggggcgcgaacaaaggcggaagcccccacctcagcgccccccgcccccgccggcgccgccggtccccgccccgacccgccgcctccgccccgccgcctccgccccgccacggccactcaccggagggttcggccgcgcggttcaggatccctcccgcactaaatgacgaacgtcgtcggccgccccgcccgccctgcctgtcacttccggggtcacgagacttccgctcactcgggcggggaaggccagggcgcatgcgcggcgcgcgggtggccgggggcacgccgtcgccatcttgcggctgggcctcgtgggcgcgttccgcgtgggttctggcgtcgtcaccttccaccccaagccccgtcagtggtcacctctgtaagccagggcacttccctacgcgagcccagggcgcccgcacccgggaggcgaggtccggtcccgcctctcgccgctgcccaacccgcgcccactcgaggcctgcggcggccgcgtgggctgtggaagcccgcgcaggtgcagtgcgctgccctccccggcccagtcggtccgactgcgactcttgcttcggggcctagtcacctagtcccgggacttcggggaggtaacgggcacggggattaagttctcgttaaacacgggcgagagcgctggcgcgcgggccgttccagggccttggtgtcccccgtggaaagacagggctgtggggctaggaggagccccttgcacgccccgcggaaagctggtgctgggcgagggcgcagcggaggtgtttttctccaggctgagacagaattcgtgcgcagcgcgcgtggctgcctggcgcaggcgccgctgcagaggccctagtgtccctgaggaatcccgcggctcctcaggaccaggaggcagggagctcctggcaccgtgagcagatgaggggctgcctcagcctgggcttcaccgcagagccctgttccccactccgcttgttccgagattccacacattcgcccacaagggccgtgttgaagtatcaggaacggccgcataacgtgagtggcctggcccagcagcagtgctcgcacccagccccgggctcgcctctcctggaggccaagcccctaaatgccctgcaccagacactgggtgggacgctgccccgcgtccagcctgcagcacttgttaggactgtggactcgttaacgtggacgcctcttttatttattgattgattatttttttgagacgtagtctcagtgtcgcccaggcttgagtacaatggcacaatctcggctcactgcaacctccacctttcaggttcaagcgattctcctgcctcagcctcccgagtagttaggattacaagtgtgagccaacatgcccagctaatttttgtatttttagtagcgacagggtttcaccatgttggccaagctggtctcgaattcctgacctcaggtgatccacccacctcagcctcccaaagcgctgggattacaggcatgaaccaccggggtgcccaatctttttttttttttttttttttcttcaagacagggtcttgctcttttgccca

SEQ ID NO: 65704 - DNA, 1414 bp, Homo sapiens
cgctgtctgagcaaagcatcactcagtcaccatgtggggggcagcagggcactgggcagtgtggagtgtccgccctgcaaggccctgtgcccggaggactggcagcacccttcaagaggggaccagacagcccagctggccaaggcctcatgtctacttgctgtctgtgcagtcagtggaagagccctgctcttctttctctcacaagcaccctgctggaacaataaattaaatagtcctctggccttggaagtaaaataaggttttgtgttttatgaataaggaaatgaagattgggtatgatgaggctcagcccagctacctgacctgctgcccaccagaagccccggtggcttccagacccagcctctatcctagttataaatggccagccccacctccaccacaggcacagaatcaggtcattctcctttgaccactcggcagcacctgcctcaatgaccccaccactggccccccagcaaataccagctgttgcttctatgacatcattctctctacttcctttacctccaaccctcccaagaccatgccacatatggacacgacttcgacgtgtccacgtgctatcagctgacaaactggagaggtccggctctaggcaacgctctcctgcgggccagctggtgcctctgcccagcctgtccaatgctgacgcccctcagctggctccttcctggggccttctctccagtgacacctacccacccagttccccaaggcctcatattacttcattcccatgcccctcactcccgagaatgccaggaagtcccaaatcctggtcattcctccctccaaatgcctgttacaccactactgcacaaccaaagcaatgctgcttgtcagtcctgtcatttgtcacaccctgcaggggctgaccacaccagtccatcaggtgccctctccacttcctaagcagcagggagccagtcctagcacggccccagagagcagaccccctgcctggcatgggcctgctcaggccttgctccaacaccgaggcccgggccaagggcacctgcttggggataacctgactctaactcactgcactggtgacattttctgtcacattcacagcgactacagctggggacttagtaatcctttctcctgctagactgggcttctggaagggccaagattagtcatcctgttcatctgggttcctagactgtggccctggctggcattgggcaagctgcttagatggcagctgctgatctgtagtgacatctgtgaccgacagcgaaagaaccacccttagtcacactcccttgcccatgactcagccaggcccatcccagcgtggaagcaagcttagcctgggatgtgtgcccgcaggagccgctggtgcagggaaaggtttctgcagacacggcatgcattc

SEQ ID NO: 65705 - DNA, 2272 bp, Homo sapiens
caaacagagccagaaaaacagactccctgtgcttcacaagatacataaagaagattctttttctcacattaacccactaagacaggcacaaaatttaaaaagcaactgggctgggtctaacagccaaaaaccactcacatttggtcagtctttgtccctgttagaaactggaagccctggcaggggattttcactcacagaacccatcttcagactaacagcagcagttcctcaggctcagctaggctcgcacctgcctgcgcactgaccccggctttactagcactgggtctgtcctgcagcccttcagagctgggagggctcccttcgctaaggcgggaaggggactcagggccacatccccaaaatcacgatccgtcctgtgcagggcgaacggctcaccgagaagccctcgtctcttacctgaatatcggcgtctgagactccaaaatccagattggacaccagcagtttcccacctgtctccacgccggcaccaccgccgaagccactgtcgaaaagatcgtgctgccacttgtcgggaagttgttttggctgaaaaaaaaaccgcaacaagagcagatctgtgagtctcagtccagggctttcctgaccctcacggctactccggacccttcctcttcccggcctgagaggatccggccgaaacggggccgccagcgctccctccggcgctgcagctgccccagcccgaggccgcacggtcccaccgcggccgcacaacttcagttcccttagactaacttcccgccgcctgtgccgcgcccagcgtcccctcctctcctgccacgaggccccaacgtccggaacaaacaaagagctgggaagggtctcagcctccgggaccggaccccgaaagaacgacctcgctcccgcccaccaccccctccgcgcccacacgcaccctccggacctccgggcggccgctccaccagccttatccacccgccggcccgggtctccgccgcgagcggccccggccccagccccggctggccccctcccactctccggcgcggccggcctccgcactcaccctgctgtagggcgccggtcggttcctgccgcctccgccggccgcgccgcgggcgatggccggccggttccggatgggcccgccgcctcgattcactcgcgcggcggcctgcgccccaccgccgcggccgccctgggagccggcccggccgcggccccggcccccgccccggccgcctcgctggctccggttcagtttaatgatgtcgtccagagacatgtccattttgtcggccatggcgggcgcggaatcgggcatcggctcgagcccgcgcgtcagcacgccggcacgtcacttccggcgccgcgtgaggccttccggtgccacggcctcggagcggctgctgattggccgctggcggacggctgcgcgcgcgggacggggtgaggcggggaggcgcgtgcgcactggcgtgcgagactcggcgggcgctgttgagggagtcgggccgcgactgtggtcgtttttataccttcccgcgcggacgccggcgctgccaacggaagggcgggtagggcggtgcgtgattaggttggcgaaggtgcgagggcgcagggggtggggcggcggccgttggaggcggagcctacgcgcccctccctccccgcacgctccgcccgatcggccagggctgggggcgctgggggcgctacgggcgcggcgggtgcctgggagctgctgggagtccttgtttccgctcccgcccaggactgtgcgctcggctcgcggtggggtccggcgggcgcggcttcggcgggcggcagccgctgcagacgagctgcgggttggttttttggtctccacctgcagcccccccaagtctgcactgtcacattttgccagtcatatcctttacaagttttcttgcgggccgggcgcgggcctcacgcctgtaatcccagcactttgggaggccgaggcaagaggttcgcttcagcccaggagtttgagaccagccggggcaacatcgtgagacccccatctctaaaaaaaaaaatgagctgggcatggtggtgcacttctgtactaccagctacttgggaggccgaggtgggaggattgcttgagcccaggaggtcgaggctgcagtgagccgtggtggcaccactgcactccagcctgggcgacagagccagaccctgtctccaaaaaaaaattatttttgcaacttattaatgaaaaccagtgtgccatttcattgattttttttttttt

SEQ ID NO: 65706 - DNA, 1118 bp, Homo sapiens
ccctccgcagcctcggcccgccctcgccgcagatataaggcggcccaggcggtggctgctccgagcccggacgccgccgcccaccagtcagccggcgtccccatggcccggtccgcgacactggcggccgccgccctggcgctgtgcctgctgctggcgccgcctggcctcgcgtggtacaagccagcggcggggcacagctcctactcggtgggccgcgccgcggggctgctgtccggcctccgcaggtccccgtacgcgcggcgctcccagccctacagaggggcggaacccccgggcggggccggcgcctccccggagctgcaactgcaccccaggctgcggagcctcgtgagtccggcgtgccggggactgatggggggcggcggcaggacgtgggtgggggtgcggcggcccctcagcctttgcttgcctgccccccaggctgtgtgcgtccaggacgtcgccccaaacctgcagaggtgcgagcggctccccgacggccgcgggacctaccagtgcaaggcgaacgtcttcctgtccctgcgcgcagccgactgcctcgccgcctgagcccggacctctcctggcaccgctgggggccccccgcccccaccgtcccactcggtgaccccaggcccctccggcgcgggatggcgccccaggtctcccctactccgctcaccccgcagttaatggcaaacgaataaataaatgaggcggcctcggagtgaggggtgctggaggactggcagccaggccacgaggggaacgggacctggaaatccccaagcctgggtatgagaaggcagccgagtgtgcggcggcagggcaaggttggcctgggccgcccagaggtcttcagacccaggggcgaagctggccacgacccagccccgcggtgaagccgcgcctagccttggtgctccctgggggaagtgcagggccacggctggcccggttcccagtgtcctcccccagcccttcgctccccaactcgagagccaaatctgtgagggcatgggctggagcccctggctgccttcctcttgcccccatcccttctggccaggccaagtccgagggtgcaggggcaaggaggagagttgggggcctga

SEQ ID NO: 65707 - DNA, 1940 bp, Homo sapiens
taaaataagccgatgttaactcttggggtagggttggatcctagactaccttgagacaagcaaacagtccctggggctaacccaaaacaaatccaaccacaaaataaaaccctgggaatcactggccctgaaaatcctgtctctcctcccttacggcctcaagctcagcaggcttaacgctaagggtgaacagccactgccttgccacctggctcgagagttttcattcacaaatctaggtctgctaacacgtgaactctcaagcccaaagctacacagccctgccaccaactgggcctcgctgccctggcttcttcgccacttctttacagcagcggcccatcccctcaagtggacaaagctgtccctgcctctccagggagaggtgtgaccctggcagcccacacagtgcacagagttgctccactgcacaccactgcttcctcccagcacccctgccacagtgcgcggagcccggcagacatgctgggtaaaatctggcgggcccatgtacccactggacaggctggaggggaggagggggcagaggctgggccaggggagcacagtctggaatggggctggggcctggtcagggcaaggtcaaagtccactgacacaaagccacattccttttcccagaggtgactcggacacagaagacaaggccctgcttgctctcctgggaagggctaatcagatagaggcgcttgcttcctggattccatccggcaggcacgtgaaagggtcagaggtagcaaattatcagtaacggtcgtcttcctttcacttgttgacaacccgaaacttttcttaaaacaatgccctctgactggccagggaagaccgatcgcattctagccccgcggaggaggacccgggagcccgcgggcttcaccgcgggtcccggacaggcaggtcgcacccgatgcccacctacagggacgctcgcccggaggccaggggaacccctggaccggagccgggcaagctggttgctggtggttacggagaagcagggaggccgtggctccagatctcagcgcggtggctgcaccggagaggtcggcgtgaccgggcggggcctccgccagaggtagacggggtcgcccacggcagggcgcggagcctctgcagcccgaccctcccggcaggcgagccccgcagcctgccagccccggcccatgccggacgaggacgccacccagaacgcgggcccggtccccgggcaacggctggcgcggcgccccggaaggaagccggccccggcgcccccgcggcccgccccggccccgcgctcaccagccatcgcaccacaccctcacggcgcgcctgccccccgggcccggctgctctgcgccgcctgcagccccgcgcccgttccggatcatggccccgcagcggcggcgcggacagcctggcagctcccggcgactccgagcgccgccgcccgccccgccaggcgcacgctcagcggccgtcacgcgggcctcacccgctgcgcacggccaatggcgtgcgccgctcggcccgagccccgcccccgcctcccccgccccgcctcccgccctccgccccgagccccaccccccgaaggccgcgccccaccgcacctccgcgcacggccaatggcgtgagcccctgacagagtcccgccccctccaaacgcacagccaatggcgtgtgccgcgctttccgagccccgccccccgacccacacctggcctctccgcaccgcccacacctggcgctcggctggcggggcagtgcggcgtggggaccgtcccaccgccgccacctccgggaacctccacggggcgctgtcccaaccaggggagttttttttcttattttttggcacaataatctacagttgtcccctgtccaaccaagggagttttaagccacgaccgagctgccaggcggcagacctgagcccg

SEQ ID NO: 65708 - DNA, 1302 bp, Homo sapiens
gcccaacaccccacacacacccatcaaattagatggacgaggtgccagctacactttcaaagctagtgatgtcccacagcccaggataacttgtcagtgaaacttctcaaaacacaatgcaattctctccttcacctggtgtattctggctcttactgtgtcactttctacttatcttccctcgacatggacagaacagagtggaaaatcacaactttgggcttagctctgtccacataacctgggggtgcctgcgagcagtcggctactacaccccattcgtatctctactccttgttttttttaactggctgtaacacagaggccaagcgtttaaaaagcgtttaccttaggtaagttttggtcatttcgtttctttaagagaaaaaaccttagagctgctttaaaggcgagtttttcgcgattactggagctcatactccgtcctggggtacgcctccgcctccctccctaccgtgctgattcccgcgcctgtgtagacgaccaagtatttggcgttccggacggcgctggccagctcccggaccttcccccgcagctcctccgggtcgtcgcacacctgccaagacgccagggtggtcaccgccccgggccgccccacccgggaccgcccgtcgccccagctgctcccgaaaccgggggcgcccgcgcgccgcacgcggaactcgcctcctcctgccgccgcttcaggccctcgcgccgccggctccggccctgcagctccgttaccaggtccgcgctctcggccagcagccggccctcctcggcgctgcgctccgccgccgccttcctcaggatgcgcgacacctgcgggcaggcggacggtgagcggcggcgcgggccgggcatggccgggccggggagcggcggcggcgtacctggcggaggcgctccctctgctgctcctcccgcaacctccggacccgctccgccgctttgcgctcggagcggctcagacccccggctgccatcgctcccctggagacctgctcttccgcttccgcctcacacggcaggccgcgctcagggcgcatgcgcaagatgggccccgcccccacccaccccttccggctccgcccgccgcgtcgccccaaagaagcacctgccagtctctttaaaaggtttattgatcatatacaaaataaagaaaaccttatatatcacaaacatacactatgtacagcaataaatacccggggggccaggcccagtgctgcccctcctggacaataatttagcaataaatactgcgcagggcaggggtagggcaccaaggccact

SEQ ID NO: 65709 - DNA, 1608 bp, Homo sapiens
ccagcttctccacctcctgctgcagctccgccttctgcttctccagctcctccttctgcgtcacccgcttcacgcggcagctggcagcgtagccgcggttcttgagcgtgcgccggcgctgcttcagctggacgatctcctccttggacaggccccgcaggtgctggttcagctcccgcaccgacatggtcaccagctcctcatccgtcaggctggtgccattctcacccggctcccgcttcacctggggcacagtgcaggtggtcacaggccaagcgggcacgcccactgtgccccccgaccccagcccacaggctcctgtccctgcccactcaccttcaaggccttgtttcctttattgggggtcgtcataacccgggggcacagcgagcaggcgctctctgcaagacacggagcaggtcagtaccctggagaccaccctcgccgcacccccccccccccgcccccggcccagttcacaagagcccttgccgcacagcccgccccagcctgctgtccaggtgcccagcccccaatacctgataggaggcagcccttggcctctcccaggctgggctgagctgcttcctgtccaccctgcccctagagaaccaggtgggaggtcaggaaggtctgacgggagaaggggaactgaaggctgttaggaaggcaggcgcaagacaaggggcaggggagagattagaaggaataagacgcgggagaggcaggcctagaaggaagccgggagctttaaaaataaccccggcactgcccagagcgcggctgttcctggcgagtcacgctgactcagcacattgcctctgcctccccgccgcgcccgcactccctggcccgccagccaacagcgccccacgagagccgcagcccccagcctggccaatagcaggtgagggccagccagtgaccctgtgtgtgcatcttccagggtcctaccttctacagccacctcccctgagccggcctcggacaaagccccctgctccctgggtgcacaggggccccacgggggacctggccagagaggaggctacagggaaccccgagtctcccagcctcctaactttgaaaagctgggggtgggccgtccatctagctctggtctgttggcaggactgaccagggagttcccccaccttccaggtggcaggccatcagctgggaggagcctggcccgaggcccctctagacctcccagtcggcctcctccactgatggagtaaccatcctgtggctttgggttgcaggaagcagcccctgccccaccccatccagggtatttcacaagggctcccacagtgagccaccccgggcctgcccaacgtgaaggctggcggagtcagcccctccgagctgcagcctgctctctggtccctgccccgggtgagtgcccacagggccagggagcaaaaacaaaagtgctggggtggccggacttaacaaccaactcttccccactcggggtccctccagcactctgctctcactttcttgctaaggatgtttctgggattcccagctcagcccagctcccaccagacccttgggcatggacccccgcctcatgctccatcccccactttccaggtt

SEQ ID NO: 65710 - DNA, 572 bp, Homo sapiens
acgtccggcacaacactgccccaggagacaggccctcagccaagcatggaggggccccccagccttgagtgcaagtcagggtgcagagacactgccctggcaccagcttctcccacccccatcgcccccacccctgctgctaagcacaatgacagtggtgacttcctgaagagatcacacggaaaagtgcctcctcgacagattttgccctccgcagaaggcctgaactcagcacaagtgcaagccatcgcctcctatcaaaggtgcgccggggggtgggggaggggcagccctgagcacagccagtgcgttccaggctcctggcctggcctctggacctgggctgagagggaccatgcagggatcccaggagctggactgaggagaagctgcccccgccctcctccagccctcaaggctgggcagagctggggcctgtcatgcaccctctgctcccagaggctaataagcccacctcacgcaggaggcacagatggtcacggctccgcaacctgcgagggtacctaggccacccattcacactgagagccaggaaagggagggagatttgg

SEQ ID NO: 65711 - DNA, 2258 bp, Homo sapiens
aaacattgaaacatctggaatctataagccccggggctcactgagagtggacctgtgttctgtgtgtatgtgtggggggtgctcactgagaatggacctgtgtgtgtgtgtgtgtgtgtgtgtgtgtgtggcggggggcggggggcatccctgagggcaaaccacaaagtagcctaacccagccatgaaatgaactcctgggcaaaggaagtcaaccttcgtgaatctccacatacccaaggaaaggtggctctggccacatcactcccaagctgccactttctaagcgtcctgggctgccaggccagacacccaacagggccactccctttgctaacttcacacaacgctgagaccccacttcaggtagcgacaactttagggtggctgggtgctgcgttctgccaccctgtgccatccacaccagcccatctgctgcaccccaaggctaggcaccctgaagctcccaccacctacagtctcaacccagactccagggccaactggggagagaggctgggctgcttcctcccctttgccgtttcctggtagagctgcccctgcttcctccctgcccagcccactgtcacccagggcttggtacacacacccctctttctcccaggacctcgatctctggccaggggctgtccaaccaggccagtcccagggaaagccgacttcccctttggctagctcggcccaccgaagctcctcccctccctcactcagggaactatttcccagtttggaaaactgctccagacttgggaccaggaccagctgccggaaaagagccgcctgggaaggggtggaccgcccggggcttcacctttgaccccgggagaacacctgcagcgagccacccccacttcctcttcaagcacccctgccttcaactggatcgctcggcgctcacttaaacaggcaccccaaggcgccgggcctggccccctcccacatccccacggctccctcccacctcccgctggcggccttttagtccccgaggcccctcgctcgaatcccctccggtatcagcttgagcaccgagtgacctcacgctgatgactcagcaagtctccctccgggctctggcacgcgactgacggaacccgagccccagccaggggcagggtcttccccgcagcacccccatcgccgcccctcctcccgggctcgccgcggacccccgcgccggggagagctgacgcggccaccggatgaatcagcagctgcgggccgggccgccgggccctggcgcggacccccgggcgcctcgctcgaccccaccctttcctcccgccgtccagtgcccctccctccaggacgcccgggtctccgagtccgctccgcactcgcccggctccgcgggtccgccgccgcccgcggcccacctccagtacccgggcgccaggggcaggaggagctggctcctgaccgctggggaaatcgaggcacgggccgccagcagggtgcgcggcagacccgaaaccagcggcccccgccgccgggcccccaaccgcccgcctagctccgggaggagccctgcctgcgcgccccctcggcccccgccgcccccgccgcgccgcccccaccgcccgggcccgccgccgcagccgcactcaccacactgcgggcccggcgggccgaggccggggcggggcggggccgcgcgcgctccgaggccgcgcggggcagggaccggcgcgaggggtccgggcccggggctcggaggactcgccgcctgcgcgggccgggccgagcgcactgggaaggccgggccggaccaggctcgggatccgccgccgccgccgccgctccacagacgtcacatgatgtttggtcacgtgggctccattcatgaagcggcgacgcggccggccggcgcttaaaggggaaggcgcggcggcgggagggcaaactgcgcatgcgcaacccgcgcgccgtcgtccctggcaacactggctgctctagcgcctggcggggtctcacgggcgggcctgggcgcacggccaaagcgccaggtctccacccccagcccccggcgtcctgcagccggagcctgcctcgcctggctcctgcgcccgccgtccagggcccctgtccaagctcgcggacgccggcggcgttttccagctcgagtgctcagcctagggcaggctctgcgtgcgccccctcgagtgccggcctgggccctgccaggcagaggcgctcttgcgtcaggacggcgccgccggggccccgcgattccaact

SEQ ID NO: 65712 - DNA, 423 bp, Homo sapiens
acccgcacccaggccccgcccccgtcgcgccagcgaatccgggcgcggccgccaggcgctggccaatcagagcgcgcggcggcgccagagcggttgcatcatctgcgcgcccctcccacgccgaccgccggccctcgcctctctcgcgccccgggatcccccggcccccggatagacaccctctccggcacgcggtcccctgacccgcgctcctcctggtcgcgcttcccgggacctacacgtggggtccgaggacgcgggcggagggggcggcccgattggggcctgtgaggggccctccacgcagggctttgtcttgggccacccggacacggacgcgtccagctggcgtccctgggcgcgcggccggctctctctgggaatcagtcccttctactgtcatcgagtttggagaagcccggc

SEQ ID NO: 65713 - DNA, 492 bp, Homo sapiens
gcctcaacctcccaaagtgctgggattacaggcgtgagccaccgcacccagcctgagtcttaattcttgccatacagctgttggtacaagtggctctggcacccctataaggaaatcccacccctagaagcgccaagaagaggcccatgggaggccaagtgcggttggggagcatgtggacttttgaagttgatgtcatggacgcaagctgcccggagcagggacactgacctccggatgatgatctcatgggagaggcaggcgggggcaaagctggccctgttggagaggagacagtggcttgtgagctccttaccccctcagccccttttccacccccactcccctagagctgtcccccgcctggccatcaccccttcctgttgctatggctgccagctgttcctctggcccgggcctccccctagttggccagctcccggctgacccttatcgctttgtgcctcaaatccctgctcagagtccacctct

SEQ ID NO: 65714 - DNA, 1608 bp, Homo sapiens
gcgggaggaggctgtgtagggtcgggtctgggaaccctggtgaggtgttggggctcctacttggccccaggaagggaggtgtgctggtgttgctagcccgaaccaaggttgccgggaaagtggaggacagttgggtttagttacccccgggaagccaccatggccacggtgcccggctaggctggacaccaggtctgaccttgacttcaaccccttgccctgctttgaccctggggagggccagagccgctgggtaagcgcctgaatgctaatgtggaatgggccccaaaaggcaagagtgaagggcgccccttgctcttagtaaacccgggcgccaggctgggcatgatgtgcggggtgggggcctggctggggctccaggaggcgggcgcggcttcctcccgggcctcacgtcgagacgccttccccagggcccgccgctgacctgtgcgagtgcgcggccagtcccgggagctcatgaggcgccgcatggtgtcgtatctggagtcgcagttctcgcggttgaagcagtaccagccgcctgcggacacgaccgccgctcaggcccgcgcgcacagacccccggcctccccccgcctcagccctggacgcaccttccaggaagaggagccaccgccggctgcccctggactccttcaggtagtagctgcgggggaggacgcaccgcggggggtcggccagggctgccgacccgccgcgccccgcgcgcccagctccggcggagggaacgcgccacctgttccggccgcgcgcgacggtcgcacgggggcgccctcggccaggcccacggggagctcagggacggcggcggtcccgggaggtggcgctcgcggggcggggaacgggccgcgcggggctgtggtccgtggaaaatccccacgttccgcccggcgcgggtcccgctgtcacctcggcgcgggcggcggtcctcccggggcgcgcggcggcgcttgaagcgtgaaacgcgtccgcactgaaggagcgcgcttggcgggggaacgggacgccgcggggagcgcgggaggcgcgggcggcaccgacccggcgggggagccttcctgccgagccccgaccccacgcccaagtctcccgctgtccccggctgtcctcggcctgttgagcgcgtgggcggccccgccgctccccgacccccgacctcacgtcttttatctacttcggggctgcaaggaggtgggcagcgggcctctccccgccccccggtgtcgccggttcccgctggagccaggcgcgctctcgggctgccatctccccgccccgggaccgaaggacgccagcagagcggctgggcccagaggccgaggggtcagtgcccgagctggccggggaccagcccttccagcgccgctccgctccccacgcggagagtcaccgaaccgggcactcctcggggccaggaccgcggggcgcccgacggaagccctttctccccggggagagaacggccgcggcccgcagggaaggtccagccggagaccgggcgcgtcgggcggggcggggaggtgcagggcgcgggccttacccggcggggctgccgtcgttgcaggtcaccgaggtgttgagtaggag

SEQ ID NO: 65715 - DNA, 790 bp, Homo sapiens
cagctgagctccgccccatcccgcctcctccctacggcttcacccggctggtgccaacatgcagcctactgggctaaccatggagtggcagggccaccagggaaaggccaccctccaaagctgggggaggaagggcatggggatgggggagtcccagctcatcagtggagatgccgcctcttgggacatcacgcagacagtgtgtggctccttcctggacaggtgagggaggctggaggtcaggctcccgggtgccaaggggaggggcagagaggctggtcctttgccctcccagctgccaggctccaccgccctcacgagctgcaggccgcggcccccacccgtccagcctgctggtccccacgctcctgctcctgccgcaacagcggcagcaggccagggaggccatgtgaccttcgctcgccctccctccctccctgtgatccccacgtggcctctggggaggcagaaacaaaccctcagatcttgccactgggaacctttcagcgccagcgacatcaaagaggggcggcggcggcgggggcggccggcggatgcttctcttaaagggccacgccacttttaattcaaagcagatcctgggagcagctgtctagctgctgtctgggagggaaggtggcagccgagccctctccagacctggctgcagttgctccttagaactagttcaaccaggctgggtgcggtggctcaagcctgtaatcccagcactttgggaggccaaagcagggaaaacacgtgaggtcggaagttcgagaccagcctggcc

SEQ ID NO: 65716 - DNA, 3765 bp, Homo sapiens
attgccccaaacgtttaaccaaggatccagactgtgggacagtctaaggaaaataggaacagactcttcaaaaacgccactaaagaattaaaacccaccaggtgatgtgtggctcagtaaggttctgaggttgcacagagcatgggactggctggctggatgggagggctatggctagcctggggctttccccaggtttctccaatgtacatagatgtccgtgtttgtcagcatacaggtgtgtgtgggtgacatggatatgtcatcgacaggaaggcacaacagcacccatgcagagatgtccttagactcagcaatgactgccgggtgcggtggctcacgtgtgtaatcccagccctgtgggaggattgactgataactgcaccagttcccccttccacaggctactgggcagctgagccctagccaggagtccgcagagacaggcaggcacatggagagaggagtgccaaggcccggctgagccatggaggtggggggcggggcggaacacgtgcgagtgctgtccatgagtggcccaggtgctgggagctaagcacattcgacggctgcgagtcaggagggcagctccttctggaagcctggagctggtgaggccaggtgctttccctgctgcggtggctggcgatgggagtgtttcctgaggctgccaccaagcccctcctcagcatgggttggtgcgggaagtccttgagtgcctgtgggtcggcaggagctccggtgagactcaagttcgctcaccccacggttctgaaaccggtctcccgcctttcctaccctcaggtttagggaccgtcgcggcagccctagggctgccagattctgcactcccattttaggatgaaagaaatcaggtctagactgagggccacgagtcccaacacccagggaggatccgtacaggggcggggggactgccccaaaccataaggtcaggaggtggacgctgaccacagggacaggtgggcagggaagaggctcagctgctggagtggaggaagccgggagggtcgggggagagcagggcaccgagctggggacgtgtcagggacgaagcgagggtgggcgagcgcggaccgctgggaccccggggctcagtgccgctcaccgggggtgaccgcgcgcccagccccggcccagcctggccccggcgagcccatccaagccgcgcttcccggaggcagaggacgaccgcgctttccgggtctggcgcgggctttggcggcccaagggcggggccggggcgccgtgggtggggaaagggcggggcctggcaggacccggaagtgcgctgcggccccgccccctggccgcgtggctgcgcgtcctggctgttgccgataaagttgtttgacgccggcccggcggcgggtcacgtgagcggaaaatggcggccccggcaggcggcggaggctccgcggtgtcggtgctggccccgaacggccggcgccacacggtgaaggtgacgccgagcaccgtgctgcttcaggtgcggccgcccgcccggggcggacgggtaggcgggcggggggcgctgcgccgaggccccgcccattgcggtcggcgtcccggtgttcgggggcggggcctcggcggccaatgagcggcctcctgagcggcggccccgccccctgctcgccgtcacctgcgcttccgctggggtcccgggggtcccgggggtcccgagtgggggcggggcggtggcgagccttcccaggggtgaggtagaacggcgccgcgtgtcacccgcatcgagtactcggcgcccggccgagcccagctcgcgagggcgccgggaagagggaggagtggagccctagacccgcgttcccattccggggcgtcccccggagcgggagcccgggttgcgcggtggcagatgtcccggccgtggggcctggaagcgatttttgccgagtcactcactgcacttttacttgggcaccttgtgaccgcgaatcaattaaatgtaaaagtattggctgggcgcggtggctcacgcctgtaaatcccagcactgtgggatgccgaggcgggtggatcacgaggtcaagagatcaagaccatcctggctaaaacggtgaaaccccgtctgtactaaaaaaatacaaaaaaatttagccgggcgtggtggcgggcgcctgtagtcccagctactcgggaggctgaggcaggagaatggcgtgaacctgggaggcagagcttgcagtgagccgagatcgcgctactgcactccagcctgggagacagagcgagactccatatcaaaaaaaaaaaaaaaaagtatttattgagcctctgctgcgtgggggaccgtgaggatccgaaggtgcacacgactcggagtttgcgggagcagcccacggcgtggggtccccaggcctgggcaggtggagggcgcagccaggaggctgttggtgccaggcgtgcagagtgcggaagtggggcgctcccgcagaggctgcgcgggaccccttggtgcaaggccacggctttggctttttatggagaagaggggcggaggcggtgcaggcagtggcagcaggtgcacagaaccgtgccagagccagggggtagcttgtgctaggcaagtttaaggcaggttgcagaactacagggtttgaaggagagcccagggtgtgtgccaggaagatgcccgtgttgctgtactgcaggggaactctgagtggagctttcctacaaaactgaggggatggtgaagaagggagggagagtggacaggatttgcaggtgagagcctgcatttgttgcggggaccgtccatagtgtggtcttgtgcttggctttgcctgggcagagccacctggctcaccaggaagctgaatgcccttggctgacctggcccactgcgcccgccagccctgcacactcagcagttcaccatcctttcatctcacccccaggttctggaggacacgtgccggcggcaggacttcaacccctgtgaatatgatctgaagtgagtttgctccagctcagcagcagggtctgagtatatctgtgcccctgccccctgaacatactggctctcacttggaaaagcccccaggtggttttaaacagtcatatattccctcccaactctggagacccaaggccttggcagggccacactctctccaaatgccctaagggagaatccctcctgcctcttccagcttctcatggctccaagcgttctgtggcttgtggccgcattgctctctgcctccgatttcttgtggccttttcctgttttctctgtgtctcaggaagacccttgtcattggatttagggtccacttggataatctagaacgatttatcattacatcttcaaagaccaggatccctagtaagatgttcagaggtcctgggggtgaggacattgacccatcttttttgggggggccaccattcaaccccctgtaggttttattgcattgagttgcataagttcccagtggggctctgaggggaaagagctggccgtggagaaataggatgccttgaaaactgcaggtggatccctgcagtctcacagcccctggaattacacgtacgcttctgtgtggggatattgttcccaagagagggcttctgccagactctcaaggagtctgagacagcagaagggtcagagccctcatatggataggatgtgcgtgtctatcccacacgcgaagcttttcactttaaagtcctgttttctggtgttttttttgttttgttttgtttttgaga

SEQ ID NO: 65717 - DNA, 1558 bp, Homo sapiens
ctagttgccaagtggtgaaaggcaggggtgtggatggaccatgctgagctgctgggagcaggaagagaaccggggactgttgtgggtgaccgagacctgccgtggaacgatgccaagggtgagccgtgggaactcacacagcagctgagccgctttccatctgaagaccgtgagggagcagggtgggctttctgtaaatcagattcatgagctcagccatggaggggatttgtcctctctcagaggtgcccccgggctgtgctggcgtgggcaccccaggtgggagtggcccccagtgtgcccggcccctggctggatctcttcccaggcccccagccctctgctcccagccttgactcagtgcttgggggctggctgagtgcatctcagcctgttcctccttctgtaggtaaagccgtggctccgggaaagctgggtgatttctgcagccctctgggtgtgctggggtgtagggatgggctgctggtgaggacagggctctgccaggtggagcactggcctgtggccacactcagggtgggtctgtgcatgctgctgggccagctcagagctctgcggcccgtccctgtccatccctgcccgtccctgttcatccctgtccgtccttgtccattcctgtccatccctgtccatccttgtccatccctgtctggacctggctgggttgagaaggccggagcctgccccaggctctcccaggctctgtctagccgcttggcggctgggctgtcatgtggtgggtgatgccctctgcgggcctccctgagcccagtggctcctggcctgcagccacagcttctgttcccggcagggcgcatgctgctgcctgggctctcgtcagcacctgtgtttgcgcccggctttgtcatacccagacaggacatgaacacagagagctctagactcactgccttgtccccagcacacagccgcgccttgccggagcggggccccagcggggcggggtttgtggtgcataaagaatatgccctcgaagccagcagcagaggcgtgtctgccctcctggccgtcccgctggcttctggccctggccgggtggggagctctgctggctggagagtgtgtgagagtgtgccagtaccctgctgcgagcaggcacccgcggaagcgccccaaagcacttcttgcatttctggcttcggagcatggtgtctggtggcttggcctggcctggggtccccgggaggccctgggtcttgcccctgcggacattgggacttgcagaggtctgcgtgggggagggggagtaggggctgtgtctcctcgggcgctggaatttcccccgggccctggcgtcctgcacactgggccggcgtagaaggtctggaaccgattgcccaccacccctccctgagatcccgcatgagggagggaatctgatccctctggaggagccgcacatcaaagccgggctggcgtttgatgtcacgctgctgtgctctgtccctgtttgtgatttgaggtccccaagctggcggtcagtgccggggaaggactgtgagttgggactctggcc

SEQ ID NO: 65718 - DNA, 1018 bp, Homo sapiens
cgggtcttgtctgcagagcgtggggcgtggagcatggggctcgcagcccagagtagtgcccgcccgtgctcgcccgtcgggaggcgctgttggggtggggtcttggctggcaggaggggtccaggggagggagcgtgtgcctggcctgcatggcgtgctgagggcctttgatctgggacttgggcagctgattgatggagggcgtcctgcctgccccgcgcctcccatcgccgccagccgcacacgcagagggcccggggccacatgccgctgctgggtccctttcagtgatggggggaggggagaagggaacaaaacagaacttttttggggaacttcaaaggtacactttagtaagcaaaaagagtttccaagtttcccattaatgttttgcctgtgtgtggtttttggacttaaataaagagtcagaaggaagagacaggataaaatacaggcaggtcctcggccgagacccggggtggttcacagacccgggcggttcctgcctttgatgtcaggcattaattattagaaggtagttttactggcgatcagaaccgggcgctgggagaggctggggctgcccggcgccccctggccctgtctttgaagtgcctccactggctgggaggctgccctgcagccctgtgctgggctgggacgccagtcccagcagacgccccccacaactcggcctcccggcagctggcacgagggccgctcctgatcaaaggctgggtctgcccgcacgggctggcggctgctgccctgcctgcccctcccgcctcgggggtgaaccttgctcctggagccggggcctggggtttcctcagcacccctgctcacacccggccctctgtggctgacagccggtgtgggactcgtggggcggggaggagcctgtcccagggttttgggggtaaaccagcggggaggaggctgggcctggagcgggtcatgcactgggcgtggtgaatacaccctgcctgggacccccgtgtgcctggcagggcaggtg

SEQ ID NO: 65719 - DNA, 1781 bp, Homo sapiens
tgttccctagccagggtcccagtcaccacccgcatgagcccagtgccacctgctggtccttccagctgcttactgccagcagtaccagaaaggcaccagaaaaggtagagaaggcactatctccccacctgctccgggacccccaacactgctgccccaggccttggaaggaagaccacgccagagagtggcggatgccaggtctgcctcgacaatccatggggcttccccgtacatcggcagtggcctcggaaggcaggcccagcactggggcggttgtggagggtgcctaggacacagccagctttgccccatgacgtgggcgccacgccagggctacgggccccccactccccgtcattctcacgctcattctctgcaatgaccacaactccagctctggccagagcccctgggcctctagttgtcaggtgggcttgatagaacacatgacctcctggggtgtgtacccagtgccccgtctccggcagtggccttttggctactttaacctggtgttctcacaaccacccagtgaggtggcccaagcctcagtgactttctctttctgaattccggcaagaatcttcaactccaccaccagagttccccacaccgacaccccccgccccccacgcctgctgccttgggtgataaagaagggcctgattcaggagaaacagaattctccctgcttctacagggctgaagtcctccctccaggatgggttcacaagggcctgagaccctcccttcccaggccacagaggcccacgaggccctgctgacatcgaggaagctcggtgccccaaccttcaggtagagcagtagaaaggttcagaaaccactctgcctgcaccgatggggtcctctgcacatggcacccccagagagctccacttccaggaacagggaagagcagggcacgccctccagcctgggcggatcctggctcagacggcctaggtctgaccctagccctgctgagtcacttaacgcccccgtgcctcagtttctccactggcaggtggggttaatccctgtcaagtgtgtgtaacgtggagcaccgaagaaaccacgcgttcctagcccagtgctggcgcccaccggggagcaaacaaaagggaaaccactgtgcctggcggctggggtaggtcctgccggctcctcgggctggacgatctcactgtccccgtcctggggcctcatctccccttaacaaaagaccccaggctcagggcgcagggcggcggcccagctcctcctctctcttcgccggcttggactccgccgtgacggcgcccacccctgcctgtttctgcagaccctctccaccttcccgcagccccggctgctccacgccccctcctaccagctgcgagacaccagcccacgagggcgcggggcgcgcggcccggccggagatggagtctgagaacgggcccaacctcaaaggcacagggggcggcgcgggggctggcgtctggccctcacagtgtcacgcgtgaggtcgggacggagcgtccgcgcctgcctagcccctgccctccggccctcaccttccggaagccggatccagctcctgctccctccatgaccgcagcctcaacgcgcgcccaccggaaccccgccccgcgcctccagccaatgagaccggagcgcgcccccggagccccgccccgcgcccctagccaatgagtccgaagcgcctgctctcggagccccgcccccacgtctcagccaatgagcccggagcgcgccctccagcagcccctccctca

SEQ ID NO: 65720 - DNA, 795 bp, Homo sapiens
ggtgaggtggggccccctggcttgtgctggcctccacacattccctcccaccagcgaccccgaatccttgcagctgatgtctcagcctcaggccccagtgccccagactcagctggggactttgccaggccccccgtactccctaatccgcgcacagcggcagcctcttccagcccctgtgctgagggctcatccctcctgctggttctgcctggcctctgactccagctgcgccgtccctggcttcgcctcggcactgccctggttgttgtcatccctcctgacctctgccccctcgccacatgctacccagatctttccagaactgagctgggcacagcatttgcctcagcattgtgcagtgccccttgacctttgggatggtggccagatgccccaggatggcccttgccttttgcggtggagcagctcccaccacctctgccccacatgtgcacgcgctccccaacaccaggcggctcttgctcacagcccgaaccccacaaagcacttccacccccatgcactgagggggcacccctgacttgccgggtgagacgctgccccacacggcatagattcccaagcagccagccgctgggtgcagggctggtggccaccagctactcctgaggctaagcagccccggggtgacacagctcctttgtgtgtgtgtgtgtgtgtgtgtgtgtgtgtgtgtgactgagtttcactcagtcacccaggctggagtgcagtggcgcaatctcggctcactgcaacctccacctcccggttcaagcgattttcctgcct

SEQ ID NO: 65721 - DNA, 1228 bp, Homo sapiens
aggcccagacccgggtcagccagctgggcctgcaagttgagggcctgcggcggcgcctggaagagctgcagcaggtaggcggggctccggtggggggccccgggcgtgctagcccccaaccctcgcctcactccccagccttcgtgcctggcaggagctgagcctcaaggaccaggaaagggtggccgaggtgagcagggtgcgcgtggagctgcaggagcagaacggccggctgcaggcggagctggcggctcaggaggcgctgagggagaaggcggcggccctggagcgccagctgaaaggtgagccagacccttgtcctcccgccgcccactggtgggacgtgaggccagccagagagcggggctggccaggtctcccgtgctgaggccgtgccacggtgcgctggggctgcgtccgctcactgcgctccttgccctgcagtgatggcgagcgaccaccgagaggcgctgctggacagggagagcgagaacgcgtctctccgggagaagctgcggctccgggaggcggagatcgcccgcatccgggacgaggaggcccagagggcgagcttcctgcagaacgccgtcctggcttacgtgcaggcgtcccccgtgaggaccctgagccccccaaagtgagacaggccgggaggacccgggcgcagtaggagtgcatcaggcggcgcccgagatggaccaggggctgcgtcccgcccgcgccgcctctttgagacccgggtcgtctgttccacgcggcggttgcggcgactgttggtggtgtcgcggctgcgggggaaccccgtgggaggcgcctgggaagggctccctaccggccccttcttcccggtcgacgccacgtgggagcacaccgggaaggggtcccgcgggcgcgtctccccctcgccttttgcgatgtcaccgtgaacgctgcggccgcctgcgcgcggcggggtttggaaatacagcgcgtttgcactttgtgatacattctggccccgcctctccctccaaacgcgcgaccgtccgtgcctctccaaacgcgcggccctctgcccccagccctgcagggagggcctgccggggtgcggctgttcgcccctcctcgccgctgccttgaagggacgggagggccgcgggggctgtccgtctgggggttcgggcggctgcagaccccggagttcccagctggctcccggcggcagggggcgggtccccgagaaagcgca

SEQ ID NO: 65722 - DNA, 2249 bp, Homo sapiens
ggcgttcaccacgtgctctacctctgtgggcagggcgggggtcaggggcatagaggaaggaggctgccgcccatctttccctcccacccctacccagggcacacacagggactgctggcaccacgctggctgggctcccacctgactcaccagcaaacttgccaagtgggattcggttcagcatagtcttggccttgtgggggtcactccaggtggcctggcccatggacgtcatcaccactgtggggtttactgcattcactcggatctacaccgggacagctggggtcagcagggcaagtggggtgtcctaggttgggggaggtaccccagccctgctcaccttgtggggcccgagctctagggccatcaccttggtcagcatgtccagggcacccttggtggagcctacgaagaggaacccaagctggctggggctggggtcggtgatgagggcgaggctggggctggggtggggctgagggcacagctggggcactcacagtagacgctatggttagttactgcccgctgggagcactggctggagacattcacgatggcccctgggactccccgggctattaagcccctggccacaatctggaatcgcagcgagaccgtgaggcagagctggcatcactcacgagaattcccgtccagcccacagggcagctcacctgcgacacctggatgaccgcacgcaggttcacctcaaaggatctagaggccgagggacagaccctggtcagagattagggctgctgcgtcctccaggacagcccctccctgaggttcctccgccctcacaggctcacctgtcaaaggcctccttggtgacctccaggaagggctgcagcagggcgacagcggcgttgttcaccagcaggtccacggggcccacgctgcccagcgcccgctcggtggcctcccagtcacccaggtccacgcacacgggttctatccccgggcactgtgtgtatcagggggcagttaccagaggctctgtgcccagcaagcggcacagctggggactggggctggtgacctttcagccggacaagtaaaggagttaggagttccgaaggtgtcgggactgtggggccagcagccgggcgctacctccggccggttcacttcctccctgcgcccgagcgactcctgcccggggcctgcttcgcagccatttcggcctctttctgagcccgggggccccggcggctctgccgaccacccggccgcccacgcaggccaccagccccgagagagggtgcgcgggcgcccaggccgcggtgagaagcgcagcgcccgcgaggggaggcggagtcgcgcacagaggtaccgcccccgctcgctgccgccccctcctggctcgccgcctcgcagcgctgggacccggcgggacctacctcgcggacaaggctgtcaagatccgcctgagtccggctcacagccaccacccgcgcgcccgtcgcgtgcagcgcctggaccgtgccgcgccctatacctgccgggagcgggctcagtgaaggcgtcccctgcccgcctctgcccgccgccggcctttgcccacctttccccgccgcccacctttgcctgccccggtgaccagcacccggcggcccgcgaggaacagctccatgtcggcgcagtctccgccctccgcactggggctgcggaacttgaagctctggccacgatgggcggggcgcggcggggccaatggcagggcggccttcagataggcggtggggacattcaaatagctgctccccgctgcagtgattggccgaaaggagtgggcgcgccggggcggggcggggtctccgctgcctcagggacgggtcttttgaagtgcctggtgtgacccatcttccgtgcttgaaatcgacgtagtggaccctggctagcatatttttccctgccaagattattgcaaaaagacgatgtggtggttaatatcggaaagaatgtgtggttaatatcaggaagaacacgtgaaatggagaatttcagggctaacatttcttgttttgtttctgaaaacatcggcatgtcctaaaaagtgtcgcctgtgcccatcatctctcaggcttgggagcaggacaccgccggctcactttaaagccaagggaaagaatttggacaaccaactacgtctggagaagacaccaatgtcagcagagctccgctttcatctgtgggcgaaggattacctagatgccaaggcaagagactgaagacacaaa

SEQ ID NO: 65723 - DNA, 701 bp, Homo sapiens
catggtggtccagcaaagaccagcattgcttcccgaggctttggggtcagttacagatgcgtgtgtgtgtgcacccacacactgggcctccatgtaaaagctactttgttctgtgggtcatggtaggaaagtctagaactactgcccttctgtggccaggagtgaccttctgtggccaggagtatggaattggtgactgtagggcctttggatcatctggggctttgggcccacagaggtggacaggccggaggcaagggtggccaggcacagcaggaggcaaggtcctggtttgttctggaggacagccaagtgcatggtccatatcagacctggcactgcggccagtccaacccccccttggccgccctgtaaactctgctttctgcccctacccttggagcctgctttctgcctgccagcagccaagggaaggacacccctcaacctgtccttcctggaaggcccatctgcttagacccctccagcggcctgcacgtgcccccaggagagtggaccaggcctcactggtcctgttatccgtggctcaagccctgctccctgtgagtcctgctggctggtcagaagcaccctcggcatcccctacccccaccctgtgccctgtgccctcccaaccactgcctggagggcccgatcctggcccctagccctctgccctcttgcccagctttggaagattc

SEQ ID NO: 65724 - DNA, 2808 bp, Homo sapiens
gaggctcctggcgttcacataattgtcatcatccacgtggcaaaaccacctgtgggcgaggggagtcctgggcacgagggcctggcatggctggacaggaggcccccacccagcttggctctgagctctctgcgggtcgggtcagcgccgcgtacttgcgcccggactcaatgaacttgtcatactccacggacatcttgcagcagagggcctgacgagtgcgcaccgccgagcagttggtgttgatgacacggtcgcctgcgaatcagagacgggaagcacgcacgtagaggatggcactggggttggggtaaggcctgtgccccacctgcccccaagggccagggcacaacgtggctgtctgacatgcctggacaccttgcctgggtccaaccacagccctagccctcacgcgctgaccctgctggtgccaccgaggctgaagcaggcggccatcggttgggatctcttgagtggaaacaggacggaggcagctcgccctgacctggcctggaagggcggattccctgctggcgcttcttcaggggacgtggcactagccccacgccccgggaagcggctagtgtgagaggctggtggggagcagagcttggctggcagggtgggccctccgcaggccgcgtgacctgggcagcgtcggggcctccccgggcctcgggagcctgggcagagaaaggcacccacagcagcgaaggggccgtggcttcggagcgagaaaggctcggggggcagatcccgcgggcgccggggagtgggggacactcaccgccctggagctcgagctcagggtcgtccccgtcggtgaagataaacgtctgggggagaaacaatctatgaggcttctggggcgctgcccaggccggagaccgacccgccccgcgcggagcctccgggggcctgggccgggcctagaccctgggaggcggggcgggtgggcgtggggctcgccgtcggggtcggggtccggcgcacctgctggcgggcccgggagatccaggtgcgcagcagcagccgcaggcgcggcccgtggttcttccgggtggtcttgacggcgatgaagacgtcgtcaggccgcaggctgggggcagcgggccgggacgggggcgcgcgcggggccggggcgggggtccgggccggggcgggcgcgcggggcagcggcagcggcagtaacagcagcgcggccagggccgcggccagcgcgaggcaggcccggcacagcgccccacgcgcgcggctcatgcggccgccgggacccccggcgctgcgagcggagaacctggccggagccgtgggtgggcggcggcccctttaagaacgcagcggccccgccccgccccgcgccccggaagcgacggcttcgctgccccggaagtggacggcacgccgcggcggggtgggtgcaagatgccgctgccggttcaggtgtttaacttgcaggtaacgagccgaggccgccccgggcctccgcgcccccgcgccccccgccactggggccgggctgaggtcgagcaggggcgcggggcctgcgccaggagtcggtcgggcacgctccgtgccgggcctccgcgggcagcgcgcgtcgggggctgcagggccgagggcgcgtctccgccgtggctgcgcgctgcgatcgggggccgccgggccgcgcccgccccgcctcccctcccagcagctcacgggagaggttcccggccgccccgacgctaacgctctttctcccttcagcagccagccagctctgtgtcagggtcggggggtgcagaaagtcaggacagaatgagggatagctcggcccccagctcggcctcctcgtcagtgacagatctgtactgcacccctcacagcagtaggtcagacctcgtcctgcccggcacggccggggacttcagcctgagcgccagcctgtcggcctgtacgctgctctacgaggtaccttccaggacagggacccccgagcgagggaggggggagcagggccccggccgcccctgctgtggctgggcccctgctgctctgctggccgaggacagggactcagtgccaagcgcaggaggggagggagccccggtgggcccggggcctgcggagggagccgagctcttggtgcttttcccgaaggagcgcgggaggcccacgggtccggcgagtgcccggcatggcggcttttccagcctgctttgtgttaagccgaggtcctggcttctctgtgtctcccagctgggggccatgaggctccctgagatgactcttttccccttctcccaactccgtggcgtgactctcagcccagtattgctgctccgctgctcaggacagattccgggggctggtcctcctgcctcctggggttgaggtggcgtcccgttcttctccgtggcttggaggaaactacatcaggatggtggctgggaacgtgtaggggccctcagaggcccctgtgtagttggttgtcccctgtctgctttctggctttcagagatgagcggctagaatcaggcgaggggtttctgcttctgagccttagagtcttgtgaggagacccctccctgatgtggtggcacaggagcctgggtgggggcgggggtgactgggagggcacacctgggggacagcagcggcgggagtgtggtccgactggcctggaagatcttgggcagagctgacctcagagaacagtgcgggtctctcgccctcctggggcagtccccaggacgaggtgccaggtgcctggcccatgttgcagggggccgtggagcccatgcagatcgacgtggacccccagga

SEQ ID NO: 65725 - DNA, 2216 bp, Homo sapiens
ctgaagagcagagccatctccactggttctgaagagggagtgtgagtgtgagaggcagcaatccagaggccccagcagggctgcaaacctcacagcacccaggctgcctgagccactcctagagaatggggttggattctggcaggtgcacctggcagccctggctccaccacaggaatcactgctgtggctacgtggactctacatgcctggtgccaccttctccctctcctcctggaattgagctgtctctggaaaggctgaaagtgatgtcccgccacagagagaagggtttttccccaggcattccaggaccgggaacccaaccgcggccgcggccacagcccctcctgcgcacctgcacgatgaggggccggtcctcggggcacacctcgcagtacaggttctccttccggtagttggcgtcgcggacaaagacctgggcatgcagcatgggcgtgtagcagagctgtgccccgtggcgccggctcagcagcctccaggccagctcgctctggtccaccatgggggccacgacgtggcgggcccctcgcagggtgcggctccagaactcgaagccctgcagctttggcatcgtctccaggctgggggaaaggcgcagacccggggttcagccaggcccaacgaggggcttaagactcaactcagaggcagcggtcacccttctaaggccgctccagtaccaccgttgggtcacacgcgggggcactaaaggcgggggtcggtgcaggctggagaacggccactccagtgccgccacctcctagcggacctcgggggagccgctggacccctgggacttgaccctccctggggagcgggactcgatgtcggcctggtaggggactggcgtgaagggggaagaaaccttgacgccagcgtccccgcgggcctggccctgagcaggccgcccggcggtgaagttaggacccccggccccttcccgggagaatcggctccgcgccgggccaggggaagggcagagcttccttctccgcacccggccaggcggcccggctggcccgaaacgccacaggggcgcccctcgcgagactcctccggagccacgcggcgggcagcgtttgctgtgtgaagtgacaggagcccacacgcctccgcgtcctcaccgcgcgagggccccgccgtgtccgccgcgcgcctttggctccgagggcgccgggtgccggtgtcccgggcccgcccctctccggcctcgccgccgcccggggcccctgcagctcccggggcgccgcgaacgcccgcaccgcgccggggccgccgccgggccgcagccgggcccaaggctccgcgccgccaccggaaggtgcccggtcctgcgcggtccgggcggcccacggtgcggcgggaaacgcgttccccggaaaccgcgcccggctccgaggggaccggcgacgagaggtcgcggcgcggggtcggaggtcagaggctgaggtcaccaccgtacccgtcaggccgtggctagagaggggtcggggctcgccgggactcaccgacagctcgctggaaacgaggcatgtggaaattgggcctcgctgaggcgcacataaggcccgggccgcgggtagaccgtgggcgctgaggccctgcgctgcccagcccccaagttcgcattgggggcttcatcccgttatatcctaaagcggccccagagccctgcctcgaacccactcacctgccgcctctgaaagccactcactttccgccgctgcgttgcggaaaatcaccctccagggaccttccttgcccgccctgggtttccgcagccgccagccttcgatcgactttcctacccgccgtggaccctccttgggttatttcgagctgtggggacccactgggaaccccagagtggatgtgaaggttattttaaactgaaggcatttgagacccaacagatgtaaaaagcagctttgtcagagctttccatatctgagagcgaagcccgaagttgaaccaggacattcagtacctaaaacatgtgaaatctcttgggcccccggaatcactaaggaaaactcaggctggaagctgctcagggcaaacctgcctcccgctctattcagagtcaccctctgctcgctgagatagatggatatctgactgactcctttgaaaaggctcatcagaaggctgggcgcggtggcgcacattgagaccaggagttcgagaccagc

SEQ ID NO: 65726 - DNA, 1208 bp, Homo sapiens
gtccatcgtgtgtgcctgcttggggtggactccgaagaaggaggcatcaaacctagacaggtccttcagcttgccggaccgccggggcaggccgtagagccctgtgggacaggcgggtgtttaaatctctgacggaagctgcccagaggtgggggccctgtggggtgctgcaggcccctggaggggccatggtggaactgaggactctctgctatgcctgggaggcccaaacaatggagcaggctccccaggaggggaagaccatggccccaaagcggggactggtacgaccagatctgctgcacaagccccaagccccaagccccaatcctgagatgggccgcagagcagagagctcggcgggagtgaggctgggggaccatctgccgggctggtgcctcggctctaccatgctgactcacagcttgcctgtcaggtagagctgctctgtggaagagcctactgggtgtggggcagttgctccagcctcccggagcacatctggtatgcaacctcccagctcaggacagacacaggcaggggcagcctggccggaagggctctggccccccgcaccccctgcatgggtgagagaccccagcccgtcacccatcctctgagcttggctcctccgtaacaagcagatgggccctgcctgggccagccctcggccttgcagccattgggggagcctcctgttggccttgcagccgttgagggaacctcctggcaggctgggcgcattttctaggccactctggtgcaatgtccaggaaggaggctgcagctaggcctcgcccatgggtgaccagtggctctgcagctgggaccggcctcaggccagtgcctgggtggtgaggacacagcacagcagggaggctgctgtgaggacaaaggtggagatggagcttcacaccccaggcacggggagccccgcagccacatacccgccttccagcgacggtcatcgtccgtgaccatgtccacaccgccgatgaggttgtcccagaactcctgcaagttctccgactctggcagcttcccggacatgccggcaatcaccacctcctccatggctgctctgcagggcgggcggtgtgagtgccccacacatcccggccacgacacccccgtcaacagcctcggcacccagaacaggtggacacccatggggccaagcaccaccctgagggtccgtgcgggccctg

SEQ ID NO: 65727 - DNA, 8584 bp, Homo sapiens
ggacaaggcctcaggtggccagcctgctaagggccatcaaagaaatggagaggcagggtcccaaagccggggcatggaggtggctgggagccctagaggggggtactcagcacccatgctcacccgtgttggggtgggggcccgctgtccaggccagcccaagagccaccagggctggggagggacgaaatggggatagcctatgctctgggggaaaggtggcccctgccccactgtggaccgacccagccagtccaacccctccagcagggtccaacctggagaaccactcctggccaggacacgcaggtgttgcctggcacccttcacctgcgcgggtgaacccacagacgcttgcctccccataccaacccacacaccacaggaggccctccctggagcccaggtccctaagacccggaacgggtgcccaggccgccggctcctcctccagcatgagggctggtgcggccctggggggagggggcggaggccagcgctggtctggccacttgcacgaggccccagggcctgatacgcgcgccgcccctcggcagtgcggcctcccttgggccgtcccggcagggaggcggccgccttcccacccgctgcgattcacagaggcttggctgccccgggccagctccaggcccgcacgctgggtcctcgccgcttgctattcacgcggggtcgacggccaggcagggggtgggaacaccgcggcgcgcccggcctcccttcgccccgggcgggggctgctcgggacccctgcgcttcggccgggctgcgccacgtgatggggaggccggtcccggcgcggcccctgcgcccccccgttcctccctcgcggcgtccccttcgggctgggcctcggctccggggcggctccgggaggaggatgcggcggcgcctttgtgggcgcggggaggccgagccgggggctcctccaggcccttcagggtccgcggcctcccccacgggaagcgaaggcggctgttggtggctttccccggcgtccttcccccgccatccgcccacctactccgcggggccccgggcgcctccgaaggggcacgaacaccgagacccggacaggccgcccaggcgacccctggatacggggccgggccacgcgcgccccgagagcggaggatgaggagccgggccaccccgggaaccccgggcccagccccgaccacgacccgcgccccggccccagcgccggctgctcgtacctggtgagggcgcgggcggcggtgcgggcggcggagagcgaggctggagcgcggcggagcgggaggctgaagcgcggcggagagggaggccggggccgctgccgtctctctggctccctctaggccggcgccgacgctatttaaaccgcggccatccccgggcggccacgccacatgggctgacagcttggctgcgccgcccaggccaatgagcgtcggggctgcgccccgggacccggcgcgccgccgccggtggggtgatgctcgtgcgcgccgccgcccgagccgggaccctgcgcgggaacgcgcctgggggggtggggctgggactgaggagcgccgggggcggggcgggcgggaaaccaccgccccccgacttccgcctcccgccccgcgggccccgacgcgcacgcggctgcgaccgagcccgcggcgcgcctcccgagccatccccgacccccgtgtccgccggggccacgtgtgcgggatgggaatgcttgggccacactggggactaccccgtggccacaccgggggtccagccggctgcggcggggcgctcggacccacaggcgcgcggaaggacggacggacccgcgtgcccgcacttcggccgccgactccacgccgccgtcgctgcccgcgcggagctggctgagggcgcggcgttgcgcggcgcggcggcagcagcaaccaatcgggcgccaggggtgttcgcaccggcccaatggcggcgcgcgggtgggcgttgctaggcgatagggtgatgggcgggcggcggggcggtcccggatgcctcgcgggccgcggcgcaagtgcgggcgttgaccccggccgcgggcgccccggccggggttactgccggtcatcgcagcgcatccccggttttcctcgcgggtgcggcggggaacccagacccgagacggacgtccacccacccgacggcccctccttagcagcttcccggggacccggacgaggcgcagggccgaacgggcgagcgcactccaggccgctggagctcggcggaggggaggggcgcggccacgtggcgagcggagtcggccgggacacccacctggtgtggtgcggacaaagggagccgctgccccacttcccagggcggaggctgcgagttttccaggcgcgcacccacgggcgggggctcagcccggccctcgcgcgctccctccctcccgagtgattcctcgaatcgtggccccttgggcggcctgagccctgaagcgcggcctcccttttctgaccgcttcgcgcttgcggggccaggcaccccatggggggcaagcgggccttgtgaggccacaggtgtctctggctgcgtgtcctactttgagggctcagcaagcccgggccgctgaaggggaaccggagactggggcccccggcccctctgcaggtgtcccgcttccttcctctcctgagagcaggcctgagggtcaggcggccactccgcgtcttttcccttctggggctgtggttgacgcacggtgggaccgagggtcaaggaaggacaagggaagacagggccggggctggccccgcactgctgtccccactgcgggggttcttctgattcagggtgaggccctgtgtcagcctcaggcgtgcgggcacgcagctccggctctccatgctccaaacctcccaggtggccctggctgccagtgctggtgatcagcggccagcggggccctgctctctgcagcctgtcgagggctgggccagctacaggggagccctggctggctcccaaggaggttggagactcgtccagcaccctgagggcttccacagaaagtgagcggcagcggccgggcttggtggctcacgcctgtaatcccagcactttgggaggccaaggcgggcaaatcacgaggtcaagagttgtagacaagcctgggaaacagggaaactccgtctctactaaaaatacaaacattagccgggtgtggtggcgcgtgcctctagtcccagctactcgggaggctgaggctggagaatagcttgaacccaggaggcagaggttgcagtgagccgagattgcaccactgcattccagcctgggcgacagagcaagactctgtctcaaaaaaagaaacaaacaaaaaaacctcacagggccgtgactcgattccaggggacatgtgtgggagaccacagagcactgagagcctccagcccatccccaactccgtctggattcccatggagcaagtgacggaggctaacctcaaacgcccctgccctggggccacagcctttgtctgtgtggtgtggtctctgcttgtcacggttatccggcccgcacacctgtgagctaggccagccgatggcactgtctatattttacactgggggtgcaaaccaaagctgcaaaggtcccacgatttgccaaggtggcacggcaggttagggctgggagcagcgttctcccatcgtgttcccagagaagctgtctgcccagttcagaaaggtggcccgagggtatatggcaaggcccgtcaattcacccagctgggtaccggctgcctccacccctgcactctgctgtgggcagagtgtgaccaggcctggggggtgcgggggacagagactgggctcctgaggagtgggggtgggatatgaaccccccccagtcaccatcctgccggtcgcagagcactgcgtccgtgtgatgaacccccaccccagtcaccgtcctgtcggttgcagagcactgcgtccgtgtgatgaaccacccccagtcaccctcctgccggtcgcagagcattgtgttcgtgtggaggacacgcgaggactcttggaagtgctttttggcggggtagtgcagtgtgttccgggcggacgggcgtcagtttacgtgtgcgtttctcatccttgcaggtacctggccccgggcactcaggtggcagggacattttgctgttatccttcgtgggggtggacgtggaaggcccagcagtgaccgctgtccccggttggcccccaccctgccagcacctgacatgcacaccccaacctgcatgaggcccaggtgcccacctggcttccaggggtcaccttggcccggttcactgggatccaaggctctcactccttctgggagggcccctcccatggtactctcaggagacgcctgctttgtgggtgggctttctgatctgccccctacctgctaccaggctctgaggaaggccacactgtccccaacaccactggtgtgcagatggctgtgggtggtgacacgggcaggccaggctctggcacaggcacttgatactgcatttcccaagtaggacagataaacaacgctaaggccaagcagacgccccagggaggaacctggttttaatgggccctgtgctcagggaggccttcagtcagcagggtcgcctcagcagcatttgggagcctgccctgcagctccctgcctccaccctgcacgctgtgcccacacccccccacaacacgtaggtgaaagcacaggcaccatgcggaggccccgagcaccccttagtggggcggggtggggggaggaagtcagtccataatgttgtagttacggatcttggggggcctctggcagcctttagcttttgcaggatgagaccgggaggctcctgtggtcttggcctttgcctgggctgctgtcttcatccctggggtggcaatgcctgcctgcatcttgacgggcctcctgtcggctgctggaggagctgggagctctgtcaggtaaagaggaaaaaacagcatgcatcaggatggcagggggagcaggaggctgtgctcacaggcactgcacaggtgcagcacttccgtgttcccggccagcgggggccctgtgacccttggcctggctttcctccaggagtccgtgaaggccaaaggatcctggagtgaccagagagctgtggcctcgccttgctcagtgggtcctgcttggcagggactgggcctgcccctccactgggcacctggacatgtggctctgaaaatggtcctgttgtgaccatttcgtaatgggtcccaggagggggcaggggtgctgtgtggtaatgggtcccaggagggggcaggggtgctggggtaaatggttgactcaaagctcctccccccaggctgccccgggtgtccctaccatctgagacacattgcctgcccccgcctccccgatgggccagcagtgccaggcttttgaggccaaaggaaaggccgtgctggtgggcaccacgtggccaggcacaggccaagggcccaggagtgcgctacacacagaggctggggcctaaatgccagatagcccttcctaaacatcggctaaaaccatcttcgcagaggggtgttgtaggtgatcttctttatctggccagtttttctctatttttcattttttcaattaagaatgtgggggttttttttggtaaaacaacagcaaaatgttactaaaaatccatgcaagggctgggcttggtggctcacgtctgtaatcccagcactttgggaggccgaggtgggtggatcacctcatgtcaggagttcaagactagcctggccaacaatggtgaaacgccgtctctactaaaaatacaaaaaattagccgggcacggtggcgggcacctgtaatcccagctacttaggaggctgaggcagcggagtcgcttgaacccgggaggcagaggttgcagtgagccgagattgcgccactgcactccagcctgggcggacaagggcaaactctatctcaaaaaaaaaaaaaacaaaaaaaaccccacagtaagatgtgagctcagcgtccactgcgtggccacactgtggctggggtgaggtctagaggactccagcacgtggctgaatgtggcccagtgggcagtctggacaggctgacccaggcaggtcagcgggcggccaacgcctcctgctggagcccagcctgtgtggtctgcgtgcagcctgggtgactgggaagcgtctgtgctttggggacaccggcaatgacgcactctcagctgggctgcgcagtgcccatgggggcagccacacactcccagccctggccctgggcccctcttcccatctcagcttcttccactccgatccactcttggggtctcaagacacccggaaccagtcttccttttcctgcagccccgttggggtcacacagtccctggccccctgctggggtcctggggggccctggacgctgcctgctccctttgtttccaacccccagaggaattcctcctcttcacacaaaggctaccaccctttatctctcaacaataagcctgcctgacctcctggtcccggccaacgcccccatccccactccctccccccaccccccacactggctggcagagggtggggtatcccgtggaaagggcttcctgcggggaagctggtcctctgaccaggccctagtgctccactgtgaccctgaggcatctcctcaaacccagaggccttggttgtccctctgtaatgctcagggattctgggggctttgcccggcttgatcctcctcagacaaagcctgtggggattttcagaaaaagtgagctgagggaggggggtgaagggcctgcccctttgcctgggaggcctgagctggccctgctgggaggaccctggctgtatcccggggcgaagcagggaggtgtgagtgggtcacagtccccggggcagggaggggcagggaggggcagggagggtgagctggccccctccccagggcaggccggcccctagctcagaatatccactttacaggctctggtttcttcactggtccttttcctgcggagccctcctcagtgatggtggcagggaactggccatgagcccaggaccccagggcagcggacagccccagcccagccagtcctaggtcagaggcacggagctggatgtgtcaaggcggctgccccaggcgtgactccctgtgaccccggattcttctacctgatgctaatctgaggtcaacccagtaactggtgtgtaaaaacgctcttggcctccaccactctctgccccgccttctcgcctgacctgttttgccgagcctggccgggatttctctttctgcgttgggctgactgggccgcagggaaaccatgtggacacacagtttgccgggcacagcgtgaggaacgcgcctcttgggtcctgcacccctcccccacgggctgcttgtgctctggccccgaactgagcttctggaaagttcctgaaacatccaaggccttgcagtgattaaccaggggagggggactggggcctgcttgcccctcccaggcttaacccctcccaggtcctggtgtgtgctgaggcagggccacccaggctgggctccgtcccctcaggcggctgcaccatacttggagggttttttaaatttttatttttatttttgagacggagtctcactctgtcgcccaggctggagtgcagtggcgtgatctcagctcactgcaagctccgcctcccgggttcacgccattctcctgcctcagcctcccgagtagatgggactacaggcgcccgccaccacgccccgctaagttttttgtatttttaatagagacggggtttcaccatgttaaccaggatggtctcgatctcctgacctcgtgatccacccacctcggcctcccaaagtgctgggattacaggtgtgggccaccaagcccggcttggaggtttgaagctggtggaatctcagggaggacatagcctgtcctattgcagggaaggtgcggccctcactcccgtctcagcctgggggcatgagaactctgagcacaaagaggacggagctggtccccagctttctggccaccctgtgagtttcttctcctgcacctgagcctcagctcagctcttgaccaagttggcctctggtggctcattctccaggctgctccgggctctctgggtgcccctgggcacacctacgtggcttcctagggctttgggaagggccagacggtgagcccacgccttccctggttctccagagcctgccttggggctggggagggcctggccctgatggcagctcaggcctcaagtccattctgtggcacagaggcccttccgtctccctgtggcctccgctgctctgtgtggttcacccctgctgtgtcaagggcccttgttctgctgaaccccctctggctgccacaggggtcctcacgcacccaagatcaacccttctcaaatgcatctagttatttccaagtctcttgggaacaaggcttttcccaccactgtcagcacggcacccaggcctttagtgcagacggtgacagtgaatgtgacttga

SEQ ID NO: 65728 - DNA, 3387 bp, Homo sapiens
caatggggtacagggggagggaggcccacgtgatctggttcccacggtccctccacagggggacactccgggcctgctatgtccagctgccttccccacctcactggcacatggagcctggagcccccactgggcagatgcacaagaggggagggtactggacattgcatgctccagggctctgggcagtcctgccacccatcactcagcctggtgaggcagggccagcaggaaaccccagatccttcaggccccgcctgctggcctttggagcagaggagaggtgggccctcgggggcctgggcgccgaccacaggctgaccccttgtttcatgccagcacctcctctgggcgcctgtggctactcccccaacggcactggcaggtcccctgctgctgctgagcctgcccaggcctgtctgctacagcctgtcagtgttgcccaatgtgggccccatcccagcccttgagaggagtcacctagtagtggggtgcaagctggagccccaaggaagggaattcaagggaaacacatcgtgggcataaggctttgagagacgtgggtctgtccctaccggaggctgcatcacggaaggcgggcacacaggcctcacttgggcgagaagagacccagagacgcatggccttcctcctgggccggctcccgaccagagcccatctgagctcagcccacaggaaggggaggtgccaagaaccccaagcacaggtggctgcaggctggtgggtgccgaggaggccactaggaggctgagacggtgagagccagggccaggcagtggcctgagagctggacagcctctgggtatctccacaccccacccttctcctgcctttcagaagagtaaacgcaggagaacgccctgaggccccggaaggaaagtgacaggcagcggctgagctggggcgacaggaagtggcagctgtctccgctgtttcggaggcatgggaactgtttcctggtcctaaagtgaggaatgctggcctcatgccccttgggccaggactctgcactgagtgctgagtgcctgggctggtgtttagacgactcgtggtctctgttggcactgtctggggacagcaaaaagcagcaggggccagtgtgcaggggagattctgggtaaaattcatgaaaagggaactttcaaaaggggcccatggggccttcccaggtctgccaggccagcttacagctccaggtgggcaccctagcatctcagggccatagaccagcaggtcaccgccatgtccccggggaacagcactgcctgccactcactttgcctgagacccgtgtctcagggctgctccctgcatgtcttggcaggagggcggacagctgggaaggaggccacacgctcctccagggagcctggctctgcaggagctacgccagccacacacttatcagctgcccgacctgctcaggacactgagggccacatgcctggccaaaggcctctccccactccctcttctcccctggagaccaggcccctggagttgctctccagagatctgggcaatgaccctctggatcccagggtttttggttcccctgggaaaagaggcaaaggcccacacacctgcagcaggttgggggtggggggatgcatggcacagtggcttggcacccgggtggggcacagatgccgcgggagtggggagtggggagtggctgcctcgaaccctgctgtgtggcttgtcaccctccatggcgtctctgcgcctccgtttgactccagctgcacggcacacggggcgaggttagcatcaggggccaaagcggacccccgccagaaaggaggaagaggcccccaggtaggtgcgtgcttctggacctggcgctcggcacactgtgaggatgggcggatggagttggtctgcaggttccagaatgaatggggccctgttgtgacaggagaaggagggcagcctgggttgaagaaacaccccctgctgtccaacagctgcactgcccgctcccctggcaacacctgccacgtggactggagaagacacattagcccttgggctggaagtcgtggaccggcgtccacctgagatgggactctgggagggaacagccgccggccctcctgcctcagctgctctcagcatcctacagtgccatcgggtgctctcaggacagatgcctacagaacaggcttttctaaagaaagggggtgggctccagggcccagagtcacggcacggacgagggggctttggatcactctgcacacacctcaggatggaagtcctggtcagcaaatgcatgagcatttctggtggacccacctgctcctggggcaggctggtctctatccccattcccaatcccacgtgcctccttgcctctgtccacgtgatgttggagcagcaagccttctccaagctcagagtcagaggccacaggccactgtccccttggccaggccgcagtccttgactctggagcactcggagagcaagtggcagagacgagtgacctgcggccgctctggcgctctgcctcctagtgagatgagtgtcatggcttgcccgggtcctggagttgtgctgagagagcacctgacctgtgatcccacccctgaaaacgggctcctctgtggacagccgggctgttcttgctcctcgaaggagtcccccagcccctcaggaaagaggttcggccctggtcacagactgggcataaaatctgcatatttatagcagggtccgccgaaagcctaaaacaacagtgagtttcagggcaggatctctcttgcttgtgttgcattggtgtcatgttatcgctggctctgagttttaaagggaaatacacagggtagtgcatgtgacggtgtccaagacgcacagcagattttcattcacaaaaaaatctgaccacaagagctaaacggaaataccttccgctgtccttcccaagtcacagagcaaacacctcagttcccaggggtccgcatcagttctggtggaggcggtgactgtgagcgtgaccagctgggctaattcgtcctgacatttagttgggacagctatagtttcctacctctatgaccagagagtgaagcgtttcactgaagaactgtggccggcgtctccaggaaaggaaggagcctcgctttctccagggcaggggcagcgtggggcggggcaggccgggtgtgtctgtggggagtgggcgcgtgctcacactctttaagctgcgactgcttcctttaggacagaatgaagttcttcgaggaggccgatgaagacagaatatggataaggccaaacctacacaaaatccttctacatcttcatatcaaaacatgttaaacataaacctccaaatacctacagggatacaagcacagggct

SEQ ID NO: 65729 - DNA, 797 bp, Homo sapiens
attttttgtagagatgggatttcaccatgttggccaggctggtcttgaactcctgacctcaagtgatccaccctcctcggcctccaaaatgctgagattacaggcgtgagctgccatacctggccagaactctgtattttaaaaggtaagacttcagatgcagaaaaaagaaaaaaataaataaaaaggtacaacttcaaaacatgtcaagtactgacggacagagctgcaggaaagaggtaactgagagtagatgaagctgttaactcacccatgttcctcaaaaacaaacaaacccatgtcctcctggcaaaaactcattcatcaacggggactggttggcttgagtcatgaggcacaggaggtctaaccttacaggtagatgattcactttctctttcggcaaacagaccatgcctagaatctcatcataccaggccacagagcaagtctcaattcatttcaaatgtaacacaataaaatttgaaaccaacatcaaaacctctcatcctgcttctgcttcaaaattgtaaaacctactactgaataatttttggttatagagaaaatcataaaatgaattatttatgccgggcacggtggctcgcgcctgtaatcccagtactttgggaggccgaggcgggcggatcacctgaggtcaggagttggagaccagcctgaccaacatggagaaaccctgtttctattaataatacaaacattatctgggcatggtggcacatgcctgtaatcccagctactcgggaggctgaggcaggagaatcgcttgaaccctg

SEQ ID NO: 65730 - DNA, 1151 bp, Homo sapiens
caaagttctgggattacaggcgtgagccgccatgccaggccttggatttctgtagctgcagtttctcaggcaggttctagacgagccttcactgcagacagcatcagccctgttcccacggtgtggctcctcctgagtctccactgaatgtccacagtgatcactggggacccatccccctggctggagcttcagtatgtcatgaccgtgtgcgaggtctggaagttgttcaccttacatgctcctttctcctctttgcctggctttgtggagttttcttctatacatgtacaggctggtcctcagtacagactcaagagaaccctgtgcagatttctggagctcttttctgcagtttcctccttgcgggattctgccctgaaatgccggctccttctgtgtccccagaccctagtgcagtctcagctccgtaagggtgctcagctttgctcaggccctgcttccctccctgtgccggcagcccagaaacggccttcaggcagaaggccagggccccagggttcaccttgcctgtctcccttccaacaagggtggcggtcttgtccgggatctcggactcgtccagggtctcggtcttgttggggatctcggtcttgtttgaccagttgtccaatgtctgcaaacagttgtttcatatactttgtccagttttctagttgttcatggaggaacattaaagtctggtccttgtaactacggcctggccagaagcagaagtgagtgccagccgttgtgtgggcatagaataaatattatcagaaagtaagccgatttggttatttcttaatgtatttactttgttctaaaagttatttcaacacaagttactttcctaagtggcagtcatggtttcgtcactacaatttcaagaaaagagctaacagacatctacttgaccatctgtttctcagaaagttccaagactgccctgtcctttcagaagccacaggtcatgataatcagtgaaggcggggggctggggttgtccgtgccattcagggcaccccagtgctcccttcttggccagagcactggttcttggattcctgtagcttcagtgacaaggtgctgtggggctgtgcatccagcctcataaaatgtcaccagcgtgacctgctctctcagtcaca

SEQ ID NO: 65731 - DNA, 549 bp, Homo sapiens
tagaaaaaaaaggcaaattaaaaccaataatgaagtatcagttttgacttatcagattggccaacaaacaaacaaacaaacaaaccatttgctaaatccaccaatactgagtgaggaaaggtgcctcacgcctgcaaccaggagcagggggccaacgtcctgggggcaattgggtaacagcgctcagaactcaaactgaccctacctttgaccagctatttcccttctgatctaacagcagcctctgtgagcacgcagggcacacgcacaggaggttcactctcttaagagctaaaaacgacaggccgtccaagtgtccacaaacatcagacaccaaaacaaagggaggtgagccgatgcggcggctcacaaaactaccagaaagatctgtcggctctgtgtgtactgacataaaaaatactgcagacataaataaaaaagcaagctgcccccacgatatgcaattgacaagaaaagaggatatacacatatatttaaaaaaccacttctgttctgagggtggctggggagtctggaggggtgcagggg

SEQ ID NO: 65732 - DNA, 1153 bp, Homo sapiens
ggccctgtctcaaaggacaaaaaaaaaagaagtttttgggttctgggtgacagagccaggccctgtctcaaaaaaaaaaaaaaaaaaaaaaaatagaagtttttggtttttttttcacttatcataccagattaaaaaaatagtacccagatatgtaaagctatagtaaaacatatacatgatacaatttgtaatgaaaaaataaaaaaaaatgggggctgggcgcggtggttcatgcctgtaatcccagcactttgggaggcagaggcgggtggatcacctgaggtcaggagtttgaaaccagcctggccaatatggtaaaaccccatctctactaaaaatacaaaaattagtcaggcgtgttggtgcatgcctgtaatcccagcaactcggaaggctgactcaggagaattgcttgaaccgggagggggaggttgtagtgagccgagattgcaccactgcactcaagcctgggcaacagagcaagactgtctcaaaaaacaaacaaacaaatgagaaccaaaaccaaaccaaaacaaaacaaaaacccagcagaaaacacattgaaatgttactaataactatatctggatcctgaaaattggaggctttttatattgtgtttattgtaatctgaagtttctgtaatgaaaacgacacaattagggaaatatttttaaaaatgcatgtcttagatgaaggggtgttacctgagatgtaaaatggggctgcacctgtcccaaaggtgggctgcgatccaaaggcctcctgggctcctcgcctggcttccgggcctcaggggcaggagggagggcgtggtgcaacagccaccctgggaatgggatggggacagagtttgttctctgtgcatcacttctggattcctcttgtgttgaatgcaaacactcagaaagaacagcatgttccttttcaaaaccaaagtaacttccattacatcgagaacttggggagggccggacaacagtgaactgtgacacacagcatttcggtagagctcttgcacacacaatgccacgcccctgccacacacagcccttgctgtcctcacagcgggggcagcaagcacattcgctaacagaagcacccagacgccctttctgtggcaggcacaaagaagaagcaaaaacttgcc

SEQ ID NO: 65733 - DNA, 1771 bp, Homo sapiens
gcagtctgtcagtcgctggcaatacaggactcctgagtagtctcagagtgtggcgttctctctataactccctcagttacaacatcgggttcaagcgattctcctgcttcagcctccggagtagctgggattacaggcgtgcaccaccacgcccaataatttttgtatttttagtagagagggggtttcaccatgttggccaggctggtctcgaactccgggcctcaagcaatctgcccgcctctgcctcccaaagtgctggattacaggcgcgaaccaccgcctccggcctttttttttcctctctttttttttttttttttttaaactcacagacactgtaaggctgcctgggcgcggagccgtccttgccggcggcggaacccggggaattctcccggggctgcggggccctggtcggcagcgcccaccgccccaggtcacccacgggagaccgagggaacgctcccgctccacgcggccgcaacccccgccccgccccgccgcagcctccgcgaggggatccccggtccgggcctggccgagctctgagggtcgacctcgcgctccaggtccccaccaaagcgctgcgtccgacaggacggcagctgctggggttttctacaggaagagtggtcggagcggcgccccccacgcctcccacgcctcccacgccgcccgcccgcacctcaccctaacgcccgccagcagcgctggccaggtcccgccgcgttgccacagcgaccgggtcagtcggccgcgtccggctgcgctcggtgcagcgctcgggtcccgccgacaggaaacggggtccctggcgctaggttccggcccctcccgccccgccgggttccgcgctgcgcccgggtccgaggggcgccccggccgacccgaccaccgccgcagatcgaaggagggagcccggcctcctcaccggtcagcggggcgactccggacggggctccgggctatggggacggcgggttccgccgcgcgaggcgcccccaccttcgccgcccccggcccggccgagggtccccaggcgcccgcttcctgaggccgcccggctcgcggtcccgaagggttgacttgagcttttgccctgagatgaagggagcacggggcggccgaggctgcccgtgggggtctgttcgggccgggggcgccacgaagtcctgcctaagggtcggctgcggccaccggggcacgagttcccggcgctgcccacgggctcggagaccggcggggcccaggggccgtgcgcgcggtcgctcagaccctgattagggaactgggggaaggaggggggtcgggacccaccgaggcccgaagtcgcccccaccatcctgtgggaacaacatcctcaggcacagccattcccaaccattcacatcctcagaaaaaggcacgtgtccgtatccatctgcggatggatgaacagagcccggccccgggacagagcagcctggctcacccgaaccctcagcccgcaattctgcgtgggagtggagggggtgtttggtgtctgggaattcccctggtggggcaataagccaggggtctggtgtcatcctccacccacattgttaacactggatcactcctctccgtgccgtgcctgcagcccaggcaccctgcagcctgtcctccccgaaccatgcgtcctggtagagctgtctccctcgcccacagtcctcagtcccgcctcacacaccaaaccctcttctgcctcaggtcctttgcgccagttgcctctgcctagacttggttc

SEQ ID NO: 65734 - DNA, 503 bp, Homo sapiens
cttcagctgagccacatgcccgggtgccccagggacagagcagggtgtgccacgggcactgcctggttcctgaagctgtggggcaggccggtctggccctcacagcctgtgctctgattcgagggccgttccgttgggttgagctccacggtcccagagcgcccgccgtcagctcaggcccgaggctacacctactgaatccccccagcactgcagcacccctccccttccttccctgccccccacactgcagcacccctccccctccttccctgccccccccacactgcagaacccctccccctccttccctgcccagctccccagctgggctccacctgggcaccctcagtgcgggtggccgggagttggctgagggagaccacattcccttcactcctggcctccagcacccagcaggactcacaggtggaaggcagacagggtgtgagccagggcctgggccgccaaaacaaagaaccccaaactggtcctttcttctt

SEQ ID NO: 65735 - DNA, 2112 bp, Homo sapiens
tggaggccgagggcccttcctggtgccccggtgagtgacacggccaggacctgaccctcccatgcctctgtggcagagcaaggtgggtggggaactggctgtcctgctcccagctgcgttcctggcacctatgccccacccacccagacacacatctgggtgtcaggcagccgcatgtcactgagtggggtaaacaagggagggtgagaggaaggtcagaaggccatggctgagggcgtaagtgtgggctgaggctcttgcttcccagaacacagactgaccttggtggcagacctcaccatgggagcccccaaaagctgcttgcttgaggcctccaggcctcttgcagggccctaaaagcacagggatccaggacaagaggtgcgggggcccccgcctgggcaccagcctgcatgggccagagcaagccacttcctctcaggtttggggaatgcccacgtcagacttgcagaggcaacttctccatctgtctggctcacaggccctgtggcaggagaggagccaagaaatgaaagggcccggtgggtgtgggcgggccctgctccgatctggatctggccagtgcctgtggcacgccctgctctgtccctggggcacccgggcgtgtggctcagctgaaagggtgaccatgggcaccatttgcctggctcccaggtcctgaggccagagaggagccaagaaatgaaagggcctggtgggtgtgagtgggcctcagtgtctggctgctccaggaggaggggggtgggcactgactcctgcctgagggctggaggcagggaggctcctctggacaggaagaccctccaggaacagaccagcaagactggcactgtccagatgggaccaggagccggacagcggcgtcagacatgccccacagcggccgtgaccacagccacttcctggaggtcaagacctggaggcagggccagtgctgccagggatcctggtgtggacacgggcaggaccaggggatgctccctcgaggctggtgtggaacaggccgtgctgcccagtgggtgggcacccaagggggctccaagccaggctgtcctcccaaggccggcttcgtccagaaggagaggagccaaggtgccccggcatccaccttcctcggctgccttgtccactgcagggacagcagcctgtgagcaggaggtgctttgagggagctggggggaccctgggggacacacggcatttccacactgtaaccacgtcacgtagagaccacaaagtcctcctgtcttggggtaaaagtgaggaaactgaggctggggaagctaaggggctcacgtggcctctggaagggacggggctggaccccggccgccgacagtgtgaaaacagcggttcctgagccagtgttgcggcaaggggcaagggacaggcactgtcagaagccccatgcccctccccaaccccccaggaagttccactgagttctcagtgctgagtcactggctgcggggcctgcggtcctggccggacaggaaggttgggcaaggccttgccctccccctcaggcgagaggcacagatcctgccacacagcccggccccactccccaggcccccggccccataggcctctagccacagcctggctgctgtcctcatgtccttggctctggcctggtgaaggccaagggcacttcagaacctccctgtgcctccatgtgccaggttggggctgggcacgaggccacagcaggggctggcaggtggtgacctctgctcctcgacctgggatgctccaggttgagacgtagggtagctgcagtcccagcaatgacaagctctgggtaaccctggtgagtggacggccaaggcgagcccagcctcagtcactggggggtggacggccaaggggagcccagcctcggtcactgggggggtggacggccaaggggagcccagcctcggtcactgcggggtggacggccaaggggagcccagcctcggtcactgggggggtggacggccaaggggagcccagcctcggtcactgggggggtggacggccaaggggagcccagcctcggtcactgcggggtggacggccaaggggagcccagcctcggtcactgcg

SEQ ID NO: 65736 - DNA, 1550 bp, Homo sapiens
acactctgggccccagcgggggccttccgggcagtggcgcagagccattggaggtgcccgggccctggggcaggggcggggcgggagcagacagagctcagggcgtcctcctagcgtcacctgcccgagtcaggcccatctgtgaaatgggccacgccgggcagccgcacgcaacggaaccgaaccgccgggctcctgctccgagacccgcagttcacgagtcgacgcccccgagtcccgagccgcgcccactggtcccacctctgcagcaagtggagtcggccccgccctgtggcttcgaggccccgacgcctggcgcggctcccgggctccgctgaccccggtggacccgcgcgccggcaattacggtagcgtccagtagggcgcctactgcgggcaatacgggggctcctcccatggcgcggtcacgtcccccacgtcccgcggctggcggggcggggccgggcggagcatccttccctccccctcccccgggtgggccccgcccagcctcgaccacccgcgccgacccccgcccgcagagccgggaagccggaacccgcaggcgccctccagccgtccctccggcccgggcggggattgcgccgaggaggggcctctcctggcgagggtggagttttgggttccccccttcgccccgcacctcccgccttcctgcctcctcccggtcttcaccttcccccccgggtccccacgacgcccgctgggcggcggtggggtagggggcgcctcctgacccgactccccttccagccttggccttcaggcactggctttagggtggaggggcggccttgcggggtccaggaggcctcggaggtgggggacggcggctctggaccagctccggcccccaccacctcccggccccagggcggtgacagccttgcggagaaggggtcttcaaagctctgagaccccgcagtgccagctcaggattgaagcctgcggcggcacatgcagccttcctttcccaaaggggacttgcgcccagccccacttggggcaccagtgggggctcctggccctggccctgggtgggagtggccaatccgcaaatgaggcctgtgtgtctgccccgccggcccctgccgtcgtgatgtaagcggacacagagcggcagggcacgggctgcgcgaggggtctgcgggggtcagaggtggggcgcagggcccaggcctggggcagccccttgcgcagcgtccaccccctgcaagctcggccccgacacctttgcaggcgcctggggcggggctgccgggagttgctcactgctccttccttgtttgcacaacaggggctgcgggggaagaagggaactgagggaggcccctcccccggtgcagcgccctcccgccctcggcacccctcggcagccaggcgctggccacagaggccgcttccttggtcctcaggcagctcatgggatccaggaaggaaacgaattacccttttcctgccccgcctcctgcctgggccacaaaggcagggccaaagcccatccttcaagggctggagtcagttaggta

SEQ ID NO: 65737 - DNA, 1013 bp, Homo sapiens
agcccctgctccctctcagggcagggaaccccaggagggcagctgcaggcctgggaagctcaggcaggaactggaacttgggtcttgccgttttccggttggggccggtgagcggggcaggggctgagcctcacccacggccacagtgaggccccacacggtgtctcagtctggggcagcaagagggaaccacgtgaggcgggctggagacagggaaggcccggaagccagctcagatgcccagggcacagccagaatggctgagaggaagggcctgggaggaggcaaagtctgggcaggaggggctggcagagctccaggccatgggcatccccacggttggggaaggagtgcatcacaggcagagttggcgggacagccccggaacgtggggctcagaaagctacaccgttcttagagcaacctccaggcaagtgacccgaagtccctgtgctttttcactacaaacaaaaatatcctcctcttaggcagcgtgaccctggccaaggggccaagggagtggcctggagtggagagtactgggtggaggtgggggtgggaggggagctgggaggggaggcggcctagcctggctgagctcacccacacacgagcacaggttaggagttggtgcagacctccctgctctggcagcctgacagcccccgcaggccttggataggggccactgctgtgtgctctggggggggggggaagaggaaccctatctccttgtgcctgtgcagggccatcgggcagctcctgggcttcaacagctcaagcgacagggggatccctgagcaccacggccctatggcagggggaagggacatgcgctcaccccaggcggctggagtgcggctgccggtgccgcccgagaaggcagggactctccagaaccgtcacacagaaagtgcgtggacttctgtgtgcacaacagagcccaagggggcagcacggcgaggagcagtcgccacccctccctgcccggcagcaggcccagggggcagctc

SEQ ID NO: 65738 - DNA, 3687 bp, Homo sapiens
catcagccctgcccaaggcccctgcacttgcccgccccagacagcctgtggtagagctccacggtgccattcccttttctccatgctgcctgataggcctccgagggggtggtttgagtttccccctgaggaagggctaggtttttacccaatagccacagtcccagtccacccaggcctggcatcacaggcagcgggagtcatctctagccaacctattgcaggcaaacaccctccaccaggcggagggaggcccttctcccttcctggggacacaaagccagaagaatcgcctgttttcaacgccctaaatgtaccacctaccaacacgcaccggtcacacatctttcatcagtctatggctaaaaccaatgacacatctaataccatgacgatcggactatgagtttggaggcaaaattacactttttatctagaaatgttccatctctgctttactccaataaatgacaaatgtgacaaccaccatccctctcaggttcacccacaaatgctcctgagtttgaatctggcccaaagccttccccaaatccactgcatgaggcatccaaggagctttaaccgaacaggagagaaaaagaagctgcacacagtacatacccagctctctcctcttccctcacgagtcccttcagagtataagacactggaatcggccgggcgcggtggctcacgcctgtaatcccagcactttgggaggccaaggcgggcggatcacaaggtcaggagattgagaccatcctggctaacacggtgaaaccccatctctactaaaaatacaaaaaattagctgggcatggtggtgggtacctgtggtcccagctacttgggagcctgaggcaggagaatggcgtgaacctgggaggcggagcttgcagtgagccgagatcgcgccactgcactccagcctgggtgacagagcgagacaccgtctcaaaaaaaaaaaaaaaaaaaaaaggacactggatccttcccaacagcgtggctatgtggaaaagaattcacactagcttcagcagcccagacaaagccctgggagacttccttccctgagagactgtggtgctgggcaaagcaacttggctagttcttagtgactcggtttctcttgtcaatggagatcagtggtgaggtctgacgtctgtttcatgagagttgtggagatgaatgggttaacagtttcttttactgctctttaagataaggttccctgatgaaaagcagagtaaggtcaagtgagcactagagcagtctgctgatatccacacgtccactgaacacccaggaagcccctcgtctgcccagatggcggcatgagatgtgccacttccagcctgggccccaaaccccttgccactgctgcgttccacaggaatcgccaccaccgggtcaccgccagtgaccattctagatttaagaacgtcacttactatcaacagagactcttcagagtactcgaggtaacaaattttgttcttcctgcctacagttgggacagtctatccaattacaagagaaatgacttcatcgaaaaatgtactgtgtaaatgaaaaaccactctgagttcctctaaggacctggactctgaactcaactcgccagccgggagggagggtgactcatcccactagttatgtcagcagctccctgcacccccaagcaggcgcagtgcagcctcggacagtaccgccaccctcgccagctggcagcccagtgaccccatggcctggggccgatggcttggggccacacagtctgctgactagcatctctcactccacttctctgtagctgataaagctaatgtctgccagtcacacctgcagcactgactgtcgtggggcaaaagtcatcaccagccgctctggcacacaacacgaatcacaccctatcatggggccgggacctctcgctgtgcaagcacacagatgtgcaagcacacagagccagccctcctgtggaaccgacaccaaggtcgccccgagtctctacaggggagtagctggatgcaggtcctgtacacagatgtgaggatggcaactctctggggcctgcagcagggacctcgtcacctgctgggcagaagcatcaagaagcagaacaccaaggtctgtgcattccaaaggcaccacctgcctcaaggtcgctgagcactgctcagaccccctggcctgcagccctgtcccacctcgcccaccgggggcacccccacactctaccagccatgctgctgaaagtcagatcctcaagctgccatcagtgcacaaggcagcacagaggcgctcagtaactgtggctgcaatctggcatcgctgcagcattttgaccttatacacaagttttggcatgcaacaggttgaaaattacaagcctggttcttcaccacaggttaaatccgagaagcactactagaaggggaatgagaatttgaaagaccctgagccctgggtgtcagattcaaaacaaaccaaaacctggtgacacgcagatcaccaggttgtctgggttgtctgtttatacaaaagacattctgtcaacaaaacaaattcaactcttccctgcagctcaacaatcctggtctgctgtgagacagggctttcctcagtccgtgtttgggtatcagttaatgttagtcctacaaaaacaaaattacgtccctcaagttcagcagccaaaagcagatggtggccgggtgtggtggttcacgcctgtaatcccagcactttgggaggctgaggctgatggatcgcttgaggtcaggcattcgagaccagcctggcccacatggtgaaaccccgtccctactataaatacaaaaaaaattagccaggcatgctggtgtgcgcctctaaccccagctactcaggaggttgatgcggaagaactgcttgaacccagaaggcaggggttgcagtgagctgagatcgcgccactgcaccccagcctaggcaacagaatgatactttgtcttaaaaaaaaaaaaaaaaaaaaaaagcagatggtgagttaagcgaacctaaccagagtgtggccctgtcctggcacaggagggtaattctgaattaccagcctggatgctggcaactcccattaaggattgtcttgtcaacaaaaaaaacagggagacgccttgagcagcaggacaaaggtcaactcgcagggcagcggtcagcagtaccacgacttctcattacagatgcttgagttaaggagagtccaaggtcaacagaggctacagccctaacactgcagtgaggagaccccagaagctacaggaagaacaggtggtcgctctcctctcatggctggtcagcatcttggggccctattgcataccaggcaccctgcaggctgcctcttgagaaatcagtcagtgaggggaaaaacgtgtgcttcagagatgaagcagttagctcccaaaagatgcttgtgcacattatgaagtcagtccatccaggtaacaggtggacaaatggaggccctgacaagctgatggtgcgatgggatcaagtacagatgccaacagattcatctgtccagcccaccagccaggtaatccagtcctgccactaacctccagaacacactacaggtgagaacagaggcaggaccagctgggctctcactgcctctctgcatgggccgcctgcggggtgaacacagca

SEQ ID NO: 65739 - DNA, 1815 bp, Homo sapiens
aggttgcggtgagccgagatcacgccattgcactccaacctgggcaacaagagcgaaactccgtctcaggaaaaaaaaaaaaattacaaacttgaagatttaagccaacctttcatcacacttgtgttcacgtgcatatttttccattgtaaatatgacacaacccaaaaccttctaatcccattgtttttgaaatctaccttgagactgttacagtctaaaggacacctcatgagtacaactacctcatctgcctctcatcttgccagcatcttaatcctgtgtgactttctctacattcacctaaacttaacccttgctcatttgcactcagtcaccgctccaaggccaaggggaaccgttcagagagaacccccagcgggagggcaagccccactcctagccgggccactcccccgctccacacggcatttgggtctttctgacattttcccccacgaatgcaagacaccggggcagcctctgagggggcagccagacagccccggaccgggctgcggaagaaagagcgtggcctttgtttactgcggtgaccttaggcgtagaggaagccgacgcccgcttcgcggccccagccctaccccctcccctcccacggcccgctgcccccacccccgccctgcccctcccccaggcccgcctccccacgccccacccagcccttcccgagtccgctccccacgaccctgcccctacccaggtcggctccccagagaccatgccccaccccgggtcagctcccctatcccctccttccccaaccctcccctctccagaccctgctcccccgacctggtcctgcccctcccccacgtccgctccccactgccctccccacccctggccgcgctagcctagtggccgttgggttctggccacgatccggcggtgccgggacttgcgcggagaccccgcgggggccaccacttccttccgcgatcgcgcttggtcttggcagccgcagggcccgggtcttcgggcggcgggcgggggcggcggggcctcaccgagatagatgtctccgaaggagccgctgccgatcttccggcccagccggtacctgttcccgactctcagctccatggcggcggcggcccgattcgctcctgccctcccggccgcttcctgggtctgaactctgggaggcggcgccgctgctgccgctactgcgggtccggctcccggctccgcccccctcacggccccgctttcaccatcgctttcctgtcgccccgccgctcccagcgcctcaatacggggcggatgggacagtccgagcgccgccgccgctgctccggcccctaccggtcccgcttgccctctccccgccgcggatggactcggatcttccgggcctaaatcccctttcagctgcctaaaggagccgccgccatcgcgctgtgacgtcacttcccctagcaacccggcggggcggggccgcggcgctccaggggcggggccgggcggggcgagcgctccaggcctcctcccgaccctgcgccgtgcccagcccctctgccctcctgttaccccgggacctcgggccgccagccccttccacgtgcaggctcctgctgctctcgcgggggcttttcgtgtgtcccccgagatgtcgaggaagccaggtgagttcctcgcgacaggcggtgccctttgcaggaggggacaggtagctgaggcgtggacagagtgacaggccaggctcaggggacacaggtgagaccccctcactgggctgccagttcccgggcttggggcatcccagtacgtcagcgtctgcggccttacctcctg

SEQ ID NO: 65740 - DNA, 1555 bp, Homo sapiens
ggtagaggtaaatctataggggctgaagcagatttgctgggccgtgggcagggtggggagtgaacgctcatgggcacggggtttctttctggggcaacagaaacggtgtcacatgagatagtgagcatggccgcccatctccgaatatacggcaaagccataagctttcaataagtgaatttcacagtaagtgcattatatttcaacaaatctgttttaaaatcttaactgagccgggcgtgctgtctcaggcctctagtcccagctactctggaggccgaggcgggaggatcgcttgaggccaggagttcaagaccagcctgggcaacatagcgagaccccatctctacaaaaaacacgttaaacaaaaacgttaattgggcgttccgtgttgtatccagcaatcctaaccgccctccgtccccgcgagccccagtccttcccctgcggctgggctgggtcccccgtcccgggcggtgagggcgccctgcaggcgtccacagagctgggcttccgtggcggcaaccctaaccccagcgccacctggtacggcccggcccgcgggtccctccgggtcaggacgcagacgcgcccgcggcggtaaccgggggcccgggggcctcgggcccaccccggccagaccccggggaggagcgcaggacactgcccgcgccgggactcggctgtttccgatcctcccgggcgtcctttaggagactcattcgcagccgacgttgcggaggcgcaggaaaagggcgagcaggtgcctcagggacaccacttccaaccgcacgccgatcgccggctccaccataaatagaaacgggtggtctctaattggcctagctctaattggcctagctgttgtcacgtgctctccgatggcccaatcactaaggctggacgatgctgcactgtgaatggccaggcccgagtcatgtgcccggagagggcggggctgggcccttccgctcgccgcgtctggcgatcgcggctacggagacccaggagggcccggccaggagacccgctctctagagcggcgagggcaggggttgctagggcgccggggtcgaacccgcgcttcctgcaagtcttagggccgcatccctgccgaggcgggcgttgggaagggtgggagatgggaaggtgcggtggtgcggggaggggagggcgccgggaggggtcggagaggggtcgcgggttttggggctgcgaggagggaaggagggaagaggagggaagaggagggcaaggggaggggagggcggggaggagagagggcgcgggcaggggagtggagggcgcggggaggggagggcgcggggaggggagggcggggaggagagagggtgcggagaggagggcgggaaggagaggggacggggggagggaggggacggggggagggaggggagggtgggggaaggaggggaggggagggtgggggaaggagggaaggggaggggaggggaggagagggcggggaggggaggggagggcgcgggctgcggggctgcggggagggaggggcgggttcagggctgtgggcccc

SEQ ID NO: 65741 - DNA, 662 bp, Homo sapiens
gggattacagacgtgagcccccttacccagcctggtaaccaccattctactctcctactaattccacttttttgcactccacatgtatatcagtgggatcatgcagatttgtctttctgtgcctggctcagtgatgtccttcaggttcatccgtgttgtcagcaatgacaagatttccttctttttaaaggttcaatggtattctaaggtgtaaatgtgtttttttctgtgggggataggtcagagtggtgtgaaaaactatagggaaaggacgcaaaccttctgaaagggcggagggttctgcagagctcccggggagaatagctgaaggcagctgtcctacaactctgaggcagagggcaaggagttggtacaaaggagtgtaggggaatttatcttaaacaggcttgtttacttatgttgaccaggaactgacctttgatcatccgtccaacgttccctgaaaggggaacgataaatgttaattacctacaggttgtgtgggctccaggttttcggcattgtgcctgcactgagtaaaagcagacagtggccgggcgcggtggctcacgcctgtaatcccagcactttgggaggctgaggcgggcggatcatgaggtcaggagttcgagaccatcctggctaacacggtgaaagcccat

SEQ ID NO: 65742 - DNA, 1985 bp, Homo sapiens
cctatcctgacctaagatgcacaaatcaacccatcttgtcaggcagataaacttctcataaacctgtaaaacatatgacttatgtatcccagtggtcttatctttcctatcatgagatgtctgctagtccatcatcctggaattatccatggaattatcacccatccatggctcccagctatgccacagtgactgcaatcctaagattgggcatccggaaggatggcccaacaccgtgccaccctgcagctttgccgcaagctgccctgggtcctgcatcctcttcgaggtggaatgagaacacagccgagagctcaggatcttccaactgctgcccacagtggcaaaaagaaacctggtgggagaagatgagtcagacggagccaggagcccgcggccggtgacgccagcggtgggggaacacaatgtcctgtgggtgatcggtgagcgagcggacggtggatttctcctgcagtcggtggcaggaaggatgtcatcacgcgctattttgtgaccagcccctggaccacaactcacgtgagcagaagggctttcttctttgcttaagatgtctgtgcttgcaaacttactggccacaggtacaaggaggttttctttgcttatgttcatattaaacatgttaataaaggtttttcttattgtccttgtttttacatttataaattactcataagctgacgaaacagaaaacagagactcatctccggttcccggtacagtgaggtgagagctgctgtgctgggtgcgggaagcgcctggccccaggttcctcctggacggaggccagaagggctgagcaagagccagcgaggctggggaggaggaggaggcgctggaacaggaacggccggccgggaggggcgaggctgggggacagtcacgcagggctgaggcgggcgtgtggtgcgggagcgtgtgtgtgcaggaagcttgtgtgcgtgcgtgtggggagcgggtctggtgagggcgcacttgggcctgagccccttccggcccctcgtgtttgctggaggctgcgtgtgctgtgtccccaccccagatgcttgccctgaggggcaggtttccatccaacaccccgattgtctccttcagtaaacccccggcaccgtctacccggaagttgtgggctgggagggatgacatgccctggggactgtgagcagtggaacccacgtcattgcaaggaaatgatcacacaaacaccagctcggcagagtggaacctttgccaaacctcagagctgcagcgagcggctgggcaaccttcctgaggacggcgccccctcgcccagctccaagctcctccctgtccccacaggatatccctggacctggcgggtcactctagccagagcagccttccacagtcctccagggtcagagctacagttgaggaccctgtaggtggtagaggtgcccggggccgggctctggggctggcagaggcaatgtcagcgcctgccacctgcgatgtggccagggaacttggggctgagcaagggcacagaggggagagtgtggcatgagggagaggcgggaccccgcagaggctcccacaccttccaaggcagcagaggagaaggggaggctgccaacagccagaccagggctccaggggggcggcagggggcccagggagctccgggaaatgggacagccactgtccacctgcagaacgctggcttaagccttgcagacgggcccagtgggcagggtcgtgattttcactcccgaagggcctggggtgacaagccggaggtctgggagatgggactggagaccgtgttcagaaggaggagctctccactctgttggcaaaagccctggagctccaggcatccacagtgaccgaatgttggtaaagtcccagaggacgggacccagggcatgcccctcactggacggtggcctcgggccctgcagggagttgaatgtggggtcatgaagatgtcagaattgcgtctg

SEQ ID NO: 65743 - DNA, 547 bp, Homo sapiens
tgactggacacggacggatggacggacagacggacggcagggtgagctctcggggagcacacagcatgctggttggagccgccatttggccacatttcaccaaatacaaaaccacatggtgggtgccatgtgctggcaagtgccaggggccttggtgcccatgggaggaggtgggcttcaggggcacctggccttcgggctggactgagtttcctctgacgagcaggctggctgcctgcctggacgctctgagtgttcagggactgcagggcctctaaggccactgcacaaattcacaccgtcccgagggcagcgggcggctgtccagggggtgccccagcccagttacactttggaaccactgttggggggtgggggcagaatctcccgaaaccagggttcttccacctgggattcttccctttcagttttgttttgttttttgttcgttcttaggattctgactgaactgctttgggatgtggtttgggatgtggctgagctctgacatcttttaaaagcccctcgggtggctcagtggctcacg

SEQ ID NO: 65744 - DNA, 1378 bp, Homo sapiens
agcccgtccaccagcccccccaccctgcccgtccaccggcctccccagcctgtccatcagcctccccggcctgtccaccagcccccccaccaccctgcccgtccaccagcccccctcccggggcagcactcagttgcgttcctttcgaatccatcgtttacacctctgtgtgttcctaatgcgcaagtcagctttacctctgctgctctcactggcaaggcaggctgctgggcagcttccagcaggcgagcctccttgtgccatcttgtctcaggcctgcaaacactaggggccccctagctgtgtggctcctctcccgccaggcagaggcggctccagggcacacacccacggtgctgggggagggccccacaggcagtgatgagcctctcacaggccccagcgaggtcgccgcttctgtgcttcccacggggtccccactcatgccctgcatacaggaggtgctggatccgtgtggatctggatcccctgagagtggctgggggatgagggtccctgtgtggaagctccacaaagccccacctgcctccacgcaggagctcagccttgcacaggagactaccctaacctaaccccaaccctaactcagtcagtcccgccggtggggtctgggccgatgcctgggctggtcaaaggtcaggccctcacgtggaccaggtgacgtgcttttgcatgaacctgttgacgttcctgctggactttgaaagggaccagggaagggaaagtgaggggaggcagcctgggtctgttccaggtggggcagcgggtaaggcccagcaggagccctggcaggacacgcctttcagccgagagaactccaccttcgaaggcggctggggcaagggttcgtggccaggctgccctgcctctcgggtgcctgcacccctgctaggaaaagtccctaggtagggcggcaactccagccctgcctctcccagctcccagtgcagcccacacgccggagtgcagatgacctgcagggaactcccatgagggaactctgtaaagcgaccttcagacgtgctatttatagatgtctatagatttatagatgtgtgtttctccaaacaaataaaccaccagaaagtgtcacagcaggacacgtcaccaaccccggggaccccatgttaccaggggtcctcctggagcctggagtctgggcctgctgaggacctggcttgcagacgggctccggccttctcgtcccattgccccaagcgctccaaccccctgtgaacatgcctctagtcatccctgggccctgcacagccacaggcagccacccggtcattcccatactctcaccatggtcctgcctccacgtggaagaccctgccagccgcagagtgcaggtgtg

SEQ ID NO: 65745 - DNA, 1153 bp, Homo sapiens
acagacatcccaggtgggcaggaggtggctcgaggaggcctggaggacccggcgcctggcggggtggcaggcgggccacgtcctccactagaacccgagggggcacgcgggcaggtgcgggcggggtcaaggatgaccaggtatcttcgggacactaggaggaggccccacaggctgcagtcacgtgagtgggcaagtccccaccgggcagatgatgggggacactggggcgtgggcaatgcccccagtttcatggaagagaggaagaagcagaaccaaactccgggaaaccctcaaatgtggggaatggacggagcagggccagactggacgctgaaccttggagcctgcagctcagccatcagacccagggtccagaggtgggtggcacagaacaaagtcccccgggatgttccaaaagagaaactgtcgccaaattggcaggtgaaacacagcctgtcatcctcccagcaagacggcaccatggccggggcacagaggtcagattccccagcccccgccctcggggaaaccccagccaccctggctgccagtgagatgctggagagggggctgaaatcccacctgcccacgtcctctgcacagaggggcttgtccccgaggccacatcccccagcagccacagcttccttctccttttttcctgcctactagatctctcaactcagagggggctgcagttcctgggggcaggggggtccggctgcttaggcaggagcacctgcaccgtgaggctctggagggcagctgaaggctggcaggcttttgtcccgtgaggggacaccactgggggttggaggaaaacgcatatcctgataaagcatttcatgttgtgaaagtgaaactagtttgtttattttggaagtaatacaggcacagaaacaaaatagaatgaaaccaactgttgccttttcctccccaccctggcttcaattcccaggttgagttatggacactgccttacctatccttctagaagttttcctggtccatacaaacagcacagccatccactcacgtttatttctttcttttttttgagacggagtctctgttgcccaggctggagtgcagtgctgcagtctcgatcactgcaacctctgcctcccaggttcaactgattctcccacct

SEQ ID NO: 65746 - DNA, 449 bp, Homo sapiens
gcttgcgggaaatttaattcttggagcaggcattctgggtcctgagtgcttttccccagccctagcccctagactccagcttagtaatcagctctcacagaaccatcacgtcggaggcagccttccaccccctttcctcccgcgcacaggcaggatgagctgctcccctttcgggtcggaagctgcagctgtatttggtttcagttcggctgttttcagctcacagagaatgaactgtcttattgtgtgacccttgctccgtccagcggacgctcggagaccagagggacttttcccgccctctccagcccagcctcgcctccccagcacgtggcaaacgtcccacggaggggactggtgggcatctggggctcccccggatccagctgattgcaggagcctctcggccattcacacttggccacctcctctcccccagcagaacccct

SEQ ID NO: 65747 - DNA, 1995 bp, Homo sapiens
aggcctttgctgtgtggggtgtgcagctcccctggaaggccctgggcagtggagcagcctggatggggccccccctgcatcaggataggggctcggttccagcactatcatatccccccaccatgcccacccctgctaccctccacccacacccccagctgcttcagcccagagcaaaaatggtgagggagaaggtgtcctgggcgggccttggtcccgagaacaaggcagcaggtggcccatgcctggggggcaaaggatcgcatgaatgaactgtgtccccggctggggggtggatgtctggtggcaggtgcctggcggcgggtgattggtttgccaggcgccctcacagactgccccacgtctggcctgtctccaggcggctctggcgtggctggggtttggtttctgatcgttgctccccgaccagagctgctgcagggcagtgggagtggacgccacgttccccaaactggcctcaagttcaaaggggctttttcagacacccccaggtcccaccttcccgccttcccaatagagcgtggaggacatggtcttctggggtccacggcggggagggtggggtgcaccggcgcgtggatgcaggggtctcaaggccccaagccacacttcacatgagttattcctcaacaaagaagcacctgccatttagagctgctgaactcccaggcattccaggaacagtgtgcttcaggaagtgggttgcacctccaaccagcaggctccgctgtttacctgcccgggcacgctccgctgtgggaggccatccccgtggaatggacctcaaggcggcccgccgctgcaggtggcagcagtgactgcgcttgtggggtgaggcggccctggccggggaggatggctggagctgcttggcaaagacttgcgctcttcctgccctgaacctgcacagcatcacaggtgcgctcctggccacctggagggtcagccccgggaggtggcgtggtgcacgggcccctttctgcccctaggaaagcacttggtgcaacccatgctgtctggcaccttccctcatcactcacaagggcaggtttttccatctgaattccagacagatgacagtcccagctggaagcgaggctgccaaggccaacggccaggctgttccagactccggcttttcccaggccaagtgcccagccccatgcaggggtcaggggaggccagttctcctgggactgacccagggcccagaggcgtcgcgtgccccaagccaccgggacaggtgcacaggctggcactggcccaaggctgggtagttctggtctgtcacttttgcccacctgcagccaaggagacccaggctgggagggcctggggggtgagtgaggtcacagcaggacacagccccaacggtcagcagcctggagactccggtccaagccccagccccctctgccctccccgcatggggcccctgcagaccccactgccagctaggcctgggatcttcctgtcacctccagccagcccaacgggacctcctggcaagcccccccccccacccccgcttccctgaagcccacagcaacccacaggccgagcggcctgggctgttgggtatttcatggccccgacgggagcccctttggcagagcccaccactgggctgctctccaaccgagtgctctcctgtttcacagctaagggacctcggctcgaaggaccacccaggctgtgcctggggcccagtgctggaaatcccgggagtggacacatgcaggtgcctgggactgacgggtcctcacagggcgttgggccgggctccgtccgtccaggtggcctccggcaccccacagcgcgattaaaaacacagagctgtgtctcaccccagaactaggagttggcgggaaactggagccgctgcccccctgcccttcagccaaatctggccaccctgagccaaaattcctcccgggggctgggagtcaggccggggctgggcctggggcctga

SEQ ID NO: 65748 - DNA, 600 bp, Homo sapiens
agggtcattgggcagaggaaaggtggacagggcaggggcagggtgtttggggcaggggcagggtggtcagacagggttagggtgtttggggcagggtggtcagggcaggggcagggtggtcgaggcagcatcgcacagatgcacaaggtacagcagagtgtcggagaggggcccagggacccgcccctgtggtttggtaccaagtgcagctggcttcatgcgctggaaaggcgtcaggccatgcctgatcgatcagacagcagcccacaagcaccaggacatggggcaaaccgggactccacaatatgcttttcctccctctccctacatcctgcctaaaaagccagccctgagcctggacgtggagcatccctcccgggaccatgggaataaaagcctcgcactcagtgctgagtgccagcatcaggggcttggacccagggatcacaaggcaccgagatgaccttggttcctttctctgggccttgtgccaggagataaacagagctccacttggctgaatatcagggaaggggggctgtagttactgtggttaaatgatctaatggacataggtgttgtatttcaaaaacaaaaagt

SEQ ID NO: 65749 - DNA, 998 bp, Homo sapiens
gggacagcgacagccaaacggcaggttcccggagcagcagcagcagctcatcaggctgggagcaaagcccccttctctttctcctgcccctctgggataggtgggcctctgccgtcggctaccgcggctcccgcccgcacctgccctgctcccagcatgggctgcggtagaccccgccccccgcggcagaccacgcccacctgcccccccccacccccccacccgggtcgggccaggccccgccccatcagccccagtcccgcccactccatggccctgtccgccgccgcagcgcgcgcccttcccctcctcaccgctacctgctccggttccggcgctcggccgctccgttgccctcgggcgccttggttgcggccctccgctgaggagccatcggaccaggccgccgcggagccgggccggacgcgggcgccaggcccggggacgaacgccgtaacagggagcgcgaggcaggcacggcgcagggacgcgagtgcgacgcgctcggccatcggcccctgggctggcggccaggcccgagcaatcggcggccgagcggggcggggctcagagcggaggcggcggccgcgagggcggggcggccgggcctggctgcgcccccggacctcgcgggaccgcggcggcgcaggtgaggtgcgggtgcggctctggctctgcgcgctaggccgggcggctcctggctggaagcgtttcccccgcgccagtacctgaagagggacggccgggctcccgagcgacgcctcccagcgtggctgtcccgcagcggcgatgcggggctgctgagagaggctcgcacagagcctgtgggtgtaaattgtgtgtaactggtcgtatgtacaaactgaaagtgctgtgttacagagcccttagggtcagcagcctccgaacccctgcacggaaccaggggctggattactgaactgagtctgtctcacatgcaaagctttcctttccttttctcacccaatcctttgtgc

SEQ ID NO: 65750 - DNA, 611 bp, Homo sapiens
ctgcacacgcttcccgtgggcccctctgtgtcccgtccacaaactcatctcctctcccagctgccccatagctctgggcagtcaggaacgggagtgacctgctacggctgcagctccggccagatcaaagtcccacagccttacctgcggtggcccatgactgcactctgcgtgagggggtgggagaagcccgtcgcaagccggagcaccaccatgtagcctttcccgaagtaccggaccttctcctcctccacgctcacatcacggacatcatggagcaggaccaccactgcggggagacggtcagtggccgagccatccccgcccacacatgctgcccggcagtcgcaccagcgccactggcatcatcgaaagcgacagccacacttggttggcagcaaaagcatttgctgtttcctgcctgaggctgggccccggaggactgctgtggccctgaaggcagtgcagggtcctctgggtgggaaggacgtgcccgcggtgcaggctggcgggtcacatgcacagcccgctggttctcctgggagtgccgactgcggggacccgctcagcgcgaggccatctttacactgcactgttcctccaggtctccc

SEQ ID NO: 65751 - DNA, 1306 bp, Homo sapiens
attgtttgagtcacggagttcaagaccagccagggcaacgtggcgaaaccccgtctccacagaaaatacataaaacagcccggtgtggtggtgtacgcctgtggtcctagttattcaggaggctgagctgggaggatcacctgaggccgggaggtggaggctgcagtgagcagaaatcgtgccactggactccagcctgggtgacagagtgagaccgtgtctcaaaaaaataaaaaatagtgggttcaaatcacacaaaccaatcctagatgctggtatatgactgggctccctcccgggcctcagttgcctcattgctcccgaaacacccggcattccacatccaaatgcacacacacacgcacactcgcggacacaagcacacgcgcgctggcaaagccgcccgcgccgctagtcgcaccgagcgctcgtttctttgtccggatcgggggcgctcccgccgccggggccaacctgcagcggaacaggcgcgaggccgcccgcgacgggcacggcgggacacggaacagccggcaggcgggcccaggacgcagacccctcccggagtgggcctaagggtgccgggacgcgcggcacggagcgggaaggaagtgcggagcccacccagcccagccgcctaccgagagcacagcggtccccgcgccgcagcagagagacgcgaaccggcgggggcggggccgcgcgcacttccgggattggagcggagccgagccgactttcgggggcggggccgcgcgcgcttccgggattgggggcggggccgcgcgcgcttacgggattggggcggggccgcaagcatttcctggatggggcggagccgagcggatttccgggatccgggcggagccgcaggaggaggcgggtggttcctgctaaagaagccagttttcttgaaaaaaagaaacgtgcggggaaacgtatccgacagcaaagaacttaccaaggactatgaacgtcttgctaacatagaagcgaaactgaagcggttctcattgccaaaaaagaagatttgagcatgaataagaacaggaattcgagtgaatttaaaatcctcagatgctccagtctgtaattcataataatgtattttttaactctgttcacctttggaggatgctggtaagctcaccccagtttgtggcctggttaataaaaggaaagcatcaagcatttgtcctgcctttatgaaatttacagcagagtaaccaaatactgcatgagaagaatttctcattatagaagttttcccgctaataaatgaagaagaaacagtaggattaaaaca

SEQ ID NO: 65752 - DNA, 2072 bp, Homo sapiens
acaaacacaatgaagcttcaggccccttcacgagggtcatgtcatctcaccagaaccactccatggtcagtgtctcttatcagtaaggaatactggtcaattgggccgaaactgcaaatgagagagttgttatcagcggtggagtctttcgaaagcgctggtttccgttaagctcttagccaagaaaacctaatggtagttagccaagggttggccttaataacaggtgtctcacctcccatctgtcatggctgagaactgccttcaaggcaaccctgggatctccttagccagtagggggttcgtgtagtcagttgggggtctttggatttcattttcatttctcagaggacaggaaggaaggctctaacatggggaatcctgagaactgctgctgtctgttaaatacgcctacaagttatttttcttatgtcacactctcccagacatgttcttacttctcatttctgatttctgtaatacacacacactgatttcataaaacgtttatgagtccaacacttccattatagccctgtatcaatgttttgcttagctgaaatcaatttcttggaggagtaagtgttatctttactttgtaagctgtaagggcccaaatcaatgtacttggtaaaactatccatagtgaacacacgcaaatgtcaaatggccatcatttagcatctgccctcgggcttccgggtccatcacgtggttactgacaggcaggccgcgcatgcgcgctgctactccgccgagcctacgtgacacgacgtcaagtggcaatggcggcggacgagggctgtgcccccggcccgccccgttaggagccgcgagtaaggcgagtgtccaacgccgagctggctgacagagcccggccgcggcctccgcgggcccaggggcctccaggccccgtgaccaccggaccgagcaccctggaacggccccagcttggcctcgggacagtccgcgcgctcaccgactccctggtgaacgccgcttggccgccgccgccgccgcaggacccacgagaagcggaaaccggcgcaaggacccggtccccccggcgccgtacgtggagtgagcctgcggtccgccccgcgcgctccgattggctctggggcctggcccgccccttcccgacactgtcattggcctaggcaaagccgtaagggtggggaatcctattggcccaggggtgcggcttgtcctctcccggtgctctcattggccgagcgcggccgttgggggtgaggccgcgtcgggggaggacaacaaagggccgcgggcggcgggcagtggtgtcccagtctcccggtgcttccctgaggctgaggcgcccggcctcccgcccgccgcgctccagatgaagtgtgagcactgcacgcgcaaggtgagcgccgcgggccggggaggcgcgcgcctggtgcttgtcctgtggggctctgggcggccgaggttggcggtccgggcccgccgctcgctcgcttcagggctcttcaaggcgcccccggcctcggcaccctgggcccgctcggcgtggaggcggccggcgcggggtccgctgcgctctgcagggcgggttcggtcttcgcggttctccctgaacttgtccatctttcccacgcccgcgaagcgcggaaacgcacggagaccgagcctctcgtgccgcgcaccacagtccgagtaaacagcggtcgtggcgggaatgatcagaagcgtttcgagagggttttaggcgttttcgaacctgcccctctgagggtcaccgagcagccggtgcaggggcggaagcgggtgacggctgctgaccggcgccttccgcggttgtctccaggccatggcaacaaccgcgcagcgcacgcaggggggttttgtagctgttattgccggaatgggctcctgtggatgctgctctgtggctggcacttctgcgcgtgacgccgtggcaggaggcttcctaacattccatgggtcgttcatccccggtggtggctgcgtcctattctaagtacacctgtgtccaggggaattcgcctgtggggtgaaggctacagttgcttctgcttttt

SEQ ID NO: 65753 - DNA, 1060 bp, Homo sapiens
actggcgaccttgtttcttaaaaaaaaaagggctgggtgcagtggctgacacgtgtaatcccagcacttcaggaggctgaggcaggctggtcacctgaggtcaggagttcgagaccagtctggccaacatggtgaaacccccgtctctactaaaaatacaaaaattagccaggcgtggtagtgcacacctgtaatcacagctactcaggaggctgcggcaagagaatcacttgaacccgggaggcagaggttacagcgagacaagattgcaccactggactccagcctgggcggcggaggtgagactccatctcaaaaaaaaaaaaatgcaaccagtgtatatttcatcatcctatctctgtgagcttgttatacacaaaagttttctgtttgtttcatgcaaagtaggccaaaaaagtttacagattttccacatgggaaaatcatggagagattgtttacataaatcccacagttcaagggcagaaagaggaatggaaagaggagttagaattgaattctgcttacgttttattagtgtttcattttattggcctcactttgccctttagatggactcctgctgtgtgtgatggagatttcataagagggaggtcacccagggtcactaatgtcaaatctcctgcaggggaagaaaagttcctgtggccacctgtgtcttttcagtgtcttacttcgtttgtctgcaggtgaaattgctcaaataatggagcaaggtgacctctcagtgagagatgctgccgtcgacactctgtaagtggcttctctggggagagtcctctggggggcaggacctctcgtcagccctgccagccacctgccaggcccagggctgccctgctttatgacgaggccatgtgaagcactgcgatgcagtcccccaggcccctgccacaaccctcagccaccctatagctgttgaatgggataccattcaccagggctgccagggagttgaaggtttggcgggcttccatggtgtgattgccaccctaaacccttgaggaaggacaaaatgcacaaacagctttgtcctcgc

SEQ ID NO: 65754 - DNA, 928 bp, Homo sapiens
gagggaaagaaaaggcaggaacccctaagcccactccctcaggagaggaagggaagagaggatggggatccagccagacccttttgtcaggaaaacacttgctgggttccttacctggaggggtctctagtgagtcggttgatggcaggaggctccctggcagccagacagggagaagaatgccagcctctgcaggcaccttcggccacgtggaggagcagacctaagtgtggccagggaggtttcaaagcctcgaaaatgctgcagacaaaggatgcatgtcctgtgccagaccctgttctctaagccaggagcaggtactgatggggggtcccgggccaggtggacacacagagaagaggactgaggagtgcaaaacccctcccttgctcccagggaggcattttgcccaagccagggaatgcagagggcaatgagcccacaactgccacaatttctgggacaaagctatgaggcaaggtatgctcacatcaagatttgaactcagattgctgctgttgcctgtcctccgtgccttgacacaaacagggacgttattggggcctggagaagaattatgggccacaggctgcccagtcaggaaagaaaagggagtctatagcagaggatggtttcgatccatcgacctctgggttatgggcccagcacgcttccgctgcgccactctgctggctataaggggggagcctgagtcagatcatgaccacaggagtcatctccctgcaggcggcgacccctactggccaagaggggccaacagaggactggctgggcaaggcacatgctcaattataagcctactcctcctctctcaacttcttgtagataaaactctctgaattcatgtccttttctgctgttaaaacattggctggaggccgggcacagtggctcacgcctgtaatca

SEQ ID NO: 65755 - DNA, 1625 bp, Homo sapiens
tagcgaccaaccacacatcgcaatactagtggggtggggcagcccgcacctggtgacaggtggcctcactcatccttctgtggaaggcgcaggggccaggccggaaaagaccctgaggctggacctggtcgtatctgcgtccctgcaggaacccactgtcgctgcccctgcacgacgcccgccagcccacgatggcagcaacaggtgatgggcccgtgcaggtgggaaaccgattttcctctcagccgctcgccctccggaggcagctggcccaaaagaggggcatcgggcgtcctcctccacacagccttagagggggaggtcggcaccagcatctttcccacgctcctggcagatgcgcccacggcttctacccgggatgcccgagcgtcagtcgggccagcgccagccgcgcgcgccggaagcgtttgctcgtgcagatccccggcgcggaagcccgactacgaagctgcggcatcgcaggcgccgcctcaggtccccacccgcttccccccgggtttgcggacggagctggcgcctctgaaggcggaggcgagggccccgctccttgaccgttcttgctcctccgcgggagccgccggccgtcacgtgggaggtcacgtgggtggtttgtcaactgctcgcagacgccttcgcgcgcagccccggccctcacgggagtgcgcagtccgagcatgcgcagcaggaggcgcgagttgtcctccacagcgcggcggggcgggagacctccctcccacccagaccccgccggcctccctcccactcagaccccgccggcctccctcccacccccgccgacctccctcccacccagaccccgccggcctccctcccacccacccagaccccgccgccctccctcggcgctcgggacaggctcgggacgctggggccgcgtccgagcacgtgagggctgagcagcccgcgcctctccttaggaaacccagtgagacgctgggtattcgaatgtggtcgccggggaacgggcggcgcccacaccccccgcgctcggagaactccccagtcccgcctgaaacgaacgcggtgccctaaagtgcgggctgcaggctctgccgcttgacgcggcgatgattgaaggtgctgcttttaggagagaatagaaagggccttctttcctttcccccggtggatgtaaacgtgcttgttattatggggcatttagaaaagcttctgtccactgtgtattctctttggcaacgctctagacactttgagggttgctgtcagatctggcccaacctctcctatgtgacgggaaggatttcaggcatttcaagtgccccgcgcagtgactggcccggaattccgcgcgtcttcccggtagcgtttttcctttgtctttggtagaggactgggggtgggtgggggggtgggtctcacactgttgctcacgctggtctcgaactcctgagctccgtggatcctcccgcctcggcctcctacgcgctgggagtgcaggtgtgagcaaccccgcccggcccagagcggcttaataccagctttccagcgttgtgatttccggagaaacgcaggctgacttccatgtttactattcactcttcttcactaatgacaccacgtac

SEQ ID NO: 65756 - DNA, 477 bp, Homo sapiens
agagcaagtgggaccctgctacatggctggcggggtacagaatggggcagtcactttggaaaggtttggcagtttcttaacatttgtccaaggagcactggcgattttgttgaagaatggtgttaggaatcaacatctgggcactggccgtgcacgttgctactggaatgtcatcatttctcggcatctcaggggactgagccaggaaacgtgtgtgcacttggcccgtgtacgcaggcatgtctagaactgtttggtttctttctttttcttttttttttagagacaggatctcattttgtcacccaggccaggctgcagtggtgtgatctcagctcactgcagccagcctcaaactcctgggctcaagtgagctcctccctcagcctcccaagtagctgagactacaggcacgtgtcaccatgctcggctaattaaaaacaaactttttttggtaaagacagtgtctggccaggg

SEQ ID NO: 65757 - DNA, 679 bp, Homo sapiens
gaatccaatcctcaggccttccagatagtatcggggagctgaaactttccagaacactaaatccgaccacccccagcagcctgttgaccacctcttcttccttactcctccctacttcctaatttcccacccatagttaccttccttccctgctatctaaaaccctaacttcagtgggttggggaagtggatttgagactggtctcccgtcacctgctgacatcacgacatcacttgcaataaagccttcttccctggcaatactcgttgtctccatgattggctttccatttggtgagcaactggacttggccgaacccctggcattgggcaacattggtaatcagataccctgtactgtttattcaacagactttgctttccctattgaacaaccttggcactattgtcaaaaatcaattgactctgtatatgggggtctatttctggatttttcatgctgttccactgatctagttcttttctttttttctttctttctttttttttttttttgagacagagtcccactctgtcgcccaggctagagtgcaatggcgcaatctcggctcactgcgacctccccctcccaggttcaagcgattctcctgcttcagccacctgagtagctgggattaccggcgtgcaccaccacgcctggctaatttttgtattttta

SEQ ID NO: 65758 - DNA, 423 bp, Homo sapiens
agggacacattaatttccatttcttttagaaaaagtttttacacattgaaggaataaaaatgcatgaactgaccctgatgtctcctgcctggggcccccagttggtggttcctgttcaggatctccactttatcctgctccgtttaagtccagtctcaagtctttctactcacactaaactccttttgtacctacattatgatgatgatgattattttcgagacagagtctggctttgtcacccaggctggaatgcagtggtgcaatctccgcttgcttactgcaatttccgcctcccgcgtttaagcgattctcctgcctcagcctctcaagtagctgggattataggcacgtgccaccacacccagctaatatttgtatttttagtagatatgtggattcaccatgttggccaggctggtc

SEQ ID NO: 65759 - DNA, 2203 bp, Homo sapiens
tcggcttactgcaacctccacctcccaggttgaagcaattctcctgcctccgcctcccaggtttaagcaattctcctgcctcagcctcctgagtagctaggactacaggtgtgcaccaccacacccggctatttttttttttttttttgtatttttagtagagctgggatttcaccatgttggctaggctggtctcgaactcctgacctcaggtgatccgctcgcctcggcctcccaaagtgctgggcttacaggcgtgagccaccgcgcccggcctcgtgtatatttttaaactgtgtgctgacgacagttaagtaaatgtgattcagaacttctgcgtattttgcaggacagttttgacacaatgacatgactcgctagccaggaaagataacgacatccagtcctggagctgctggttaaaaacgaacgtgtcaccgggtcccctgggtctgaggccacgcggcacgcggcccctccgcgatattcccgcacctcgcggggaaaaggccgctcggcggccgggcctgggctcgcgggccgccgcctatccgcaccccggcgtccacgccgggttgggggccgctgcgtgcctggcgcccgctgtgaccttgggcctggtcccgcccgccgcgcctaaggcgctgccaggccgggctcagacccccgagctcccgcgcccgcgccaaccccgcgccagccccgatcccgcgcgggctgccgactgtccgccccgggttttccgcggcgcccggagtcgggactgcgtcgggcgtcgccgccggacgtgccggcagcttggtgcgacgtgtcttgccattggcctgcttcggtagccccactgccgtacgccgcccccattggccggcgtaaccgtccgtcagcgaggggcgggcccggcgtgccggctcggtggcgcggccgcgcgtgctcccgcccctcgccgccgctcgctcgctcgccggccggcggcctccgctcggccccctccctcagctccggtgcgcggcggccgacgacccgcgcggcctgggcctcggcccgcgccaccggcgcccgcgcggagcggcccgggggccctcacgcaggcccatggcggcggccgcggcggcgctctcgggcgcgggcacgccacccgcgggcggcggggccgggggcggcggggccgggggcggcgggtccccgccgggcggctgggccgtggcgcgcctggagggccgcgagttcgagtatctgatgaagaagcgctcggtgaccatcggccgcaactcgtcgcagggctcggtggacgtgagcatgggccactcgagcttcatctcccggcgccacctcgagatcttcacgcccccgggcggcggcggccatggcggggccgctccggagctgccgcccgcgcagcccaggcccgacgccggcggcgacttctacctgcgctgcttgggcaagaacggggtattcgtggacggcgtgttccagaggcgcggggcgccgccgctgcagctgccgcgcgtgtgagtggcctcggggcggggcgggcggggtctgcggcctgcagcgcctggcaggacgggacgggacacgcgcccaggcccgggaccacccacgagcgggggcccgactctcccacagccgggaccaccagcgggacccaggccccggctggatcccaaccctcgacagcccctggccccgacccccgtcctcccggtccccttcctggcaggtgcagccccccgtctttcccccttcctggagccggggctgcgggcggctgcgcgcgcgggtcaaggtttctgggttctgtgcgtgcggggagttcacgtgtgctgtttctattctgcagcgaggtcgcgctgaacagaaatgtgaaaacggtgtgcggtgggaggaactgccccgaactaaaatctatgtctcttaaccgatgaagggttgtctgttgtcttttgttgttgttgttgttcagtcgttttcagtagtgagctgtttcaagagtgcggtgttttaagcaggaaggactcctttttccctgccgtgttttcagtaggccaaattggaagacgcttcaagcatgatggattttcaatctgtgctctgaaccttaaaatttagggaaaactagatgcttttcgcataacttctacaaaaagacagttgattaggaattattacaaggtcatgtagagtgttaagtcagcctgat

SEQ ID NO: 65760 - DNA, 644 bp, Homo sapiens
ggtttcaccatgttggtcaggctggtcagaactcctgacctcaggtcatctgcccacctcggcctcccaaagtgctgggattacaggcgtgagctactgcgcccggtcgaggacaaggttcttatttgtccaagggcctggtctggaggctatgattagtaaagtgttttttaggaagatcaattggacaggacagtttgggtttgttgttgctatttttgttgccatggtaacaaactaagtataatttatgaataaaaataggcaactctttaacagttgtttatactttgaaaatgtcaaatgaatttgacacattctgatcagtaagatcccagaatatctaatagtcaaatataaatagaacaagttgaatttactattgcctacaactatttaacgtgctaaattaaaactctgtttatttagaagagtgacccctgtcctatgccaaatgaactctatcagttctacccagtggtaattccacactttctttcttacgtggcctgaatcccacactttctttcttacgtggcatgaatcccacactttctttcttacgtggcatgaatcccacacttactttcttatgtggcctgaatcccacactttcttatgtggcatgaatccctcactttatg

SEQ ID NO: 65761 - DNA, 650 bp, Homo sapiens
gagggcatgtttaaggcacacattaccatctctacaatgtgaagcgggctttgagcacggaacaaggtgttacagctgtacctaggaagtggtggcagggagaccagaaagtacctcgtgccagagccacagcccctgcggccctgctttcctcgtgcacgtcagtttagagtgcacattgggcttcaaacgcctctgctgatttgttaggaacagagaaggtgctctgctgagaattccgtagatttctagacagtatttggtttttgctgcagtttgtcatttgagatggaatgcttgtgttctttgtcctgtgaagggcattggagtacgacaccggggtgagtctgcctccttcccctccctgggacgtatgacagtgtctggaggcacatttggttggcatagactgggaggacgggtgctactggcatctagtggacagaggccagggatgccactgaaaaatcttacaacgcacaggacgcaggaggggagagccgcctgttgcgtagcaacctggcagctgataatataataaaagttggttatgactcttggtcctactggtggtaagttttaataattttttttacagatgattcctgcttaaaacctttatgctaccaaagcatctgttcaaattatac

SEQ ID NO: 65762 - DNA, 541 bp, Homo sapiens
tgaggtgatagttgctgcttgaggtttattgctgatgacaaagtgtgggctatttagggtttctaatgtatttctcattgtcttaaacggtcttcagctctgtcaagctgtttatttgtaatttatgtgctttaagatgacacttgccactcagacctcctccaaggaggggcaggggagcccattcctgggcctggcacggtgctccacctcctgcacacccctttctggggcaggtccttggactgtggggaagcacctgctgcactctgggtggtggcagccttgggccctgggctcccccttgtggagtcctcagggtgtgaggcaccataaaattattcaaaaaatgaagtggcttccaaacactctccatgtccgcactcccctcgcggtggaccaaggcacacgctcccagcctggccacaggcctagactagtgttgaggtttgcattggacatgttgaaggcttacaaatgtttttctttttcttttgaaattacttcagaattaaagcaaaattgcaaaaatagtacagag

SEQ ID NO: 65763 - DNA, 855 bp, Homo sapiens
acctgcctgtccagtgacagccctgccagggcatcggtggggatgtgggcttgattctggtgttgctgctgtgttcttggtattggggctttttgcaagtgtactcgtttagtcattcaacgcacatcttagggtctccctaatagctgtaggcccaggtgctgagggctgggcagacagcggaagatggaggagtaccttggtctttgtggagctcatgtgtgtttgtgccggagtttatccccttgtcccaaactctgaaggttatgcaaatgcacaccctgccactcatgtttgtatagggcacgtttgtcacttgtttggacagcagttgttgagagtcacactatgacctggcacgtttgtattctttgacccagtaattttccttttaggactttgaccaaaggaaatggatgaaagtttgtataaaacaatggaatgcggctgggtgtggtggctcatgcctgtaatcccagcactttgggaggccaaggcggggggatcacttgaggtcaggagttggagaccagcctggtcaacatggttaaaccccgcttctaccaaaaaaaaatacaaaaagccaggcgtggtggcacgcagctgtaatctcagctgctctggaggctgaggcgggagaatcacttgaaccccgggaggcggaggttgcagtgagctgagatcacgccactgaactccagcctgggtgagagagtgagctcctgtttcaaaaaaataaaataaaaaataaaaagaacgcaacctcagtgtccctaggggaatggtgattaggatattgtgcttccacttagggaatagcatgcagagtatttgctgatatggaaatattccaga

SEQ ID NO: 65764 - DNA, 461 bp, Homo sapiens
tacaggtgcatgccaccatgcccggctaatttttgtgtttttactagggatgggattttgccatgttggccaggctggtctcgaactcctgacctcaagtgatccacccgcctcggcctcccaaagtgctgggattacaggcgtgagccaccgcacccgtcacttgatctcttttaaagggaggactgtactctggactcaccctcacccttgcacttttggaagcgttcctggacattagacccatcctctgaaaggaacttgtcctgttccttctcctcagtttctgtacacgtccttactgtgcagagtgcacacgggagcgcactcagggctgggtgaggaaacagacaaaccgtccttgagaaacgtgaggtctgcttaggaaggctgcaggaaggcacagaggagagccccggaagggagggagctggtgctcagggagggctgattttcagcag

SEQ ID NO: 65765 - DNA, 1300 bp, Homo sapiens
aatccaggtcccgcccgcctcccgcgggaatccgaccgcgccgccccggccgcatcccccgcagctccgaagcacctgcggggaaggaggtcaccttccctgggcgctttaaatcatccagtgcttacacctggattccgacatgggaaaagaagtaagatttccctcaaaggcctcccttaagtcctttgactccaccaaacacgaagaaaaatcccggggagtgggggtggggagagtgacattttccgatggaaaccgacgggaaaggtgagacctgcaccccacccgcgccactcgccaccagaggcgtcggagacgccggctccgcggctccagtaaacccaagcgaagtcagctcagccacgggctacctactaaagaccctgaaaggaacagggggcaaaacggggttctgggcagggcgtcaatcacgctgtggggaaaatcccgataaccgtggagcccgcagggagccagggaacccgagtgggcgtggcgcgcggggaggggcgtccgcgcaggaggctggggttctgtgccgtctcccaccgacctcgacctcggcccgggacggccggctgggagcggtcacaacccggggggtgggggagcgcgaaaggccaggaaggtgggagccggttcgggcctggtccggaccccggctcgggctgggagcagcggcgagggccggggccgggggcttcggaggggagctcgggcggggccggggtcccgggtggaaggcctggccggaaaggggcgcccaggagaggcctgagagccggggaccccgggctgcgggaaggcccggccgggcaaggcgacagggccgcgcctcctcaccgtggtcctggttgaagccggcgtagagcagcccgttgccgtgagggttacacggcaggaggttcatggcgccgccgtgctgggtcgccgctcctcagcgctgcatgcctctcgctggggacggcggcctggtcccttcgggccggcgctgaggccgccgcggccggaagtgccggacgtacgtgcgtgcgtgctggatgtgcgtgtgtgctggacgtgcgtgcgtgcgtgctggacgtccgtgcgcgcgcccgcgccccaccagggagcctatggagcgccgagcgcatctaaccgaagcgaggcgagacgaggcgaggcagggcggggaggggcggggcggggcgaggcgaggcgaggcgaggaaaggcggggagaggcagggcgggcggggcgggatgaggcggggagaggcagggcgggcggggcgggatgaggcggggagaggcggagc

SEQ ID NO: 65766 - DNA, 1047 bp, Homo sapiens
cactctagcctgggtgagagagtgagactctgtctcaaaaaaaaaaaaaaaaaattacaatgagataccactgcacacccatgagtggctaacatttaaaaaaaacaaaaccaaagaatgttgacaactgaaacactcacacactgctgacggggatgcaaacggtgtggtcagtgtggaaaagggtttggcagtttcttataaagttaatcattcatttatcatatgacctagcaactccacccctggatatttacccaagtgaaataaaaacaagttcgcacaaaaacgagtcataaacatgcacagtggcttttttcatagatcgccaaaagctggaaatcacccagaccctcctcagagggtgggtgggtgatggactgtggttcatctctactgtcccacaatcaaaagcaatgagctcttggtgcacctgacaagtcagatggcttcagaggctcagggctgctgagtgaccggagccaggttcaaaggcctccgggatgcaggcacgttggaggctgaggaggtggggttggggaggggctgcctacaaagaggctgcggaaacttctgcgtggtggaggtgttctccaccttgaccgtgatggcggtcacaccactgtctttgtcaaaactcaagacggggccaggcacggtggcccacgcctgtaatcctagaactctgggaggtcgaggcgggtggatcacctgaggtcaggagttcgagaccagcctggccaatatggcaaaaccccatctctactaaaaatagaaaaattacccgggcgtggtggcaggcgcctataatcccagctactcaggaggctgaggcaggagaatcgcttgaatccaaaggcaggggttgcagtgagccgagatcataccattgcactccagcctgggtgacaagagtgaaactctgtctcaaaaaaggaaaaaaaaaacaaaaaaactcaagaagggagacattttactgtaagtaaaccatatctcaataaaagcagagaggaagcgggagaggaaaggaatggggagggggaggga

SEQ ID NO: 65767 - DNA, 1965 bp, Homo sapiens
tatttttagtagagatgggatttccccatgttggccaggctggtctcgaactcctgacctcaagtgatccacctgcctcggcctcccaaagtgatgggattataggcatgagccaccgcgcccggccaagggtcttttcagatgtaatcaagttaagatgaggtcatactgagttaggtgggccctaaatccaatggctagtgttcttataagcacagagagatttggggacacagacacccaggagagaaggctgtgtgacgacagacagcagggactggaacggtgctgccacaggccacagaacgccgagggctgccagcagcaccccagaagtcaggggagtcaggaagggtccccgcttagagcctgccaagggagcgtggcccaggcaacaccttcattctgggcttctggtctctagaactgtgagagaataaatctctgtttcaatttgtccaaaagccccttcactcagcagctcttttccattagtcacagcagcccatccaaaagccacttcactcagcagctctggagccccccaccttcctccacgttcctcccgtccagtgctggggggaaggatgctcagagctcaggggcatggaagaccctcccatccagtgctggggcgaagggtgctcagaggtcaagggcatggaagaccctcccgtccagtgctggggggaaggaggctcagagctcaggggtatcaaagaccctcctgtccagtgctggggggaagggtgctcagaggtcaagggcatggaagactcttgtctgtgggcccccccacacccccgatgatgcccagatctgatgacgctggcctctatgtctctccaaagtcaaaccaacacgacgcaatttgaacccgtgagtgtaccacagtgttctctcctcaaacatacgtggcctcctgagctggaagaaacagactttatttccagatgaattttattaatctaagagaaaatttcatactcttcatacttatctatttactctttcctattaagataataacttctggccttatgtattagggtcactaaagtttaatatgtatatttatgcctctgtaaacttgtttttgcttttatttttagtcaaacaaaatgccagtcctatcacgagtcacaaatataaataacacaccagttgattcaaattcaggagcaaactttgctgagtcacattagggggagggtaattaattaattattagctgcaagaagttgagatacgtaacccacataaagtaaaaacagcctgaggctcattcctagctgagaaaaccccaagatctgttacaatggcctcgttgttctccactgacagctttctggggctctctctccaggacatggccgccagcttctgtgagaggtgctggcatcctcggagagactgagaagtcaagcacagggttcctggaaaaccagccctcctgactggctgccgatcatgcagggcaggtgccttcaagactttacgcccccagccaggcgcggtggctcatgtctgcaatctcaacactttgggaagctgaggcaggaggatcgcttgagcccagaaattcaagacaagcctgggcggcatagcaagaccctctctctactaaaaataaaataattagccgggcatggtggcatgcacctatagtcccagccaactggggggctgaggtgagaggactgtttgagcccaggaggtcaaagctccattaagctgtgatcgcaccactgcactccagcctgggcaataagccagacccggtttcaaaaaagactttacatccctgaaagttttcatttcatggtgctgagcgtccatcagtccatccttctctctgccagccggggcccaaaacacactaagtcaccatcacgcccagctaatttttaaactttctgtagagacgaggtttccctatatttcctaggctggtctgaactcctg

SEQ ID NO: 65768 - DNA, 1097 bp, Homo sapiens
ccagggatgcgcgtgggtgaaggccccgcctgctcctcactcccagccgaggtgttcgcctctgcgcgttcccccttctcctgggttcctgcccccgcctttctttccccggagccgtccaccccctcgccgggcgccggctttcaagcctcaaacttgggggatccccgggctgcctgcctgggagctctgggcgctccggcctcccctcgccctggaacccgctctccggccgctgtcgtggggggtcccctcttccgcacgcgagtcacctgtgctccttcctctcccccggacacgcgggacccctggcctcgggaccggaccctggtctcccctcccctccgacccacgcgcagacccagcacctgggcgcctgctcgccgcgctccgccccaggagccccggagctcgcgtcccctcccgcccctcctgccccgcggccgaacgcgcacttgcggactcgagcccccgccccgggtccccacagcagcggccccaggtcgggaggagcccagcgcccggcccagccgcgggctcccgctgcgcgcagactgcggagaaggatggagactgcgccgcggggcctcgagtggaactgggggtgcaacagggacgccgcagcacgagggccagggccgggcggagaaaggcccgcccgcgaaccgcgctcctcctcagccccgcgcccccggaccgggactcctaccctccccggccacgcgccccggcctcttcccgacccctgcccggtctcgcgtccccggacccggacccccacccgcaccccctccccagccccgcgcccctccccggccccgcgcccgcaccccggcacgccctccgcccgcgctcacccgccgggtggccgtacggggactcggccgcgccatcctgcaggctcgccaggatctcgcccttgcccacgtcgctgtcgcccaccagcaggaacttgagcagaaagtcgtaggcccggaccgggctgcccagggcgctcatcgtgacggcccggcgcccccacccatgcccggcctgcggggctgagcgcagaggcggcggcccggccccgagaggcgccgcgcgggccccgagtcctt

SEQ ID NO: 65769 - DNA, 605 bp, Homo sapiens
cgctgacagcgcgcatccccgcccggccccgccattggtggaccgcagttgctagggcagctgcgcgctttcactggcttggttgtccgtccatcttactctcgtcaccgcctccgggctgtcgcccacccgcccctcctgaaaggtcgctgtcaccacagccaatggaggcccggagacggggcaggggcggagccagaacaagcaggaggcggggactctgctcccgcagccaatggcggggcggggtgggggcgatcagggggtggggccgggtgtttacactctcgcgtgcgcccgtgagcgccacgaactcgctcccacggtcgtcgggtctgcacgccccgagtcgggaggggcgaggggcggtgcagggtcccagcgtggggcctccccacctgcccaccagggagacctcgggtgcctggccgggtggggctcggggtcggtccagttggcggacgcggccggaaggcccccgcaggccgcctcgccggaggagtccctgtcgccgtagaatccaggctcgcggtctctccccacggttcatccagggcctcgtcgttgccccatttacgcggcgtgcctgaatgcctgtgtgtgca

SEQ ID NO: 65770 - DNA, 1284 bp, Homo sapiens
cgttgcacgtgcaccccgagcgcgcccgccactccccacatcaggagctctgttcctcgggttcagcaaacgcccgggcgaaagcaatcttaacattctgggctcccggcacccagaccttgggctgatgccccttgctagtgggtcagctctttagaaaatatattctaactatttccatcagcatttccacttattttgtgcaggagagttgaacccaaaccgtctgggtcggggtcggtcaggccccgccccctgacgtcatctcacccccacccaatcccccgcgcctacctgcctcccggcccctccccttcccgcccctcaatcccagcgctcatctctgcggccacgcccgccccttcccgccacccaatcctagcgcttgtctctgcggccgggccccgcccccacccgccccccgcccaatcctcgcgcggactcatgtttgcccgctcggccgccgtctctcgagtctccgccagatccggggcgggtccgcggccgcggcgggaacatggaggagctcctgaggcgcgagctgggctgcagctctgtcagggccacgggccactcggggggcgggtgcatcagccagggccggagctacgacacggatcaaggacgagtgttcgtgaaagtgaaccccaaggcggaggtcaggcagcgggtcgggcgggccgggggaccggtttctttccggagagggtcgcgggcctcggcgcggggcgcggcctgggcttctcccgccggaggccgtgggtggctctcccgggactgccgccgccgccccttgcggggaaccctttgcgcggggcgagcggtgaacgggggcggcggaagcgtccggggcgtccggaggagtttgcacctgcggggaactgtccggagcaggaaccgcggccgccccacacctcctgttctccgtgaactttctctcgggggcgctacgtgaaatggggcgggactggctgctgcagtcttgctcccggggttcctgccctgcggtgctggttaagtggggtcgttctagccggggaagctgcttaagtcctcagcttaagtgactctggaggtgtccatcccccgtgagcctcggtcagtacgttgtgaaacggggcgaaggtgctgcccccaggccagctgctgcgcctcaccacaccctggcatgctctgtccttctgttagactcattctcgggccgggcgcggtggctcacgcctgtaatcccagcactttgggagacagaggtgggtggagcgcgaagtcaggagttcgagacca

SEQ ID NO: 65771 - DNA, 1461 bp, Homo sapiens
cagagactccatctcttaaaaacacaaaaaacaaacaataaaaaaacctcacgtcaaatgacttcagcacggactgggctcaggtgcgcacctgctcgtgtgcacgcgtgtgtacccacgtgtatgcatgcatgggcgcgcgtgggcattcctgtgtctcaagtccctttcccaggacatcctggaatcagcagccccaccctgggccgggtcagcgcgtgccatcggagcccccacgtcagcctctctctccgatcggcacctggcgtcccagtgcgcaagccccacgtcatcacgggggccgctgggcccggcctggtctgcagtgtgggaagccggccaggcctgtgaccagcgcccgggccgagggccggacctgcgtccgctgcggggcagggataccgggtccctgcagggagctcaagccccagcgcgcccgcgaagagctgcgcggactcccggctgcttcccccgaatcccgggcgcaggaagcgcgaagccggacgaacgcggggagcgcgcggcgagcccgcctgaggccgcccctcccgccgcccggggtcacgcgccgcgcgctcccgccccgccccgccccgcagcgcctcagccgacaggggcttccgagcgagcagagtcccgcgccccgcactccatggagcagctgctgcgcgccgagctgcgcaccgcgaccctgcgggccttcggcggccccggcgccggctgcatcagcgagggccgagcctacgacacggacgcaggcccagtgttcgtcaaagtcaaccgcaggacgcaggtgctggcccgtgcgcaggcgggggctctgcgggtctctgcggggcctgggaaggcggaggggtcgggggcaggcgcatttcctggggctgggcctggggaggggtcagctttggcccttgggaggtggcacctgctgggtgagcccggctcaagcgttctgtgaaggtttgtgtctgcacgatccgtgaccttcctttggcctccatgcgcagcgcacaggcttctaggggtggttttaactttcctatccagcaagcgtcgggggatgtgaggcttggggtccttggctcagctctgggccgcccctctcagcccaccgtcctcctggcagtgggaaagaagcagagacatggctgggcccctggcagggaccccacgggccaggccagcgttctccttcccacaggccttgtctgtgtttagacctgatttctatctcctgctgaaaatagttctgtttaagaatgtatggaaggccgggcgcggtggttcacacctgtaatcccatcactttgggaggccgaggtgagtggatccctgaggtcaggagttcgagaccatcctggccaacatggtgaaaccccgtctctaccaaaaaatgcaataattagccggatgtggtgccactggcctgtaatcccagctactcgggaggctgaggcagga

SEQ ID NO: 65772 - DNA, 1163 bp, Homo sapiens
cctgtaatcccagctactcaggaggccgaagcaggagaatcgtttgaacccaggaggcggaggctgccgtgagccgagatcatgccactgccctccagcctgggtgacagagtgagaccctgtctcaaaacaaacatgcaattctataggccaaggtattcatggaccacgttcgtcaatgcatgttttcaaccaatgtgtactgtacgtgaggtgagtgttcacctaactgaaaactggaatgtttgtgggaatatttcagaaacaggaaggcccaggtcccacgggaggcgttgggggccggccgggtgtgccgtgccttttaccttcccagcccctgccctggacctgaggccccgcctgatgggcccagccctcttcttccctgcctgacgtgtgtgcccaagttagctccagtgaggcctctgctgtggctgccccaccctaagaggcagcaaggaaggtgggtagcccgggggtccagctctggaccttggttcactcacacctccccacgccctcagtgctcccgggcacccacacgtggcctgtgcatcctcctgtcacagcagcctgcagaccccacacccctcacggcccaggctcagcctcagccttgcagcctctcgtctccgacggggggcccctctgcaccctgccctctgtggtggacgccagctcccagccagagccagctatcagtgaatgaaggtccttgtgactcccacgtggtagcttctgtcaagggcccagtgggcagaggccctggctgagtcaacaaggctgacaaggctgtgttctggatgcaggcccggcagatgtttgagggggaggtggccagcctggaggccctcaggagcacgggcctggtgcgggtgccgaggcccatgaaggtcatcgacctgccgggaggtggggccgcctttgtgatggagcatttgaagatgaagagcttgagcaggtgagtgtgtgtgagacccatatgcgcacatgtgtacaggcagagagagactcagagacaaacagagagagacagagaaagggatagagatggggagggagacagaaacagggagaagcctgtggctgagccgtccacacaactgcccggttatcagaggcagggccaagagttccaccctgccattcttaatggagataaa

SEQ ID NO: 65773 - DNA, 1233 bp, Homo sapiens
gagttgtataccgtctgtctttacactacattatgaaaatgagattattaaataagaattttgatgtagctgataagctagtagaattggcacatgatcccttttatacccagccctcctgtctggtgtgcttgaggtaataataaccccttttatacccagccctgctgtctagtgtgcttgaggtaggagtgtcctggcagatccatatattgactaattgctactgtatgtagtacatcctcagaccacctatattctagcatgcgtagcccaggcttgtactgatgctctgctgaggtctggcatttaagagaaagacaaacagctccttcaggccaaggatctctgtcaacaggccgaagaggtgagggtgctgagcctcagtatgtggacaagttcggcttccacacggtgacgtgctgcggcttcatcccgcaggtgagtgcctgggtgagggtgttccctgatgccctaatgctggtcacccactctttatatgtgacagaatgctaatctcccaagcaccagcaagattgactacttgatttctgaaagcagagtagaagctgtgatacctggaatggggagagcagacgctgagggtcactgagctgagctgggcagggtcatgggacatgctggggcaggcagatcagcattccaagcagagcgagcctcaagtgcaaaggttgtgttgcacaaggctcctgatgagtctgagggactggagacagtgggtgatgggtagtgtgcaaagtcagggattaagtgctgattactcagctcctctcctgaggcctttacaaattattatttatttagatacaattgaaatataattcacataagatccaccattttaaaggattagaattaattggtttttagtacattcgtgatggtgtgcaaccatcactgctgtttaactccagaacattttctttcttttcttttcttttttatttttttgagacggcattttgcccttgttgcccaggctggagtgcaatggcacgatctcgacccaccgcaacatcggcctcctgggttcaagcggttctcctgtctcagcctctcaagtagctgggattacaggcatgcaccaccacacccggctaatttttgtatttttagtagagacggggtttcatgttgaccaggctggtctcgaactcctgacctcaggtgatctgccctcctcggccttccaaagtgctgggattacaggca

SEQ ID NO: 65774 - DNA, 1249 bp, Homo sapiens
ctcgcgcccccgactgcgtgctcaggccccgcccctccccgtccacgcatgctgaggctccgccccgctccgcggtcccccggtcccacccgcccccgccccgcccccgccccgccccccggcgtgttgtggctccgccccgctgtctccggccccaccgcaagccctgcccctcccacccacgcgtgcccgggccccgcccccgttgcgcgcagccccgccccctatcgcgtgctcaagccccgccctggcggcccccggccccatcccgaagccccgcccccccgcacaccgcctgctcaggctccgccccgctgtcctccggcggcggcctcaccccgcagcccggcccaccgcgtctcaggccccacctcctgtcctgccccgcccaccgcgtgctcaggccccgctgagcggtcccggctccgctcgcgccctgtggggtccacggcgcgctcttccagagcctttgggacccgtgcccgctcgcgtcctcaagtgcacgcgccgtcccgcgcgcggtattttggcggccgacgcgttccgtagcgaggccggcgagtggggtcggaggtcgcggggcggggccagcgtcggttgccgccttagcgggcgcctccttttcatccctcatccttcatccctggctttcgcgctctagcggagtgggatctgcgaacacgtgaggcgggggcgcggtccccaggctgccgagatggccctgagcgacgaaccggccgcgggcggccccgaggaggaggcggaggacgagacactggcctttggcgcggcgctggaagcgttcggcgagagcgcggagacccgggcgctgctgggccgcctgcgggaggtgcacggcggcggcgcggagcgcgaggtggccctggagcggttccgcggtgcgtgggcggcgccgcgtgcccgcttcctcccccggcccgggttcggcgcgctgagtgcactttaccgggcggggaccgcagcccggcggcgccggccgctctgcgagggctgccggtgcgcggtcccgcgggccgtggtggggcgcggccttcctaggcgggagagggccaccccggcgcggcgttaggtgcacggggcagacgcgcgcctcccttggggggaccgtggcccgcggagcgcctgctctcgcacggggtgaagcctctgcggcctccccgggaggcggggtgcagaagccctccgtcccccgtctccgtcactggaggaggtccctgggctggggaga

SEQ ID NO: 65775 - DNA, 797 bp, Homo sapiens
aaaaaaaacaaaaacaaaaacaaaaaatatatacacctactatgtaccccaaaaattaaacactaaaaattaaaaataactaggtatttgtagtaaatctaggtgctcttcagtttgaacagggcctcttatctagtctgaatactccaatactgatggttcccttgtgctggaaggcatattaggtgctcaatgaatactcttgattctttgttacaattgggtaactcctttgtttacattctcctgctctgttcttgcaaatgtgtgtttcaagggggtgtgaccaaatgctctgtgtagctcaggcacttcctgggtgagtgtagcagttggcagctgtagcccttggctcagattgaagagaggtttttttttgcagctttggacttaggcctgtgctggtaaggtttgtgaacctgggccctcggggagctggtgagggtgggactggtgactgtgtggtgtccccaaggctggcgtgtgcaggagtgaccgtgtctgtgcttcaccctttcttgcagtcctacttgattgtcagtgacaaggcccgagatgcagctgctgtccttgtgtccaggtaagtttccatggcacatttcttggtgtgtggctggtgggttctgagaggggtttgtttgggtacgtgtttcatgtgcgtcttcagtcctcagacgaaggaccccgggaagtctttggactctgtggctttctctgagggagtgtgcagcagtgtttgggcacagaagacctctgaccctgaaatgaccaccctcagtggtggtttggggtgctgg

SEQ ID NO: 65776 - DNA, 1249 bp, Homo sapiens
ggcaaaaaaaaaaacaaaacaaaacaaaaccaaaaaacaaaaaaacaaaaaaacccacaaaacccgtgttggttagattttctcaaaagctttacaacaggcaggttacgtgtaagctctgctgttgcccaaaatagtaattagggaaataattgcttttaaatgaatatgtctgttttctagtcagatttgcccttttgttctttgatcagttagttcacgtaagcgggtgtggcagggaggaagcccctggtggtgagagtgtttggagctcaattgctcgaagggaattggtgtcgatatggagtctcgggcagtggttttagtaaccttggataaaccgacctctcaggcttgcacaatttgctaattaaaacagggagcacagctgcttcagttgtaagccgggcgtaggtcacctgatctgtaaaactacaatagtgtcagagaagtaagtgggataacattgttgctttggtaagctttcaaatgatgatgatgtcagcctgtgagttctgtgtcctgcttaagtgaggtttataaggatgaagaaaccaaacccgacggccagtacctcaggctgtcacagctgtctgtgggcacagcgtttgaaatagtctctgtgtggtcagtttctaccagcccgactttgtactctggcagctgctggtgttaaatattcccaaaagagtatgttgttgcccaaacagtgtaacccagaaatctagctgtttacagtaatttggatttgtatttagaggtgcagtttttctctagaggggataaagaagtgcggagcgtctttctctcctgggggaggtgtgtttccattttagttaataacatgcccggagagctgtctgtctgtctgttaataaagcagagtctcattcattatctgctttcatttgagaactgcagtgctagcgtgttttacagtgaagacctcggtgtgatcctgaaggagggtttcatcctcctctcatttcccactggatcggcaggaagcgttagcagggtggacatgccacagagcttccagatctggatcaaaggtggctgttgctgaaatacttatgcagagtcttccctgactgctgctggctaatgtgtgccctcttctccaacacacctcctccgagcctggcctggcacaaagccttctttctccaagttatttcagatcaagcagccaatgtagacagtgtctacactaaagggcgtaagaacagtggggtgcagtggcttc

SEQ ID NO: 65777 - DNA, 589 bp, Homo sapiens
aactttgaaaaatagacaagagaaagagttcttaaaaaaaaaaactttgataggacacagcggaagtaattacagtttaactttatgggacgtttctgtgacaggctgggtaactatgcttgtcatgcgtcctaacctgtgccctgagattgtgctgtaatgttccttttggtggtgtccagctgtctggcaaggagcctgctcggctggagcattgtgaagggcatgctgtaattacaatattgtgatgtggcgttgttgcataactcaaggacacaccattgtcgcctacccactgtgatgtcgcaagaacgagatttgtgagttttactccaattgagcttttccagtgattgactgccactccctcccagcctttcggttctttaaaatgaaagataaacctcaggacaaccaagacctggggaaaagacagtctttgggaatgtaatttggaagaatggatccagaaaaacaaccaggggctcttaactctagtttcggcaggagatcccgagttacagacctgagctcgtaaacaaacgctcaccactttacagtcgccgcctcatcctgaaactccggtcag

SEQ ID NO: 65778 - DNA, 1103 bp, Homo sapiens
ccgtgggtgcactttgctgggtcttcctgggacactgaagtctcctgtgtctccagccctgagaactcggagcccgggtgcttttgggaaggacggggcaccagctggtgacacatgggaagggaggtgtggttgtcaccttgcccaggtaacctgctctgcctggtcggtgcgcctaaggggggcagggtgtttggggaggacatgagaggcctcctggaagcacttcatcctgttgaagttcacattttgaccttttcagcagcccttgctctgggcctgtgcccggccctgggactcggcctggagagcctattgacaccgtgccatgggtgcgggcagggcgccctccctggagggcggcacgtggtgccagttggtgaccatgagctgcctcactcctgaggaagagtgttcgggctctgggctttgatttaacctgcctgtctgtctctctgagttgacagccggggcctccgcgtgggtgctgctgggaggctcagtggtaaaggccacttttcaggatgtgtctgattttataaacttgaattcttaaattgtggttttaaagagcaccaggacgtaaaaacagagtgacgcaccttgaggctctgttcagccaacaatgagggcttttatttaaaaaataaagccgtgggtcattcacgttgtgctgtttgttctgaacttgcctctggtgttggcggaagctgacctcgctcacctgctgtgtttgttctttgctccgcaggccgccttccaggagaatgtggggagacaggtatggctgctttcaaacacctttattccaaaaacttcctgcgggtttataggtaggaatcttgagagctataaccctggtgtcttctcgcactgtgagatgtggtgtggctacatcaatgccagggtcatgagttcactataggacgcacatgttaaacagcgagtcctgtttcacagggaacctgcatgtacagtaatttacacacacaggccggaaagctgtgctttacacgttgccaagagccacataatgtggctctgcagggtggggcgggtccctgggaccagcctggccttgcggggacgcagacctgaccccg

SEQ ID NO: 65779 - DNA, 1864 bp, Homo sapiens
gcaggtaggtgtgtgggatgcgcaggcaggtgtgcacggcaggtgcacgggcaggtatggggcacgggcatgtatgcaggacgcagagcaggtgtgtgaagcaggtgtgcaggcacaagacgtgtgtgtggggcatgggcaagtgtgccgggaatgtgtgacggcagacgtgtggggtgcgaggttgtgtgggggcacacggacaggtgtgcaggcaggtgtggggcacggggaggtgtgcagaccaggtgtgtggggtgcgggagcgaggcaggtgcgcgcggcaggtgcgcgggggcgagtcaggagcgcggggcacgtgtgtggggtgtggggcaggtgtgcgggggcggggcaggtgtgcagggcaggcgtgcaggggcaaggcaggtgcgtaagagcgaggcagatgcgcaggtgcgcggaccaggtgtgtgaggtgcgggggcaggtgcgcgggggcggggcaggtgcgcaggagcgaggcgggagcgaggcaggtgtgcgggcgcggggaaggagcgcggggcaggcgggcggggatgaggcaggtgcgccgttcctccaccccacgaccaggtgagggcgaacggggaactgcctgagctccgagcccggaagcttcaaaatcagaacgaggaaggtcggtgaggaggccacgctcgcgggacgggggcaggaagcgcagccggagctgcagatctcggccgcgccccgcgggctccaatcccgagcgtcccccgcacgcgcagccgcgctcgcccgcggggcctaagggctgctcagggcggagaccccgtaggtgagcccgagaggcggtgcggggctgcgaaccccggagcgagagaggactggagggcggggtgaggggacgcgaggacccagcctgcacggcggggcaccctccccgctggcacctaccacgtgggcctgcatggcctggctctcctcggacgccccgcccacgccggctccgctcatcccgccgcttcggcctacggcgcctgcgcgggcggcaccaggaggcgggtctgaggccaggcaatctccgattggtgcagagcggcgtccataggggtgggcctcccggaggggcgtggaaggggcggggctgctcggcgcggggcggggccgggaggtcgccgcctcagtcttccgccctgggccacgccccggtcccgggtcacctctcggagccgcctccttggcccgtggaagcctcctgctctcccctagggcgcgcgtcacaatctctggtcccccgtagacgccgccgcggggaaggcggggctgtgcgagggcgccgcgctgcaaacccaagccaggcggcctggagttgctgtaaagcctcaagcaaggctgatatgtaaaaggtcgttgcatttcacccgggctgtgggctgtgctacttgaccggggaggacgaggggactgcagggcgtcctttcagacagacgcggtagggagagcagggcgtgcaggacacttgacggccccaggagaggggtgaggccctgaccccaccggggtgtcatccaggaggaagggtgcccggggcgaggtcccccaggagaagtgcccaggcctgaggccttgaccccactgagatgtccccccaggaggaggggtgcccggggttagctcccctaggaggaggggtacccgggagtgaggccctgaccccaccgcgaggtcccccaggaggaggggtgcccaggagtgaggccctgaccccaccaggaggtcctccaggaggaggggtgcccaggagtgaggccctcaccccaccgtgaggtcccccagaaggaggggtgcccaggagtgagaccctgaccccaccaggaggtcccccaggaggaggggt

SEQ ID NO: 65780 - DNA, 733 bp, Homo sapiens
aaccacccggccccgcgtatccggagcgaggagtgggcagcgctcggcagaggccccggcgcggcggctgcacgtcctccgggaggagggagggaagccgggctcaccgccgggcctcccccccggtcaggagggagccgggaactcccgaggcaccaactctgcggaacgcggggcgcccggatcgcccctgatcaccgcccgctggcgaggcgcgggggacccagaaccggcggggccgggagcctcctttaccgctccgcgccggggctgcccgcaggatggggcgcaggatggggcgcaggatgcggccccggcaccgcctcgcgggggtctgcggggggcgaccgcggctcgcgtcggccactacttgggggtctcgggtttccgccccgccctcgccttgcaacccctccggccccggactccgctttccaggccgggctcttccctccggaccccgctcgccgcccggcgcggccccctcctcctgcagcgccccccgccccggcgcccgcgcccccgattcgctgctgactcggtgtctgcgcgtccggccgggcgccccgggaggagtttccggcgcggggcggggtcgggggcggggtcgggggcggggcggggcggcgggtgggccccaccccccagctgagcccggccgggcggactcggactcgccaacttcagaggctcggcggcggcggcgggcgcggagctctgcgcgcggctccag

SEQ ID NO: 65781 - DNA, 971 bp, Homo sapiens
tcacaggggcaggttcttatctctgggctggacgtgtcaaggctgggcttgggggccagaagcttcccagcaggcctcccactggccacaagacacaagcagcccctcagccctgcagccacgtcctctctgacagggcccctcttgccccaagcccagccgggccaccgtggccagctccacacacacatctggctgagcactcacaccaggctgcggggtggtgtcacggcccaggaatgcaggaagacgtctggggctctggcagagaggcatggccatgcgccaagaatgtgccttgtagagacataattatgcattgggggaatacggcgtaacaaacccggtggatgccaccgactccacttactttactgagagctgagaggacagcaaagtgcggcactgaccctcaggaggggagggcgctggctggtgcccaccgtcctgcagaggactgagggatgcgtgggcatgggtgggcacaaccgtgggggcgctggcctgggggaggaggaaggaggccgggcgagggcgtgggcagcgctgtcctggctgatggctgaggagccagggcgcggccgcaagtgcgtggcagcgtggcagggcggctgaacgaccccattgtgtggagtgaggccgaaaggccaagtgggacgggcagggaaagaagcacatttcataacttcagtccactgtgagaggactgcctgccccttttagaaaacttggaaatcacagcaagtctccagcagggaaacaacgccatgggggaggggtcttatctctgggctgcgctatctccccacccaaagaccacgtcagccttccgggcatttctttcagaattttaagccacatgtctgtgtgtgtctctctgtgcgtacaaacacgtctgtttatgtgtgtcctcacatcgctggggtcatgttgtatgtgttgtaaaaattactttttaacttgtgtaatat

SEQ ID NO: 65782 - DNA, 545 bp, Homo sapiens
ttgtctaggctctgcttacagggggtattgtgacatatctctgcactgatcacctaagtgatgtaatacttgtgtaggctctgcctacaggggcattttgacatatctctgcactgttaaccgaggtgatgtaactcttgtctaggctgtgcccacagggggattgagacatatctctgcactgatcccgaggtgatccaactcttgcctggtctctgcctactggggacattgtgacatatctctgcactgatctcccaggtgctgtaacttttgtctaggctctggctacacagcattgtgacatatgactgcactgatcacccaggtgatataactcttgtctaggctctgcctacagggggcttgtgacatatctctgcactgatcacccaggtgatataactcttctctaggatctgcctacagggtgctttgtgacatatccctgcaatgatcacccaggtgatgtaccacttgtcaaggctctgcctacaggggcattgcgatgtatctctgcactgatcacctaggtcatgtaactc

SEQ ID NO: 65783 - DNA, 560 bp, Homo sapiens
gatcacccaggtgatgtaactcatctaagctctgcctacaggagctttgtgacatatctctgcactgatcacttaggtgatgtaacacttttataagcactgcctacagggaatttcgacaaatctctgcactgatcacctaggtgatgtaactcttgtctaccctctgcctacagggggcgttgtgaaatatctctgcactgatcacccaggtgatgcaactcttgactaggatctgcctacaggaggtattgtgaaatatctctgcactgatcaactaggtgatgtaactcttgtctaagctctgcctgcaggggcgttttcacatatccctgaactgatgacaaaggtgatgtaactcttgcctaggctttgcctacaggggacattgtgacatatctctgcactgatcacccaggtgatgcaactcttctctgtgctctgcctacagggtacattgtgacatatctctgcacagatcacccaggtaatgtaactcttttctagtctctgcctacagagggcgttgtgacatcactctgcacggatcacctgggtta

SEQ ID NO: 65784 - DNA, 1752 bp, Homo sapiens
gaacgcaataaaatgaggtgtgggtgaaaagaaaactgaggtttgcagacatcatacagctagctagtaacagctgggtttcaaaacacctctgactttacaaccactaattttatttattttattttgaggcagggtctcgctctgtcgcccaggctggagtgcggtggcacgatcacagctcactgcagcctcgacctcctgggctcaagcgattctcccgcctcagcctcagacagcaggtgggataccaagttcccacttcatctgccgcagggctgggccgcgccaggaccacgtggccagtgcgcgcagggcgatgggcggcagtgcgcaggcgcgcacctgctgcggtggatggggccccgcgcccgtccctcacttgctccctccttccttcccgccacccctccaccgccttccccctcctccctcctctcgccacctctaggccccgccccggtcctgccgcccagtctcctcgctgcagtcgctccggagctgcacgggtgttttgcgtgttgctgcgtcatcgccagtggccggtttgaatgagactcgtcgcaccgaagccgccgccaccaccgcgcctccgcctcggccgccgccgcagctgctcctggtccccgtccctttgccgccctcgtcaggcccagctctcctgcgccgccgcctcccgccgcgccccgccatgccgctctactccggtgagccctgtcctggcctcgcgcgcagcacaccggaccggcgctaggcctccgcgtaggcctggcctgcacgggcgggcacccggcatggactgggaggggccggggtggggtgcgcggggccggcggcgcggagatgacccaggcaccgtcccctctcccggctgggtcggagccctgcgtggcaggggagcgccgtccccctgagccaccgatgggtggggggagtggagatggggaagcctctcaaagtcgtgactctgcagaatagtttctgacgctgccctggtgtgcggtgaaagtgagggtgtgtcctggggcgctgggccaggctggaggtgcagggagattcctttgggcttctcagtggtcgccgtggaagggagcggggaagaaggggagggatggagcgacccttcttggggttgccaagcggcgttcgccgcccttcgtcgtccttcgcccttctcttgccccttgcctttgttcgaccgcccctttggtaccagttttagttttgtcccgaggcagattgtaaacctttttgcttcgttttcgtttcatcaaacgttgcattggatttctgtatccgaaacgtggtgtgagctttcagaagtagatgaatacacatatccccggggtgtcatttcttgattggcgtttgacaggggcttgtattgtttgcttgctgacagtccagggtactggccagggatcacttttacttagggaatggaccttgctgctccctagccttattcaaaatggcacctaaaatatgtgtggtgtctccaattggctgtaggtgtgtgattcgttgaccatccctgtttattctgttacagttcctttattgaagattcagcatttacaaagcatgatacgaatcaagagtattgtttgatctcaaggtggattcttgatggtctagaatcttgaatcgaattcttaatgattgcccaacccctttctaaagccataacaacagtagaatggctcttgaaatattctaatacttaaacacaccagtagattcacacacata

SEQ ID NO: 65785 - DNA, 2809 bp, Homo sapiens
ctacttactacaaaggatgaatttttctttcacacaattttcatcctggcatccctataactaccaaaacacagccgaatatctgagaaatgttggtgcaaatgctagagacgaatagagtcaggcaacttaaaagtgttcttcatacttacgttgctgtgacgagcaacataaaaagaacagagtgtctaaagtcagaaaaaccactgaagtcacaactttttggggggtgtcagcttctacctcatgtaccaggaataaccaacttagcctacttcacagtgttactctaatagttaaatgagaaagtgatctgtcaagtgtttcccaaatgctcaaaaccacccttccacattgagcaagaataaaatagcatctggttacccttcccaaggtgatctatctgccttttcccgcttaggatctcatcgatcgcttaggagttagacacggtgggttaaggggtggtgaagagacggcgggaacaagcacttggtagctcagaaggctagggcgggagccaggtctttggactgaaaccactcccaccctcccccttcagcagctccccttccccttctcgagacacctgccccactaaacgagctgagaggatggacccaaccagcagtagtctgcaggtgggcactccaagcggggagccgaggcgcccagcacgcagtccggggacccgctggagggtgggcggaggcggacggcccagcccacaaagaagaggcgggtagtgcgtctttccctacccctcaacctccgacggggcccggagcggacgctgaggcggacacacctctgtctcactttaccccagggcaaaattcgagtaatttcagggagaagaggacaaagcatagcgccgggtcaggcctgcaccctcccctctacagctcaccgtaaaccgcgtccgcgcttcgggcaaactgaagagcggcggcgtcggagacatcttctcggctgcgcgtgcccgccactgcgctgcggcgcctgccgatgacgtcaagccaggagcaacgagactgcggtctctctgagcccggctagagtggcctgtgaacaccggtcgggcgagctggcagttgggagtttccctagcgactcagttcgggtgggcgttgggcgcctgagtcagccaaacagcctactcggggttcttgggtagcctttggggtgaggggacttgggcggccttggtctgtaagctctgcgttcccgggcgtggaagagactggccgcgcacatgcgtttctgtggttttcctggtttggggaaagcgggtaaatggtggctggttgcggctaactgggccgcgctaaaaggtaacccaaggcaggtggattacctggggaaacagctggagcagtggtcctgggccgccagtccgcggtcatcccgggagcttaagatgcggagtggtgataggctccggatgtatgagccctgtggctcaagggcgctgttctctctgctccgaaatagaaataatacctgtctcacagagctgttgaaaagctccactgaaataatgaccgcaagtgtgaactgtaaagcaatgtaagtagtatttattattaaaaggtctctactgaaagaaagagacctaggaggaatgcagtgcccggcgctgattggaaaacgggtggcgctgcgtcctgggccgaggcttccctagcgaaaaccttgtctccctccatttcgtcccttgcctgccttcccaggagagacgtggccgatagaagccgagtggcagtaactctaagttggagttacacggtggagaaggaagcactgactcagactcgggtaacttcctcttattccctcacacgtgtatcttgttcccttcttcgaagtctgtaaatttaaaatcctaagccccccaacaactgaacagacccccgtgaggccaaggggacaccagcaaaatcttaacaactgagttcccagtcataacgggatgggaggtcagacggacctggttataccctctcccttttgtgatttagaggagatagctgactggccataaagttaaaatagaggccaggcgcggtggcttacgcctgtaatcccagcactttgggacgccgaagcaggtgggtcacctgaggtcaggagtggatcacctgaggtatggcaaacatggtgaaacgctgtctctactaaaaatacaaaaattagccgggcgtggtggcacgcacctgtaatcccagctactcaggaggccgaggcaggagaatggtttgaacccggcaggcggaggttgcagtgagcggagatcgtgccattgcactccagcctgggcgacaagagtgaaactctgtttcaaaaaaaaaaacggagatgataggactgacggaattgactccatggcaataagataccaaagtataaacaggacctaagcccatgccaagcaagggttaaaagtcatgcatccctacgcttgaaaaataaactatgttctcactatgcttcaaggtttttctttagcagctaaacaagcgctggcctcacagtattaaaacaatttgcagttcatcgaccaccagacactaacaaccctctcccaccagccgtaactacagcttttattgatttcagttactttctcctgataagaaggtcactgaccatggacttgttctggccaatttgtagtgattgcatgcttacgtaacttcctgaaaagatattttgatgtataggaccaaactgtaaatacatttaaatgttaagtctccaccccaaagtgaacatggattgtctgttaaacatgcatatttgtttaata

SEQ ID NO: 65786 - DNA, 1389 bp, Homo sapiens
tccagcgccctggcggtttttaatcaagtagaaaagctgcattataccacttgcttcggttgcttcagtgagaacgaagaaatggaaatgcaaatcccttattagttgtaggaaacagatctcaaacagcagttttgttgacaagaccgcaggaaaacgtgggaactgtgctgctggcttagagaaggcgcggtcgaccagacggttcccaaagggcgcagtccttcccagccaccgcacctgcatccaggttcccgggtttcctaagactctcagctgtggccctgggctccgttctgtgccacacccgtggctcctgcgtttccccctggcgcacgctctctagagcgggggccgccgcgaccccgccgagcaggaagaggcggagcgcgggacggccgcgggaaaaggcgcgcggaaggggtcctgccaccgcgccacttggcctgcctccgtcccgccgcgccacttggcctgcctccgtcccgccgcgccacttcgcctgcctccgtcccccgcccgccgcgccatgcctgtggccggctcggagctgccgcgccggcccttgccccccgccgcacaggagcgggacgccgagccgcgtccgccgcacggggagctgcagtacctggggcagatccaacacatcctccgctgcggcgtcaggaaggacgaccgcacgggcaccggcaccctgtcggtattcggcatgcaggcgcgctacagcctgagaggtgacgccgcgggcccctgcgggacgggtggcgggaaggagggaggcgcggctggggagagcgctcgggagctgccgggcgctgcggaccccgtttagtcctaacctcaatcctgcgagggaggggacgcatcgtcctcctcgccttacagacgccgaaacggagggtcccattagggacgtgactggcgcgggcaacacacacagcagcgacagccgggaggtaagccgcgtcccagcggctccgcggccgggctcgcagtcgccccagtgatgccgtggcccccgaggcgggcgtcatcgggcagcgtttgcccagtgctggagggttagggagagctgcctgggcttgaccgcgcgccggtctcaaagtcctggctttggcccctcctccgttttcccctgtggaccattccgcttcgcagcgttttcaaaaactggagcgaaagtgatgtgggcggggcaaaggcggcgggaagaggagagcactgaagctggcgcgggaacttggtttcctggtggcctcccatccaatccccacgaaccagctttcctcttaaaccttgaaaagagaaattcgggagttcgagtataagttcttagtcgtcctttcctctttcctttccgacaggagcaccccaggcaaaaaatgtctc

SEQ ID NO: 65787 - DNA, 1204 bp, Homo sapiens
gaattgcttgaactcgggaggcagaggttgcagtgagccgagatcatgccattgcactccagcctgggcaacagagtaagactctatctcaaaacaaaacaaaacaaaacaaaaaaaaccaccaaaaaacaaaaaaaaaaaatgctgtcacatttctgtatttacaaagcataggaaccatgtctattaaccttcaaattgctggtagcccttcaacttttagcagcttactttatctaaaacaaacagaaataagggcaaagtataagctgaagtagaaaaaggaatgtcaggtctgtaacccctgtatttgtcacacattacaattatttcagctacttcaacaggaaatgcaagagggaacaagtgaagaaattttaggatctgtccccagcactctggaaaactaaacagaaaaataagctgccacagcagcagcagccgttttcctaccttggaaatggtggcgtgccccagaatgtcatcaggggaggttggctcctcaatccacaatggcttgaacttggccagcttggacatccactccaccgcctcaggcacatcccagcgctggttggcatccatcatctgcaaaaagagactcttcacagggaggtcagccctgagccaacctcacagcagggctgcggctcccagggaggaaatgctgtcactcagtgccaccaacagctgagtgagaccccctaacgcctctgctgaggcccagcacacggccctaacaaaaagagccagagagcagctgctgagacggggactctggctccaggtacagtctttaggaggagccgtgaatcgcttgaggagccactggatgtccagcagtgccctgggctgggccatgagaagtgctcgctggccctgggctctggtccaatctccatctagatgccacccaaatacatgtgtcttgcagtgttggttctgttcgtagaaaccattttgtcacattctgaatcatgcacaatcaacattgtttgttcaatagtcatttattgactattgcccactgtgtgtctggcacaataataagtagccttaactctcccataatggcacacctactccactaggcactttatggattttgttccatttaatatttataataactggccaggcatggtggctcatgcctgtaatctcaacactctgggaggctgaagcccgtggatttcttttcttt

SEQ ID NO: 65788 - DNA, 1199 bp, Homo sapiens
ggtggcttgtgcctgtgggcccagctactcgggaaggtgaggtgggacaatcatttgagtctggaaggtcaaggctgtatgagccgtgattgcaccactgcactccagcctgggtgacagagcaagaccttatctcaaataaattaataaataataaaaactttaaaaacataaaaaaaggataaaaatgaatattaattaagtaaatttaataaagtcatgatttaaaaaaatacccaaccaaaaactacattggtatattctatacatttgaaaaacaaccctccctctctgtctcacacacaagcactctcttcacagtaaccctatttttttaaatcataaacagatgattaggtaagtaagcagaagaaccaggatgagctaatggaatttttcatctttagtgtgagtgctgtgtaacacatttagtgagactgcagtgagtcacctgaaatatgtagcaaggttaaagttaaaatgggttctgtcatgttgtggtctgaaaaaggaggaagccaaaacccttagcacaaaagagtcattaattaaagtcatggagagatggaagttgatttatccgtgcctgagacatccaccaagacagcggtgtggggctgggaatggaggaggagaggggaagtgaaggccctaaacactgagctcagcacccatcccagaagggcttcttatctatcttagtgcccagggcccctccacgtgtgcccaagtcagcaaagtttaaagtctgggctgttaacagagagtgggtccaatggcctaacattatcttgtaagctcgctgagttttatgcaacctttgggggctgtgctgtagggtttgcagtatggagaaaggcagcggcttcataaagtactcaacttacaaacaagggacaattagagttgcagaagaagcagaaacagctcacagctctgtcttagtaagtggttactactctggggaaaactttaacagtaaattgtttacttaatggagaaaagcgggactgactcacagcatggtctttctctgcctggcaaattcctgtttgctcttcgagactcacctcaaagcattacttctgctctgaagccttccctgagccttttggacagagtgaagttaccccctgagatggtttagacattctgcacaaatttcatgttgaagtgtaatccgcagtgttggaggtggg

SEQ ID NO: 65789 - DNA, 2416 bp, Homo sapiens
ggtgcacacctgtagtcccagctacttgggaggctgaggtgggaggattggttgagtcagggaggtcaaggctgctgtgagccatgatagtaccactgcactccagcttgggcaacagataagagaccctgcctcaaaataaataaataaataaatttaaaacataaaatagaataaaataaaaatttaaaaatgcaggatgaacttaatctcaaaaaggacattgttttgcatttaataactttaacgagagatctatttttataaaacatttcaggtacaaaaagagtatagataatgtaatggacaccagcttgccatccacccaatttaggaagtaaaacattacaatgggaattagagacctcgtggtcccctccgtgaccccatttccttccctccctactggtaaccattttcctaacattgccgttcctcacttcccagcatactttcacacattcactacatacccatacaactctgcttttctagcgcggccaatctcatcagtggactacgaggggcagtgaggacccagtggggaacaggctccctgaaaaccctgcacagaacccactgtatttgggaaacaccgctctagacgggggcaggggagggaaggcctgacattctaacaccctcagtaagcaaaaaagaccttcaatatttaggtaggagtcagagttcctgcccttactttattacatctcttaagacgaactgacatttgcatcagtcctttctaagcgtgtttgcgggtaatttcacgagagcgccctctcatgtgacgcagttagcacgcgcttggtttctcaacccgactgtgacaccttcattacacagacgggtccaagagacccagagaggtctggaacttctccaagtcacacagcaagttgtggaagcgggatcaccactcaaaactcccagccccgggcttcccgttctccctcagcgccaaccccgtcgcgttcagggtacagaggaagccagcgagcgctgtgctctagggtttccactggcgggaacccaacaaaatcattttgctgctattgcctattatgcattctaccatttccagcaaaatgtgagtcgtaaaagtaaaaccaggatattctaaactccagcaaagaaaaaacccaggagagtggaaagtttctggatacttatacaattgctccaaggcatgaaaagcgagtgtctcccccaggcgcgcctcccactttacagaagcaatgggttcgaagtcgggaagctgcccggggcccgcagagctgcagtcggcggggcgggagggacccgggccgcaagccgcgcgtaccatggcgtccgcgcttaccatggcgtccgcgcttaccatggcgtccgcgcttaccatggcgtccgcgcttaccatggcgtccgcgcttaccatggcgtccgcgcttaccatggcgtccgcgcttaccatggcgtccgcgcttaccatggcgtccgcgccgtggcccccaagcgacgtggggaagcgcacgtcccggaccgagagccgggagatcctgccgcgcaccatggcccctgcgccccgtggccgcggcccccgtgcggtcaggactggtcgggatcccgagcgcgcggcgggagggcgggagggcgggagcgcggcagcgccgcgaggcggggcaccgtcagggcatagagggcgctcattggccgcgcggccgcaccccgtgaacttggccccatgggagctgcagtcccagctccgggctcccgggggcgcactccgccttccgccgttcccttctcagcctagacggagctgaccccgagagggttcgctcagggtcgccggggaacctgggcaggcaggaggcctcgcgcccggtcggcgcctccgcgggaccctgctctgctcggatggaagactcgtgaagggacctgcccgggagccgcgccctagagggagaagtcgggtctgagcgagtgcattcgctcagcggcagattccggccagtggctcagctcccaagccgaggccgctggttgtcgccagcgtacccaggagagcggtgccctagaaaatgctaggtctctttcagtgcccacagcctcagtttgccacctgataaattaagaggcaggtcatcattgattacacccgtactgatgcagatgaggtccccgtaccgtgcctcagcctgtaatcccagcacttcgggaggccgaggcgggcggatcacctgaggtcaggcgtttgaaatcagcctggccaatacggcgaaatcccgcctctactaaaaacaaaaattagcagggcgtggtggtgcgcgcccgtagtcccggctactcgggaggctgaggcagaactgcctgaacccgggaggtggagcttgcagtgaactgagatcgcgccactgcactgcagcccgggcga

SEQ ID NO: 65790 - DNA, 2049 bp, Homo sapiens
cttccaccaaagactttcattatttcctttagtaatttataattatacagtatgttattccacgcctgtatcaattaattatgcagaaaatgattcaaccaaatccgaactgttaagtcctactcattacaaaacaaaaactaaagtccctacaccagacttgattttcaaagagcttcttaaaacagctctgccccatgcccaataaagtgaaagctggaagcaattatcaagaagaaaaacacactttaagacaattttctttaacacatgtggacagggaaccgaacgcaacgggaggcggagtggcatgattccgtaaaagtggacgctgaatggtaaatttcccaacccccaacccaaaacaaaggaaaactttaaacatgttgcggttttcaatcaaaccaagtaaagccagaaaggctcatccactcgccccacacacccgctcctctccccgcacagctgctaccggcgtcggccgatacacagacccccagcctttaggacccaaaggggccgcttccctcgcccctacttcggccgtaggggcaaaaataaacctctcctccccgtcgccgggcggtccacacgaccccaaagacaaggggtggggagtgtccccacgcccctggaacctcaggtcggacttgggcgggacccggcaggtctggacagggcagagaccgagtcaggggcgagcaggtagcgcggggaacgagacaagcccgccgggcgatccgggggaggggagaagtttcttcccaacttcccgactcgggcccgcgggggcggggaaccgcggcggcggcggcggcggcggctccgggcgctggggcctagccctgtccgggcagaggtggaaccctccgcccgcggggccccaccgggtccttacctgtcctccggccgcgctctcatgagtcgctgctaccgcagctcgaggtggcggagggcggaggcgaggcccgcgggccctctccctcctccacctcctcgtcccggggcgcccggcggcagcaacgacggcagagccggcccgggacgcgttacttcaggaggagggagttcccgggctccccacgcctcggcctcactctccacctcctccgccccccccccccggccccgccccctgacttctagcgggggcgggggctgcgggtacctgcgcgcgccgccgtccgctcaccggaactcgggccacgccggcccggctccggggcccccagccttccggcgcctacgcccccgtcaggtcccctccgcgggctccgggccgctttgctgtggtcaggataggcgaccggtccgtgtcacttctcccgacccaacatggcggcggggtccggggcggattcccgggggcggtgcaggccgagggggcgtgaggaggaggtgcttccctgcccggagagcaggcccgcggcgtcccttcccacccgcgaacccaccgacgctcggctgccgcggagattgaatggagcgctccgattctgcccctctgcctttctctgttccttggcccagctctcagtagtggccagggctttggggcttgcttttgtgggggaggacggggttgagtttttttggttggctgtttgcttctcagcgctacgcttccgcaccctttgtcgttggtagtaaaatctcaagcccaaccgcgtgagccgggggcgttactcacaccctcatcaccatcctgatcgccgtccaaaaaacgttcacgtcttgcctccttccgaggcagggatcctgtccctgcccccaggagcttcctgttgactgtaggtcgaaccagccttgccgggaggggaaccgaagctgagttctgtttggcgactatcccagtcatggtggctttggcttatgttgggacagcgtttttctatatgatgctggcggcagcccagtgagggaagtgcaacaagtatggttctcctgcttgtcaactgtggaaacagcgaccctgaaagtggaggagccacagctggaatcgtgtccgtctgaatacacgcacctttcctatgagccttgtaaagccag

SEQ ID NO: 65791 - DNA, 715 bp, Homo sapiens
atgaatctgaagtattgctcccctactcaaatgcacctccatacactgtgtacatgtatacatgcatttcatatgttttccattgttacaatttatacagatgtattatatctactcatacatttccattcttttgctttcatctgctatgggatctatattttactattatagaacatttaaggccaggcatgttggctcatgcctattatcccagcactttgggaggctgaggccagaggattgcttgaggtcaggagtttgaaatcagcctgggcaacacagcaagaccctgtctctacaaaaaatggaaagaaaaaacaaaaacaaaaacaggcatggcagcacatgcctgtagtcatagctacttcggaggttgatgcaggaaaatcccttgagcccgggagttgcagtgagctatgattacacaactgcactccagcctgagcctaggtgacagagtgagacactgtctctaaataaataaatgagaacattttgaaaatttagtcaaacaatggggaatcttgttcttttaccttcagttcagctcaaatcttgaatatttatatttaatagtcacatgcaaatgttccccattatttcctatttaataaatactacactataagttgttaaatttaggtccagctgctaatgactaatggggtaagaacagtatagctgtttatacagaattttgcaaattgatcat

SEQ ID NO: 65792 - DNA, 1383 bp, Homo sapiens
gcaacctctgcctcttcaggtcaagcgattctcccgtttcagcctcccgagtagctgggattacaggtgcccaccaccacgcccgactaatttttgtatttttagtacagacagggtttcaccatgttggccaggctggtctcgaactcctgaactcaggtgatccaccccgccttggcctcccaaagtgctggaattacaggtgtgagccaccacgcctggcggcattactaaataattctaataaactcactaatacacaatgtactgaaaacccaggggctttgaggccatcaggaatcctttaatggccagagggactgctagggtcaggcccttctacctcatttccaccacagctcacagatgagggccttctacttcctctccactctggccagtgttggaggaagcaggtacagcccctctctctctttcttctgggaaaaggagtgattagtttgattgtgagcctagaatattcacagaggcaggttttactcatcagtgagattactgtgcccaagacttcacccttcctccttcacttcccacttttgcagcagcttggtctgcattcctgccccagccacaggctaaatggccaaagtcctctcggagctggggcctgggccagtggaaggtgtgtgactccctcgtgctatgttgccctttgctctggcagtaggaatgcactgtgcattgggatttccttaggcggcaatagttccatctaccctaagatttgcaggtgaaatggcagatatttatggagaaagcagtggaaagctccactaccctcagtcctaagcctttctccagcccagcttttagcagagtttatgtcaagtgcttgctcagcttttcacaaacagccactgtcttacctcctgaggtcttcctgctgtgcaagctccacccgttgggctgacgaaaggcgctgggagctctggggcgcaggagctgccatctttgaagcgctcacactgtgctgggcactttctgtaccttatcttctttattcttcaaaatgactctgggggataggtgcggtccctggttcaaagacgtggaagcagaaaatttgggacattagtaactctgggctacttagtgagtaataaagctgaaattcagtttgtctggactctaaaacctatacttttagcactttgaagacaaatttgtttcttccatgttttatgatatggatttatcaacaaagcccttctctttgagtttctgagcggatccaaagctgttttttgagagaaataattggttctggcggcacccctgaggaagcaggacaggcttgtctctggcaagaaaataaatcacgttcctccattttcccagcacttgcagtcctgccatctgcat

SEQ ID NO: 65793 - DNA, 555 bp, Homo sapiens
tctctactgcaacttccattaatacatatgttatatcaaataccagatataagtaaaaagttgatgccataaatatcaagaagaaaaaagaaggaacttatcacaattatttgttttaccacaagaatattccacacctcattttttttaaggtctcatgcaaatcggccaatatgttcatttattcatccaacaaatacttattaaatgtctactatggattggcatgtgaacttgctcccagtaaatgagtcatctgggaatggaaatgttaatacagttgtgtcaatattgcatgtcaatatttgactgaataaaggtgactctagtacaaccactgtcgtcacaaggcatctgaatggacattaagaaggagacatggggtgagggtagggacatgtgtccacctttttcctcagtaattataaaacctcagaactggaacactgcattcccttgtgtaactccataaagctttgaaggttgttttgaatgcatcattcacaaaacaaatgatttgaattgaacttctgacaataatttttaaaaataaga

SEQ ID NO: 65794 - DNA, 716 bp, Homo sapiens
taattttacagtaaaagcaccaaaaacagtctactacccaggttcctgagaagaaacaggtggtgcactcaaattggataatttgagttgagttacgatgataatacttacctaggtgtgggcaggttattaccatccataggtctgaaggggcaagggtcaagagcatggagaagacgttacttgataagaagagtagccttcagtagaggcatgcagccaacctgtacaacttccaaagggaaggagctatgctaaaaataccctagcctgacagtcctcctgccctttgatctcctgccagtgcctcccattggccgaatgaaactgaaatcagggataaaggaagactgtgatgtagtccctccagctcctggagcacagaacagggtggaaaagtgaagagaaaggctctggaggagcaaagagtctccagcacaacttctttgagccagattgactctcatgcccacttttttataacattacattcacactgggttttacttaaaaaatcacactagggattttaccctcataataggctgtgagaaaaaagaaaagatgataaggaaagataacatcttcttcatttttgtatatctagtgcccaggacagtgctgaaatttagtaagaactcaataaatgtgcaatgagccactttctcaaagcttataaaaacctaaaaatcaaagttatttcagttatgaatata

SEQ ID NO: 65795 - DNA, 646 bp, Homo sapiens
ataggaaagtacaaatgaatccaaggaaggttggtgagttttcagtgataatgaaagttgatgttgatccttgatccctggaatatatggtacctcatgaccctcacatataaagaaatggctctaccccatggatgttgtcagttatcagaggtcactctatggaatgcctgccctgactgtcaggggtccagccagattcttacaatccccatgtaatgtgtagagaacgtcactctaaatgatggggctagtgagaacagaacatctctgctgtcatctctggaaactgtcactctggcaagccttttcttatctttcctgtatcactctgtattttccctttcatgactcattccttccaattttctgtttcatctctttccactatgccctctagagtccaactatgccaaaagcaggaacaaagaaaaaaaaattctctttaattatgaaattccacacaaaatgctgtatcttggctgtattagtctgtttttatattgctataaagaaatacatgagactgggtaatttataaagagaagaggtttaattggctcacgcttccacaggctgtaaaggaagcatgaagctggcacctgctcggcttctgaggaggtctcaggaaattttcaatcgtagt

SEQ ID NO: 65796 - DNA, 1745 bp, Homo sapiens
accaaaagaaccttgaatttggtgcctactttggttttggtgctgctgcttctcaagatcctcagcagggattaagaagttggggtgcacagcaggaatatcaggaaattggcaggcttgacttcctggcaaattgctagcaggaccactaaatgctgaactgtactgtgaatgtataccgaaatacaagcaattatttctgtactaaaggtgtttttaattttgtatttgtgtaaaaccacctttggaagcagcaactatctagtcagaaaagcaaatgatgtttccattaatcttttctggggaaaacattagtgctaaggatttaacaatctgtaggtaaagtttaacctaacagtattccacaaggagactttttattatcagacggttgcctaattttcatataatttttatattaatataatccttggttcctccccatccccttcataggccacagctgaggtgaaaagggtcctggaatggctagtgagagctagaaattcagacgggaaaattgaaactcagagcagaaaggcaagctgcccaaaaataacaacgctagttaatggcacaattgctaccagacccaagtatccagacttcctggagctgtgagatctttcatcaccaccactctccaggtaccgggcagtgcctgtttctggattcaaactcacagcagcgaggaaatcctattttagcaaagtgatctactgttactgttgttagtgcacccctctcctgcgtctctgcttcacatccactccctcgccgcccgcccccaaacacttggattcttcctagcctctcacaggtcagccaccaccagaggaccgtgagcctccggcaagtgatcaaatactgagcccgaatttcggcagccgtaccaacgcaatcctgggagcccattccacccactccgcagcccctctcccacctcacctcttcccttgtcagaaaagcggacgccgccttcccagactctcctcatgaaaacagcacccatctaaatagtgatcatgaaaaatgccccttccagtccacagagaaaaagctttctccttttctaagagtccatgggcgccgccatgttgctgtacggaaaaacgtttccagggcgagttgagcgttcagggcactcctcggcgctcaagctgcccacaggtcttccgacctaactttaggggtcgtgccagtcttcgtagagacggccacactggcccacagaccccagttcctggggtgacgcagctgggcgcgaccagcacgcagccttccagcgacgaggcggtcgcatggaagttactgcgcgcgtcgtgcgtaatgacgtcagcgccggcggagaatttcaaattcgaacggctttggcgggccgaggaaggacctggtgttttgatgaccgctgtcctgtctagcagatacttgcacggtttacagaaattcggtccctgggtcgtgtcaggaaactggaaaaaaggtgactgaatgacatcggattaactttgtttctgcagagctgttctggaggaagaaagtgatggcgccaatgacttaaatttagaggtcctgaggcgatgttttggtgtttgtttgctgttgggagaagcctcgaggccaaaactgtgcgaggcgctggtttcacgggatctattaaatttctagtggcaacgatttcccaaggaggaaaggggagggcctgggggacactgatgaggagtggaggctcgggagaggaaacg

SEQ ID NO: 65797 - DNA, 515 bp, Homo sapiens
ggggttacaggcatgagccaccacacccagccataaattttatagatattatatgttgtggattttttgtgcagatgcctgtgataaatgcataaagttttactttatctaaccatgaatttgctttaagttcactgtgttgcaaataggttgtaacaaaccaagataccaaaataccaatcctctccacccttaggatgactctcttgaccccttagtcatcctcatccttttgtcccagcctgctataaaaatgctaatcatgttcaatataggccatgagtcacagaaggttggaaaacactattggtaaacagagaaagcaaaaacctgaccagtttggtatggttatcactgaaaatgtcagtaaaatatgaataaactctggtgtgtgtgtgtgtgtgtgtgtgtgtgtgtgtgtgtgtgtgtcttttttttttttttttgagtcagactcttactctgtcacccagcctggagtgcaatggcacgatctcagttcactgcaacttctg

SEQ ID NO: 65798 - DNA, 2560 bp, Homo sapiens
cccctctatctgctacctttgggtttctgaatttacataccactctcaagtatacagtattcacgatttctaagaactggagagtaaacctagtcctctaacaatggcattttatttgttgagttagggcactacctgcccacgatgaggatagttaatgaaacgctgcccggtaacgacgattaaaggctttgattgaaaacgtattaggccttaagaattttgcgaacatctaatttaaccctagtaactgtggcgtgggttctttcagaatttacacgcacgtgggagaccgcgaagcgcaggcagcgttaaaactagggcgctggagtcacccccgtaccccgaatgccgtcggcgctccagggcccccagagggtgcggggggcggggacgctgtgacgtcacagagcgcccttctgacgttctcacggacccgctttgcctcgggggcccacgctggagcccacccagtactactaagaaatgaggaggaaaaaggggcgccggctctcgtagcgcctattttctcggcagagggacccacgtgctcgctttggtggactctgcgcccggcgagtaccgccggcctgaagcttcccgccgccgcgtccacgcgacccagccagagagggctcagtcagccggcgcggcacctacaagctcagtcgggatcctggagaggcgggaaggcagcggggccctttccacagagagaacacagctcttcgggagattcccccgctgcccccgagccctgctctcccgcctcggcctctgaggactacccgcagggcgcaggcagccgcgaaagactcagcctccttccaacttcgcgagggccgagggggcgggccccgggcgcgcgcgcggcgaagccccgcccctgcccgcgcggcctgctggattcgccccgcccctcgctgtcgcccgccgcccgccacccgccaccgctcttcctcctgcgccacagtcccggcggcggcgctggtcgcgggtcgcaccgtgaggctcgcgtgggcggcgataggcgctgggcccgggcccggtgaggagcgcgccgcgcgtccccttctcctcaggagtggcgggccgcggaagtgacgtggtgcacgggcaggagcgcgtttgaatcggttcccgggtgatcctcgcgcctgccgctgctcggccgccgccgctgacgaggagctgcagcgcgccgggccgaggcctcgagccgccccgggagctggagctgaaggcgccgcgcggagcgcgcacctcagccctgagcccggcggcggcaggcgtcgctgtcttttctccttttccccaatatggcagcggcggacggcggcgggcctggtggggcctctgtggggactgaggaggatggcggaggcgtcggccacaggacggtgtacttgtttgatcggcgcgaaaaggagtccgagctcggggaccggcctctgcaggtcggggagcgctcggactacgcgggatttcgcgcgtgtgtgtgtcaggtacgcgaaggggcgaggaagggatgcgcgtgtagacttgggggcgggagggtgatgagaaactcaacttgctcactgagggcaataaacctgtcacccggtcccggtcctgcggccttggcttccctctcccgtgtgcccgccatgtccgtgacctggtggccggacgcctcgggcgggccctggcccgggcctcgaagtgcagggccggctcccccgtggccctccctctgcctccgctccttttacgggaggccttgccggcccgggtggagagctcagcgtttgttggccctgggcgagcttagcccggttgcggccctgcagtctagggaaagccgttggtggtgtctgtttttactttgtaacttttttaaaacgagagaagggagttaacgcccaggggctctgttgtgagtgttgcgacggtgggaagttgtgaaatgcccggagtcatctcccccaagttcattagatgatgcggggtgtccccgggttgccctgtcgaggttgcaggtccttctggggcggggcggcgggggggatccttccgcacggagacacttgtccaggtcagctctgcaggtagagctggccttctgcctgtctgagccctaacccttgggaatttccaaaccaagtcaaaggttggtatgggtggctgtggagcaccagaaaacgtacctaccccgtgtattggttcgctttgaaaatgaacgtggagggaaatccgctttaaactgtgatgtactttatagatatgaggtggtggcattgcctgagctttgaagaaggaatattgtcatgctctgaattaaccatatgaggtccctttttaagctgttaagaacacttagcgtccaagggaaaaaaagaactttgaagccgtgttttgtcgtgaggctgataggtttagaaatgttctagaccatataactgtatggttgctgaaataattgaaatcgtgatccgtagaatgaaaacgattggagaagtaaggactttcttttgttcacagctgtagtcccagcgtctagaactgtgcctgcgacatt

SEQ ID NO: 65799 - DNA, 1091 bp, Homo sapiens
gaaaatttcagtttaagatgccttttaaaatgtccttataataattaacaatcattattattcagtaaatagaaatatacacaaaatactactgaaatccttcggttgcaaatatatagtccaaatgttacaaaaaatgttaactttgaatttacttttatgacatgagggcactatcatttacattcatgagagctcagtcagaaattgcctcctttacttatgggcagaggaattcgtcacttgtttaatcattaacacactttccacaggcaagtaaaccctagtaccttggtggactctgggaatccgccccacgtccactccatgtgagactctgatctgagcaggctctccgcaggtttcacctccagctctgaatcactcttaggacacgctgtctggggataggtgctgcaaagagaacaaagacacacgatgacttgaaagtcgggaaaccttcagtcttgctgagcctgacagattaaaagaaacaaatctgaatatcttgactttatcctgcatatataaaaactctatggaagggagcatcaattatttcttccacttgagttctttaataataataataaaaatgacaccaactagtatttaagaggacttaccaggtcctttgtaaacaaacactgtagattcataatctcatttgcttttcacaagaaatcaatgagaaagaagataattttgtaggaaaggaaaagcaggcaaattaacataacacctgagaatctgattgcagaataaacagttatgactatactttttttcactatattattcatttacagccaacagttgacactaaaagatgagaatttttaagaattgcagatgagtgggcacaatgtctcatgtctgtaatcccagtgctttgggaggccaaggcgagaggatcacctgaggccaggagttcaagaatagcctgggcaaaatagcgagactctgtctctacaaaaaaatttaaaacttagctgagcacagtggtgcgtgcctgtagtcccagtcactcaggaggctgaggtgggaggatcactcgagcccaggggtttaaggctgcagtgagctatgag

SEQ ID NO: 65800 - DNA, 565 bp, Homo sapiens
acaaatactgtcttatataatcccttatgataatgctatttgggagactgttaggaagactagagaacaaaaagagaaaaaatctacttgggagagttaggtaaggcttcaagcagcagaaaatatttgttctagaagtgcaagtatgtgtaaagggctgaacagattaaggaaggaaggttcccagtgggcagtcccaggcagagagaacagcttatgggaaagtgtgctaagtttgagggacaagagtgagatgccacaaggcctttgaccctgtgcaagtttatcatgtgggcaatgggtgcaatcagtgcttcttctgttcagggaagcgacaggattaggtcacagggggaggatgaactagagaagaggtagctaaaggcagagagactactccagaagtcaccacaacaaattcaggcaagagactgcacagctctatggtagaagagacacacacagggagctgagaatcagttagtcttgatgactgttgcatgaaccaacttagagatatggaaataaaaagagtagacctggtggggaacttcctatcaaggtt

SEQ ID NO: 65801 - DNA, 1214 bp, Homo sapiens
atagatagtaatagaattttagacattttaatgacagctgacctgactgttttatgatacttaaattctagaactggcagtgcttctgtgaaaaaactcagaaattctggcctgggaagactgcttgcctaaggaccccttccacaattacaaccaaatattactcaatatcaacctttgggatacgtaagaagaggggattttctgattcaatatttctgtttgggaatttaaacagacacataatgcaatggctagatctgaaggtaaaaacagggctccctggatttcaatgatttcagtgctcagagaggcaccgaaacacaagggtgggcccccagtagccatgtctataatacgggacccaggtcttggtatctgctggctgacaggggtgggaaacatctggcccaaacagatattcatgaaacgtatatggagagccaaggccacccaagactgggagggctgggctacctgagatgggatgcagaaggcccaccagcttggaacactgacaccccaggtggccctggctcttgccctcttggcatctctctgaacgatgagccagtcataagtttctttgcgtggttgttcagagtccatttccaatgttgccaacagaggacttaaatcagacaggctagatcctgactggataaagccacctggagccctaaaacaccctcctgcaaatatcagcctggcaaaactagcaagaacatgcttcaaacataacccagataacactttatgctacttaacaacttaatctgttgagaaaaaaatttttaattttttaaaaatgagaaaatatgaagctggccttaagcttagttctcagggctgataagttttaaattaggatttttggatctgtcaccatgttatttcctttgagggaatctgaaagctcagacttctgctcactgagttcacttcactatgatgatttcaacacactcactttctataaacagatgaactgctttgttggactgagtagggctcagaaaagggaagacgctttcccagtatagcaatgcaccctctctccgagtggcggcccagacctttactcaacgacagtgtctacttcagcttttcagcaggtataacttaaggaaggaccataaacatcacctatttcatcttcaaaaattaccagcccccatcttctacccaccccagtcatcagcccaataattttc

SEQ ID NO: 65802 - DNA, 8930 bp, Homo sapiens
gaggctgaagtgagccaagactgcgccactgcactccagcctgggcgacagagcaagactctgtcttttaaaaaataaaaaataaaaaaaaaagttgaaggagaaacaagataaacaagatgtctggatattctcaaagtattttccccaagatacacattcattacaaaaggaaaaaattttaactctatagtagagaaacctggaagacaccaccataatcaagtgatcgggaaaacttaagacacactgacctcagggactcctggtatgactcactgaaaaggacttttgaggtattttgaccaaaaacacacaacctcaatctaattatgagacaacatcagacaaaccgaagtagagacaaattcaacaaaatatctgaccagtgctcatcaaaacatcaaggtcatgagaagcaaagactaaagaactgtcacgattggaagagactaaggagacaggacaattcaaggtaaggttgggctctggaacagaaaaaggacattagtaagaagaatctgaataaagtctgtagtttcattttcaaaacaaaacaaaacagttattcttggcctccactactgccttcaattctgcttcagtctgtctgggaaatctgtattttcttttgaaagctccacagggattcactcagtgatgagtcagatgtgggcatcatcgtccttggggctcacttctcacccccggtgcacgttgcagtcactgaggtgcttggggaatcctcatgatcaggccaccccatctgcagattctactgcaagtacttttgaaagcctccaaatgatcccagaatgtagcacatctcaagctgtgcctcaggaccacaggtaggtggaatgactcccaaaccctcttgttttcttgacagtgaacagagctgaagaagggtggtgtagtagttcctgttcctttcctgcctcacttcctggcctcaagtgatctacctgcctgggcctcccaaagtgcaggattacaggtgtgagccaccatgcccaactgagatttttatttagatcctttcagagttgtgtccatctcctctaggccaggccagcagcctcactttttgggacacctaaaggcacagtgatgtaactaaggtgtgttttcccaatgcacgaagactacacctggatcacatctacaaaacagggctcaccaggcactctaacgcactgagtatgctgagtatgtaatcaggaccaagtatccaggcaaactcaacatggtagcattcatacagccatttgctggatatctgcccagctgtgttattcataaacccagagcagcaaaaaattccgacatattagtggaggcaaacaaaaaaaaattgatttacatgcatctactggactcagttgtagtacaataaatatttgctaaatgaagacaattttgtttcctctacattaataggcttagctatgcaatatacagtgtgtgtggaggcagtctgtgtgcatgtatgttttaattgtaaactacttctaaatccttccttactgaaaacagatgggggcacaaatataaaaatgaataataaataattttcaaatagccgaaacatattcatgtccacagtcccaaaactactcccccccaaattcctgagttcatctgtggcgagcatgctttgaaaacaaagactttcagagaatttactcccccaaactgcctaaccagtaatcttgtatggtccctcaatatatcctcttagcaggcctcagagttttcatttcagtgcacactgtcacttggctagtgagcctaccaaagcacacctgtaggtttactagaatcctcttcctccaatgcagctacttctgctgcgcttaaggaaccatcacccattcacagctcagtggcaagagcacaaacactcctaaaacttaggggagttaggagggaggaaaggtatcattttcaagcccaaagttactagctatggagagtgggagctaaaacatggcttgaaaatggaactcagaaaatgtttgtctcaaaaattttagcgaaacttggcccttatccagaaagaaagaggaaattcttgcattagcccttcttcccccttgttctaggactcagaactctggttgagttctctggctaattatgagacaggcatagcaacattatttctatgaggaaataaaattccactcaattaaataattacttttttgaacactggccatgctagactggaggaacacagttagttttagacttgttcacctccagttgttctaggaatctgggcagcaatcagtaatgacaacgtgttatggttccccaccaccaacctcagccccaccccaaatcctgggtggactaaggtttcctaacttagcatgatgcacgctgcctcgtatcatgtgccccacctacagggtgacttgccacctctgaccactgtttgtgttattaaatctggttgagctttttggcatcaaccagaggtgcccatgtcctttgataaatagctcacagagatgagaattgagggacactgccctcagggcttcctggagtcccctgaagctggtgaggatgtgaagactcaagatcaagtctcgcttccgctggagaagaggtctgggctctgtgccgggggttctctctaacaagaatggtcaggtgacctctagagtccccccccagctctaaactgcagaaaagctccaattctataagcatttctgaggattacaagtttggctaagaactcctgtagtatattctgccctaaatggggtgaaaatatggccagtagattattctgggacttcaggttatttgaatataaaataatttagctttttccttagcaaataaaggtattgtcttcacttgtttcaaaaaatatgaaaacatggtctttgaaatttcccaatttctaacaaagcacagaaatcttctcatggttttccaaatcatgatatgatacatttatattcccaaatcacaaaaccatgaggaaagactctttcaaaactgaaactgtcaccttacaaaaggggtgcccagaaaggatgtgatttgtaaggagtgttcaggtcacagaaggcctggaccctgaaaaccagggttctccctctaaccacacacacccaggttataaagtcaaactcctatataatcattacaggctactaagcagatatcagatccttatcccaaacgttagcattaagaaaactcatgcttctcatgggacagggaggtgactcattagacttcaatgttctaacggcaacataaaatgggaccgttaataaaatgcagcctaagcaaacacctcttgacctctttctggaaaacaccagcagacacaagtcttaagaacttcctgtgagggagagtttatgtgtgttagtgctacttaatatatgaatgtttaaagtatttcgtaaaaagtcagcaaggttctctattctcccttctgacctttacaacaaatgtgagtgagccaatatgtgtatacattctataatattacaatgttgatttcaaaagcaaactgcctcccccgtggtagcacctgactcttccattcatattcaaaccacgtctttccattagttcctgagaactctgagtaagtacactttcactaacagatccaaaagcaaaaagcagagtgtgataacatttttaaagataataaacatttgtataaccttaaaactaaaatcaagttatgagccacagattttagaaactaatttttgtctcactgattttatgcttgttttcataaaaatatccatccttaattttaaaaaataaccttgaaaatagtgtttccttcctattatttttaaaggaaagcttccacaggtagagttacactgtcctcaagtcacttgattttgtttctttaatgcagatttctgggacttacactaagcttacataacttgttctaagttatattttgtaacaagagagaaaactctggattaaagaagttcatacaatttatattttccccacatacttcaagcttacaaaaattcttgtttatgatcacagaagaaagcaactgcagccactctcatatatccaaatacaacgtcagcttcaaaatattagtttaccattccaaaaattatgactaggccaacaaaaactgtaacacttttatatgatttttactactacacttaaatgcaaagagaatgtgaaaccaaatatattatttttgaaacataatttttaaaaattctcagtttaaaacagcaacttcatttttttcctaggaaaaaaaagtcttttgttaaataacaacgaatagagatagcagaaagatggcatagtaaatgcaggagggcaggtagccaaagatttctgttcaacataacacttagaagttaataaaattcactacaacattacattttcctaagaaagggcattagtctttttcttttggtggatgccatccccttgtctctcagtagtgtccagattgagcaagcagcgaagggagcagggacattgggagatgtaactcaccaagataccaggaggggacttgtcatggtaaacatcttgagttttacttaatgagcctttacaaaccacctcatcttccttgtcatcttctaagtaaaacatcttgaaatttaactagcatgtcttttttcagagatgaaggtatataatccaaacagaaagctgctctcttgacaaactgagtacaaactgcttgcagacacagttatatggctaaaactgaaaggaaatggttcttaaaaaaaaaaaaagcaatgcatacacaagtttaccaatgagatttgctcaaaatacctcaaccccttctccccaaaggagataagcaggggcatgggacaggttgtgccatgtgtttacactgataggcaccaagacctgcccaatcacatgatggccactgcagcttccatcacacaggacagggattgagttaatgattctctaaaccaatcacatcctcattttttagaaataaaaacagctactacacatatggagagtgatcttacataagctaatcatgtaagggaagtaatttacagacattttccgagcagcagggagcttcccaaagtcagccagattacatgcctccaagagcccaactactgaacacttttcctttgtcagactggtgtgacccaaggtattttcacaattctgggagatatcctgctcagtactgtatataacaagcagaatttattaatttcaagaatatgataatgcaacactgtaaaattaaaacattcctggtatttccttggcagctctcagtaagtcaaaacatagtaattttaactgaatttttctaaaaaccgcaaacacacaactcacatggacaaacatattagatttctgaattaagatacactgtttttttcataccattgtctaggattgtgctgttcatcacaaacagccattagccacgtgtggctactgagcaatggcaatcaggccagtaccaactgcaatgtgctccaagtgtaaaatacacactggatttccatgactaagaatgaaaagagaataaaaaaactcataatttctaatatatactacatgtttaaaggatattttggatatactgagttaaataagaaattacatttacttttacctagttttttttttcccactttttaaaatgtgattactagaaaatttgaaattacacatgtggctcacattatatttctattggacaatgctgctctaaggccccgagacaatcttgagaacaaggtggggaaaaggccattcaggcaagttataggtaaggaagaactgaggacaactggattgttcatcattcctttaaagtatttagttaattcatcaacaatatactagctgatccacatccatttaaccttcacattaaacccttttctctgcatctaaacttcacaaaagacaaaattttcaaatgtttgaccaagtaataggtgtctggtgatgcttaatacagtaacatatcaccaaggttcatataataaaaacattaagtggcagaattaaaaaccaatttcaccaaaattagaaatggcaaaacttatcttgcatgcagcatgttttcctgcttgccttctagcccagcatagtatcgtggacctgcagtacaccaaagtgcccagtcacttgcgatctaattcaacacacatcatgtacacaaactcctacttccagaagagaattgtttaggtttttctggcctaaattttatgcaatgaataaaaatttaaatctcttcatccatgatctactgcagttcaggatccttggcatcagatggtagtgataaaaaccggatattggggtgctgccggtggagaaaaatggaagaagccagaggtcagcaagaaggggaggctagtaggagaaagagagattaaagagaaacctaagaaggtgaaaaaaagaaaagttagaggggcagaggaaataaaatgtagaagagatgagaaaatattcaactggatagcaggagaaggggaaaactgtaaggagggtggaaagaagaaagacaaaaaccatatccactttaaatgtgaggaaactgaggcccagaaagaggtcaggcaattagcccaatgtcactcaactggtcagcaaaggtgccagggagaagaagccccccagtttctggttcagtgcttttttgtgttatgccaagcagagaccaagaaagaacatgctggggatcagcaggaggaggctgacaagaggtaggagcaaaggcttagcaagtgaggcgtggtggagatccagcagggcagaggtcagcgggtagaattctgttcagcaactcttgcctacaatgcagcttacacaacaggtggggcacccaagccagtcatttgggggtttcctgatagtgtttgtattgtttccttgttttagctgatgactcccagaatgtcctgactgcaaggaacatgtactatggacccatcagaagtgagctcattttctaaacatctgtgttgccaacaggcacacacctaaagtttcctcctatggccacctgtggatcaccctgaccttcaaagctggtagccaaagttctgcttccacccccaccatctgcaaggtggcacttttcagtcttgatggataaatgttaaaaatcacaaccaacaattcttaatcatccctatgattttcaaaggaaaacgctactgtattgtcaaactttttctctacaggctaaaataaaaataaatgactactgaaaaaagctactttttacttttgtataacatcttcaatgatcttttttttaaaaagtgcatagaatttggaagtctttttcccaagacttaactctttcaaaaaaaaatagtctaacttagggaaacaaagctaaaatgctagttaggaaaaacagaatcctgttcagattccacagctttaatgatgctaagtaaaatatataccttctttgtttttgttttttctactactaatcccataagtatgtaagactaggtatacagggctttttaagagggtataacgatttatttaaaactttctagctagaatttgcttatctgaagctgtactaagctggttcaacagaaatacctttacaccacaagcatgttattttaccataaaacatgaaaataattgtactcccccccagtggccatactatggaaacacaacaccttgctcctggattaccaatgaagatgtgacaaaactaagttttgattattaaaaaatcatgaaaatattttataacctcaattacaaagaatttcataatacccaccggaattcctctatagtgaagaacctaagtgcatttctgcattttcaagactcctcatgacaaagggaacatgtaaaggaccatggctcacctgaaacaaatgttttcatttagagccaaatggctctcaccatctacaccaaagcatatgaagtgtttcttctcctaaatggaatcacttataattcactgtttatgaaaacaaccccaaagggactgacgttttattcaaaaccaagataaaattcctcttgctaccactcttgggtttttcaaacatttgtagtttaactgctcattgggtaatggttatatagtttactcaagttccagtgtttcataatatcctcatataatctcaaaattctaaacaagatagctagtggctggcaatttcactgaactgtgagtgaataaccaaatgcaaacagatctttccaggaacagaagagaaaaaacaagggagggtctcctgaggtcagacgcccagcttaaagtgactctcccaaagataaacttctttgaagacttgtcatttatctttaaaattcacacattttgtagtctattgtgataagtctatttttttaatgtaaaaaaaaaaaaaaaagaaagactaactggccaaagctttcttcttccaagttcaaaggttaatgcaacacatttactgtaagaattagaggatgctcagtgtacacatcgcagtttaaggagcttaggaccaaacaacctctgcggtctaacccttccaacacaaatgtttgaggtcaagcttttacccactatttggagacaagagagacaatactgagagttgcctggctgtagcagtcaagtgcatctgaacattaagagagtaaagctgaacagcctaatttaggatcagagtaattatggcctgacttgtgtcacaacttttggacaacattttcaacaaaataaagccaaaagaaatggaaaaccctctgttctgctcaggcaggactcctgaggcctcagttgcttgacaggggtggaggtcgggggtgaagagggggcctgttaattgcctaattgtttctgtttaaatgtctttttcttctcccatttcacc

SEQ ID NO: 65803 - DNA, 886 bp, Homo sapiens
cttaaggattacatttataaacacatgttgtgcataacatttgtatacaagatttctaactttggcactatgagaataaagaaatttctttctgggtcaagaaagaaattctaagcaaacacattaaacaatgtttttctttgagataaaaacaagcttttaactaaacagtaaattctcacattaaaaatataagcccagagctaactccaagacagttcctcagactttcccacaatcgctcaagcagtactcccttctaagtccctccctgtccctgattcataaaaccctgctttacgcagaagcagacctacttgattcctctatgacactatcagctacttcgggacaagaggaatgttcattcattcacctttcgccctttgtcctatgactctctcaacactggcttctctggcctagtaagacctagaggtggatgcgggctccagtttaacatatgacctcatttaatcctcagaaccagcctgtcaagtaggtattgttatctccctattacaaaagagacaactgagtaaatgatacatcaaaagtatattcatgaatttgggaattcccaaaggtctatgagtatatttctatttaatgaaaggttcttcatcagagctgatgtatcattcatttattcaattacactaagtaaagcaccactaaaactccattagcggggagctcatctgcagatgtagttaccaagtgagtcaaatgatacagtgaagaaagcactagttcaaaagacagatctgctcaaaaagaattcagatactcacttgtattaggggtttccactggctaccaacaatgtgatgggacctggatttctgaactgttgcaggaagtcagggaccctaaacagagggac

SEQ ID NO: 65804 - DNA, 2423 bp, Homo sapiens
ctaccttgacaccaagtctagagcctcgttttcaattaaaaaaaaaatgggtaagccccaaatgtgcattaaaaattagtttggccatttactaagtagtccttcaaagcatttccaagtattcagagttccagtacttttcggaaaggaagggtgatctttctggtactggtttgcataattatgcctaaaaaatgtcatcttgaattttcaatgaaaagagtcttaaaatgttcaggcgagtggagaaaatggtgatccgctggcgttagaagtggacagagaggctctcagtacaaactgtatctgaacgtgttcctcacaaattaagatctgcaccgggggctggggggctttgagaaaactaaccacatttgaatccggtccacacagcttgaaggcggaggtacggggcaaagcgcggcggggaagaaacaccagcaactcggcggcccccgcctcgccgcagatcacgtgcccggcgccccctcccgcagggccgggggcgggatggagacgcggcctcccgcgcgccttccgcactcccctccgcgccccaaacccaggggtaggggtggtctcgggtaaccatccccagggcggcggcgagggaactgcgcgggttcagagtcctcagcagccaccactgacgccccgacgcccccggctccccgcgcaccccgccggtccgtcctgcggcggcggcggtaggggccgcgtctacgtggcgcggtcgcggcgaggcggggactgggacgcgaggaccgggaagcggggaccgcggcgcgaggaggggcggctcaacccgcgccgccccggagggtcccggcctccggcaggacagccccgggcccgcgccaagggaagcccccaggcgcagacactcaccgccagccccggagggacgcctgcgaggagcccggcccgcgcccacttacccacaggggctccgctcccggccagcgggcggctgagggcaggcggcggctggactgcgacggctaggacccgccggggagggaagccgagggggcggggccggtcgggggcgcgcgcggggtcggagcgcccgcagccgccgctgccttggaagccgcctgggccgcagctgagtcgggcggccctcatgaatgggacgccgcggctgcggcggccgagccggcagctggcgggcgggcagcgcgcaggccccgccccagccacgtgacgcgcgctcccggccgcgcgccgcgcccccgccgccgagcgccaggcgtgcggcttctcaccgctcccagtccctgggctgcgcgcccgggcccctggccaagtgagggcggggcctcgattttctagtgcctcgggcgacaggagccttactttgttttaaaaaaaaaaagtttcttccggtccccatggcaaccctgcggcaggtcacgtgggactgagagcccaattgccaaaaaggaatgttaaagtgcaaaaaaagtctagggaatgaatgttttataatccccttttgatcactagtagcacatctcctttgcttacttacatctccaccgaaaaaaaaaaaatcctattacacaactcatttttaaaaatatgccggggttctgttgttttttgtttattctttttatcgctctgttaccccggctggtctccaactcctgggctcaagcatccccgcacctcggcctcccaaagtactggaattacaggcatgagccaccgtccccagcattaaaatatactttttaagaaatgggtggctcacgcctgtaatcctagcactttggaaggccgaggcaggcggatcacttgaggtcaggagttcaagaccagcctggccaacatggtgaaacccccgtctctactaaaaatacaaaaaaccagccgggcgtggtggcgcgtgcctgtaatcccagcttctcaggaggctgaggcaggagaatcagttgaacccgggaggcggagattgcagtgagccgagatggcgctattgcactccagcctggcgacagagagactccgtctcagaaagaaaagaaatggggcccggcgcggtggctcacgccggtaatcccagcactttgggaggccaaggcgggtcgatcgcctgaggtcaggagttggagactagcctggccaacgtggcaaaaccccgcctctactaaaaatacaaaaattagccgggcatgttggctgcaatcccagctacttaggaggcagaggcggtagaatcacttgaacccggggggcggaggttgcagtgagcagagattgcgccacttcactccagcctgggagcgaaactctgtctcaaaaaaaaaaaaaacaaaaaaaactggattgctggtgctatatactattggtgcacactggtttttaatttgcagcctattctattactattctatgattgaaagtaatgaacagaa

SEQ ID NO: 65805 - DNA, 1061 bp, Homo sapiens
aattgtatgaagaataaagtaaattaatgtttataataacatatggtatagaaattcctaggagctgaactaaagcaaactaaaaaacaaacaaacaaacaaacaaacaaacaaaaaacttataatgagtatttgtgagttaggcatattttatcttttagtataaaatacaaatataattttgtatggatatctctagttaattttcattcattgattactccttacatcacttaagtcagcaggttcatttccttttgaaatatgctgatgcagaaaatagcaactaactgagccagttttgtgaccaaagatagctagtcacagtggagctagttgggaacagagcacaaagccctgactcaccgtgtagcctttcctcgttgtgaaacctttctccttcctgtttacattttcacttcagccaacatatattgcgtacctagaagggggctaaacatagcacaaggtagaaaccaataaggcctgggctgtttggctttccctcccaggactcatatagtaggatcttccctctaacacaataaaggaatttggattttgtgcagctgcgaaaggacaaatgcccactgcagggctaaaactccaagcagaagttatcaagtggaggcaaacattttgcttcttggaagttgctctttattagactttggtggtaaagatatgttagttccaactacagattaagatgtttatggtctcttacaaccatattgtttagcatttcgtgtttggactttttgcaagtaacttacaaaagaaattgatttttttacacaatagcaaagaggatttgttcgtttatttattgagatggaatcattctgtcgtccaggctggagtacagtggagtgatcccgcctcactgcaacctctgcctcctcagttcaagcgattctcctgcctcagcctcccaagcagctggaattacgggcacccgccaccacactcggctaatttttgtatttttagtagagacgaggtttcaccatgttggccaggctggtctcaaactcctgacctcaggtgatccgcccgcc

SEQ ID NO: 65806 - DNA, 1131 bp, Homo sapiens
tctatttctggaatctcatttcatggattattaactactctgcctactaataaagagaggttagtggggaaaatagtctttgaaatctcaaacttaagcattccactgtctgaccataatatcctctggcctgcttacccaaaagcttaaattccaaatattcctctctcatcgggactaccagtttattgagcatcatttatcaaatgttcttctgattcttcttacccagccttagactccaaggtccaacactataatcacttccttgagaaccacccttggccagacacagtgactcatacctataatcccagcacttcgggaggccgaggtgggcagatcacttgagatcaggagtttaagaccagcctggccaacaggcgaaaccccatgtcttctaaaaaaatacaaagattagctggttttggtgacgtgtgcctgtagtccagctacttgggaggttgaggcacaagaattgcttgaaccccggaggtggaggttgcaatgagccaagatcctgccactgcactccagcctgggtgacagggcaagactctgtatcaaaaaaaaaaaaaaaaccaccccgactttgttcctttgttctctctccatttgtttacctacctgacacagccccgtccttcagcataaccacacttgtgcaaatgaatgttgcagataattgcacaatggtgccactaatgtgaaacatagatttcaaatggactctggcacttcctggaaacctctcacatccccctgctctctaagatatttatatcatgccttttcctctctccacttacctcattttccatcttcctcttaattattcactctcaactgatgacgtggcctcataattccttaagaatatggaaacagaaaggaacgtcctcatcatctcaccattaaccacctgtatctgtgctcatgttcttgcctcctgtcctatgaaggtagagggtaagtgtcctcacccaagcacagatgaaccccacctgtcctctgaatgtcaccctttcttgtctcctgagatctgtctgcattgtcccctcctccctcttcctcagtcagtctcatcagcatcttctaatctatcacctgtcatcctaaagtcccccaccc

SEQ ID NO: 65807 - DNA, 754 bp, Homo sapiens
aaaggcaacaatctttttttacacagcgttagaaatgctcaaccactttttgaaatgttaaccaccataatgcagcccagataagaaacaaaattaagagcctcaagaaatacaaaattgagaaacattccaactaaaaacgtttaaacaaaatagtctcattctttatagatacgaagtttatgtgtagaagccaatacacatttcctgcctcttccccctcacttcctggccgccggtgctacagagcaactgtcctgccacacttgagtgagatggaaaaaaccaattcttcaccccagttcacttccatgacttccggcagtgtctgttcagaggtcaaagctgttggtgattttccacttgtgctggacataaacctggcaaaaaggcaggaattttagggacagagggctttctaccatggcaggtcagaagggcctgggggaacagggcctgacccacaccaagtaaatatttgttgaatgaatgaatgaatggaagaaatggtatcttatggtttgtcttttttggagacagagtcttgctgttgccctgcctggagagtggtggcacgatcatggctctctgcagcctcgagctcctgggctcaagcatccacccatctcagcctcccaagtagctaggactacagtcatgtgccaccatgctcagctaatttatttttattttttgtttttggtagagacggggactctctgtgttgcccaggctggtctcaaattcctggcct

SEQ ID NO: 65808 - DNA, 3865 bp, Homo sapiens
ggagccaccatatctggcacccagtttcagataatttttgagtgacagcctaaaatttccccttaatctcaaatagtataaagaaagcagctctatttgatggcatatgaatatagagagtaatagctctttcaaaggaaaaagcatcactcccaattggaggaaaatcttccccgtaaagagtatgcgcagcccacaaatgggtaaaaacaaacgataggttatggtttacaaaatccttttaccaaattaaatataatcaatcctatgggccctgcatctgcactaaatactgccaggtaccttacattcatttatctccctcttccttaagacaattaacagaaagaaagctcagagaagccaagacacttcataaccctctgcagggagaaagccaaaatgtggcctgtatgaatgctattcacattcttggcaaagtccaaactactaagtgattgcctgtatctttgcatgaccaccagctgctacgcaggtgaaaaaatttattttttcctttcctttttttttttttaaataacaactgacatctagccaaccaatcaaaatcacctgaagtgactcacagtagcctgaaagccaacttgtagaaggacatactctgttatgccatgctttggtgttgtgtaattgatagttcaatatttgtttggccctttaccttggcttcatggctacaaatatgcgtcatgcttgccttccgatgttttgtataaagctatatttaaatattaataccaaatacctcacacgaatgtggcatgttctgttttgcaaagggcttttataaccatgatcttgtgtcatcctgagaacccagggaggcatctagattgggagcagtatccctgccctacagatgaggaactatgctctgctgtttcctagcagctctagtctagggaaaagcagacctagtttcctaccctaattatgctacttgttacctctgtgaccctctgggcatcatttaacctgagtgtcaattttttcatctgtaaaacaggatgacaaaacattcttattgctttcttccataagggatttcttgaagtgagacttgctttacactactcagtaagtcaaggatgggactgagaagccagggtgtcaggagggtggagggctgccccctccatttcttctctaagttgacagcgctcacctgcaacctttctttgtcaactgcatcacttttttttaaagacagacagagcctcactcttatccaggctggagcacagtggtgtgatcacagctcactgcagccttgacctcgtgagctcaagcaatcctcctgagtagctgggactacaggcatgcaccatcatgcccagctaattaaaaaacattttttaagagatgaggcctcaccacgttgcccagcctggtcttgaacccctgggctcaggcaatccccctgcctcagcctcccaaagcactgggattacaggaatgagccaccgcacccagccaacgacatcacttttgatcaaaaaaaatttctacaggcctgctcggaatttcttagtctctagtcgattgcatttcactttactcaggaattgcaagaatttgaaaatagacccacttttatgcaggtggcagaaaggacttaagaaataccaactggcctcaaggaactgcaaggaaagagcaatgtgtttgtctctctctatttgctgaagtcgagagagcacctgaactgctcttgagtttctcttggaatcttgttattcacacctgacagagaagttcagcaaaggcaacgtgatggtcttcaagggcaaagggtttcaaacagaggaagcaagaggcaccagggacataaaatcaccccccgcataccttactattgctagtttaaatcttaacggcttagtaaatttgcattcaatttttattttattttattttgtctttataactctgtaagagttacaagcaaggtaagtttcccccagccccatcctcgccccacttcccactttcttccctgcccacccaaccactccctatgatgacctctgaagaacagtatttgccaggttccaggaaatttcttttggctcagagtttggaaaatgcttagagagaaagggctggaaaagtcagtgcagagaggcaagcggagagaggtcagccttaaaccctagacaggtgcacgaaatccatccatgtgatatgatgaagagctgggaggagggagaaggagagcctaagaagccacatagcttgggtatggagggagagattttggggggctaataaatgagaaccttcccagcagcataacaatatatgagaacaaagaagtgcagggagaagtgtttgagaaattttgctgtgggatataaattggataacctttaagtggcctttcagaagcaaaaacaaagattggaattccttttaaacattcatttgcactcaagccggctgcctgtgctaatcctactcctcgcacaggctgagcgatgagggctctaggatttactgggaacacaagcataaggaatttatactcagttttacattgctacctattatttaatattatcattaaaatattttaggtaaacacaaggggccaagagaattcttttcccttaaatattgaccatatagtactttgaatttcattccaggttgtaggttctcttggaggaaattccgaggtgcggtgtggaggcaggtgtctgtggtttacctgggacggcgatggtccactcttcacatttgaagcattcgcttactgcggagggcgcgcccagcccagccatgttcatggctgccacttggaactgatacaccatgttttccttcaagttgctaatctgcaacattgacaacatcacagatactgaatgttccaggtttgtttttttttttctacttgttgagcattttatttatttaccttccatgtcagacacaccctagggtgaccctcaatgagtcacaccccttttgtaatctcctgggtgtggatgaaaccgtgacctccttgtagcctacaatagaatgtggcaaagggattgggagatcaagtcctgtgattgtgtcaccccatatggcaaaggagaaaagatattatagattagggtccctagtcagctgatttgaggttaattaaaagggaaattatcctggatgggcctgatgttatcaggtaagaactcttacaatggggttcgggcccctcctaaagaaaaacatggtgccaatggccttgaggaggtaaatgtcacactgagagctgcctacccactcacatttggagaaaggcaacatctaggagtggaagcctcagccctacagctgcaaggaactgaattctgccaacaacctgagcgggcttggaagaggaactcaacatgaatgtggcccagctgataaccggattgcagccctgtgagatcctgaacagacgaccctgcaacgccgtgcgcagacccctgactcaaggacaccgtgatacaacaaatgtgcattgttttcagccaccgagtctgtggtaatttgctatgtagcaatagaaagctagggcatgtacaggtgaaatttaaacgagttctaagctaggaatcaaaatgctcaagttctcataatgtttctgctctttactgagtgacctaatattttccgtatcactcagtaggaactgggttgttgtgagggtaaatatacatgacaaaataataaatgttaaaacatttgcaaaatagaagtgatggaatatattagtgtgaaaaacatttgtaggaagcagcaaactataaaatatgtaaaatgtgaccgacaagagatggaaaatacagtaagaaaaaaataacagacattt

SEQ ID NO: 65809 - DNA, 1943 bp, Homo sapiens
atgtgattaaattttacagattaggattaagcagctcttactttttttatgagcagagtgctgtacttttagctcatatcatttccccaacatgggctctatgtccaaaatgtgtaattcccaaatgattctcaggggcgtgggggttgccagtggcaggacagaggtggctggtgtggggggtgtatctcccctcctcacaatcaccttcctctctttgatatggacaatagacaatttccttatgtaaagtggaatagacaacttcctcactttccttatgtaaagtgctgtcaaatgtggcttcaatccctgccttccatcatttcccctaatcctccttggtagaaattctggagctgctaggggtttggggaggtggggctgtggcagaagctgatagggccaggacaattcttcaatctacacctgtctccagagattctgccaggactcagcctcttctctgtgcagatactgctatggtgacccagtgacactagagcatccttcctaacctcatgtgggcagaaagaaaggtggaactcactgctcctgacactttccgcagcacgttggagcagaaagaacacaaacctacagccaggctcacatctgaattctagttctgctacttattacccgcgtgatcttaggtgagttagtgcttcctcactgatatgtggtctcgggcctcatttcctacttgaaataatagcaacgaccttaaagggcggttatgggttagtggttaatatatgcgaagtgtttagaacagtgccatgcacacagtaaatgcttaataaataatagccacaaggtgggtattttcactatgactaaggccagaggagaacaaaatgtacttattgtccctggcctttcactggtcaaagtttaaaaatcccctggaaatgtgccaaagacaataaagcacaaaaaagaatatatctaaaccttcacaattcatcactactaaatgatgaaatgttgtggaagcattagttcacatggatggttaaatagtatataatttattagaaatatttcttacaaatagttctgagcacaattgcatgtatttatgtactgcgaagttcaacacacccttggtgcaaacccattgtgctaatatgacacagattatccatctctagtgatttctacaatgagatttcattactcaaaaatgaaaagagaattggaacaacgatctgaatagaaaccaagtcagagaacaatgttatttaggccaaatctaaatttgctgtctgtatcgtccaaactcatgtcataattaatgtgtaaagcccagttactataaatatcagagcctctaagttttggagaatatagacaagaacttatagatagtgaataatttgcttctattgattttttgttgttacttctttgtataacttgaaaacacatcctgaggtagaaataagactttggtagtattaccaaagtaaatattcttaaattattgacatattaggaatatggacattatgctgaattccaatgatttcatttccaaggtggcctctatgaggtctacaaattcatagcattcttgccaaattagtgacataagctggtagccaaatttaaaaaaattcatctttggaatttaggtaaatatttaattcatttttggaacttttacctaaattccaaaaaagaattttttgaatttgactaccagctcatgttactaatttggcaagaatgctatgaattcgtagacctaatagagacctaacagaggccatcttggaaatgaaatatatatatatgtatatatatctacctacctatttacctaagttccaaagatgaattttgtgacactatgatatgagctgtcacatttgtctgctggggagtgacccactccatctgcaggtactaactgctgtaaaagcactcaattagaa

SEQ ID NO: 65810 - DNA, 524 bp, Homo sapiens
gatccgcccgcctcggcctcccaaagtgctgggattacaggcgtgagccatcacacccggccaaatcttgctatttgttgaccaacataacaatgtgtgtttttcaccttcagcaggaagaacattgtgtcagaaaatagaaagtgctctgaaaagaacccatgacctttgcctcatggtccctgtggcccaaaatgttccaaaagaaaattaatatagagatgctgaagattgcattcagacaagtcagttgtgccagaaagtctgttctcatgacattgattgtgcaacgttgctaagaaaaactaagaaaggctcccaagggagacaaataccccttctggaggcatccacaagaaaatacgagtcatagagctttgccagtccctaggcaagacactaccattttgaaagagaaaacattcgttttaatcaaatgattgttaccaaactgaacacttaggaaaagaactccaatgcaatactcacatctgagctcagtttatctgagtttagtaaaagtc

SEQ ID NO: 65811 - DNA, 1020 bp, Homo sapiens
tcatgaactccctgaagtcaatccatgaacttggggctaaaagtccctgatctacacattaagaaagatgttaacaatagggatctgtatgggaaccctctgcactatccttgtaatcattttgtaaatttgaaactattcttaaaaaaaaaaaagttaatgtattttttaagagcccccgtctagagaatctctaaagacaaggtgaacaggggtattgtggcatgggaaaagccaagctgcccagttgaaatagaaaaaccttccaaaccatccaaaccttgaccatttcctaatcttggaaaatcatttgaaaaagcaaaagggattacctaatcaaaagcagaagagaggccaagcacatacatggtacaaaatggatatatgacgatgcgagaaaacaagtagcacaggactttgacatgcagggcaggcagcggccccttgaatcctccagggaggtcgcatggaaatggccaaactcttccttccccactatctaccacctcccccagtggggaatatccatctctttttctatgatgagcattaaaactaaaggttagaactttgaatttaagcttgtggattggttacaaactggaagccagggtgacatttgttcctggccagctgtcctgggcagcagcaaaacgactgcattctataccccggcaggtcacaaagtacaggctgtgcttatacaggtctaagtttaaagtggtattttccctcacctctttattccattagcatccaaaataacatacttatggggcttaagagtttcattttttcccctgtttccagaacagttggatttctaatttctctcctgtttttctgcttttgcttttctctctttacttccattctagtggccacagtcatagtctcatgagctcattattttttgacatttatttacatcaaaatagctatgatttgttattcttttcattgcattgctcctttttctgtcatttatcctttaagacaaattcttaaaataatgcattt

SEQ ID NO: 65812 - DNA, 1121 bp, Homo sapiens
tgaactgaggtgtccagggtttgtcaaagcaggtcttattaacttatttataaagcagcccagacaccaatatccactctactttgggatggtcactgggattgactagacattgcacgaaagttaccttactcttgctttcttgtttcatctaaaagatggctgtgggaaacctcaagcctgttgcaaaggcacccttgggcttccagagtccagaggtctctctgtggaagctcagttacaccccactacctggccagtgccgacactatggaggccaagggcctgcagggacagagcaaatgtttcacctctgagcccagggaggtagcagctttgcccttcctccgcctctggctgactcattctactctgctctactctaggaaaaggacatgccttctcacagcatgattcacctgcctagggaagactatgccattctgggtatatctggtgccatctcaacttgatttaggctgcatgagagcctggtaaaagagtcaagcacagcaggcaaagaaggaaccacatctttctgggcctcagtctacacatctatgaaaggaggggcttaaattatatgaacttttggtcctttcttgctttaacattccacagttctatggatctataaattgccaattatgtgaacctgttgttaccaggagtgagaatcctagctctctctccctgtgtttacagctgaggaagttggagcaggaggctgatacatagaaaggaccattctccttggatttagggttggtctttgggattcagaacataatgcaacaggccaggcacggtggcacacacctgtaatcccagcactttgggatgccaaggtgggtggattgtccgagctagctcgggagtttgagaccagcctgagcaacatggtgaaaccccgtctctacaaaaaacacaaaaattaactaggcatagtggcacgcgcctatagttccagctacttgcgggctgagaggactgagccaagaggatctgcctgagcccaggaggtggaggttgcagtgagctgagatcgcaccactgcactccagcctgggcaacagggcaagatcccatctattaaaaaaaaaccataatgcaacagcctt

SEQ ID NO: 65813 - DNA, 676 bp, Homo sapiens
cctccatgatcagtcctgcccaacccatcacctttctgacatcctctccacctgcactatccatcactcccccattcccttgcatgggcctcgatgctgttctgtgctggaaggcctggcagtggctgtccctgatgcctggtgcacctttacccagataacctcatggctacctctctgagctacttcacttctttgctcagatatcaccttctcaacaaggcctgactgccctcttgaaaattctaacctgcactcttggcccatgtccctgatctctcttaccctgctctgtttcttattgtttctataacatgtattaccttctggtataaaatataattctacttaatataatagattcaatacaatgtgcttggtaatttatcccaagcacctagagcagtgcttagcgctcagtaaatatttattgaatgaatgactcataatgcctaaacctcactgggtgttccccctgtgccagccaccacactcaacatcttacatgattatctcttttcgacctcacaacatgagggacagtcattttcctcattttacagaaatagatatgtagaaaatgacatgaatctacagctcatagctgaggttaggacacaaaagtgtccacaaggcagatttctttggtaacacattttgaaaggatattggggta

SEQ ID NO: 65814 - DNA, 2550 bp, Homo sapiens
aaaataaaataagtaaaataaagtcctagaactgaaccctggagtatgctaatcttatatataagctctctcaaatctcacaaacatttcaagcaaaggtatagtctcaaaccagaaaacaaaacaaaacaaacaaaaaaacctgtttgctctataaggaacatgcaggcttctagtctccctacttaaagaggtaagagagtcgattcccagggtgacagctggcattgtgaacttgagctagcagttctactaaaagtcaaaggtatgtttgtttagcatagggtggggagatgtcacatggccttagcattcttgaatagtttatccactgaagcaggcctatcagccacgttgacaaccctggatgaagtaatagttttataaaagctccacccccaagtgttttaatgctgtagaattagttttaaagtgatctgttttctccaaatgtcatttttaaaaaaattcaaaatgaagaatgaatccttctaaactcagcatattctttgtcaagtttaaaactactttttatttaaactattttaaaagtcagcatgtattccccagagaagaaaactgagcaaacttcactccagaaatatttatcttagggttcatggaagatatcagtctacagggcatttcctaagggaaaaaaatagctactagcaagcaactttgcttcaacccttaaatagatggctattttctgttacaaaatatggaggataattaccatgtataattaataactactagatgaattttgataaaacaaaggggttagaaaatgttaatacagaattacgttaggcagttataaagatattagagaagtttctgttatgatactacattgtaacatggcacatgttatttgaatgatttttcaaataaataataaagaaacttgttatgttataaactaaattcattccccagatgacttgaaatgctgttattttcacaaaataaaatctttaaatatcttgccccaatactattttttactctctttatttctatttctcccaaatacatttatttttaataatacttactattcctctcacatagatagtaagttacaagtaaacagggtttgacttgaagcccacattgctgattgtcacagccctgacctctggaacaaaggtacaaccacctcctcttcatcaagtaagcccttgaagttaactaaagccaggattagctccaacacatgacggctggagtacgttgggaggaaagatggttttagtgtcttttgtttctttaagacctaaattttctttctgaaaataatttgagaatttaggaagaaatacaaattccatagctgtaatttatgatacttttgtgcaggcattagagggcagaagctgatgaaaacgattcccagaaaaatcactatgtggggctctatgttgcctctgaaatattacttaaccatttgaggccatatcattgtgcgcgctcacatttatccacattgcatcgtcacagcaagatccctgaattataaactagtgacttcagagttaattttccttctttcggtctaatttgtaaccagggagcattgtatggcacatgcaggattgaaaatgcagggcctcctgtctctcatccatttcagatttcaaccaaaccgtacttggaaatagcattaaacacacgcttacagttcaatccgaggcagatatgacctccttacagttccaggaacagcagcttaatttcagaagaatacagtgatgtgagagaagagctgtgccagcccgactggcacccggctgttctggtttccctccctggagcttcactttcctatttctctgttattctgacatctctttgagaaaactgctgagttcagaagacagaaagaaagcacttacactgcactgctgctaagctcataagctatcaagtgcattcttctgcctcagtgtcacacttaccagtttccaaaggagtaatggtggtggaaatgttccgatgaggccgaggagctggatgagagaatgaagactccacctaggttgaatccaagacaatgttaagaggcagggctaaagacaggaccctgggggccagttcaaaaataatgcatgtggtcaggcagtcgaatgtcaggccacacaaccagccttttatggccaagaaggcagataaatatagcagcagatggggagggtagttccaaaccaggaggaggagaggggcatgggcaggtagcagccttagtaatataattgcataatgccggtcaatgggtctggcccgattaaaccaaatatagggtttttatttggcaacaagagttattttcaatgtcactttatcagtagataatttaaaagtgtaatggaaagagtggtttgtgttaacagctaaaaataggtgtagtaatatgattctcaaaatggacttcgtggaattttaatgccaagatatgattctgagtgtgctgttaacaacacacgtacggtacatttaaaagatacaatgtgaaaaaagaacttgaagctaactaaaggcaaa

SEQ ID NO: 65815 - DNA, 1488 bp, Homo sapiens
attttatgcattgttctcccctgccttggacaatagtttttattgtgcctttatatgtaaacaagatctgtctatggctaatctggccacttctactacctatgtaccacaaaaatttatttttggacctagtggaccgtacagaagtttggtaacaacattcatctggttgagtttcaacacaggattactttcatcatttacccacttgctaaaactcccttactttttctactacttttgttccaaagttcttaaagtttatagatttaactgaggttttactaagcacacatgacatggctagcactctgcaaggtattgagagtacaaacagagtaagttactcttgggaagcatgtccccttacccgcttactatcagggcttgctctttttcctcaagcaaataatgaactgtgtagcacatggcaggacactgaataatagaccctggtaaagcccctccaaacttaacctatggctctctggcccttcagggattactgggtagcactgccagcccacagctttaatgctttactgaatcaacactctgtgaggtaatgcaaaaagaggtgttatgtgttcaatgctgacaagtcatatgaatggaaactgtccacggattcatctaccattccttctccagaggaaagaagaactcaatcaaagtccataatacatctacaggtggctggtagaggcactgatttcagtggaattaggccttgctggaaattctgcaagagaccatacagactctttttccgggaagaataacaacaaaaaagtcaacatttcaagtaaatattcccactccaaattattaacacagtcattcttatcaatagttagtatgtttcacagatcaatatagcacagaggctgaaaggtcaggctttgaagttatacagacatgcgtcacattcctaccttttcctcttacccagaatatgaccctgggcaggtcactaaccttgctaagcttcagctcactcatctgtaaaatggaggtgacagtcattaccttgcagctaatgttaatgagagataatgtgaataaaacactttgcagagagcttggctcataggacgtgctcaataaagaagaagaagaagaatataatgtttattattattgttaaaagtatacattgaaaaacttctacttagctaatgtaaaagtaatatatgtttacaagccagtttgggaagcaagtcaaacatacaggaaacagtagaggaaaatcccaaattatgtaacattgttcaccgtactaggatgttaagcatgacattcccattattttagaattgtgggagctgtcccaaaagctggaaacgttcattgtcaaaacatctatacaggacatgttacaagattgtggaattaattttgtgaccccctagttaattatccacctcaggaattataggaggtaagaagatcaatctttagacccaagagattctagggacaccagca

SEQ ID NO: 65816 - DNA, 8704 bp, Homo sapiens
ctaggaggcagaggttgcagtgagctgagatcgtgccactgcactccagcctgggcgacagagtgagactccatctcaaaaaaataagtaaataaaagtaaaaaaataaaaatacaaaaaaaaaaatttaaaaaggaaaaaaaaaaaagaggaagagagtgagatctctctgccacatgagaacacagggagaaggcgactgactatctgcaagtcaggatgagggccttcaatcgaattggccagcactttgatcttggacttcccggcctccagaagtataagaaataaatttctgttgtttaagccgcccagtgtgtagtattttgtatggcagctaaagcagactaataacagaattgaaaagaacagaatagaaatccttgaaaaacattataggtagtcaagtatttcttagtgaaataaatttcttactatgagtattggtcaaaagattgagggaggatggcttgagcctgggagatggaggctgcagtgagctgtgatagaacacagcactccagcctgggcaatagagcaagaccctgtttcactctatttggagcagaattcaagtctccaaacttttagtaaaaacgtgagaaggagattatcacatggaggcaaagatctcccatagggtccaaaggatagaaatatcagagtcagaggcctttgatggtgggtccagtcatgaaaactgagtatcaaaatactaggtggacatttgaagaacattttatcgagatgctatttttccacattggttgactaaccgtttttaaatccatagttgtggaatgaataaatgaatgaatgaacacagactacacaattcctgttcatcttcaatcagccaggccctctgatcacctccagacaatcaggcatgctgctccctctgcctggcatctccctctccttttctttccccactgaattaattctagaattagctctttaacatcccctgggggacaccttccactagttcccagacaagtttacgcttcgtttgtgctccttcaataggccctaactaactgtactgcaattattatatctgttccacccttgttccctgatactccgctaactccgcattttttctattcctcccgcccccatccccaaggtagcaacaactatgttctgctccggaaagcataagccacagcccccaccacagtgcttggcaatgcggttgctgtttaatacctgctgactgagtggaaggaagacaaaacaattacctgactcaaagagaagcaaaagaatgctgccttcaagctgaggggaagactgaactgtccgtttctttctgctctaaagtgtcctctggagaggacgctggcggagctggtgctctcgtggtggcaggccaccaccctgtggaggtgtccatgcattgcaagtgctcgcaagctccaggaacaaacgcatccgcgcagccgtctggggtttgtcccgtcgctgccagccctctcgctgagtccccgccctcgccgataagagcccacttaggacccccattacatggatggcttcccaggacctgcccttaaagactccgatttagtaggttggaaatgacgcaattatttttatttttaattagtaccccaagtcattctttaccatcaaggaagtttgggaaacagatcacttttgtttcaatcacctgtggaactggagcagttatttttttccccagcgactttaccacgaagttaactttggaatacgttagtggttaatacacggaacgttcccgagatccctcaagaaagaagctacgaatacttagaagatactattccgcggcgtttacagcaacactgtccgttccagaaggattcaagtggcggcctgctttgaaggcgaagaccacagggcaacccaaacttcagaagggttctggccacgggagccacactggtcactgtcccctagtgctgggatgacggctcgagtgttagaggatcccactctctcctctggtaggtgaggtcagagagctgagggggccagaacaagtcttccttatcggattctgggcggaaaaagataaagtcggggaggactttctctttttaataagattcatcgttacgaattgttctaggcaagcagacctcaggagaaataggcccaagttttgattcctgttttcaccaagtcgcaagtcctaatcgtagcaagaggtgcggggaagagtcgccttccttcctgcatagtgggatccaagtcaggctgtccttgttagccagggtcaaaggggctctgccagggaaaaacgacggcaaatgtttttcaagaggaagtctccagccacttgtgacctgggaaatccgtctgggccaaaaagatagtggaggcttggctgagggccccagggacacacgtttcctcccgtatggagggggcgggactcttaataaaattacactgcacacagagctagcatcaagatccgctcccgggatacgcgcactgctccggggccctcaggcggagacccagaccccgcgcggggcgtcaagcgcaggcgcactaccgcccacaagctggagcccggcttcggggcggggcgagggtcagtcacgtgggcccgcagccctctcctcgatttccctacaaggacttgggccgacgggccccgcccttcgccgtgccctggaatgtgcggccaggcaaagccacaggacggacgcaaccatctgcggaaaggataggggggaggaagacttaacactgcaacaacaggtacaaaaaagaaggaaactcagtaacaggacccagaggaccattatatattgctctatattctaggtcgcccactttacacttccttctcatgcacttggtcaataccacgcccgctgaccacactggcgacttccctctctgtcgcccctccgtgaagtcagacccactctgcgggccaagaaaggtgaccgggcttccttccggcttgctaagcagaggccggaagcggtggtttttagcggctctctgggtagcagggtggtgtgatagcggcagcgaggggctcggagaggtgctcggattctcgtagctgtgccgggtgagtggcgctcgcgttcgggcgcgtgagacccatcccggggacccgtctccgcgggggcagctggagggcggcggggctcctggcgccggtagcgcacctgggcaggtgtgccagccaggtccccggttctgggatccgaggccatggcttggagtggcccagacccgaacttcgctcctgtgcccaaacttggaactctggaaatgtggcttcgctcactggcgccttgagcttgggcgactgccgggcccgcgaaacccgacccctgcagagctgactccgggactattttagtttctaacgtcaacttgcccgattcaagagggtttgcgcaaaaacgtagcccgttgtccccctgctgcagctgttgttgcagctgtgtggctgcgtttagtaggaataaccaactcaaattgggaagttcttcagctcagtatccgctcctgtaattagaactttttttctttaagcgatgaaattttggacagagagatctggagtttagtttgtgactcgaagaaaaactccaaaatgtaataccttgtcccatttggggggaaagtttgggctaattcaattcgccatggaagtgtcttctttttaaagtagtttagtaggtatatgaatgtatctgtcagttcttgagagacctatggatttagcagagattttaacttaagtgcaaaaagtttcatatttaaaggcgaataaagcgaatatttcttaaaattattggtatttgtttcatgttctggaagggctctaataaacggtaatcagaaaagcactctattttcaaaagcgaggctttactggcaagtcagccctcacagctaattgtctttgtccagtggtgagaacttttgggtgtggcagtccaagagaacgaatcctaccttcaaccggaagtttgcataagaaatgaaacttggtttacttggaacggaagcaccaacttgaaatacactttttaaaaattgtggttagcaccagaaaataagttatacttaggctttttttttttaagtgcattgattaaatgaggcggtatatttggtcagggtttagaaagcccaccaaatactaggtgctatcacagtacgcagtgttttgtaagatggtggttttttcttgcagaatgtgtgatatttctcagaatattatcaatttgagtgttcgttttgtagaagaagtttctaggttattttacatttattgccactttgtaaataaatgctggactctaggattctaaccacagaactctaatgtatatattggtatggattaatcccattttataaatgaacatagtttctagagattctgaaaacttcttgtgtcctttggtgtgtggggaaagccactttgagaatctcttctatttctcccacctattaatctagtctaacattttccttaatcatgttgtgtatctctcgttacagcccacaatgattctgagctaaaacacaaaataaaaaccagattcattgccaccagcgctcacctcgcctgacttaaaaaaaaggttatgctcctttagatctgtaaactcagtctcctaactgcccttcatccactttctcatgcatctgaaatcctcatattttgtagaagcctgttctgtaagtctctctactttccagtttcgtacaacagacactccttgacaccaaggatctttcacttaatccctcaaaaataaagactcgagctgggtgcggtggctcacgcctgtaattccagcactttgggaggccgaggcaggtggatcacgaagtcaggagttcaagaccagcctgcacaaggtggtgaaaccccgtctctactaaaaatacaaaaattagctgggcatggtggtgggtgcctgtaatcccagctactccagaggctgaggcagagaattgcttgaaccctggaggtggaggttgagatcgcgccactgcactccaccctgggcgacagagcaagactccgtctcaaaaataaataaataaaaataaataagtaaataaagactcgactttatgattgaggagcttcgtaatttggaaacctcaggtccttacctggcgatctttgcatcctaaagaataattacattgacatgaaatcttttcaatttattttaccctagcttgctttttgtaaaaagcaatttcaggggggaggggggagggatagcattaggagatatacctaatgttaaatgacgagttaatgggtgcagcacaccaacatggcacatgtatacatatgtaacctgcacgttgtgcacatgtaccctaaaacttaaagtataataataaagcaatttcaacttttttagattaaggggtataccctagttttctaaacttcgatgagagttgtgcatttgctgaaggcttattacatgaagagtgacagtctaaattgtttgaaggaaagtaaaatgaacaacaaactagaatcagcaaagaggaccctgacaatatcagaaatgatctgctccttgagatcatagcactgttcctgatttgactccctccaccattatttattctccccacacttttagtttggtagggaaaaaaccccacagtttctgtattttggaacagtgactgtgcagccaaactccctatcgctgaaaggtttctggtggaaaataactcatagatcagaatccagcctccttgaaaaagtaaaggcctaggtagtaacttcctcaacattacactgccagtttttgatagaattaactaccttaatttgttagaattgagactaacagccgaatctcttcattctaacaatgctttgtagcttctaaatgatcccacacggggtttttcaaggtcttcctcctccccaatcccttaattactcagaaacatcttttctgaactcacagcatttgataattatgtaccatgttaggaattatttttcattattgtcacacgttttaagtttagagtcatacttctggaatgaaaactatgactcatttcataagttgaaccaatcatctcatttctttatagttgcctccccaactatattaagctccttgaagataggacacatgccttacatttcttaactcttagctagtattcaacataattaatatgacgtttgatacatattagtttaattaacttcataataaaattgataagattaagtattgaatgtgctgaagaagagctctatatgaggccattgtcagtgctgacccaaaaaaaaaaaaaagcttttttactttaaaaatctattttataatacatttacaattcaaaaaagtgcgtgattaaaagaataggaaatatatcagaattcagaaaacatactactttacaaccaaaactaagcattttgaaaatgtatctagaggaccctcgtaaatttagttatatgagattttatataatagattaaaaaatcagatgtgtcagccgtttgacctcatcagtttctttgttcttaaaatagctgacatttctgcatcattagggaaagacaatgttgtcacacaaaacagactatttttaaagatgtgctttggcttgcaaaggcgtgacatgcctaaaatattaaagcgatatggactggtaaacgtgtcactcattgggtttcaacctcttgctccaagtccttgcgtacatttaagaattggaggaataatatattctatatctctttgtattttttaaagacagcatttataacagacgaggaaagtacatcctcatgtagtttagatgtgaatgggatttactacccccaaaggtgttatagaatgaaaatatgcatttatgaatagttttaagtcatgaaaggcagcatcctaaaagttgattaaagaattctaggaaatttgggaacagcatatatatcataacttctgtgctatgtaggatatatcttttcaacaatatattccagttgccatacggtgctgtattggatgggctggaatttgtgactatcctttgtggaatttcctattaaaatctgaaaacagatttagctttaaaaaatttgaggcagagcttttctaatcattccataattgtatttagtctggacgatatggttataatcaaggaaagaatgtaagaaattactttttaaacacatcggaaacacattcttagggtcactttggagtgctgagatctaggtggtagttcattctttgcagtccacagacttatttttagaccaatggcatagtgttttgccagatcatagctaaatgttgttttcagaacgtaagctttaaaattgttatcctggtcagagtgaaatcagtagtgcctattttagacctgcttggaagaatataactcaatgcagtgtcttacttttgctgctgagcggttttgcagactaccatcttccctgcaactctgaaggatggtatggtagaattttattgtctgatgactgagatttttaacttgaaacaaatttttgtagtttttaacagattgagtattgaaaattgcctttttattttaggtattattagacattctttttaattttaacttaaattttaccgggataaatttaggtaagagagcaaaggtagtttctacgtttaagatgttttctaaaacttttaaaattattttaaaagcttgtgctctgatttctgtttagagatcttagatacttccagtgatttagtgtgactgtaatgcaagaaactggtttggatagagtgcaatgtctataaaaactatagatgaattcccttcagtttttttatactttactattagcctttcaacaaatagtttttttgaactacttttgcctagtggtgagggtacaataaaaaatgttagttgaaagtgaaagctttaacaatatttgtcaatagagattaggagatgaagacctgttccatcagttagtcattcttactattcttcacctttctgtccaccgtactatggaatagccagtttaggctaaggctgcaaagcagggacctactgaagatgaattagtatccctcagcacccctatactgctgaagtatagaacttgggagtttcctaagtacctaattttttttgcttcttggttttttattgttatcaaatcagcagatttggttatcagctgttgttagttatatagcagtacaggacatatgtaatcttgttgagatgtgtcttctaaagacacatttctgagtagctcaaacatatcaggaaagttggttctgtgtacttttgttaatcattgttttgattcaaacttaagtaatcttagatgttgatttggtttttattgtatttcctttcctaattaggacttaaccaccaccatgtcgagcaaaagaacaaagaccaagaccaagaagcgccctcagcgtgcaacatccaatgtgtttgctatgtttgaccagtcacagattcaggagttcaaagaggccttcaacatgattgatcagaacagagatggtttcatcgacaaggaagatttgcatgatatgcttgcttcattgggtaatgctcagtttaaatattaatctattggatagaatttccatggtgcctttcatcttgatttcatgagtcttaaagctctgtaaagcctgtctaa

SEQ ID NO: 65817 - DNA, 3666 bp, Homo sapiens
tatttattctcagccattttgggcatatgtatctttataatcagactggaaacgggactttctattaatatcattttcagaataaaaaataggataatttaacctaccagcccttctcccccaataactgtggtctatacagagtcaatatattttttcagagaaagttattcgctcgattttttctgaatcataattaaactttatgataaaatacttacttgtttaaacttcttatttaccaaacttggcttttgttggtttcagtcgtatctcccaaagaaaggtagatgagggaaatcctagaaaatgatatggttgttagctttctcttcctccagttttcctaacaatcctatctcctctactatccattcctcctcctcctcccaaggatatccaattttaactgccctaatcaggttttctgcactttgtcttccaatttttaaaataatttcctgtagaatttgcatatatgatagtttccatagctttaagtccttaagttgacatacctgccaacatttccactttatttaaacttttgtaatttctggtcatttaaaattagaccaggttactgagtataatttcaatttgtcatatttttaaaaaccattttggcttaaaggttctgtggaatgctaccaaagagagatttttatgttatgttttaaagtgctggaaatataatgcagtattttttttattatatgtagtttttctttaacacagcaatgtgtattgaaagatatttgtttatgcagagattcaccatgagtccatgtttgagttttggacattcctgaccttcccacaatcaaaacagctgaacctgcatgcctgggaaagtgaggtcattatttcagtcctaaaaataacttctactatttgcagaaatgcagaactgtttcacagttaatcagggagtggcagacagtttcgttctttttcagctttaaaaatctgactctcaaagggcttcaagattctcttttttttccagacagggtctctcgctctatcacccaggctggagtgcaatggcacgatcacagctcactgcagccttgacctcctgggctcaagtgatccacagccacctgagtagttgggactacaggcaggcaccaccatgcctggctaatttcttaatttgttgtagagacaaggtctcattatgttgcctaggctggtctaaaactcctgtactcaagtgatcttcccacctctgcctcctaaagtgctgggattacaggtgtgagcaaccatgcccagcccaaaactctgactctcaaagagcatgagttttaaaagatttgaaatggagaaaaatttggttgaaaagatttgacaattagcctatgaagatgagtaattgacaattactataataactttaagttttatgctacgattaacatgactctccttggacaaaaccattacctcattcagtaaacaattactaaaagccttctgggcagcaggcctttgcagccaataagatagatcagctagatcctgtaacgtgggaaggccagtgctataggaatagaaggactagtcaaagctagtccttgacctcttcagcattagaatcttagaacctgccttcattctttgtcttttgtttctgaattttattcactggttaagccaaaatactttttccaggctatggccatggtgctaaaatcttgttttttgaattgaatttccatgtcaagagaaaaaattatcatatgctttgttacatctctagtgaagaacagatagcattgtttgcactatatgaaaaacaaggtactactaaaaggatctcttgcagggcccctgtttccctttcagataagtgcttaatgaaccaacttgcattaagaacaatgatgtaccctgaatgaaataattctcctaatttagtaatagcattctttgcttaaacaagagtgattgccaacagaaaggtaaaagcatccatttcaatggtgtgtttgactgaaaaatcagtctcaaaagtttccatgatgaaagtcatacttaaaccatttcaaaagatctggctaggcacgttggcgcacatctgtaatcccagcactttggaaggtcgaagtaggaagactgcttgaagccagaagattgacatcagcctgggcaacaaagcaaaaccccatctctacataaaaattaaaaattagccggacatggtggtgggtgcctatagtcccagctactctggaagctaaggtggaaggattgcttgagcccaggagtttgaggctggagtgagctgactgtgccactgtactccagcctggggtgacagcgagaccctgtcttgaaaaagaaaacaaaaatcggacaaaaccagcctaatgggggtggcatccttatccacctgcatatgatgatatggtcattttgattccaggccccaaattttacttgatgaaagaatctataacttgatgagagcaggaattgaatgctcctgggaaagaaaggaggaaggcctgagcataagagacaagtaacagcaaattgagaaggaaaggaaaccatttgctacaaagtgaaaagaggaaggacagcaagaggcttaacacctagacttgaggatcagataaaaaatgatcagagtttggagaggtaaatagagccacaaaaacagtcttacggaaacctagttaatttcaagagtaaggaggttggcagtgtccaacacagaaaagtggagtatgggaaggtttaaatgagaccctcccagatgtgacaagtcgttagtcatgtttgctagagttattagagttctgagtgcagaatccataatgcagcacaggatagtgaataatgcctaggtgtggggtcaggcagacctacacttaattcccgtttgttgctacgtcatggctctataaccttaagtcagttatttaaacttccttggcctatttattcatttataaaacggaaataatactgttggttcatattaggaacataatatataaagcagcatttgtgtgattaagagcagcacggatttggagccatacttaagtgaattgcacctgcctatttgactttgtgttcttaattgccagtttcctcatctgtaaaatggccaataccatccaagtttcttctgaaaattagaagcatgaaagacaaatggtctgggacacattaggtctccaaatagtagttattttgtttacgagtgggccagtgagaaggggcaaagggcatatcttcaaattcaagcctgtttataggcagagtagaagacaacaaactaggggggaacaattagtgaaacaaaatggatcatgtctaagagctaggatgtgacagaacctagaccacgtaggattgcccttagaaaagtggatggatttcaaggtagaatttcattaacaggttgttaggaagattttataagactatgcatacaaatgcctgtcagtttggtactagtggattctgaaatagttcactttcgatttcctgagcaggtccaatatgccagacttgtgtgtgtcgaattaggtcctcttcacgggtacagtttattttttctgtccataaagggattgtagtagctaatcccacattgaagaaatgcccagttttcccattgctgcttattcgagtcatttccac

SEQ ID NO: 65818 - DNA, 4539 bp, Homo sapiens
actccgtctcaagaaaaaaaaaagtgtctaatactgccagacgcactggtgcggtgtctctcacctgtagtcccaactacttgggaggctcaagtgagaggatcgcttgaggccaggagttccaggttgtagtgcattatgatcacgcctgtgaatagccagtgcattccaggttaggcaacatagggtgaccccatctctaaaaataaaacgtatcaaatacaactgaggaactaaatttaagtttagctgcatgtggttagtgacgattgtattggacagcacaattctagaaacttttttttttttaatttagactatcgaaccaaaacctaagagtaaatattgtagaaccaggtgtgacttttcagcaattgcttttctaacactattgagaaaatacacacagttatgaaccgcgtttagagctgtgctgctgggatggcgaccaccccatcagcatcatgtgtgcttaccagaaattcgaattatcctccaccccttactcactgaatcctgatacccggttttgaggctcaaaaatgtttttaaaagccctgttattatgcgtgctactgtttaagaactgctacagagtgctgaacacaaggtccctctcttctaggaatttctgatcaaagatttctagaatataaactccctaagaggctttgaattcatctctcagcatccggcacatgttaaggcagtaagaagagttcaataaagatttgctattagattgccgatcctccaccatcctgaagtaatgctattttagtaatgctagatgaagtaatgctagattacctcaaggtgagggaaaatatcctgaagaacacagccacaaacacgatctagaacaaaacctgaaaaacgtagctttgtgtttttatttgtgtgtgcatgtatgtgtgtgcgttgccattttcttgataaaggaaagcaagtagttcgaataaaactttcttgtggccaaaaggggaatcaaacagccgtaggctgcggccgtagcctgatacggccgtaaaccttatgagggtaagcagagaggagtaggttaaagaatttaactcgggctgtaatgcggtttgaaaagagaaagggattctggaacggagaagaatccgcccaggcgccgccctcaccttctcaacattacatgagacgaaccctaaaacctgtcttgtctgaaattcaaatttagaagaactgtacttttacttgctacatctggcaactcagggttcggcgccaggggaccccaaatcctaggcggatcgcgccccgcctgggtcaaaggggaccccaaatcctcggccgatcgcggcccactcgggtcaaattccagcggcctgcccagccgcgcccagcgggcccaggaatgcggaagggtggcggagctaccaaaggagcgggggacgagggccgggctgcggacgaccgccgcagcgcaggccgcgatatcgcagcggatcggagcaggccggaggggcaattaagaccccggccgtgtgcgtccggcctcagcagccccgccgctcggcggacacgcagaccccgccggcccgggcgcgaacactcagcgcacccccgttccacttggtcccgccgcgccttccggtgcgccttccggtgcgccttccggtgcgccttccgctccgccccttcaggcaggaagtgtcggcgccgccactgtccggccacagcctaacgctcttcgctgtcgtttgtggtctcgcgcagggcggccccggttctggtgtttggcgtcgggtgagtcgcgctcgactctgctcgcgagacccctcgggccgccgtctccgtacccccgcgccccctcccgtcgcgcgcctgcggccggaccccgccccagggcggccaggcggcggcaggacctgtcagactggctgagaagggggcgcggggccggaggtggagggaggagggttggcggcgggaggagggttggtggcgaggccctggcccggacgtccaggggccgggaggctgcaggcgatggagccggtatggggagacgccctgctggagaagtggccgggtcccggccgtgcgtgggccggccctgcgccacctgggtgacctcagacacctgggccttggacggcccggctgcccggcggccaacgcctgccctcccggcgccgcggcgggtcctggcggtggattggggccgacccgggcgtgttcgtgtggagcacctgccctgtgcccaacactatcctagatgctttggagggtggaggagcctcctgttgcacggtcttgcctaaggtgaagcctccaaggaagccattagcatgccggtaaccgagtgtgtggttgatacgggctcaaatgtgatgatttacatagagttgtaattcgctcagtgtgtcttgcatcttgtaaaggtttagtttattcgtgttgattgaagaaaggaccattaacagaaatagggaaaggttacttggaaaagagtcgtgacctcactgaaggccttggattcaaccttaagagggagaacttagcgtttccggctagatgtgtgggaggtggtaacgagcaaaactcaaaagctgggaattgtgtcctgtgaaaagcaggccgtggggacaccggcgggtatggaacagaactgtaatgactaatagtcggaaataagggtagataggtaagtaggaccttcttatggatgtcttgaaaacttaggagaaagaaaagattatctaagaagccatagagagtaattttggagtcttcactaacggagtaataagaaagggatgtttagaggattcgtttggccgctttagtttaaggtagatttggaatggtcttttggtaagagaagaatcaaagcatttagaattcagtaggacctgatagattaccttgtgaaggctttgcgttttataactgaggaaagtgaaacccagagaggtgaggtaatttgtcgaaggtggtggaccctcctggactttataactaagagcacttttgagtgctttaggctcttttgagtgaaacagcttttatgatggctgactcgatgttcgtttatgctttgatgaaactaagcttgaacaagatgaactgcaatttctgaaggacagatgtccagacaagagttgctagggttaggaaagaacaggatttagagccccgacatggggctagttttccctttctcccaagattcaaaggctccaggtatatctggggatgagtttatcataccctttttgccagcatctttgtgatcttccttcctcattctacacattagctttggggtgtcattgcttgttatgcccaggtatccacattttcatggtagagaatttcagctgcctgtatgcaggatgttactggctagtggttcaagctctggagctagatttcctgagtacagatcctgactgagctctgccattttctagctgtgtggcaagttgtttattctctttaccctgattttcgtatctgagagaagaggatgataacaatacctatatgatgagttgtcgtgaggattaaatgtgttaacacatacaaaatgcttaaatcagtgcctggcacatctttagcacccagttgtccctggttgctactgcttcttccaggtatggagcagtgggtagctactaagtttccttagggatctcttggggaagagactggaaccataggtagaccgtagagaaaagcctcatgttggaattcagatccgggacctaccttgtaatgaacatatatgtgtaattctgtttgtgacaggaaagaactatatatgtatatacactatatacaactgtgtatactatacatatatttatacatatatatatgtatttgcttaactaggattatttgagcacctgccatgtgcaaggcacactgctaagttctgcagtccaaggtggaaaggcaaaaggcaataaaaagaatgaatatggccaggcatggtggctcatacctgtaatcctaatgctttgagaagccaatgtggggggatcatttgaagccaggggttcaagaccaacctgggcaacatagcgagaccctgtctctaccctgccacccactccttgcaaagtagctgtgtatggtgactcatgcctgtagtcccagctgctcgaggctgagtcaggaggatcacttgagtccaggagttcaaggctacagtgaactatgattgtgccataaacccaataagagaggtgaatttcaaaaacattgtattgaatgaaagaagacaggcatatatatgaatatatactgtacaattccatttataagaagttcaaaaacaaaactaatctatggtgatagaaatctgaacagtggttgcctatgggagatggtgattaacttggagagaattttctggaacagtgttaacatttgtaacttaatgggggtgatggttacatgggtatacacattataaaaacttattaaggtttgtacatttgactatataaatttcactgcagtaaaacaaaatgatataggagctcagagaatagaaag

SEQ ID NO: 65819 - DNA, 1235 bp, Homo sapiens
acagtaataaccataagaatccatgagaaatttctaaagattctgatagaccttggtgaagatgaggtggagtaaaaatgaccttaggttttagcccaagaactactctctgcttttctgtgtgagttcatctactctgagggctttaccttgtgcctctgctcacaaatcagcactgctaacaagaccctctcagagtcctgtcctctactagcattctactgtggcccagataaaatttgagttatttatcatcctttgctgacaaaaccagctcctccctcccctccccaattacctcatttttgagtggtagctttatactaccaggttttcagtcagcacttaggaaaaaggacagagctttgagactccaattagaaagcaggaataactagcaaatcaggaagtgatttgctggtcagagccagaggaattcagccaaaagaataggatggtggtggtgggaatgttgaggaagggtgactcgtgcagtaaagagaagaacctacagaacttggatggaaactgagtagaaggactttaaacttttctgttcagaaatggaaaattccccgtgctatgcaaatttgactgcggtcccttggaacttggactgtggctgtaattctgaaataaaggcattgccctattttaacattaaagaggtcaaggagacagtggctttattacttttctattggtgtataacagaatactccaaaacctagcacctcagaaacaatgaacaatttttgagggtcagagccagagcagcttaggtgggtggttctggcacagggtctctcatgaggtcacatggggaggctgcagtcgtctgaaggaagatcagcctccaagatggctgacgcatagccgacaagttggtgctggctgtcggcaagaatcctcagttccctgccacatggatctctccacagggctgtgtgtctgcatgacctggctcccgccgattgagtgatccatgacagagcagggcaaaagctgcaaggtgtattatgacaaagccaaacaccctcatttcacaatatcttattgtcacaatatcttactggttacacgggtcaacacttttcattgttggaggggactgcacaagggcatgaaaattgttgagggctttcttggaacctggctaccaccatgaccagaggagcaagttaaagtgttctgaggggtcagacagataacaaactaataccagctgggataag

SEQ ID NO: 65820 - DNA, 707 bp, Homo sapiens
caaagcagggaatggctagagaggaggctggaaaggtcattctagagtagggaaaggaagactcatgcaccatgtttaggaacttggtactttatcctttagaaagtggagagccaaagaagattttaaaaagtggaatgatgaggtcatattcatgttttagacagccctgcctagaaaactaagggtagttttgagagagccgagaggcaaggggatagtgaagaggccatagagatattttacacaagagataatgaggatccagtttagggtgatgacagaggaatgaggaagatgagcaactctgagaaatatttctcagaggcagggcttggttcatcagggagagggattggggagggtgactcctaggtttctggctgctgggtagatgattggaaacaaagatggtaaagttcaggaggggagagataattgagttttcagcatgttgattatgagtgtctgtggcatatccagatgggtgcctttcacaggcatttggatgtttgagtccaaggctccaaggaaaggtcaggcctggaggttcggatttaggaggtgcaggcattgtcataacagtgaaagttgatgagatcatccaaggaatgaagactgaaaagaactttaaaccatgtgctgctagaatactgggaaacatgaatatttaaacggagataaacatctaagaggaaaatggagga

SEQ ID NO: 65821 - DNA, 841 bp, Homo sapiens
caagtgaaaggctgtatcgacacctaagaggctgatctgttctcaccaaggaacaggattttcccaattccgttttcctgaaccatttgttcattacttcccctcaagccacagtttcatttatgccattaagaaaaattatcacatataatcgccaaccttgggaaaagaatatagtcattttgttttctttcagaccacaaagtaggaaatcagaagccttgggtaaattgaaaatcccaactttgttttatttaagggatgccaagactccctgtgcccctggcactctgggtggggggatttcctgcatgccaaattgctaatgcaagatgcattagcccatagctttagaagttccagatttcttggcaccaaagggttatgaataatcctttccactccccttgactgttggaggactttcaaaatattttctagtctttacttctactgccctttgatcttgtcagggagaatctaagagaccaacttgtttgtttcctggactaacagcaatgcttctccaactttaacaaacataggaattacctggtaaaaatacagactcgcaggtcacactccttgaaattctggggtgaggcaagttgtacccaatatcgacaatgattccaggtgatctgatgtggggttgactatatatcacaccatgaaaatcactggcagagagatataaaagataaagaacatcctaaaaaagtgctttgaaggccaggcatggtggctcatgcctgtaatcccagcactctgggaggctgaggccggggggatcacctgaggtcaggagtttgagaccagcctggccaacatggcgaaaccc

SEQ ID NO: 65822 - DNA, 1773 bp, Homo sapiens
gagtgcagtggcaggatctccgctcactgcaaccttcgcctcccgtgttcaagcgattctcgtgcctcagtctccggagtagcggggattacaggcacgtaccaccacacccagctaatttttgtatttttagtacagaaggggtttcaccatgttggccagggtggtctcaatctcctaacctcatgatccactcgcctaagcctcccaaagtgctgagattacaggcgtgagccaccgagcccagcttttcttttctcaaccttgtcttgtgaaattttatgttgaggcttgtaagttattttctagtactttaaacacagtaattattttggaccacatgtaatagacaattaatgcagttaaattcccctggcctgaagtttatgcttttggtaaattaaggaaattgtaaagagcaaacattctaccttgttggaatttggctataatgggccatcatgttgcatggctggatggtgaatgagaagatgaaattggggtcaggaaattttaaagctggaagagatcttaaatcttggccaaattaaatttaccagactttaattgagaaaagaacaattcgtgaactggacagccttccgggccagaggaggctcagagactccagctcagccacgtgttggaaagacgtaaatagagaaaggaaagtgacgaacagaaaatggaagtgaggtacagaaacagtcagattggttacagctccgtgtttgccttatctgaacacggtttgaacagttggccccctttaagttgccaaaacttggtgattggcacaagagtaggttacagtctgtttactcttccatttaggttatggttcactaggtacaaagaaacctttaggccaaagttaaaatatgtaagcaagctgctttgggctaaacccgatttaatacttatgaatgcagcatggttttgctcttacgtggctcagtttctgctgggtcattctgacacatgtgccacctggtaatgacctttgatctgaggggattgggagatacttgataaatagtatcctcttctgtcctgccaggggacaattctagggtgaattatacatggcttctcagagactttccagcaggattatactccagttacctaaagcaatgaacagtttgaaaatgcacccttcccctatttcatcctgtccagtccttcccaccattagaaccacttcccaacatcaacgatctgcatgggagcacatttctcaggctctgtttgaagacacccacattccatacagcctttcctggtgcctctgagtcctgggcttctcagtttctctagataattgtcttacttctcatggtgccctgctctgccagggttaggagcgcatccaaattccctgccaaggtagtggaaattccatcataagtttaccaccttgcaaatatctgtggatatttgctgtctccttttcccattctctttgctcttgtaagtttcaatattttaattttgtattgttattttagctggggagcactgcaatatacaataatcaaactttttttaaaactcacagatggactcaatagcagaatggaagtgacaaagtgaagatttagtgaacttgaagacagaacaaaagaaatgactaacctaatgacagagaaagaaaaaaaaagcagagcttcagatttcaggtattattgggactataacaaacgatcaatcattcatatcatttgccattttttggcaccttttgaaatatccttatggtatttctccttt

SEQ ID NO: 65823 - DNA, 10795 bp, Homo sapiens
agatggctctaggccaccccaggttcttaagacaatggtcagctctttcttaagcagtccaagaccctctgacctgagatgtgactggatgattacagacctcttgtccagtgtttagagcctagctgtctgcatattttataaagatatctgccttccagagactggaagtgaaagagatccaatgactgggtgagtcaccctttctccacctagaacacagtccttgatggaactcatgctttatcaattgttgttgagtagaagaaacaaatacatcctccaatcttcacttggtggacctggcatcaaaaaataatcatattaagtgcgtttattagtacacttttctggcttatctgcctttccaagtttctatttgagttcttgcctttgaagggtttgcaggctgtgaaaagtaacttaactttttaacaactttctttgcttggccttgaggcagcttcagaagataagacgccaaaaggaactatgtgtgcctggagagaaaaaaaataatggtgaaaaacgtttatcagtagcctccgccagcaccaagcaacgcctcaattttactcaagcaatttcccaattcaagtaacattcatatgaatcagcaaataatatgtagcaaatttgaatctatatactttaaaaaaaaaaaaaaagcactggaaagaatcttaaaagtcattgaatccgttttatagcaaggccccgagactggaagggactgacagagctagaaatgaaacttgtttttccacctcgagaaaaacgaatcaacaaaaaataccctaagcaattgctggtatctgaagcccacttttttgaggctgttccctttgttacgttgcgctgaccctaggcactttcttcccagaatgcaccaagaatccgaaactccaaacaagtttgagatcagcgttggctggggggaggcagtgggggtgcatctacgggagcggttgggctgtaagctttcgctacatcacagaattgtgccagtgtttctctttggagtgcctcgccagctttaacaaccgtttggatatgacttgctcgggcaaaagttgtgcattggcccgatcaagcctgacttctagccaaggtgagttcacatctccgttttttcctccccctaattcgaaagaggctttcaattgtctccgcccctccccccttctcctggaaagtttgttttcaagctataaaccctttccaattctcggttcccatctcggttgcctgagaatcgcagtcattagccaagtccacttggacgaaagcaaagctacctttgtgtacataatgagagccaccgcgtggccaaggagaaccacggggaagagggaaacatttttgtctcgagctggctaaagcgggcggggggggaggtagggttaaaccgaccgaaggcgtgttttgtggagtggcttcgaaagcggccgaggcagccgaagccgctttcgaagttagcaaacaaagcgtctccccagtaaccgcccggttccagacgaggctcctgccactcaggccgcggagtcgcagcgtcgcccagcccccggctcctcctccctgcgtctctcctccctccgctcccggctccccagcggataggagccaccaatcccagccacagacaacccttcaaacgaaatagcgaggcggccccctctaacgggcggcgggggcgctggccccctccctgcgccacatctgtcccgcaccgggcgcagcagctgattcatctgcagccaggtccgggaaggaactgtgctcccggcagttgcagggcagcgtccgggcgggtggcttgtccccaggaccgcgctccccccgagccgttttaggtgtgtgttctcttctgtcccgagcagtcagcaaaccacagaagaaaaaaatcgtaaggttgctgccttcttagagagacgctttttttccctgttgattcattttagtcctgtaattggaaaaaccacccaggctttttaaactctggcctccacgcattctaggggcgggggtgtctttttttttttttttttttttgagggagggtggcaggctagctctagttcctgaaacagacgctccgaagtcgagttagttatcccttggccgtcttagtactcctcgggtttaatcttatttccacagagtttcttctgccgggatctccaccgaggttaccgaacaaaaacagcacagagcccagactggaggcagacccgggcgctgtctctgctaggcttatttacgtttagggcttttctttcctttttttaaagtgatgggggaagtctcattgtgtggcatgtgacagttcgtttgcttcaaaacaacaggacgtaaccacgcgaaaactagaaccagaggagggggcatgcgtttcttcaagtcagccaaacagcatctggtctttgaaagcgcaatttcatcaagaaactcctgttggatccctcctaactgtggaccaaaataagccaacaggaacgggtgtttacttaatggctagtttctgtttgaaatgggaggagggatcccctagcagggttccaatccgaagagtagacactgttgaccgaaacagacgagcaggcacggcgtggtcaccccttagctataaaagtggccgctgccggggttcggcgactcggggtgtcaggcggagtcttggtgaggcaggcgcgcgcccggccgtccccgggcagagacgtttaaagagcatgtgagcgtgacaagtgtctgtccgcaacgtgtcagatttcgaaactgccttgcaatccagtccggaactcgcagctttagcccgggggaacagacgttcgtttaggctgtgtctcatcattcccccccgccccacccccgccgacctcccactgtcgctgctggaggaagagccccgggaggagaagggtgcgccgcgccgcgcccgcgtgtcaatggcagccgcgcattctggaagaagttggttcttgtctcgaatacttttcctcccgtgccccgccccttgaatcagaggcggctgtctcgtgcggctagagcagggccagtagagttcggggcagctgtcaaaaacgagacggggaggcttttcttcccgggggtggaggagggaaggagggaggtgtccttttttccatctgttgcagtttccgaaccaaacgcaccctcgccagccccgggaagaaaggcccaagggagaaacctggggcgctcggctggtgcccccaccgccgggcgagggatgcgggcggtccgtgcgcggcaggcggaaaggatcgtgtttctggacccggccaccccccgcgtccgcaccgccgcccccgagggacgagtgacagcggccgccgcgctcggtccagtcttcccggctggaaggtgcgggggaggggcggaggagcggcggggcgggagggggacggggcgggcggctgggggcggaggcaggacctcctgtaccttccctcctcgcctctctcactctgacagcgccgaggtgcgccgagcaggagcagggaacaaaggagcggagaggggaggggagagagttgggcgagggagagcccccggccggctgccagaagatcccggcgggaggaagcccaagtgtcacttgaattccacccaaggagcgggcgcctgggatcagagcgtcctgtttagcaataacggctggagcacgtcctacaagttacgggagagtcggctgtgaaggagacgttcgcttatcccctgtgtccccgctcctggcccctccagacccccgccttgcctcgcgctgggaggggagatccagaatgaaaggcaagaaaggtaaggcggccgcgggctgcgcgcaccagaagacgcgagtccggggaaacgtgctggccgggccgcgccgcgcggagtcacttggtggacttttccgcccaggggctctcatgctggagtggcggccgtgctctttgttgaggctgcgtctgaaacggcagcggctgttttcctgctagacacaacacgaggggctgttgtggggcgagcctctccacgctgctggcacgttgtcaagaaacacgctcagcgccttgtttgtgcgcctgcaagtttcattgtctccgccgacaccccacgctcggcccagccgccgcgtggcttctcgctctttctcgcgtgctggggatatggggtccgagtagggaggacccagcccctcgtttttcccgatccggacccaggcggccggggccgcgggaccgccgcggctttgtctgaaagttccactcctaggctccccccgcccccgcccccgccgcccccctactcccagccgggccctagcactgttctttagggatgtggtgtttttacgatcgaaggaatgcgattctggaccccctcatcgccctcgggtgtaaacagctttggaaagctagacttttacaaatccccagtctctaaaagttttcccacgatgaattttggggcaggaggaagagttagcacccagggccagcagcttcaagcggcatgcagtcaaaatgcgtccaaatgtgacaagcaggcttggttgtaagtgcaaagagcaaggctgtcattgtttccacgaagtgttctggaagctttacaactaaaacttgccgtcagtttggtttaaaaacaaaatacaccggagggggacggggggtggagaaaccacacaaaacaccccgaaaggtcagagtgtgaagtcccttttgaagttaacaaaaattgagtccctggctgggaggtcccccgagtgttccgctgtgggctggaggtggcgtttctgtcgtgatttatgtggagtggttcaaaacagaagttaatcactcgggaagcggacgggaggggcggcgctactgcgcatgcccgggagccgcctggagtttggaactccacattctttcagacccggcccgctgcggggcgttcctggggggtagcctcaaggccagcggggttccttcggctgcgtttctgtgggaggccctgaaacgcgcggagcttccctctgcctccaggctttcccagcgagagtgaaattaaacttgaaactcggatcaactggcagtcgttgttggtagaacgccctaaggacccctccccgcgggacggagggaggactcgggacagggaattggccctgggagaaaacgcgcggggggcgtccgagacgccccgtgaaagccgtgccgacccttgggaggactgacaggtctagagacacgcgctgtctgttgtggtgggcctcccgggaataagtgaggggctctgtgtttcgaggatggttctagcgcagagccgggtgtctgccggggtgggctccccgcattgttcgggctccggcgggggcggctctgattcctttccatggcccgcctcccaccccgggaatccccagtgctccttttccacggcttttctggcgtccccccgactctcccgcggcactttggcctaccttcccccagcgccgtggtcctccctggcgaccccctctgcgctcctggggtcctcctgcgccccccctcctccaccggcgcgctgcccacagccgcgtgccctctccccggagctggggaccaaggctgggccccgccggccgcatcggtgggaacttccgcggtccccatcccagggcgcacagggtccagctcctcggcgccgactcctggaaacaatgaaaggtgacgggctgaaggggaaactttgcgactggttcagggctctttgggggagccgaggctgccgaggttacccgggtttctttccccttttaggtttccctggcgagtcgtctggggtgggcaggcctctgagaaggtgggattcacggcctcatttctagtttcttgggtcctggagttcctttgcttgtgctaactcgtgcagtgtgcgggccggcctgtttcacttgaggccgaggaactctcaagaacaaaagctacttgcttttcctccttgggcccctccctctccccgtgctcctccgccgtcctcctctaaaactacctgggaggggggagccttccccgtcggctctggaaagactcctgaggaagtcgggccctccttactgtcttgtcttataaaagtctgcaaatcttttcaagttttcttaaaacaagtgcactttcagctccattcctgagcccggggtaagcttggtttgtgataatagtgtgtcctcccagaaagctgagagtgacgccaaaagatctcctaaaatgacttaaaaacaatgagaaggatcgataaggaaaatccactaagtctttttgctcccagtttttaactgttgaattcctgctttgggattgctctttggctggggtagccaaccataccttggatttggtggcttgagtgttcaatgcctgttgcttctcccaaggagatactgattttttttttcttttgttcctggagaccgggtctggctatgttgcccaggctggtctcgaactcctgggctcaagaaatcctctcgccttggcctcccaaagttctgggattacaggcaagagacattgctcccagctcaaaggagaacttctggtcaggaaacttgttgagttaaatttgctttttcctaattgtgcatctcgacttttcccatcaatcttatttctagagtctcttcacaaccggtgtctccctgcctccctgtctcatgatgttaccgagctattcagaaaagaaagtgcagggctgggcgcggtggttcacgcctgtaatcccagcactttgggaggcctaggcgagcagatcatctgaggtcgggagttcgagaccagcctgaccaacatggagaaaccccgtctctcctaaaaacacaaaattagccgggcgtggtggcttttgcctgtaatcccagctattcgggaggctgaggcaagagaatcgcttgaaccctggaggcggaggctgcggtgagccgaggttgcggcattgcactccagcctgggtgacaagagcgaaactctgtctcaaaaaaaaaaaaaaaaaaaaaagaacgtgcaggaacaaggtcgctgcttagggcggtgggatcctcaggccatgttgtggctttctccacaacatttccttgtatgtggatagcgtgaaagaagcttgtgatcctgcccccaccctccccaccgccacattttttaaagtgtaagcaaagcaagacgtttggaaacaagtcttaaccgggaaacttttcaaaagcgctgttacaataggaaatgagtaaggaggaaaaaagtctttgtttttccaagctgagccacaactaggagggagagttttaatgaaaacagtcctgacagcagcaaacgtggttttactgcagtgaaatatcagctggcgtagccaaggcactgaagtcttaacttcctgttacttcagcttttgtgcacatattggaaatatttgttaagagttccagaggtctggcattcatttatttaaatgaactgagaacagagtaaagtcgcgctgcagtttggtgttgcttaactgaaacctgcttttgtgtgtcactaacctattctgaaagatcaggcttcttgtcaaactaggcaagcagatcaaagggcagccttcaggggctttttttgtttcaaactctttgtgattaccaacttacagttgggaattcactgttcaatgagcaaattttcacactttttctagattaaaaaaaggaaggagataatagccttgagaagaatgtctggcttttcagacgttggagagtttaaacaaattgctttattcaaatttgctttagtcatttaattaacttaacactttttttaaaagttcgatttctttaattattaaagccaatgtgagacaggaactcagctataatttctttaagctattttattaatagttcttcacccaaatttcaatataggttttgaaagtctcatcttgccaatagtgaaagtagtttcagttttaaatgggcacttttaaaaacctttttaaaaacttaaatcatcaggggaggggaatttcaaatacatggcagttaaaacttaggattcttgtgcagtttatttgtagctgtttgttaagctgtgagctaaagtgaatttgcaagatcatccacctctttgttagaactttactttgtctttggagagttctgccttttgtaggaataccctgcagcaccttctgccccctgcagtccaaaactaaaaatgtgtcaccaagtcagagtcattaaaagggtgggaaaaattcctttaaaaaacacggtgtttagcttaagaggaatattccgtgtttatttcctgtcaaggggaactggctcaattaaggtcaagtcatattttcaaccaaaattacatactacagaggaaagaaagcatacaaagctaaaaatgcttacctttacatttttgttattttaattacttcccctaatatagaagtactgatttttttcaagcatgccattgtttgtaattcatttctgtttttaagattctagattgtctacaagcaaaagaatgtatttctttagtcattcggagtagcctgctgtagtttttgaaaggtggaattaatagcgtttgttatttaattttttttaagttcagaatgatgtttaaatatctgtaaaggccagttctggagctttattgaaccccgtccatctgtgatttaaatattctctatggcttgtgaattcttaaaatttctggcaggattaaagtacttacagccaaaagagcttcctctggggcttgcatattcagtttcctttgtcatgtaatcatttaagactgaactctgcttattgatatgtagtattctattctaggttgagctcaaactggtagctgaaatttaggagacatttttaattcatttagtattaggcatcttttgaccttactaaagtaccagtagtagaaaaatatttttgtgtgatgaaactgaaaacatcagtggtcgtatttaataaaaggtgactagtactgcccatttaaagtaggtgtctaactttgaataaatgtggatagcaatgaataagaaatgaccatgcatggtgttagcagaaaattttaacatgtgttttacctttagaatactaactgggttcagcgtagtatgtaattttccttccttatatccatgaaaaaaaatgtacgagtgctccctttcatttcaaaccttcagtagaggaaggaggaagagtagcatttaaaatgtacattaggactggttaggttgcttttcctagttagcactgatcttagaaagaaggttggtaggcatattccaactgccacagcacccttcctgtttcaaatgtggcaggttattcattttgggtgcagtttgtctcctccaatgattagacgaaagagttttctgaccatcattcaaaaggaatgtgagaagttaatgaatcctagaggaaagcggctgagaaaaggcatctggcatttggttgagagcctcctatgtggtgctagtcaaactacttttacttggaccctgaattcaggacagaaaacactgctccttctcctcgctctcagttgttgggaaagcatggttacattgaatggtcagcgttaagtgagctttgcaatagttgctgtgcttataaagcaactgacaactggcccttgtcctttcctaggtattgttgcagcatctggcagtgagactgaggatgaggacagcatggacattcccttggacctttcttcatccgctggctcaggcaagagaaggagaaggggcaacctacccaaggagtctgtgcagattcttcgggattggctgtatgagcaccgttacaatgcctatccttcagagcaagaaaaagcgttgctgtcccagcaaacacacctgtctacgctacaggtaaagaaagagagcgtgaggtttatggatgcatttttagtttcaaagtcattttatggcattcctgtgtgtcaagtcattaagctccttgccactcaaagacagaaggaatatctttttattgtaaacttgatagtgttaaaagctaataactagctatttagagaacacagaaacacttgacagtcatctatcagatagcatttcctttaatgcctaaaagaaccttcctttatgcaacagacattaaaaggaggttaaaccttactctattgtccaggaaactggtttgatatttaaacaaggacgacttcagtgaggtaattcatgttatgtctgttgacacagtcatttgaactgggaaaaatcagttactgggaggagtggcccttttcataaggagaggttttcctgtagttgattaacttaaatgttggggcagtaggtgataggttaaaatggggagagttaaaaagtaaacctctctctcaaatcatttttaagcatttgagattgtatgtctttttcttcgtcctgaaaaggtttaagtatgaagagacaaaaaaggaaatttgtattagaaactagaaggcttatgacaggtggtagcttgctttcttggcggagctcagataccttgaaataacattgtaaattcagataaggcttttcatgctttctttaattcagagagcaagatcaattaggtaccccatagaacattctcagaacccgttggctgagtgaatgaggaaaatgttaaagcgtaccgatatgatttcaggtctgtaactggttcatcaacgcccgccgcaggctcctccctgacatgctgagaaaggatggcaaagatccaaatcagttcacaatttcccgccgtggggccaagatttctgaaacg

SEQ ID NO: 65824 - DNA, 766 bp, Homo sapiens
agcttgctttgttgttacggtcatgttctttccagccctgccccagctatgaattgtctaagtgtgagggagcatcagagcttcagtattgtttaaagaatgtagaaaaatacaaatttgtctaattttgaaactattttagaaagtccctactgtagaaagagctaaactcaaagactttccttgtaagtgaaagaaaaaaactgctgatgattaccaagaggcgtaagaaaattaggtgagggaatgttgtgctctagcctgtggggtgcagcttcgtagggcacatcagcttagaatggtctggcctcacctcagagagtcacagaaatagacaaaaacccaaaaagtactagtaaagtaaatacaaggaacaaaataaacattaataaaaatgaatgacgcaaaggtgatccagaatcattacttgctccaacagctagatcaaaggctgaacattttgctttagtatagatgagggaaatgagcaagtcctaaaaggtttgccctgttacggtgtttcatcactcatactggaaggagaaggaaaggagccatatgactcatttaaaagaaaaactgtaagtcaccttaaattccctatgttttacttcattttttccctattgaggttgttacaggtcatggttgataatagttggtgttgaatgaatgtaatccattatttaaaaacaggtacatttaagtgaaaagataaatgtaaaaagctgttcatatcaaagccaaatagaaatgatttttatgc

SEQ ID NO: 65825 - DNA, 5438 bp, Homo sapiens
tcagctactcggtaggctgaggtgggaggatcacttgagcttgggaggtggaggccgcaatgagccatgactgtgccactgcactccagcctaggtgacagagcaagaccctgcctcaaaaaaaaaaaaaaaaaaaaaaaagaaaaagaaagaaagaaaaagaaaaagaaaaagaaaaagaaaaaaaagaaagaaaagaaaagaaaaagaagaaaatagacatgatctcacatatgtgaaagatcccactatccccatttaactgatgaaaatattaaggctcagagcaggcaacggacatccctaactcatctagagattcagtgacagagttagagtactcagggctccaactcccatctgaccattaactcaaaccacctttgtttatctcccccgccccccgccagtaaacactctctagtaaacaccttgtccactaaagcaccgtggtttccacgagggactccttcgtgcacagccatcctcactctgcaggaactcttaagtttcagtgaatgaatgaatttggagtggtcaacaaggggtgcacagttgcaacttttaaaatattgcagaaggagagaaatgccacaaaacaaaatgcacatggaaaaatcactaccttatttcaaaatatttacagcttcacatttaaggccacccaaagcgtggcggtcagtggtgagaaggcagagatcagaggctgttggggtgggtcatacaccatgattcccggcccccctctgggagatacaaggtatcccacagtcttctctcccagttacatcctccacggaaaccacaagatgactcgctcaactttttctaaagtagaaaaaaatatgcttgtgtgtgtgtgtaaggggaggagaggggatgtgaatgaaatggagggtagtgtaataattcctgtagtcataagacacgccagttggtagttgctagtattccagacacttcctaacgccagacaaatgccccaagcctcggcatgtctggcctagagatctattcaactgatagcagccgcctcttctggggagagcagatctttcagaaagcactggctgcgctgctaatcaaacgcaacattgttctcagcaaggaggaagaatggaaaggtttgtttcagagtcacaactttattttttttaaaaggcacccaagttgtttcaacaagctgctacaaaacttgggcttcctgagtggaggctgttttgcacagtgcatgtactgtacaaaaatccaggcagggaggggtcagagagttcgtcattaaagaaaaaaaaaaaaaaaagccccaggcacttgatgcctggaaatgatgtcagacgcagccactcctctgttagaactacagccaaacaatgcgcaggcaatccacagcagctgcccctgcaaatgtcagcgccagcccagtcaaaagagcttgaaacctaccaagccggaggactgtgctgtgcctctctcgcccacattttccccaagcactctcaggaacctggcaacaggtaacgtggcaacctttgacttataaaagggcaagtggcacaatctcagggaacaaatggacttttttttaaagccagcatctcccccaccactcccacacccccctccctccctccctccctcccaaccaaaagtctgtaaaaaacaaaacattgacgcgggcagtcctactctctagtgtccccttgtggccaagcctggaacatcacatctgtacgttgcaatctgtggatcagctacgaggtaagtcgctctttggaaggggtggaggtctttgctggacttgtcttccgaaaagtatgaagagtggaagtcaaggctcagaatggcgtccttttttaccttatcaccttaacaaaaacttcaccttagctgcagggttaaacctctgggttggggctggggattttcgttgttgttgttttaaagcagcagccaaggccatgttttttaaggtggtgagttaaacggagcaagagctgcggtagccttttccacccaatctctttcttcacatcctagtcacagccaagggtagggtggatggcagtgaggataaacagcccagaaacaggattcctgcagggtgggactggcattttccatttttatctgaagttgtactttgaatgcagacacctttctctcaggccagaagcactgctcatttgtattgctggcttccagttagcctatttgcaaggattacttaggatttccagactgcaggcccagctacccagagagtgtgcctcaaagccccacctcaaagcttttatctctatgtggcgggaaacacccacgaaaatgccaacggcggtatttgtaacttgccttcttccttttgggaactgctttctgcagctctctctgcgttagaggaatagctacagctgggagctgctccagccacgcaggaggagagggcacccattgagaggcgggcaccccttctgtctccctctggctatgttaactggaaactaggaaaggggttcagatcaaagtaactgctgtcttcagaaagttccattcattaactaagttagcggaaattaaatggtgtttggaggaaggtcatttcagaaggcccagggccagaggctgaggtctaaaacttctaatctggacttctattgaagtttggcagtaagttaaacaggaagttgaaggctaccatatgtaaatccagttgttgcctgaaatcagtcatttcaagggagtatcttgaaaggacacagactgggaaacaggcatgagaaaaaaaaaaggaagtagacagacatttggctagtatgtgcctggaccacttaacactaaagattagaaacctagggctctgagtaagaatcatttgaccagtagctaaagtgagtcatggcctgcacagaactagggcacacatgttgaagtcaggatgttgagaacatcaggcttactaatttgcaaggcaggagtgctgcttccagtagggaatgtgatcaggatttcacggctcattttcccagcctttccaacaggtgcaatcaagtcatccgtgtacacaagtgactgccctgttacatctgttaggattaaatttccatttgttccattactttatatgaagtgatttctactgctgagtcagacagaacacttcctcttagacctagggacttttttcaacatttttaacaatgtgtgtgtttttcaaaatgtgtcccaaccaggtctgcaggtcttcctgggttgaatggactgtttacagaaggggaagattcaggcccaaggtcagggttacagaattatataaggtttcctgtttgggcagctggtctagcaacacctctggttggggcagactgggtcttgttgagagatagcatgcccaggaggctagggcagggagagtgccaggagcaggaaagaacatttttcttttctttttttttttaagaccgtgtcttactctgtcacccaggctggggtgcagtggtgcgatctcggctcactgcaacctccgcctcccaggttcaaacgattctcctgcctcagcctctcgtgtagctggaattacagccgcccgccaccatgcttagcttatttttatatttttaatagagacggggtttcaccatgtgggccaggctgatcttgaactcctgaccttagatgatctgtctgcctcggcctcccaaagtgctgggattacaggcttgaaccaccaagcccggcctgacatttttcttttaaatcttttatcaaccagctttcatttcttgtcagatgtcacttttcagcaacctgttgctatattctctgttaggagaactttttttttttttttctggccagactgagagaaaggaatgaaaggatggaagaattacaagatcaggcactgctgtctgtctgttccacggatgtaaccacagcacacgcgtggctcacggtactagtgtgataaatgcttgttacatgaaggcgtgaacagggatgagaagagacttcctggagaaacaaaaggactaacaatcaggaaggggaggtgatcggggcaggagtaaagtggacacctcagcaaagccattcgctgtgatctctgattgtgcagtgtcatgtcctgtcaccagagccccctcgtgtttgatgttggccaatgccgccagcatgatctagcaggccaaatcctaatctaccattctctgacaccagctggtcccctgggtcgtccacccgatgtcccccattctccccacttggcctcccccacaggctctcggcaaaggaccgtgggaggcacctgtgacactgcccttttcctgtgcagctgtttttcttcttcattcttttcactcctcgttactcttttttttttcactctcagcccacacaaaactaggaactttgttattctacttatttttctgtactctgtctgtttgcacacagatggatatctgagagccagcgaactttctttacctcctagtatcatttcatgaaaattagtagcacctgcacaatggggccttggagacaggaataaaaggaaaaatctggaatggaatcacatgacgcaacaggctatgaagactccctgcccggctgctatatgtctggtaaacagaataaatagtacttgagcatccctgactctgagactgtggggtagctggttgttttaagatgggaccagggtattgtgcacttattgccaattcttgcttcagtaagtggggtggctgtgcagagtgagtggcctgtgtatgaaccagggtccgtcccatctaatgagagtccggtcaggctgagtcctcaccaagacttcagcgtggattcatcagtaaccttggttcactggcaggcttgctggactttggagaaaaggctgaccctcccccaaagcagcccattgctgccactgccctaggaacagagggcctggagccagggcttgacctggtacaggagcttttgcacaaggccggctcaaacctccaaacctggggaaacaggatgcatggtgaagtgaagaagaaagaaaatgcatccaccgttccttcctgttggtgtcagcacgatgaggaataattacctggatctggaaagcaggcgtgtgggaggctgcaggcccccctgatctgtgtagttaggcacttaatttttcatcctcctccttctctctgccctcccgaaaccgccgttttcaaaggaaaaacagaaaaacgtatctgggtaacccgtgtaatactgtttacatcagcccacttggcccagaaaggataccagctccttactgatgctcagataacagggttagtgcttaaaaaaattatgccttgggccgggtgcggtggctcacgcctataatcccagcactttgggaggctgaggtgggtggatcacaaggtcaagagatcaagaccatcctggccaac

SEQ ID NO: 65826 - DNA, 4951 bp, Homo sapiens
cccagatcacgccactgcactccagcctgggtgacagagcgagactccatctcggaaaaaaaaaaaaattagctgggcgtggtggcgagtacctgtaatcccagctactcaggaggctgaggcaggcgaatcgcttgaacccgggaagcggagattgcagtgagtggagatcgggccactgcactccagcctgggctacagtgcgagactccttctcaaatgaatgaataaataaataaataaaacatatgatttaccttggcccactataattttgcactacagggtggcagctccgtgctatgtacaagccgggtgccgcgcagctttgatgctgcccaggacactgacctaaaagtgtgtctgcaagtactctcacccttcattcattcaagctttgcctagtacacactttttggaaaccatttcccaaaatgcatgcttttataccacatttcccacccaccagataaccgagacagtgcacgtaacacagtttgaattaaagaataatcttgttttggccgggcgcggtggctcacgcctgtcatcccagcaatttgggaggccgaggcgggcggatcacgaggtcaggagatcgagaccatcctggctaagacagtgaaaccccgtctctgctaaaaatacaaaaaattagccgggcgtggtggcgggcgcctgtagtcccagctactcgggaggctgaggcaggagaatggcgtgaacccgggaggcggagcttgcagggagccgagatcgcgccaccgcactccagcctgggcgacagagcgagactccgtccaaaaaaaaaaaaaaaaaaaaaaacaaagaaacttgtgttggtagacaaataaattcatgaactgcagatataaatagatcgagcactagatatgtttattatctccagcacagcactgcctcctggtgcggattatattccagttttcaaaaggaaccatagaagatacaagcaatacgattttattttggagggatttctagcatcataggtcaaagacgttattaagtatcgactctgaaaaagcaactataaatactgcaaatcgactaagccagaggacgcaaatatatcctgcgtgttgtgtgctggactgtggttgagacttcatggtcgtgctctgggctcatgggggcagctgactgctcataattaagattgctgttgccgctgcctgtgttccaaagagaacacaagaggacagagctaaggtgtaggaatgcggaagaacttgcagaaactagagctagtcttcggattgaaatgaattaccaataaagggttgggaaatggatcaaggagagggaagcgttttgatggtccctgctccgaggttcagcccatttgcagttgctgataaccttgtcaggtcaccagataaaggcaagtcttgtcaccctcaggcacctggctgcgaagtaataaaacggttgccttatcatctaaaggtggagtgagtcaaacctcagcccagggtaattatagtaaactgaaattgcctgtcctttacaaaaaaaaaggcggagggagagagaaaggaaaagggcttaaggcaggaaattgtgtttgtctttctccttggatttaaaaaagaaacgagcaaaacagcaaaaagttttccagggagtgagaaaagcagcccggctagactcccctcaccctgggttaacaggattgccgacagatcaggcccacgtgatggtcaagaaaagaggctcaagctgatgaaaatccaagaaatcttcttaggagccttcctttctaaatgtaaatgactgagtcattgctttgctaaggagggaaggaagttacaatcacaccaagtgactcattcattgctgttagctccggcagttggatgaaaagttttagcaaaagcagcaacaaatgtactttaaatactagcacagtaagggaattcctgtctttcaggatgaatgccatccacacaaaagagctcctgttgacatctcatttacaatctcccccaggacacagacaagaccctttcaataaatccagctcagaaacacctattgttcaaaatcttcaactcgccacaggctaccaccactccctatggctttgcaaaattaaagatttagaagaaggatggggcggtggaagctatgaaaagaggcaggaaaaaagttcctttgacccgatgctgtcagagagcgtgcatgaagaagaaagttaatggtatttccatttatataagaagcgcctaagaaatgcctgtgacgttcgtgaactagtgattgtgaattccaaatttgatgccaactttatgtgtaaagaagctaactcctgccaacatcgtggctgaatgaacagctgggactatgcttaacccattcccagcttataaaagccccatggcagctgcagtgaagcatcaggtgagtctgatatgggctgtctgttccctcggggatttgaatcttgcctgtcctttccaagtggagtcttgtgcctaagtgctagagcccactccttcctccccactgattcccttctttccatttctgccatttcccttcttcttttaataaaacttggacattttctggagttacatgtttttcttgggatgtacttcaaattaaggagcatatttatgtttacaaacacacgcacacgcacacacacacacacatacacacaaaagaatcgggcatttctcaagtggtgatacctttaccctccttatttttcacttaaggttccccatctcagtacacgatccctttatctgccccgagttcaagccaaaactcagcattatctgtaagcactcctttgggtccttctctccagtctcttaaatccctgtggagtcattccacatccttctgtgcatctttctgcttccctagatcctacagttttaatgttatcttctggagtatcacagcaacttccttaactcaaggtttctccaactctgagttgtcacttagtgggtagtgaaataagatgagtcatgcagtttcaccatttagaaaatgcaaaatgttaggtagaaaatgtcagcgtacatcctgtgtagaaaaagtaagtcttgttgtgaaacctctttcagtttgtgtgtgcgtgtccccggatctgtgtacatactgggcaacagggaaaatgcattttgtaggtcaaaatatttggagaaatacgtttctacttagtctcactgggtctgtcttttctgtttccaaactattgtgtacacttagaggaagagtggaaaccctccagcaggtcctgtcagtctgcagtttacaaatctcccctcaggataagagttcctattcacccttttcaggtctcagaattctgcctcctcctgaccacttttcctttagttattcaacccatcaagttccctgggtttgcatgtgcaatcgattcctcgttagggatattctttcctctggtttttccttcagatacgagcttacgttcgacctcttccaagaagacgtcaggaatgtccttctgaatgcctttcctagttctcatgagaacacagcagtttttaatcaggcagagcacttattacattataattatcttcttggttcccaactgaacttttaagttccaagtgggcagtcagtaaatatttcttggtgcatcaaatgctccacattttacacagttaacgtttgctgcctacaaaccaatttggatagttactttaaagtatcttatctctagttctcaaagctttagtttcctttaacacttaagtatctcttgcatattttcttttcaaacactgcttcgttaatttgcaaattcattggactcctttccttaaaaatcaaaataataaaacttcaagaaagctgttgtgacttctggcctctctgaatgtcagatctgtaaacaggaagggcagaactctgatctctaaaatcctctccagtccactactctgaccctctaacttgagctttctccagagaggttaagtgacttttccaaggtcacggagctttttagcggcaggagattttttttgcctgtctatagatttttaaaagctagccgtaaacaaaaaccaaaaagtttaccgaggacactgagtgccactaacaagtttgtgtgaaagagaattcatgaagaaataggagacttcaaacaaaacactaaaatcaacaacaaccataatggattcctgcctaggcaggtcgggacattaagaaaaaaaaaggtctcgctgtggtttgctattagatggagagatattcagatttcatttttaaaatgaaagtgaaagattaaagaattttggcatcctgaccctttgtagaggccattcctcagaggcacagtgtgcagacaaaactatcctagaggtgccaaccagaacaagctctaatgtctgtctcattcctgagccttggtgccttgacgagtcaccacgctcaggaagaaagctgcaactcgccaggatgaaactgggccccgcttcttagaacccttccccgcttccttcccctgccagaaccacactaaagaattcgctgctctcaaagacagacgttttcattacttccttacattatagagtttgggcttagataaccagttgtatgagtagtaagtcaaacagaaatacaacagcaataatacttatttctttccctaattgtaatatgttgtacttcataagccatcatatgcatttgttgcttttcccccttctacactgaccagtagttttgctttgtttgacagaaaagtatagtaagaagaaactgaatttgaagtggattcttacaaaggaaaaagaaaatcactattgtaactataccaaattactatgtatgtgagctcccagctttgacatcaagtcgttacagccacgtaatgggattacgggtgatttttactttattctttgggcttctctgaattttcctatat

SEQ ID NO: 65827 - DNA, 789 bp, Homo sapiens
ctgggtgacaaaagtgaaactccatctcaaaagaaagaaagaaagaaagaaaagcacaattaaacaatgtgtgcctgtatttaaacctatattggctagtgagtttgaccagagtctaacaaaggtttatcaaggaaaaatgtcagagaattcagatcctgtaagtcaaagacacaacctgttccaggaaggactttgcaacagcaattactctaacaagttacaattcgcagagtccggcctttaaggggctttgaagagagagaaacccatgaatcaataataagataaggctatttggtttgtttcaacttgcgggctgtttgacttccgtatcaaagccatgccttgagaatgaaatcatttctgtcaaacagccctttcaaagaacatccgacacaaacactcactggctgctcctttatttccactgtgtccagggtgtgtatggacttggtggaatttaggggaatagctgtgaattgtgcatcaaataaataacctgcagggagttggcactggtgactgctagccataaatgttgctatttgcttacacaggttaagcctgggcttttggaggcttctttgaccttttctgcctttttcccaaccctaacccaacatagctatgacaaggcagttctgggccgggcagggtggctcacgcctgtaatcccagcactttgggaggccgagacgagcggatcaggaggtcaggagaccgagaccatcctggctaacacggtgaaaccccgtctctactaaaaatacaaaaaaattagccggg

SEQ ID NO: 65828 - DNA, 4888 bp, Homo sapiens
aaacgccaagctgtagccaatccaactgtttctgtacctcacttctgttttctatatgttactttcctttttctgtctataaatcttccactgcgtggctgcactggagtctctctgagctaccctggcttgggaggctgcctgattcgcaaagcattctttgcttaactaaactttgttaagcttaatttggctaaggtttttctttcaacacgtccctgcaaaaacttaaaataaaagaaattagctgggcatggtggcatgcctgtaatcccagctagtagggaggctgaggtgtaaggattgcttgagctcaggaggttgaggctgcagtgagccgtgattacaccactgcactccagtctgggtgacagagtgagaccctatctctacaaaataaatacataagttaaaagtgacctgggctgctgctttgccaacagagggtacctgtggagcctctgatgtgcgtatgggtagtgtatgtgtatgttggctgtgtgtgtacccactgactctacaattaagctgattcttttttttttttgatatggagtctcgctctgtcgcccaggctagagtgcagtgacgtgatcttggctcactgccagctccgcctcccaggttcatgccattctcctgcctcagcctcccaagtagctgggactacaggcgcccaccaacacgcccggctaattttttgtattttttagtagagacggggtttcactgtgttagccaggatggtctcgatctcctgacctcgtgatctgcctgcttcattctcccaaagtgctgggattacaggcatgagccactgcactcgtcctaagctgattatttcatgattcatgcttggcttgggatctgggaatgatggggaaagttactctctcaaagattggctctgtcccctggggaatgtgggaggagggagagtccagaattcggcttccaagtggccacaagtctggcctccttcacccagcctgtgcctgtgtccacaggacaagatccaggctgacagccatgcactgccacaccactgtcccagactggggcaagcagaagggggctgtttcctctcatctttccccaatttcttgcttgccagaggcaatcctaacttggctagcggaaagataatcacttttgaaaacatgagtgaggtcagcccttccagccacagcctggagtttgaaattacacattcattgatttctttttttttctttttctttttttttgagatagagtctctctctgtcgcccaggctggagtgcagtggcacaatcttggctcattgcaacctccgcctcccaggttcaagtgattcttgtgcctcagcctccccagtagatgggactacaggcatgtgccaccatgccctgttaatttttgtatttttagtagagaaggggtttcaccatgttggccaggctggtcttgaactcctgacctcaaatgatccgcctgcctctgcctcccaaagtgctgggattacacgcgtgagccaccagcctggcctgatttcagtactggaatggcctcatgtcagctgggtgatcttgtgtgctgcctctctgtgtccccatgtcctcactggtgaaacaggcatgctaaaagcattgatttaagagagttgttgagaggatcacatgagataatcaaggaaaaagtcttagatcagggcctggaacaaagtaaatgtttaatcctattaatgcaattaattgtggttaatgacatgtcataattaatagctatgattattttcacgagccctgacattatcttccatttccaggcttcgcatgtataagaggtcctagacacaaattcacctacacaagggattcagtccgtcttaggttctgctaatgacaactcttcttgaagttcttcaaggccgtgtgaaaaggaaaagccagccgggcacagtggctcacgcctgtaatcccagcactttgggaggctgaggcgggcggatcacctgaggtcaggagtgcgagaccagcctggccaatgtgtctctactaaaaatacaaaaatcagccgggcgtggtggcgcatgcctgtaatcccagctactcaggagcctgaggcaggagaatcgcttgaacctgggaggcggagcttgcagtgagccgaggtcacactactgcaccccagcctgagagacagagcaagactccgtctcaaaaaaaaaaaaaaaaaaaaaggaaaacccccctagaaaatgcttttcccgttgcttccctgctaatgggcctttttcatcagggcagcctccagccttaggatgtggccggtccccgtgcggatgcccgtttcccctcctgcctgcattcatctgaccggttcagtgggatctggtacttttcctccctcctcctcgtgctgggcttccacatcatccagacagctgctgccacattccaccgctccagcagcggaagtaaggcacatttaggccctttctgggtgagtgacagcatttgagatgagattaatcaaatgccagtgttaggggaaagcagcctttccctgagtcacctctgctccacctttctcatgacacagagcatgagcctgtccaacggttggcctgtgcgtcaacctctggccaggagacaacgggcgcctgtgacctgggcgtgaaccgtctgtttgtgcgcataggtctgacactgctgctgggcgagcctgcgtgcccctgccccgcggtccattgactgtgccgctgagcacaggcagggatgtgtgcctgtcgccctgggccgctgtcccctgacggcagatgagatattcttccagctcaacactgatgttgcagggtttttcctcacctaccgcatgacgactgaatgaaagcattccaggaaaccaaaagggctgggcaggcctctggaatttcaaagccgacagcctggccctgctggcagctcatttctgccgcgtcattttctctgaactgtaggagtagttttgtagcaaacttatcaccaaaatcccacaaatgttaagcattacccttcttagaaaggaaaagcctacttacttttccccattggaagacttcaattttttaagattcaagaaatccccaaaagtcatgataaagaagagggaaaacagactgagcatacccatccccttttaaattcaaatttattttgtttttttctgcttagctacagggaaggtttgatcatatcacatctgagttaggccatatgcacccagggggaatctcaagagcaaactaatctaaactccaagaaatagaccactaagacccacccaggtagtactcactgaacgctcttcctgcctctcataagaaccaaaaatagcggtttcccgcagatgctcccagaagcaaagtctacctaccacacacacaatatgcagaagggaaaaacccaagccacaagtccctaaacgcctgagtcgtgactcatggaggctgtcctccacccctgccaagtataagaaatgatttctacccacccacttctctaaggagatggtccctcattcctctctcccgagcaggcttcacagcccccttcatagagatgaagccctagtcattaaatgcccagtgatgttacgactgccaaattctatgactatttggaaagttttatcaggtatggatacactccacctatttgcttaggtggccaagatctctgtgcagttgcacagacagtttctgtcctcccaccccgtgagaggttgtgtgtgtgtttgcgggggctgggaagctaatggagggaaggagagacctcctcaggtgagtcaccttgcagtggaactgcttcctgtgtgtgtgaagttcttcaaggaggcaccacttcacgcaatgccccaaacagaaaaatcgaagcaaattagcaaattattttctaggagattagatgttggacaacttcaagctttcacaatagaaaatggcttgttttaaggcagttaaacccaaagcatgccttttttggggttttgtttatgaatatgttgtaatctaagaagagtaatgttcttacagaaaaattagaccttcatgattgcaatctaagtgagaggcaattaggcttatttttcttagagattagtacatcatgttagttcagaaagcatttgtaaaacagaaaaaaaaaggaaatcataaatatcaatttcatcttaacacaatgcaactatcactgttctcaacctgagttcttaatttctggcatgtcacaaattccttgaactaccaatgttgaactaacctcccctgacccagggagttgaatagttttttcaaaggatatgatcaaatctctgttcatgcatgcctacatttattcattttccaaaagcataaattaattctgagggacagaaagtagacttgtgcttgcctaggtttgtgggagatgaaaatgtggctgggagccatggctcacacctgtaatcccagcattttaggaggctgaggcaggaggatcatttcagcccaggaattcaagaccagcctggacaacatagggagacccatctctacaaaataaaaaaattagcccagcgtggtggcacatccctgtagtgccagctacttggggggctgaggtgggaggatcactttagcccgaggttgaggctacaatgagtagtgatcgcgccagtgcactccagcctgggctacagagtgagacccagtctcaaaaaagaaaaaaaaaaaaaagatcaggaatggcggctcacatctgtaatcttagcattttgggaggctgaggtgggaggattgcgtaagcccaggaatttaagacaagcctgggcaacatggcaaaactcagtctctacaaaaaatacaaaaattagctgggcatggtggtg

SEQ ID NO: 65829 - DNA, 676 bp, Homo sapiens
gacaatgcggctggatgagtattatagagacttttttctttaaaataagttatctttgaacatccccccccactataaatttgtatactttttttgcatatattaaagaaaaaaatcaaattaattaaaaggtgaatcttttttataatacataatgttttatttataatctactccaaagaaaaaagtgactttgtatttattgctattcaagtgagatccttttctgtagctgaaaactttgatctccctttccttctttgtttacctaaaggttaagagacatttttggactttccatcctggcttgactcatcactggttgatcatcttgcttttgattctcttcttcaagttttcaatttcttatttatgtgtaatgccctgacattataataataaaatccagatagatgtaaattatattgagaatattgccttcatttctatatgaattcacttaatttatgtccttttaagacacactttgtgattttaatacaaactggttcatggattattaattcaaattatgctgttatagtcaaccacatgagatgaggtaattggaaagataccatgttcttacataacgatttggtctctgaatgactgaaggactctccctgtcatttatttgtacagatgaatttattcgaaggtgaacaaagtaatt

SEQ ID NO: 65830 - DNA, 2100 bp, Homo sapiens
cgcttattcagcacagatttgattagtttttggctatacagttcaaagatttatgaaaagttcctctctggatagctgtggttgtatttactttggttctccttattcaaaaactttcatatcgttgatgagtggtgacaaatggcttgctcaggaacactgtgccagtataaactcttttgtaataaaacacaattaatattgatgaaatcagtcttcagtcagcacttgtttgttgcctgaaaacctttcctctcctccccaccttccaggactcaaaaaacagactgggggacaatctcatctgaatcgaacactccaaactggggctgtgacttgcccctggcagatgccacaggtcccagaaaggtgatcagagagctctatccaacacgaggagtcgcttccctctaaggactctcaaaggggagaagcaaggatttataaactggctctgtttgtggctttgccgaaaatgaaactctcagcagtgtgctacaccatgattctagtagaaatgatcattagacactggaaagaggaaagcgggaaggagagcacctactgccttccgtacactgtgttaaggctttctctctagcatctagtttagtctctgcaactgccccaagagaagtctttattttattggctaggacactgaggcaaatagcggctccttgccagacccttccagccactggttggctttctgttgcctagggtcccccttaaactttcttctacactgtgcagaaatagaaaagggcagttggaaaagaggaggagggagagggaaacaaagaggggaaaagataaacttaaaaaaaaaagtaaaaagataaatgtgagagagctctgagatgaggtcaatggttggtcatttgaggtcaactttatctgaggtgagggtaatcacaagatgacaaatggctaacccttggaaatttctttccacacatcttccagtttctgggtcacgtggctccacctctgccatttcaggagggtcctcgtcttaggaagctatttgggaaactctcaatgctcccagagacattactgttttttgtttttttattttttttggaaacaggatcttgctctgtcacccaggctggaatgcagttgcacaatctcggctcaccgcaacctccacctcctggattcaagcgattctcccgctcatcctcctgagtagctgggactacaggcacctgccatcatgcctggctaattttttgtatttttagtagagacagagtttcaccatgttggccatgctgatcttgaactcctgacctcaagtgatgctcctgcttcagcctcccaaagtgctgggattacagttgtgagtcaccgtgcctggttgaaacatttatatttcataggaatattttggctggatgcagaggctaaggcaggaggacagcttgaggccagcagttcaacactaccctgggcaacatagagagaccctgtctctacaaaagaaagaaagaaaaaagaaacgtttagccaaaagtataatgacaagtaaagatacatctgagaagagaacattcgtttgtttagtgtggtgctccagcctccacgtcatttttataaacaggatgtctgggtttctttgcagaaacaagtttcttgagttttgttctcagtttctataatattccatttagtattcctgacacactgccacctaccacgctggtggaaggaaggaaggaactccttctgggagatagctctatcctatctctgtcagttatctgactaacattttgatttccggtagtaaaaatgttgaaactggccaggcatggctgctcacgcctgtaatcccagcactttgggaggccaaggtgggcggatcatgaggtcaggagttggagaccatcctggccaacatggtgaaaccctgtctctattaaaatacaaaaattagctgggtgtggtcatgcgtgcctggaatcccagctattcgggaggctgaggcaggacaattgcttgaaccagggagttggatgttgcagtgagccgagatcacaccactgcactccagcctggcgacagagccagactctgtctcaaaaaaac

SEQ ID NO: 65831 - DNA, 1930 bp, Homo sapiens
ccagctactcagggggctgaggcacgagaattgcttgaacctgggaggtggaggttgctgtgagccgagatcacaacactgcactccagcctgggcgacagagcgagactctgtatcaaaaaaaaaaaaaaaaagaaaagaaagaaagacacaatgacaaaggcagagttcacctacagagggaatgacatcaatacattaggaatatttttaatacattaaatccctttggggtgtttttggacacctggcttgtcatactatgaacaacagaatttccttaaaaagtttttattttagagacagggtctcgctctgttgaccaggctggagtgcagtggcgcagtcatagctcactgtagcctcaaactcttgagctcaactggtcctgccacttcagactcccaagtagctaggactacaggtgtatgccaccacaaccagctaacttttacaaaatattttttgtagagatgagggggactcgctctgtggctcacggccgtcttgaactttgaatacctggcctcaagctattttcctgcctcgccctcccagagtgctgggattacaggtgtgaaccaccgcacccagccctcatttatttgatttcttcagagaggctcatctgttcctatatttagaaatgtggaacttttccaaagaagacaaccttcatttttttcatacgggctttcaaaagaatgtgatgtccttttggtgttttagattctcacctatgaggtataaacaaatcgccttgcagacaagtctcaacacagaacacatgctgcttatcactggcaaagacttgcatcagcctgccaccacggctggctcatcttgtccctccaggcctgtgcctgctggaacactcccactccccatgtctgaatacaccacttcggttggaccaagagtttccagctcgggtggcccctccttccctggaaataaatagctgcctatagaatatcagagtcattctgactcaggggtgactcagctcttccatgacctgtgttcccacttctccttgataaggccaatgttttggccctactggtgaaaatatgtagacctaacatctatctccctgctccagtttcaagagaaaagaccttattcagagaaatatttagaagactcttgtggaattcttgctgtgagtggtttttccttccctgccattggtgcgactgtttcccccttccgtcaaattgctgtctagatgtttctctctgaccccaattttctcggagtttgggattatcaatctaaaatcagaggtgagaattcatcagtgttatcgataagactttgcaattatttctttcaaactgaactttttccctattcacttatttttcctcattgcaaaataatcaaagcattgatgagtgtttctgtttaaattcaaaggacattccacctttaaccttagcattcatgagacacaaaatgggtttttctttttgctgatttaaaaagctgctatgaagctgcacagtgcggaagagggcacccctgctccagaaaagaagaaacaaaactgcctgccatagacacttggtagggagtggcaaatggaatcttggtttgtttttctcttaggactttgacaattatttttccttgaaaagaataagagaatctacctaaaatattaatactagtttcagagctctaggataatatagagcagagtctcttttttttaaaaaaggaaagcggtttcatttctgacagtggatttcttccactgatgtgcacactctttgacatgaaaagctgcacgaagctgccttgaattcattctgcagatggaaagttgcaagtacggtaattagctaagcagtggcaaggccgaccatctgaggtttgatttctcatcaagagatagtgtccgacacacgtgccactgagcatg

SEQ ID NO: 65832 - DNA, 1591 bp, Homo sapiens
tctcagtattattttcttaatacctaatctgaattcctactgttttaaaatgcattcccctacttagctctacggatatggaaaatacatgctccgctgggaatagtctttcttaaaatatatctgctctgcttaaagattagtttatcatttttgccacatataaaataagctcaggtctctacaagtgcccttgtaatttccatttcataaatttaaaaaatattttgttttacctcgttatatttctaatagtgacctccaaatgggtctgtgtacgatatttcattaaatgggtttagtaggcttccaaagggagaaaagaggatttccatttctgcataatattcttgctcttttaagaagaaaacacctctacagtggcagggctaatatgtcgacaggcatattccgtatcatttatgtaagttaacacattctgaggctctgcccatttccacttctctgatttgtcctccctccctgagtgcacaatactgcatttgtcccttttgaacatgtaacagattaaagagctgggcaggaggcagatgtaggggcacctttgatctctcatccttggaggttaagggagggcagacacctggcggctgccgagctggaaacaaaacacaggcccagactggaattaccttaaagggagcccggctccaaccgcagaggcagctggaagcgctgaatgggcaccgggggaagagagccccgcggtcaggcagaggacgcaacagagtcctaacaatgtgatccaggctacccgagagctggttagaataatccttcctacgcagaaagacccaggaaaccttccaggaaagactaggcagccgcattgagaaaaaacgaaaagtaaatcttttgcaaataatatcacaaaacttccagctgtgcacaaatactgaagggcaattttgatgacaatgcaggaagctttcaaagaaaggatttttaaacatattttttccttggcggaactctttttagtaaggatttccacctttgccccaggatcctgccaatgttcttagtcaaagccagacccgagtttcctaggattcttcggtgaaactgcattgccccctggcgtttgtgtgctgtcattacgccgcacagataaagcccatggaacacctaccaatccgaggaaggatgcagctcctggtttcatctacatggagaaacctctcttaaaacacaggatcagagaatgcagttctaaatggcaaatctagacttggtttgacaagacatggaatgaaactttgaaattaaaactccttccttttccatccttagcagaatctcctgagatgttcaagtagctctggaaagaaactgatcagattctaatctgtcaatttaaaaagtttttttttaaacaatttttaaatttgttttagagatagggtcttgctgtgtcattcaagctgcagtgcagtggtgcaatcatagctcactgcaatcttgaactcctaggctcaagggagcctcctgcctcagcctccgtagtagctgcaactacaggcgcccaccactacaccctgctaattttcttatttttaaatttttttgt

SEQ ID NO: 65833 - DNA, 867 bp, Homo sapiens
aagagctggaggcatagtagtgaacaagacagaaaaattttttggctggaattgagatgacaaatacacaagtgaatatttaatttcatgtggcagtaagtgtcatgaagaaaaagtaagcattgcaaaggacaagagattgacttggggcagagccaagtggccatgagacagagatgtgaacatggagttgggaggtggaggaaggactccaggcacgggtgtagggggtgggtggaagcagcgccagagccctaaggcaggaacaagctcgctgggttccagaaggtcagagctctccatgtgtgggtcatggttccctggtgagtgtctaataagtaacaggtgttcctgagaaggtggcacacagaggtcagagggcagggctagggaaacacgggagtgagggcaagaagaaggccagtgcgtctgcaacagaagagtccagaaacacgacagaggaagtcagagagccaggaggggccgccctgggcaaggtctggcagagacttggctataaacacgatgatctcagccacagagtgtaagagggcagcacaaagggaagtaaaaacaaagccaagggcatatccttgttgtttcaggcatttaaatctgataagaacttgataactggagagaataaaagctacagcttgatgccccttctgtaatgactccagtgatcaatgctttcatcatgcaagtgaatcagatcatatcactatgaatgataaaaattgtgttaaagaatagccaggtaaatcgacctgtttataaaatgtatatgcccaattagtctattggaacaaaaatagaatgtaaaacaaaaaataaaaatacccacctaggtgagacaacttcaac

SEQ ID NO: 65834 - DNA, 989 bp, Homo sapiens
caatataagctattcgacatattctgttgtggaaattcccaagctcccaagattccgataaggaacgtgctgcacgagctcagggcagcaaggagattagacaataaataaacaaagctcccctttcacaagctgcggtcccatggctgagaatccgctcttgttcttctctcttctaacccctgggtcttgttcttcccttcctcttctctgggtctttattaattgggctttgtgtctattctaatgaaaaaggcaccgatgctccgtcccactccttcctgcgcccccgtggaaggacggtggggggacgacggcgtaggtccaggggagctgagagtgcgtctgtgtttccccggagacgcgctcggcccgggggcgggtggcggcgtcagtcccggggaggaccggcagggggcggtcgaggctgaggactgcgcaggaccgcccgggcgggacgtgccgtgtgtactgcgggacttgcataataccactctccaagtcagggtgccttccaggaaatcctgagcgagttgctcattcaagtttttccatgtttgacgttggtgacttaatcaaagaatcaaaggatgtcaggggcctggattgctgttatcttctttcaaaggctctccttcaacggataaaaaattaaggctcagagcagctctgggtctaactagctagttagtggcagagctgacgctgtaactgaggtctactaactgcctgccctagctctgaaaaaaaaaaaaaaatccatgtggccactgccagcttctatttacaagataaatttctaacgctgaaagaacattctctcctctcccggtcccttctgagttcgcatttctgtggcttaagctgcaagtggtgaagcttatttcgggaacagaagcgcaaatttaaaatacaatagaattatgaatagattgcaatatttgactattttataacaaccatagactctgatggtaaaaacagttaaa

SEQ ID NO: 65835 - DNA, 1945 bp, Homo sapiens
acacagctaaaacggcagcactagggttcgaggtgtttaactcctaagatcaaaattatattaatcaaaattttatgatttatgtcactttgaaacctaaagtgttaagaaaattgtccacaatagcacacacacatatcagacacagatttctaaatattataggttctaaggaagtgagaatagatgttctactaaaagagcataattctttcctttttaattgttaattcacctgtataactggaaagtttagatctaagaacttcagattgaagagatgctactattcatggtcttgaaaacagtggtttgtaggttctaattctgaaaagtactaaccaagatgaagcatcaccctgcagcatgttcattttatttaataaattcttatattgtgctcctgtgtgcaggcactgttctaagtgctttttaaatgtcagctcatttgatccacacagcggaggggtggtattattattattcccattttacaaatgaggacactaaagttatgtagctcactcagagttacagctaagaaggggctgagtttcaatgaggcagttcctagggccatatcttgaccactgtttaatgctccttgtctttctaggctgtgctttgtggcacctgcagaactgagcaattatagtcccggacacctttgtgctcatcacatttgatacacttgtcatttattaattatgctagtaacaatgtaatgtttttacttttgtaggtaaaagcatcaaaatcaccacagcaacaaagatttctcaggaaattataaatgctgagaacagtcttgttttccttgcattggcaggtgactcactgcatagatatgatcatcttcagagcctcattataggtttagcaattacattttaaaaattaacttggtacagctgagggtcatagatgacgcacaccacacttgctatttctcaatcctgatgtgaagttcataagcattgctctctggagtatgtcagagactaatgacaaactgattagctcatatggcttatgcaacaaaacatggcaaattttgttcagatatttttttcaaagttagtttatggtagaaatttgggctcatactagaaacagtctgtaactgttgtttagggaaccagctgagaagtatttaacctgtgtatctttcaattaatcttacttttcaaatgatagcagctaagaagttatgtggaagtgacttccattggagtggaatttgaatagtaatacattatttatatacctaaaggtagcatacaacaagattacacataaaataatacagtaatccgttctagggaaagtgtaaagacagaaaatcgagaccttggagaagaaaaacacaactgctgaactgtaagggccattaacatcgatataatcgagtcagtttttagtttttgtttcttaaaccctaaagcaaaagggagacattgcttaggtagatagttttagaagaaagcatataaagtgataagcataccaggcccaaagagtgaaatgttactgccttttgattgtaaagaaagggagaattacatggctgcagctgctattgtgagctgggcagaggttgctgtgtctttccatttcagctgcacagagagaaaagatttaggaaaatccaaagaaaaagataaccttgcagctgtctctgaaaagcctgcgttattactgtggtggcagtttcaggagctggaagtcttggtagaaggaaagctggagcagagacaaagagtgcaggtcctcattgatttcaggctggtgggatgccctgcttgtgtgcaccagcttaggagggggttggactcaacaaacataaacaaataataataaaagcaaactaatacaggttagattttatagtagttatggatgagaaaaaaggattaattgctttttaattattatgtttaagcat

SEQ ID NO: 65836 - DNA, 1551 bp, Homo sapiens
atggagaagtagtgctctatttgccttaagaagtttggatttggttctatttgttggggggaaggctttagcaggttttaaccacggaactgttatgatctaattcaccctaccacaaaatcactccagctgctcagtggagaatgaaccattggaggtaagagtgggaactgaggaatgaattatgaagctattgccatggattaggggatgagaaaatctctggttgcagaagatgagatactaaaaaaaatcggactagaaactgtttgggagccaaaactgatcaaaggggttttggaaagatagcacaaaaaagaaatccaagacaatgcttaagtttttggcttaagcaactgatatatggggatgatatctactgaggcaggaaagacgggacagaagtaggcttgaggtaagtgaggattttgttttggacctgttacattggagatgtttattagatattcaagtggagaggccgagttggcagctggattaacgagtatgaggtgagaggggacgtctgagctagagataacagatttggatgacatcagcatgttgatgttatctgaaaccttgggactaaatgagatcatctaggaatagaggagaaggtcatcaggaaaagagctgcttggggcattcaatgttctgaggtccaagagaggaggaggaggaggagaaagccaggttttctaagagaagtggccagtgaagcagaagggaaaccaggaggtgaggtagtccagaacctggagaagagagtagtttaaaaaggaaggactagtccactggctcaaactgctgagtgactaatcttattttaatatgtctgtgtaaatatggcagtgcctgtctacattggtggagggaatgtgcctaccacattgtagagggcattccataaatactaacttatctttcttcctcaaaacagtcgctgggctccagccaggcactgccaggcactgtggtaggcactgagcgaatcagcaaggaatgagaaatagattatgaactgatgagctcacagtgactttaacctttgcagatatttgtcctggcattgcagagttttatttagaacagtgattctcaagatgtggtactgcgatcaacagactctgcagaacctgggaactcattaaaaatgcaaattctagggcttcaccccagacctactgaatcccagactctggggttgaggcccaggaacctgagttttaacaatccctgcaggtgactgatgccggctgaaatttgagaaccactggtaaggaggagagcaggctgtcctctgcagagctgtcatttaagctccatttaaacattatagtctctaaagagaaagtgtaaaacagatgtaatggtagtattgatcactctctgtttcatttctgaagcccatacttggttattttgtcttaaagagcatttgactctacttttggcttcagactatgtggagctatttttaaaaattcgagtttatgtatttccacaactaagtataactgttaagggcttctgagaaaatcacccaac

SEQ ID NO: 65837 - DNA, 2568 bp, Homo sapiens
gttctttgaagtaagtattgggttttatttcctaaactatacacatcaatatcacctcctgaagctttttacccagtttcacggttggtatttcggacatgcaatgttccatgctgtcaaacttggaatgcctcgtttggatacagggagacaaagacttggagacccagaagcctgaaagtggttcttgaccgactttgtccactcaaattaaggcatcatgcagctggtcatcacttacattgctggttgcacgcaggcacacacacaccagtgctcacagccagcacttgttaagaatggttgagctggaccaaatggtatacgtgtctttcatcaatataaacatggactgcattcatctggacacgggcctttcccgcctaccgagcctgcccaccacccgaagtttaagctcatcttggaggacctgacactcaggaagccgtctcccgttgttccaccggctttgtggccccaatgtctgtataagctgctgatttgccttgggaaaacaaaccagcatcgatttcagagaaattactggataatttgcgctgtgaggcgcctagatcgcaaggcgcactccgcaaatgacagccgctcccgtgcacttgtccagtcattcgggtggcatactgtccgggtggaagcccgccaaaataatccatttggaagggacggagggcttcgtcagaaattgccttcttgtagctatgagacattgagcaaaacagataagaactggggcaatggaggcataaacattaaggctaggatgtatttttggggagaaagcggcggctagcagggacgaagctcaacttcatgcgccgcgccccggaatgctttgcctttagccactagcggagccgcccgcctgagggagccctccgggagtgagcgcacgcaaccgtgcagtcagattcctccgccgaccgcggccctctctcctcgggctttgccttcgctctctagcttttcttctttcactcccgctcgccgactccagcccgctgggctcacgctctgccggacaccaatcccggcggccctgcccgacggagctcaaggctaggcctggccttgtccgcggagtccgcccctcgccgccaccgggatccgcccccgcgccgacacgcacttccggcagcgccgcggccgggagggaccgagcggggagcaaggcctgcggggaggcgcaggatggacgcgttggctgtcatgatgtaggacctcctgacctagaaccatgcccggcgcagggagaacaacgagcttacggaccgggtgcgggggctgctgtgcgagaaagcctacctgctggcccgggagcgttcgccggcccacctggtggctttccctggacgtttaacggcgactccgcccggcctcccgactttttgatgcaggcgttctcttacatgactttcttcgaggctagattctcgaaagacatcctgaaggtggctttcttaattagctgcctcaccggctggcggagcagttcgtagtcgcctacatcgagagggagagccccgtcctggctcagtactggggcttcgtggacgcgctgtagcgggtcttcgccgtcgtgggtaggaaacagtcgggccggatccccggtgtctggggagcggctgccggccgggcccgcgcgagccgcttcactcctacaagcccggctcactagttccaagctgctggactttgaccctcgctgggaagcttgatcgccgcctgttctcgccaatctctatgcctttgcactgcccagcaacccggtcactgcccaggacctgttaaaagttgaatggacctcccagaatcacgccgctgccaccgccgtttctagagacggcttttggccacctttgagaatcagggtcaaacttggaagggcctgcatttgtcacacttcctcggacactaatttggatagttcaggcccagagacggcttcccgggttagtgtgcctgacaacactgaagaaaaattgtgacattttccttccccagaattacttcgttttatacatttcacttctcttctgaaatcacagcaatgccagtttgcgccttttggtctgaggaacgcaggccctggccactaccaggaaaaagtatttacttttaaaacttgaatgtatatctttaccgtatgcctagtacagtagtgcttggaagaaacagattagtaagacaaaatatatgtcttcaagaacacttacgttctgagaaagaattctgaatgcagattctaatgtctggtaaaatgctttacagtgtaaagaatgcatatatgattcttattttatggcattttaaactttccaccccacggttttaaagtgttaatatatgttaaaaatatatgcaatttataaaggagaaggaaagcccagcttgatttttgctgccaaagatggtatatttaaaattaaacgtaactaatggcaaaaaataatgggaatggtgcagtctttgagctgtatccagttggcattattctcttggactaaaaggaatagtattaacttcctcactttgggtaagccactttagatt

SEQ ID NO: 65838 - DNA, 655 bp, Homo sapiens
aatcccttactgggtgttcactgctgttaggatatagacaaagatctttcatcatggccttcaaggagaggtagcttgaggtgggggtggggaggagtgttgagaatgaagaaactgctccttctgagcacattccaagtaagatcatcctcaacaatgtcttaggtaatacgttggcctgatggtttttaaaactaaaaaaataaataaaagtgtaccttaggtgacaccatttttgtgcccacctacctaccaacaaatggcaaaggctcaatcctggacccagcttcaccccagactaactcccaagattgagtccctggcagtgctttcaccttcaatgcctgcatcggaattcccctgattatgccacaagtcatctgaagtgggaaccatgagacacagacactgagaaattaacagtgtatgaggaagacaggatataatcagattcatgttttggggaaattactgtatcaaatatgttaaaaagaaagataaatctggaaacagtctagagaatggattttgcagggtataaactaaagacagatcagttgaaaaaacaaacttttaatagtccaaaggaaagaagatgaaagaccaggtcagaacaaagaaatatgatagatttgagaggaaattttgaagtgaa

SEQ ID NO: 65839 - DNA, 2787 bp, Homo sapiens
tgttgttttggctagtgtgtacttggccactcgcccctctcccctctctctctcaagatgtatgagacctggaagagagaccatgtgtgtccaaagccgcctcctccccgccccgccccccttgccattgagatgtccaattgctcagttcaggtgagtcaaaactggaagacagctgttgccagcatctgtgtaggcaggtgtaggaaaagacgtagccccaacaccaccttcataataaggctgccccttcctaattgctctccaaactgcgggcgcgctaagccgcgttacagtgcagggagccgggcttcccgcaaagccaaaaacttacataagcagctgcagccgcctcccctgccccgggcagcccgacaatggcggctgcacgacttccttgttgcaagcttgcaacttcggagtcgggaggaagcagggagccaagcgcagacccaagaagccctcaaggcgtatcgagtcctccctctcaatttctttgggcctgggaggtggggagtggaggaggccgtttgcactccttcccagacaaaagctcccagcctgggagccaggtggtgaaagggccactttccctttcataatcagacgtcgagcgcaggcttgggaccgcggctcggagcgcgcagggagggactgcggcccgcggcggccccggcggcgcgacgagcgggagcgggcgtgcggccggctccgcagccccgcgccgcgccgcgccccgctccgcccgcgagcccggagctcgcgccccgcgcactccccggccagctcgcgccgggccctcccccgccctcccgcggccgggggcgggggcggcgcgcggccggctaacccaagctccgcgggcgcacccgggagtgcgtgcgctgggtcccggccccctcctccgccggcggctgtaggcggcgcggcggggcccgcggctcggaggggcggcgcccggcgggccgcgctccgcgctgggttcgggccgtccccacccccaccgcggtgcactgcggcggtgcgagcgggggcggccatgaactcggccgccgaggctctgcgagcgcgcgcgcggggccgccgccgcctggccgctccccgagcccgctcgccggcccgcgcggcccccggggcgccccggccccacgcccaaccctggcccacgcccgtccccgctcgcaccgcgccgcgccgctggcggccgccgcacatcctggagctggctggtgccccagagctcggcgagaacgcgcgtcttccgggccgccccgccagccgccggccgcccccgcgcccgccttgcggacggccccagccccttccgcaccctggcccgcgcttacctgcagcctggcacaggcacagacactgccgtgggttccccgcgctcgctagcaaacgcaggccgggaccggaggggctcggggcgcgggggcacggtgggtggcagtgtgttttggatttttttttggagtttggggagggggcggggtgggggaaatcgtgcacgtccctgatggtagcagccctcctcctgcacgagcacagaatgtctagccggccgtgaacacccccaccgccccccccttcccgtgcatgcgcggtgcgggctggggggaaggcgcgccgccggcttgcgcaggcacggaacccgaccgggtctctaagtgggcgagcaaagaaagggttaatccgggcccttgccgacgctttcgttggagactacggggccgcccccggagggccctggcctgcgcacgcgcgcgcacgcgcgcggcttggggcgcgcggagcccgcgcgcgggagaaggagtgggcggggcaagggcggggcttcgggagccagggaacttaagcacgagcgctgctcgcggacacccgccccgcctcaagctccctcccgccctggttcgtgggcttccgcccgcgcccggcgccggcgcagcgccggggacgcgggagccagcgctcccgtgcgtgtgcatgtgcgtgggccagagcctcccccgggcgcgcgcaggccgggcgctgaggctgcggggctctgccgcgtctcggagcgggcgccccggccactttcgccctccgcgcacaccggccgacaccgggaggcgcgcccacgggtctgcggtcttgcctcttgccgccggcacattgagtttgtgggggagtggacggtgcacaataaacacttgcagaacaaatggaaaaagcgacgtcttcgatttgtagtgtaaagcgcaaccccagttgcccagcagaaagggatcacccatagggcttcggagctagtaggtccgcgcccggacactccaaggaaaagtccaggggctggaggcggcgacccgtctgtggcagtccagaccctggactcgattcggagagctctgataacttggctctgtccttaacatccctgctcagcgccagtaatggctccgttgctgttgaaccacgtcgccttccctctgacgcggcggctgtgcctgtgtctggcgtcgggagctgggaagtccctcccgctcccgcgttttctgctcaccgagatgcaggaggccggacagcaatgccgcgccgccttagagtcgctcatgttgctttacctcacacgcgaagtttccccgaaacgcgtaatttaatatctaaagattagagcagaagcttcctcttgggcttattgaagatgacataagatagtgcttgcaacaggcacctaagtaaacatttgggaaataatatgatgattggatgtgttaattttctaaaggaagttctatatggcct

SEQ ID NO: 65840 - DNA, 1727 bp, Homo sapiens
tgctaaacctttccttgtcttctgctctacaggttgggaagccagatatccacattatctcacatcacatcactgagctctgtggcccagttctgactacatgttagaagcagaagtctgcaggggatggcttctgagaaaacttgtatttattatttaaatttaaccttctagcctgggaataaattccagcttgcttagaacaatacagcacagaagagagcctgagttcctggtgcatccctgtgccagtgtctcaatcctgccccaccgatttccaatttcttattatgtgaaaagcaaccctcccttctttgattaagtcattattgatagggtttttttggtgacttgcatccaaatgcattccttaactcaaacaaaatagaaggggaattccacattcacactgttgcatcagacaagctctggcttctcagaactttagttttccatttactagagctcagaatcaaagagacagtaaagaaacccatttaaaaattgcttggcatatatatcttgggtgatgggacttcatgggtaatatttttaaaatttctttgtgtatttttcttttattgtcaaacgttattaaagagaccatagataccttttgtaattataataaaaaacaaaatgttactaagaacagtgagaactcttaagctaactacaagataattaatatataactgcaaaatataaaataccaaagccattttcaaataaagaaacagagccacatgaaactttgcagtttagccaaagtcatttcaggattctgaagctggggaggaagcaaggcttacttagcccgtggctagaattcacttttgaaaactccatttttgtccattccctcttatcactacttgcttgcaagttaggaaacaaattagaacaaaagcattgtttgtcgtcagtggtcaatgttcattgctttaccagaggctcgggattagaagattctcagaaccagttagctcctgatacaatcgggccttgatatggtttggatttgtgtccccacccaaatctcatgtcgaattagaggaggggcctggtgggaggtgattggatcatgggggcagatttccctcttgctgttctcatgatagtgactgagttctcaaagatcttagggtttaaaacttttgtggcacttccatcttcgctctctcttcctctctcatgctgccatgtgaagaaggtgcctgcttcccctttgctttctgccatgattgtacgtttcctgaggcctcccagttgtgcttcctgataagcctatggaactgtgagtcaattaaatctcttttctatataaataacccagtctcaggtagttctttatagtagtgtacaaatagactaatacaggcctgaaataagttgacatctaaaagccacctgaattatttctgggaatagactgaggtactttctgttttaaaattcttggcttttgttacccagccaaactggggcctgcttgcccagtgcagtaaggccaaacatgcacactgagtttatgcagtgggagaaaagaaggtgttttatttgcagagtgccaagcaaggagaatacagcagctcacacttaagactcaaactccccaatggcttgcaggtaagggtttttaacagaagggataaatttcaggaaaacaaattataggcaaaatcataaatcaatatatggaagttatacattggtttggcctaaaa

SEQ ID NO: 65841 - DNA, 1155 bp, Homo sapiens
tgtccctaacagtggtgtctattcttattgcataatggcacccctgagaagttaataaaagctctggcccttatccattaaaaatgcatatactgtacacaatttttccaaattccctgaggcacaactccaggaacccagcctcaaaacccgaccagctctgacacctgtcctgctgcaccgcacactctggtttcatcttcccctgacacccggcttccagggactccttggaagtcagtgcccctttgcggctcttctttcctctttctaactggggccctgccgacccatcctcaccctatctctggacactcacaccttgggaaatgcaccttggtaacctctgcctgcagcctttaagggcacccatcttgagtttatgtccactgggacatctctatatccactactgtgattcacagggactgctaaccatgagtcacgtgtccaataatgcagtcatcacgttatcctcctggccccaaactggactttgccccaaatttcacttctaatggcaccactctttccccattccttcagatgaactctttgggtctttcagctctcacatattattaccccaattaagtactaaactgtttagtgctgagactgtaaatggaatggcatttggcacgtctcactttttcttcttctatgtctgatctacctccctgtgctactgcctgtgcctttgaaatgtctattgaatctgagttcttttcttggcagtgccccaccaaggccctgatggttccacttcctgggtgtctccttctcatccacctcttctcgtcttattctctacagatctgtgcaattctcatcttcctgaaacgccatcttcacaaagtgactttccgcataagaacccagaacggctctgtccagcagactgtgggctgtgcacactttctgccctgcctctgcggcctttcaaaccaggcccatctcccggtcctgggttactttcctctgtgcccagggccacaatgagcatggtgggcaggaagtcagctcatggcctggttctgactgtggcctgatgcaagtcacttcgtctctgggtatctcaacttccccatgagtaaaatgggaaagtgagtatccgccttactgtcattatattcatatagctggtttatcatg

SEQ ID NO: 65842 - DNA, 556 bp, Homo sapiens
cgcctgaggacaacctattttcctggaggggcccttcaggaaggctgtctgcttgctcaggctgagggtgggcctgggggaaggaaagtcacttaaccaaagggtggttaacaagtactttgtccccatttggcaaaagaggtcagctaatcatttatgaggcaaagaaagggcatttggaaggactgtgtctggccttgtctgaggcagtcaaggggtgatccaccagacttctctaagtcacgtggggaaggggcgttctttgcaatcagtcattttccaggacacaaaggttggggtgattactcaacctttgctgttttccaggatccctaagggtcaggtaaaagtcaacattgtctgttcctgtcccctcctttctgtcctcactgtcagcagcctggccagctgccacttgcagtcacctgggatagtctctgccttcaggctcctctattccaagtctcctccaacctgccctcagaatttttctctgccataaatctaactaagttattctcctcaaaatcaagacaaaatgaaatgacaaacaaac

SEQ ID NO: 65843 - DNA, 426 bp, Homo sapiens
ttacacattttcagaatatggcagtttatatatagctaacttttaataaagaaatatattggattgtaataactatgaatcagtacttactccctgccagttgctggctacagtgaacagtggggcttactgcacttctacgcctcttgtggaataacaaatatcagtcttcaaacatttaagcaaatgaaaataaaggtcaaatatccttgtttgccctttgcagctgaaagggcaagttacacaattcttatgtatttttccatctaatcttctgaggaaagaaagagaatctgaatttacgttttgcaaatggctcactttttcttactttgccaatagtggagaattttctgtttcaagactcagtgcgttagtaggctaatggacataaagaattccaacactgctagttctcagggaaag

SEQ ID NO: 65844 - DNA, 1675 bp, Homo sapiens
aaaacagaggataccatcccttgctggaaacccaacctcagcacttccataggcctcgccccaggttgggacctctcactggctgggttacccacttttctgttcagagacgggataaccagagggcaacacatctgattataaaagtgcatattgcagggtttaggcaagtaagaatacattctgaccaggaccagagaccccactctggctctaacaagctgtgtgaatcattgagttgcctcacctctggatgagaggtttggatctgataagtcctaggattccatcagtttcatattccacacccctatctttggtgactaggataagagaagatgaatcgaaacacctctcctgcatctatttatatctatacccaagctgagcgagcagctttgttcttcttaagttggagatgcaaagtgttcccatcataaacaagagcccagcttaatctgacgcgatggtccctgcacgggaggctccagggcatgccacatggctctccctgaagggccagcaccaccaggccactccataccccaccagcccttgtcgcggcacctcagttttttgtcatttcataacaaacactttatatataccctggtgagaaaagtctgttagttactaagtggtgcagccaaatctgcatttaattaaaaaatgaatattttgtctcaagctatatctatcttattagaagcactgggacatgtcacatttttattttgttgtttttattcctactttaaaacatttaaaagcatttctacataatcaaatattttattctgcattgtttagctctgatttctgaaagagtgtttaaaacaagggctgaaggggcaggaagggtgacgtaagtacagccgttctcatccacagcatggagagtcatgcagtcctggggggctgccctgctggtggactggcacattccatcctggagccttcaccaagtgtttccggacatgagctaagcacctgcaagagctacagaggttccacagagtgaggagcaagggtgaaaatacaaagaccccaccctaggggatctcctggattaaaagaggagccggcgttcattcccttactcagtgactaccttttgtgttgcaagtcagcagtgtttggagtcaggagtgttcggagtcagtgttgcaagtcaacagtgttgcaagtcagcagtgttacaagtcaggagtgttcggagccaaaaccttgtttaatctcacaggcctgcagattccagaggtcatggaactcatccaaacgcacagagttggccaggggcggtggctcacgcctgtaatcccaacactttgggaggccaaggtgggcggatcacctgaggtcaggagttcaagaccagcctggccaacatggtgaaacccagtctctactaaaaatacaaaaattagccgggcttggtggcggggtctgtaatcccagctacccaagagtatgagacaggagaatcacttgaacttgggaggcggaggttgcagtgagctgaaatcgcaccattacaccccagcttgggtgacgagaataaagatccgtctcaaaaaaaaaaaaaaaaaaagcacggagttaatcagagcagaaaggaaatggacatccaagtcttcctaactccagagtctatcatctagcttctcaaacttgg

SEQ ID NO: 65845 - DNA, 1842 bp, Homo sapiens
atccatagacactatggaaagtagattagtgactaccaggggcttggttgggtagaaggagggtagaatgaggtggctgctaatgggtacaaggttgctttctagggtgatgaaaatgtttaaatttagtggtgatggttgcacaactttgtgaatatactcaagaccactgaattttaaggtacgtgaattgtatctcaaaaaaggtataataaaaatagaactaataaaatacataaggccaactacatatttggggagtggcagaaggaaatgaagttgtctttagtggatctgctgcgctctgtcaagaactgccagtaccacacaggaccctccaggtaggacagacaatgtgggcttgggcacaagcgacaaagtgagtggggtcatgggcagtcacaactcctcatcctacacatctgctctcccactaggaagtgagttatttaggataaaaattagaacacagagtaggaagagtaggaatgctataagctctagagttgaaaacatctgtttggaagctggggtttaaaaccctgttcccatatatactatcttgtgaccttggaccaattacttaatctctgtggtttcagtttcttcatctacataacgggtataacaacagtaccttatttcacatggttgcaggaagatatgttaactcatgtaaagcccttagaacagtgtgtgacaaagactaagtgccatgaccaccataggcattgttgaaaatgtagttctcattgttagaacaggctgactctgctctcacaaacacaggcatgcagcacagtaacatctgttcctgttaacattccccatgtaattccaatcaaacttcctgctttttgaaccaaggagtgtaggcttgttctttgtccatctactgatgacaattgcttccttgaggtcccttcattaatacagaaaataaatacacccagggagggcagcacagggtacttgtatcaactaattacagcagcagctactgctgaagtacctataatataaagagccaggtagagtttcaggaattttccatacatgacctcattgaattttcacaacaagcctgtgaggcaggtattgttgacgccatcactttacagataaggaaagttcaaatatgttgagtaacttcaccaagttaccacacagtcaaataagtcagtgctggaatttgaacccagatcagtcttgtccgagggcattttccaataattattactccagatgtccaagagaagagtaattatgaaaatatttgaaaataagagaagagtgcctgttgaccaacacaattatttctacatattcagacaacagtcagagtgccaaggtacattcagtgccattcactcctccacaccctccttaattcactcatgcatacagtaagcatctattatgtgctgggataaagatttcctttgaaaaatactgactttaaaaagaaaattagagaataacagaacaatatgaacaatatgatcaacacgttaattgaagaatagaggaatgtactgggcaaagctgagagaagaaaaacttcaattgcttgctcataaactggcaacaaatgatcaatcgatgctacagtaaatatcttatgaataataagaaaacagtctgtcaactaaaaatctaagtcagatttgatgtgctattatgactgagcttatcttagaaatgaaatacttttttttttttttttgagacagagtccagctctgtcgcccaggctggagtgcagtggcatgatctcggctcactgcaacctctgcctcccaggctcaagcgattcttctgcctcagtctcccaagtagctg

SEQ ID NO: 65846 - DNA, 604 bp, Homo sapiens
ttttaaactgccaaatgtaggcatgactcaatacaaacgttgtttaaaggtgagagtttgtacccacatagaacttaccattttaaaaactttggcaggaactgcattggtttgagtagcttccaggtattctgtccaggaaaaattttctggattgggataacctgaaaatatatatatataaatagcaaaagattactcatagatattctgattcccgtatactacaaaacgttggatgatatgacacctaatgttaattgaatgctcaccattaaacagacctgatgctaagaacttcagatatattaattcacttaaccataacctctgagaaggcaaaggcatgcctgcactcaagcacttactccatggtactctcattcactcaacaaggttaagtgagttggccaaggtcaaaggccatgtgagtacttcacagagccaggtgagacccaggtttctgactcccaagctccaacagaaggctccttagcagtttgaaaacacttacaagcaaccatctgacctcataccatgaattggaaaaaaaagactctgaaaatctttcaaatttctctaatcattctatatctattaaagc

SEQ ID NO: 65847 - DNA, 567 bp, Homo sapiens
tttctcctaaaatcctaagcacaatgaagacaactacaggtaaatagaagtgctaggaaaatagcaaaccatggtaatgtagttatcaacatatagcaaaattaaaatattagtatcataaacttttaaaaactggctttagataacttgatgcttatttggggaacaaatacatttctacttgaaaatccattatcacccggacagattcattctgggttatctattaccaatacagagctgtctctccacaagagacgctatcacattcctgctgaaagcttcaaagtccttttattaactatgggatagcgtccaaccagctgagcacagcaaacaaagtgcttctccatgagtctaaaccaactttcagcctcatcaactgttctctctagttactaattaaaccaatactcatggaggacctactgtgtactaggctctatgggcacaaaaggaaacaaaattgtccatcacacttccctcacgagctttaaaatctactggagagggatcaaataatctgatataattgcaaaccatactaagtaagtgcttttacagaat

SEQ ID NO: 65848 - DNA, 815 bp, Homo sapiens
cctcatttcacagaagaggaaacaccaaggggttaagtaacttgtccaaggttatgcaacaggcaagtaaccagacagtacaattctggggtccctctttgaacaccatactatgctgtagcttttttaactatattgcaagtttagttatctgaaacttaaccactcagtacgctagccaaatccttgccacacacaatgatttaagtcagaaactgacaccaaacgtcctgtgggaaccactcgccctcatgtggagcctgtctgcatagtggcttcatattgtcactttccttatgtcatggcagccacctactctcattttttaaaaaattttgcctttattacctattttggaatcttaaaatattaatagttaattatgtattaattctgcacccataagtcttgcataatactttatgagaatagcacaggaagtcccaagattcagggtccaaagggtatcaacagaggttgtctgcagctcagaactttctaaacagttacgtcactctcacggagtccatgccactcccctgccacccccatcggagctagtgctggtgcctactgctgggagacataaggaaacagttacgtcactctcacggagtccatgccactcccctgccacccccatcggagctagtgccggtgcctactgctgggagacataaggacaggtcacatcactggaccccttgcagataatcttcaccaacagcctgaaatgtggcagccctatggggtggctacacccagaggaatagcagtgttcacagtggtctggctctcagggacaccaactccta

SEQ ID NO: 65849 - DNA, 1810 bp, Homo sapiens
gatcctgtcatttccaacaacatggatagaactggaagtcactatgcttttttatgttttttaaataacaatatggattgtgtgtaacgcaaaggataaatgcttgagagcacagatactcctttccacatgatgtgattattatgcattgcatgcctgtatcaaaacatctcatgtctcccataaatatatacatcgactatgtacccacaaaaattaaaataaaaaaatttttaagatttctaataaattaactctttattcacctgtaatgttttcaataatactatgataaggcaagcatatttgttgatttttttttttctttggaaaagaaaaacctgaaagtcaaagaactggataacagtagtaatcttcatccattttgtctacaaagcacttcagaacttgagcaaaatagatgacttgtcaagatgcttatcaatgtgaacaatctaccagccagaaacaactatctgaatacaaaggcctggaaaatggaattgttctaaataattatcatttgattacatttaaatacatatggctagcttcaataagttcatctcaatgacttaaaatctatcaactgtatgtaagtcaacctcctgcaatattaaaaacccattaacttacatgatttacgagtaaacagtgtgctaggtaaagataaactttagcaccctcattttatcctcatttgaattacttttctcattcaaatttataaaaaaaaaaaacaaacaaagcagtgacctctgaagctagtaccatgtgcacgataagtgattcaccagcgtgtgcatgattcatccccagcagggttggtcacctccatttctatgacaccacaatcaacggccaccatagtagcaggcttgagacctctagagctcctccacagctcaatcacagccctcaaaaaagaggcctgaacttcagacagcaatgatgccgtcagctctctttctagtgactaatacaagtcctatgagtcacctgggctttctgtgtctgtaccttttaaaatccaaaataattctgtagtattctctgtgtttgcacagagtcagcatcccagtacctggtgcaagatgacatttacactccaaagaatgccttggagagagagagaggacaccgctcccactcatggagaacccacaggccaaacctcgaagaggagatggcaatcaacataacagagttacggcattctgccaaactctatttgtcccacagcttaaatatcatgtgctcatcctgctcacagatggattttcttttcctgattgcctggatcaacataaacatacagtcatgtgtcacttaacaacaggatttgttctaagaaatgcgttattagcataaacatcatagtgcaattacacaaacctactgggtagagcctactacactcaggctatatggaatggcctatggctcctagtctacaaacccgtactgaatactgcaggcaattgtaatgcaatggtaagtatttctctaaatatagaaaaagtacaataaaaaatacggtataaaagataaaaaatggaggtcacttaccatgaatggagcttgcagtactgggagttgctctgggtggatcagtgaatgagcggtgagtgaatgggaaggctgggacgttgccgtacactgctgtagactttatgaacactgtatacttaagctatgccaaatttattaaaaacagtttttctttcttcaatgataagttggtcttagcttactataagtttttactttatgaagtataaagtaggtttgtttacaccagcatcaccac

SEQ ID NO: 65850 - DNA, 1585 bp, Homo sapiens
gctataatgtcctcatgcaaagggaaaaattacatacaatcaaatcagacttggaaaatgataaatgcctctaaaggagcaatgaagtcagcttttgttccagcaggggagacactgcaggttcttcaatgggaacccagatggaatcaccagccgcccgtctatgagcagctgtgggaaaccacgcctcccgttcagcacagcacagtcccttgggggcctacagaacccagcacacatgagggtacagcaggtcccccctcccacccagggcagtggcagaatcacacccactactggtggccaaaagagatgaagtcacctaagttaaatgtgtgtatgattcaaaggtttggcggtggtgaagagtcctccctgttgggagactgagccgggaggtagacgcagctgctctgataaacccacaggccacactgtccccagttgacagggacagggctgaagcactgcccccaccaagcaagccgactcagaaaaatttaaaaaaattaaaaatttgtaagaaaagacgtttgggtttccatgactggaggccagcgcttttcatgcacatttcaccaaccagcgcttatctttcctcacttatcaaatgcagatccagcactttctgtgcacagagcattgtggggaatgcacaggagcaagtcttagtcgcgccaaggagggttctgtccagttgatttattaacttagacccagggtcagcacagttttgttttgtttttttaaagtccagactgtaaatattaaggctttgagggtcatagtccctgcggtaattacttaaactctgccatgagagcatgaggggagccacacaatatgaaaacaaatgggcatggctgcgtgccagtaaaaatactgacaaaactggcggcgggccagatgtggccactaggctatggcttgccaccccctggcttacacctgtactgtgagctgatgaaccagaatacaaaccatcagagaacttggcagaacacacagagcggagttctggaaatgcctgtgaaaagcaagttttgatgagggtggaagacagcaccagggctggttactctgtaagcgagaccctgcggggagagcctctcagaggaagctaagtgcccagggcagcccagcctcatgttgggaaagagcaacacacccaggaaattcaagcataaagcactgcacgatcctgaggaaagccaactctgcctggcaaatcatcctccaaaatttcaccaaaacccttactaccacagagcatatcttccaaaaaatggccttacaattcccgccccaaatgttactgaattgttaaggcagggcactggtgcttggtaataacaaataatgcttagagaactttcctaatttagctacaaatgcatatgtcactgaactgtggttaagaaaatagatgccaacctataataaagcagaaaacctaataatttgatcttgttcttggtttcagaacactgtaagaaatcattattttaattccaggctcagtttctcaagaagcttatcaatatcaccataaagacatacatgaattccatgaggctctccacaa

SEQ ID NO: 65851 - DNA, 3615 bp, Homo sapiens
acaaactccatcagatctgcccaaatgtcaagtgaattgataaaaaaaaaaaacccactttaccacttccataaactaaaatgttaaaatataataataataaacttgaatgtgacagattactcaaaggaaaaactgtgttattttgttttgttttgtttcctaagatactgacaaagctaaattattggggtttttttaaggaaggtcttagaaattcatagcagaaacaaaatttttgggtttaagagaggacttttcttcattgttgtaatttttcatcttccatgtgtatcagtggtctctgaagaattcaagtaaaataaaagccctccctggttgcccacatttcccctgtgaacacacaaacagcagatgtacatgcccgcccttcacactcctgctacatcttcctgaaaatccagctctggagtggcagtggctgggttcaaatccagtcactgccactgaacagctgtgacttgggcgagtcacttatcccctgtgctctggttcttttttgtgtaaaatgccaataacaacagcaccaagcacacagagctgtcacgaggattacatgggttaacaccggcaaagggcttaggaccaagcctggcacgctagtgtttgctaaaacattttatcaagagagctacaaaataaactccctggcaatgtctcgccttttagatgcaaggcaacattgaggtctacttcatccgcaaagtccacatttcttttgtgggattgtgcctaacaggaagtgagtgtcaacaaatattcgtgggacagatggatacaaaaagctgtacaaataaagaagcaaatgacctcttccatgattacagtcaaaattccaaagggcttcattaaagtcaaatcaccagaatggtaaactggagcctgcgtgctgttctcaccactaagtggtacttcctgcccttccacagtgagtcctggtcccagtgaaaacacgatagaaccagtcacgccccgcctctcctcatcgtaagaaagctgcccactgagaccatcccacactcgccaccaccatttccctcaacactgccacttctattactggcagttattgccagtactaaaacatgaggcaaaatgaaatttctaaagcaccgtgaaatctatggaaaaatattcagaagcaaagctttcaattaattcagtatttaaatgaaattcatttcagacacaattcgataaagccttcatattctgaagaaattcccaatagtatgaaaaaatatataggtttccaaaaagcttctgctttggtgcattgggaaactcgggctgctcttgcagtgtaacgcagtctgatctgcagaattaattcagacgtccacacaggaactgcaaaccctgactcacaggtgccttccactggcggccacctagatcactgcatctgccccagtcgatacaggaactccagtctttataccttccaaacttactgtccatatgtggacctaaaatgcctctacggcttggctctctctcccccatttatggcccctccatggctctcccgccctaaggataaagtccaggctgccacggcttctgaggcacctcctgacctggctccccacctgaccagccgacttctcttcccagccagactgtgctacaacctgactttgtgcgctctcttctcacctcctacctggagccaccttcccaccacctcgctgcccctcagacctccgtgtaaatgtcatttccttggatgcctcctgcaaccaccaccccgatcccaggctaggtgagggacacttccacagccagcgcttcccttagcatgacactcagcacttttcatcctagttcctttacttgagccctccgagagggctctttgtcactgtatctccagcacctggaataacgtctggggcacaggaggtcgtcaataccaatttagtaaatgagatgacaatggcttaactgcaacagtcaggatgagaaatagagaagaacccaaaaagaatggggtggaatccaataggacctggtgacagaacagacatgggcaataataaagaaagaagggcctggcctggatgtcaaatctccactggggcagcaatgtgagcagagccactcaacaagaaataggcaaaagcacaaactcaggcgagggcactagtttaggtttagacacgctaaaaacatgaggtgtcccaaaacatgtggctacagtgttgtggctaagaactcatccctgccctgctcaagttgccagtagcttcccagcacattaaggaaactccaaactcgtcactgagtcctacaaggccacatatggactgggtctagcccctcaagctctccgaccccactgtctcagtctgctttctccctgctcgcctcactggcaacagtggccctcccactgtccccagaggtgcccagcaaaatgctcctcagcacctgtgcactcactgcagcccacctggagcacggcacccaaatccttgcagggcttcctgcttctcttaatgtaggtcccacttcaaacatcacctcctcctgtcagtcgtgaaaattatccacagtagcaccccctgactcgctgtcacatcagtctgttttagtttaatcactaaacacttgatgaaattacactgtctgttcatttgttttgcatatttgttgtctgtctatcctatctacagggtacataaagtaaggccccagctgcgcacagtggctcatgcctataatcccagcactttgggaggttgaagtgggaggattgcttgggaccaggagtttcagaccagcctgggctggggagaccccatctgtacaacaacaacaacaaaaattagctgagtgtggtggtgtgtacctgtagtcccagctactcgggaggctgagatgggaggatcacttggacatgggaggttgaggctgcagtgagccttgatggcatcactgcactccagcctgggtgacagagtgagaccttgtctcaaaaaacaaacaaaaaacatagtcagggtcctcaactactttccttactagcatagcctgagcacttagaacagtgtatggcccttgctaatagcttatcatatctgttgaatgaatatctgaatggaggaatgaaggtagcaagatgggatttgtcctctcctgccctcacactgaaatcattgtgtatttacaaaaggtgatacacagtgccaactatctaaggacattagtaacgctgactatcacaaattccagaaagttctctcaaccaaaagcaaataaagctttggaggagggcacggagcacaaacaggaaaagggaaaagagaggaagtggatttctctgatcctcacctggccccctgtctcaagggtcacaaacctggctgaccaccaggagcactgtgttgtattttgtttatttgcttggttacaaattcatccattcacatactgagtaactgacaaactcatctcgttcgaaagttaagaccatataaataggtataggtgaagaaatcttacctcctctcctggccgtgtccacttttcttcatacgagtttcctgagttggtttttttaattattatttgtattatactttaagttct

SEQ ID NO: 65852 - DNA, 2549 bp, Homo sapiens
cggcagcagtggccacgtaaacaatagggaaataatacaaccatgaagatagctcctctttgcaagggacttattaaaaccttgcacttttccttccctccataacacatggtctctggagggagcgcaatgcgatccagctgacaaaaacaaaagctggcgtgaaggtaatgcagccctgccgctctgcgacctgcacaaacagctcctgatgtaccatctgtggtgcagaacaatagtgcctgtcacttagggccttggcaaggatattctcactcactaacttttggaaagcacactcactccctttcagtgtcagcacaggccctgagcccgagggcccactaaacccaggggctgagcctgagtgcctgctaaatacaggaaatgagcccgagggcccactaaacacaggggctgggcgcgagggccccctaaacacaggggctgggcccgagggccccctaaacagctcttccagcccctcccagtgccactgtgaatagtaaggcatttctaaggagagaggtctgagtgcctcctgccagcacccatcacaggtattgaggaatgcagctgaagaaataaacctattaataagccagtgattttcctgtactgccatgcaaagaagcctcaaatttgaatctatccatggttatgagtttcctggaacaggtccagtctgggtgtctgtgtggtcctcctaatatcatttacattccacgacctaccacagccttggccaaagtacacactaagtaagcattcagggaatgaatgaatgtactcttacttagcagctgtctatattactggcttcatgatttccaactgtgcaagtgcactaagtattaattattactctagaatgaaattcaccaagctactgaacacaactttattgcaaaatctggctatgaaaacaaaggttgacatgacatcatagaaaacctcgtggactggaacctggtgaggaaggccaagtcacagctccaactctgccattactcagatggataaatgtgggcaaattggtcttcaaactgctattgataattttatgtcttcaccacagtttgattaacaatcatgacacttgtacttggccagtcatggcaagaaagaatcaacggggaccatctactatcattagaacattttacaagagaaaaggagttttgaattgataaaaagttccctccttgtagagaatgtgcttttcgattcatattctgacatagtgacttctgagcctggaaacattgcataatacaaccggacctctgatgtgtcatctgcaaaacaggctgggttaaatcagcagctcaggacttcgggtgattttacccctccacccctccccagaggacaggaagaagtgtctggagatagttttcgttgtcacagctaaggagggggaggtgctacagacatctcgtgaggtgaggcaaggaacactgactgctgcttaccatcctaccaggcatggggcagcatgcgaaacaacaaattcctgttaactgtaccgagattgagaaaccctggatgagattatttttaaactccctaaaattcaaaaaatgctgaatccaaatgtgtaactacgaaaaaaaagccttacaaagttgctaaatgtgggacatcagaaacctcttcataagccatagctggcctacagctactctgggctgaaagttctaggatcttgaaagacaatttgtttggaaataaatgcaatgtaaagctttcaaagcagtgcctactaacctcacactttgcgcatcacggtgattaatgtgtaactgtacccttcacagcttcctttctttgttctctcgccctttactccacagtgatgggcattgtttgttttggacacagatgcaagccagttctgaaaagacggacaattatattctccttgtcctcatagtaaaagaataaagtggccctaaagattactaatgatcgactgcagtaaaatagatgggcatcaccgattcacacaaaacacaaagaccacagcaactgctgaagtggggacgctccttcgagttcttggtctgttaaccttaacagttcctcttctaagctgaattgcatgtgtgaacctgcccaaaaacagtcacatatcttctaggaataaaatcacagcaacctatagttttagaagagaaaggggaaaaaaaatcattgttctaaccattctcagaaattgagtgcataaaatatagacttggaagtactatgctggcatctccaataattcacctttatgatatcaaaggccaagactaaaggctataatgatagagaattaaaggatattctttgcctttgtattttctttgatacatgatcataattataataaaatgaacagctgaaaggtcagtgcttaaattttcaatagaacccaaagtcttagaagcctacacacagaatcccaaaatgttaggaattttgtaagatttctttcctgagtaagcttgtcactagttgacacaaaatcactcatcctttattcactgggcatctaacatgtg

SEQ ID NO: 65853 - DNA, 2754 bp, Homo sapiens
taccctttctttggaaactgagtgagagcacactgcagaggttaaccaagctgaacatttcttgtgaccccaatattgtacagcaaagtgctaagtgattctgcagtcaagggttacatgcaatacatcctcaatgttgcctcacatctaagagcataattaatagcagttttatgttcatcttccttcctactcaaccattacacaccaagtcagtgtagtcgaatccaatccctttggatactccaagaaaaaaacctctcctctttcaaccgtttctcctaattctgtagtaatataaggaatgcattccaagtttttaatattaccaagggccaaaaacaactctactgtacccaccacctgtttgtcaccttaacctttttaggtggaatagattagaaaaccgaagagccacactacacttatttcagccaaggactgaaactggagcctgccacaagcatcttctagaacagctccaacagaaggatccaggagatgggccaccagcaagtcatagtggagtccaaacaagtgtgaagtgagagcgagtcttcagcatgggaatggccgagtgggtcgtggtgaccagctgccttcctctgactgttaagtacagcagtctcaacagtaacaatgaccaggccttccctttatttagttccacctcggggcattggcgcattaagaatgtccctctaaaggcatatgtaagataaagcacacttcgcactttaaccagtgactaagggagatcaaaagcaggggacaatacccacccggaatttgcgacctcgcgaaaacgctctcaccaatcccgcaggtaagtgcggcgctggcccaggtgtgcccagctcgactcgcgtccacctgggaccaagcgggcccaagaaggcccggagagcaggcgagggcgactgtggccggcgcgccccccgcagttccaggcggtggcaggagcctgagagccgccgtcccaggctggccaggcgcccgcccgccctgcgcgcactccctgggctcccgctcccgaggctgggcagaactcgcagaggaagacaagggcagaaagcgggtggagggaggcagcgctcgcccgtccgggcacacgacacttgtcggctgagggggacacgcgggcagacgggggcgttagccccagaggaaacaaaagccaaatgcccaccgccgggcgctcgatggccggaggactgcctgggggccctcaggagtcccgtcccgtcccgctcccccggtcccaggctgcgctggctccagggcgcccaggtagccgcgcctggcaccccgaccctgccctcgcggctgaccgaggcgccgggctctgcggcggccgcgcccgtccaaagtaggcgacaagtgaggcagcgcctctcgcggggagcccggcgcgcgccccggcggcgaaagagaaagagaaagagcctgggccgggaccggggctatccccaaccgccaccgcccccaccggcccggccctcgccgcgggagtcgtgcaggcccctctacctgcccggggatggggccaccccgcgcggcggcggccgtgggcacccacgcgggctcgcgaccatcccacgcgggcggcggcgtccttcttacccccagcggagcggcgcctgcccgcaacgccgaccgagctacaggcggggggcgagtcggagcgcgaggttccgccagcccaggctgcggcgccgctgccccgcggtgcccggcgggaggggcgcgagggtgcacgcgcggggtgggggcgcgggagccgccccctgcccgccccgcgcgcatgctcccgccgcacctgcctcgctcagtgttccacaccccggggagccgggtggcgctgggcccgccgaggtcggggctttcccatgggagggaggtggctgcggcggaattttcagatgcgtccttctctgtattcgttccctgggaaggattcccccaaatcttggctacttcctgcctgccagcttgctccctggcagcgaagtcccagtagctcacccatgcttcatcccagctcttggggttcaccgtctgaaggctctctcctccggatccctctcggtcctgctgctcgctccgattttgcaacctcccccactcccctttcctgctcttgactttgctactcacgagtacctggataccatttccaaataaaagaatactctttccaagtggcaagcagtgtttactgaccctgttctaactgcttggaattgagcaggaaacaggagctgggtagatcctgccctcatggaacttatggccttactggctagctttggcctttctcaaagcattgtctcccagtttgggaggactgtattaaatcatttattttggcttacaaataaaggtagctgataattgaagactatatgttgtgacttttgaatgaaatgttctttcataggacgccttgtgtataaaccctagtatgcaaataataaatagtaggtactaaataagtattagtttgttgctttcagcaggaaattgaatcatttagcaggattaacaatgataccatccaaaatgatctttttggtttgtcgtgggctaccataaacagagaatgaaaacttgctttttaggtgagactgggcattgttgaaacataatttcgtgtccttactgaaaagagaaatataaacccctttgctaatgaagtttttaaactaggaacaatgatcatagaaatttgtaagtgcaaacacacgatttgtg

SEQ ID NO: 65854 - DNA, 977 bp, Homo sapiens
aaatgttcataaactataataaagacaataattcagctcttctgaaaactgcaggcagatagggtacagtagcagacaggacttcggaagtactgggtttaagcccagggcaggttaaaggttgtggctgtggctttgaacaagccacttttgcccttctgaatctatgcagatgctttgttcatttcagaagcatttctagagctcctactaagtgccaggcctcatgctaggtctcaggcatacaagggtaaacaagacaaggcctctggcttcataggttatccaagaaccttgaaatggttttgaacttttgggatgaataatgctggaaattagttcaagacaaattccctggagattttaagtgtgaaatactaaggattacacaattcactccctgcttagcgtctaaggaggaatcgcatttcaccctcgctccctgggaagtgcgtggccgccccagtcctgggtcccgtgctgcctcagcaccatctgctggctcacgagggaagggcctgcagggaggtcctgcggggtcggcccagccccacccaaggaccgccttacagacctcctggcagggaccaatgatggctggttggccaaaataactcttgctggtgaagaaagctgggagaaacatgacgtctgaagggttactcgccaccgtctggcgtaggtgactcagccaggcaggacctcacacagaggaaacattatgattgctctaagtactgtaagaagagaattattattttgttgtgagtgtatgatccaataaaggtaacaatatacagaatcacatgccctgtaggtgagactccaacccgtcctagacttactggctgtgtggagatgcctgggagagcgtggcagggctgcagcagctcacattccccacgtacctgccctggcagacagcctgggattggcaaatgcacaatcatattcaccaggtgaagaaaggaccagga

SEQ ID NO: 65855 - DNA, 1182 bp, Homo sapiens
tagcagatttctcttcggaagccatgaaggctggaaggaagtggcataacatttgtcaagtacttaaaggaaagaactgtcaactgtgaattctatattcagcaaaaatgtccttctggaaatgagggggaaataaacattctcagatgaaggaaaactaagagatttgttgctaagaaactgacccataaaggatgactgaaggaagttcttaaacagaaaggaaattataacaaggcttagaacatcaaaaaggagaggagaacatcagaatgggtacaaacagggctataaactatcctacttctcatgcattttttaaatcacatttgatgagagaagcaaaaattacatcatctgatacattgctcagtgtatgtagaggacacacttaagacaattacattttaaaatggtggtgcacccccactccctaagtggtctatgcagagtgacttccttccaaaaaatagtgtgtaaaaagggaaaaagcaactgtacagccaagaaatctgacctcagttaggtgatcgggttaatattaacagtgatgagtcatgttgatagtatgttgatagtatcaaggtacacccttgatatgataaaaaaaaaaaaaaaaacagccctttatctctgtggtcttcctgccaagaacacataattccaatctaaacatgagaaaaatattagaaaaatcccaattgaggaacactctacaaagtgtctgagcagtactccttgaaaccgttcaggtcatcaaaactaaggcaactatgataaattatcagagcagtctaaggagacctgactactatattagtttcccagtgctgccataacagattaccacaaattgggtagcttaaaaggtggaaatgtattctctcataattcaggagtccagaagtctgaaataaagatgtcagcagggttgattccttctaaaagctcagcaggagaaactctgccatgcctcccgcataacttttggtggttgccagcaatcttggcattccatggcttgagacacatcatttcaatctcttctcccatcttcacatcatctttactcattttaggtgctccctaaatccaggatgatttaatctcacaatctttaattacatctgcaaataccctatttccaaataaggtcaaattatgaacttcagggtgggcatg

SEQ ID NO: 65856 - DNA, 3287 bp, Homo sapiens
tgtatcaccggtttgccttctagccagaatcattgctagaaccctgtcactcagttactttggttcctaatttaacctcttcccaagccttctattgcgttcagttagctaggccaggagcttacagctgtctggttggtgctggctcaatgtgcttattccctggaagatagaaggatcacttacaaaaaaatttacaattaaaataaaaaaattattttttgctgaagcattgtaaggtttttttaattcactcagacccaaaatcgtaaaactaaaatatttcaagacattacttgattcaccccccacttctctttctcccctgtttctcagcactttgcaccagatacagaaaccacgggttatgtccaaaccctggttttggtgtgaccaccgccttccgtgtactgcctgcggctcgcttcgggcccacacgggacaccgaggcatgatgaggacgcagaacagcagaagcgcgccctgcttcccgggcgccagtgctcggggccagcggcgtgtacccggcgggcccggccgggagcgggctggcgatcgcggggctcggcgctcccggctcccgcgccatctcccggcgcccgccaacttcgctccgcccgcggcgtagagaagctcgcagccctccggagcctcagcgatctcctggctcgcttttcccgcagccgccgagcagcgcaggcccggcgactccgggtgcagctggccctgtgcggtgacatcgccgtccggcgccaggctcgaagccgcctggccgcgcccgcggggtcgcaggccgctggtcccgcccggccgcgctcacaaactactcgcggctcgtgacccgggacaaacttctggcggcggcgcagcctcttccacagtcaccctccccagagccagctaccaaaatagaagacgcggccggggcgaggaggtgggcggggggagcccggtggccgctcctccccgcgcggctgacgcccgcttcggcggcggtagtggctgtggccgcggggccgcccccagccgagctcccggaggcgctcgggcgcgggccggcggggcacgggcgctcacgccctctagcgggccgcggcggcgccgggcggccgtgacgtgagcgctcccttcagccggcctgcggggcaccgccagtcagtcggggagcaagagccccgcgcgcagccggcgcgggctcggtcatcggcgcgccgccgcccggggctgggcttggggctgcctgtggagaggcggcgggcggaacgcgcgcggccacggccacggccaccgccacggccacggccggcagctcgggtcccgggtcccgggcaggggaaggggagaggcggcgagctcagcaaccggaaccgagggaagattttggctccgcgggctcgccctccgctccctctgccagcggcgccagacgccgagtggggccagggacaggggaggaggacccaggaccctgtgcccgcgcccctggagccgctggagttcggacttctgcaactgttggcactttgggggcttggcttagcgctctgctgtttacccgtctctcctcgctgcctcggaaccaaagctcccggccccctccgccctcgcgcgcccacccaccgccgccggggagcggcccggcccgcactcagcaccatgaggggacttgggacttgcctggcgactttggccggacttttgctaactgcggcgggcgagacgttctcaggtaagcgggaccgcctctgccgcccccgaggcgcgcgggccggcgcgggacgcccgggacgccgacagctccctggtggtagagccctaaggctggcgtcggggccgggcggggggcgcggcgggccggacaccgcttctgcctgtgagccgggcgctgggcgaggggccgtggggctggcaggcacccagtcctcgggcgggcggagcggacggaccccgagggcgagctccccagccgggactgccagctcggccgccgtccttccgcggcctgggctagtgctcaaggttgggcggcttgcactcttgagtccctggccggctgcaaaaggaacagcagaaaactttgcttgaagttcccagttgcagccgccgggccgcctggcgtaggcgctgcgcggtccccgccgaccccgagcagcggccgggcccaggccgctggtgttcggctgcgcccgcagcgatcgccgggaactggcggccgctccggcggcggcgatctcccggtgccctgccctccctgtcgccccctgcccggcgcggctggcgaccccgggaggtccccgcggtcgtgcagcgtctgcggagaggctggggggagttcctcgccggtcccagcggtagggcttggcggccgcggagggaagcgggcaggtccccaggccctggccacggccctgcgccccgctgggctccccctccccaccctcgtccccctagcggagcgccgcggccagctgcaacttgttcatccagcccggctgcccgggggtcccaggtgggaaggagaggcactggcggtgtgcgagcaagcgtgtgagtgtgtgcgcgtgtgtgcctgcacgcgcgcgcgggggcgttctaagcccagaggaacccctcacggagaggatctgtggatcggagtcgggggtccggcgtgggggcgaacccggcacgctgtcacaggggtttacaaccaggatgacctttattacctgggtgacacaggtggatagacggcaaatgctggcccatttgcacaccttctttctagtgtttattagattagtttcattaaggtccacatgcagtgggggcggtgggctttctttttctttaataaaaaagcctgctctttggtcttaaacttggtttttgcaaaataggtctctgcgtttgggaacaagtgagttgaatgagtaagttgggctttttaagaatttaatgaagaggactttcataaacagtaaagagcatattttaagcagtaaaaacctttggtcctccggtgcgtggaaacctttttattttcttggggtccaggaccattggctgctggagctctggactcacaggcacattagttgtgtcttgtgtgttgctgatctgcaggacccttgatcacagttggcctcagagaaggagtggaacgtgtaggttttgaaacccaaagcatcaacttcaatacagaaatatcctttctccaagttttgtgtttccctaactgcctggtaattgcacgtgctccagaggatttaacacaatgatgcactgtcgtctgattataaaactga

SEQ ID NO: 65857 - DNA, 2019 bp, Homo sapiens
ccagccaaagcagaagcaaagcatttactttttatgggctgcaaagcataaaagcttatagagcatcagtttttcagatgggtgaatattcattttaatctctctttctattcaatatgcagaaagcagatttattgcatacaatgagaagagtgcatattagtgtgggttactctgggagtctgaggccccattacttttccctggcttctagctatggaatcaaaatgggctcacaggtaacaggtaggctttgacagagggtgagaaggaattggaccacaccctttgtatagtctgtgtttttttgatttttttttctcaaggcgtcttgctctgtcatccaggctggagtgcagtggcaggatcactgatcatggctcaatgtagcttcgacttcctgggctcaagcagtcctcccacctcagcctcctgagcagctgggtccataggcacaagccaccatgcacggctaattaaagaaaaaaattgatagagatggggttttggtacattgcccaggctagtcttaaacttctgggctcaagtagtcttcagcctcccaaagtgctgggtttacagatgtcagccactctgcctggcccagcctgtttttgatggatactatttgttctctcttctctgtttgagtagcttgaggtactttacatcatgtaataagcacatgcttaaaatgaacttaaaatggactcagtgtgatgttccatctagatatacaattataaggtggtttaaagcattccttttaacatactcataatgtgtaaaaccagattacttaacaattttagcatgtagtagtcactcaataaatatttgttgaatgaatgaagaaacaatttaaagaagctcccttggagaagaaaaaaatcaaataacttatgcttaaggctgttttttttttcctacttcctatcaagtttgacttaggtatctccaataaccttaacaatagaaccaggctgtgtgtttagtgcctggtgccattagcaatttataggtgtatagagacacagttgctaaatttaaaggaaaaagtattaccttttgttaattaaatatataaaagtaagactgtagttttattgtgtataataaaaatgtataaatcagttattgctataaagtagcattttgatataatactgatcactaaaaaatgaaatttactatgcagtagatttatcatgactgtactctagggggatttgatttagtcactggtatattaaaggaaccatggtatcaccagaaagaagattccatgacagggaataatatatattatctctgctgccttttatttctgatatagaatgaaatgaattatacctacacagagctcagacagcatcatgataacatcaggctcatcttcattacagcaggcatgttctcgttcctttttcattcagtgtatcatactctcaagtgataaaacttaataaaaagaggctactttgacaacaacctcataaactgtgttttctacttcctcaacttctgaagtcttgaacaccaaatgtggtgtaaaatttccaccatgagttcaggtcattggctctcattggcattgtgttctgtgtgtgtgtgtgtgagggaggttctccctcgtctctctgtctgtcatcattttcatcccaaatgtgtgactttttaaagagcctctgcttttctttctaatcttgctcagtaggcaggggcccctgtgagacagctggttgagaatgcttggtatgtttggagtgcagcatgctttgtcagagagggacaggacacagtgggggtctgaggctgtgacatcagccatggggatccctgagctgttgaaagaagggcagtagtagcctctggttggatcaggtcttcctggcattgagttctccttctacctctaagtagccatgagaccttgggtgtgttatttcattttaaaataccctgcaggatgatgatgatgattatgatgatgatgatgataatgatgatttttagaca

SEQ ID NO: 65858 - DNA, 853 bp, Homo sapiens
attatacatacaataaagatttattgaaatgagtcagatagtgtcttcttatttttgggaaaaaacatagttttccagagtaaatttagaagttatttgcttaattgaaaaaatataatccttaatcaaaaaacttaattttaaagagggtttgcaccaagcttaaacactggtgtgtgtgtgtaaatatgcatttttaaatgtaatatatgtgtttctttctcctttccgctggtataagcatttcgtgagaagaggataatcatcaaccgcttgagttaatctgggggaatgtctgggaagtgggaagttgaggaatgccgcattgttgaatacattgagagcatttctggtttcaatttggtttacctactcttggtctgggagatctggaatgctgccctggactttcggttttgtgtgaattggctctgaggaaaaggattgctagaattagctgttggaatgaggagcggcagagactgggctcttgagaagcgagtggactggaatctgttctctgagatgttgccttgaatctgacttgttgatgacagacccatattggaaatattattccactgttaataagaacattttattttcacatgcaacttgttaaatatgtagccaaaaatcctgaaacaaaacaaaccccctctccactcaaaaaacttttctggaagtggttacttaatagtgcacatttcaatagaccgttgaatgaaacactaagataaagaaaatgttccctgagggaagagtcctgagttaatggcttagaaaggtgttgtaatcaactaagttttcatgcctctttcttcttctcattactgccatttcccttattctg

SEQ ID NO: 65859 - DNA, 2118 bp, Homo sapiens
gtggtcagtgtgtgacattggggcccatgagcctgggtttgaaacccaggtcctcggcatccagctgaaacagccgtttcagcctctcagcttcattttcctgtaatatagagaaaatacttcctactgtgaggctaaaatgccttaacattcataaaagcatctaatgctaggctcttgtaattttagcaccttttcctctgatgacattcactgggaaaaggaaaggctctgtagccccgtcttcagaactaaattctccaaagcaggacttcattctaggcttgcttttaaacaagattatttccatataccatccaatcaggtaatatgacataggaaatgcccttccctctgtgagacatgcactcgcgtttggcaaagactgtggtcaccaccttcatttaaaagggtttaatgatctttggactttagcagactccatagagtacagccctgatggacagagtttaggcagagagaatattttccatttcataatctcatacacagggacctaaattccactatcagggacttctttaatgactccaactgtcagcctggacatgagtgacctgaagaacctgtatggagagtggaaggggcatacagatgacttctgctggtatgaccctctcccctctcccagccacacagctggtggcttcacaaagagctaggttagcagtgaggttgtcctgtgtacaatttcagtgccccttgctcagggtctaagcctgacccatgttgctgcagattgtacactggggttatctgggttatttatttatttttagagacaggatctcactctgtcatccaggctggagtgcagtggtgcaatagctcactgtaaccttgaactccagggctcaagtaatccccccaatttggcctcctgactagctgggactgctcctgagtatctggaactcctgtgtaaacattttaaaaatttaaaatttttgtagacacaaggtctcgctctgttgctggggctggagtcgggagatttttgacacaattccgtggtttatccaatccatgcctgcacctgggagtgcatcacactcagctcactctcccctcggcactatccccctctgcaggtggcttagtgtccttcctccaagcagagggacttccctggtctccttcctcttctcgaggttctgggatgactcacactgaaatattggtggaatgagaatcccctgtggaagttgttgtttccatccctgccatttctactcacctcctgacctcactgacttgcacaaccagccaccctgtcattactctgggtgggacaatttcccttttcaatttttggttatcagatgttaccatccttttgggcctccggatatgggccttttcctttgcagggttatagctgtctccctcaaaggcttggtttagtccagcagccaggcggggaagcattttattcctctctgtcctgaggcatatgtcctgaaaccattctgttcttggcctcctcagcccttgtatgagatcctgtcttcccagagaactggcccttcccagtgaccacccatctttggggtaaaggtctttatcctcatgtttcaggacctgactctgggccttagggtacatggaaggagggagatttggggacacagaatgcccagtaacctgcggtgaggctcggttcattctaggaagtatttaggaagtattttgcaggccttgtgctaagggaatgtgaagatgagaaaattcggcgggcaccagaggcatgggagttgagtacttggctttgccaatgttaaatgcctccttcaacatttcagacagggaatttttgtagtggagagtagagctgaactttaactcggtgatttttcctgacagaaggtcctctctaaggacagcaaggaaatcaacagtagcagttagttaggaaatggggtgttgtgcggtgctacagtgactagagtcagaaggagttccattgattccaaataagaggccctgcacaaatggagattctgatgtatgcagctctctacctgtgtctatttgaaaacaaaaagccaccttattttgtctaaaataatttgaagaatttttagatggccacatgac

SEQ ID NO: 65860 - DNA, 676 bp, Homo sapiens
aagataaattttatttccctttatatcctgtaggacatcacaataaaattttgtttggtcaggcttttcttatactgttttatttcttttaagcattgggattcttcatactcaagataaaaaaggaagtcataattgcatgttatgatattctttgaagttatgttggacagcgtccacagtagaaaaggttaagttcatttcttaatgtgtacacactgcctcttacccactagcattggggccacctcattcatttgtttgctcattcaacaaatatttattaggcatctactgtgtgccaggcagtgtctagtgtctttcaattgtgtttgcattcctcatggtatgttttatattctttttctttcttctattctatgaacgtttctttgggggatatagtaggttcttaataatcattgaattaatgcacattgaaaaatctcacaaaggaattcaggcatgaataagcaagatggacttgttgaaagttccactgcagttttggacttgagtacaaatattgaatactatgtttcatagggtttcattagaacagaatgcgtttacaacttttgaaaattttctggtgcttttccttaatttaacaaataatcccacacatgaatcacatcactgttcaaaaatgtaactttgtattttgactaacctt

SEQ ID NO: 65861 - DNA, 571 bp, Homo sapiens
tttcgctcatgctggcttgcacttgccttgtttatcaagaagtctctttcccagggaacaatgaggatttttaaatcacattcctgggggaagaacattgtgttgtcaccctttcattctccctcccctcccccagttttactgaggtataactagcaaataaaaattgtgtatatttaaggtgtacatcatgatgtttcgatacatatatacattgtgaaatgattaccacccctcacctcacatagttaccttttattatttgtggtaaggaaagttaagatttactctctcagcagattgcaaggatacaatacagtattatcagctgtagtcaccatgctgtacattacatccccagaatttgtttatcttgcacaactgaagcttcatgccctttgaccagcctctcctggtccgttcattcttaaatgctgttctgggctctggggtgactcaattgtagaagctatacagcatttgtctctttttctccagcatgatccctagaaagcctgagaatctattaaaaacattgtggcttcctaaaattaaagtaaatttatatata

SEQ ID NO: 65862 - DNA, 2302 bp, Homo sapiens
cttagcccatgttgtatggttgtgttttggttttctatttcttctttactcttttcatcatataccttgtagtttttgtcatcagtgaatgatttttgagaatcctaatgtgcacagcattctgctggatcttgtactaagcagtttaaagagaccctgtgcaattacccgacatttcctgtgtgcttcttataggcagaatttcatagaatacaaattatcctcttctaggtacttgaatctaaaacaaatatggacacacagagcaagaaaatagctgaacagtgagtatgtgaagagtaaaccaacagacaccaggattattcaccataggccagccttctagctcccaagatgttccctccctgccagtcttcattgtctctcagtattgagatgtcagcctcctttccatattacctggaataattgccaagcagtcatgccacttgaaaatgaggtaacaagtcctttgattgaactggcagtcccactccctgtcatagcatccttgtatcagtgttgtttattcatttcatggtctgttctctcaagaaataagcatcaggagtggacagtgatgtttggggggatcccaaggcacatgggaggcagatcttacctctttctgaggaggccacagagagctggatagtccctctgtctgctccctggtagctggaatgtggatctgtgactccatgcagccaactggaagcttaatgcagggaatgtgaactttgaactagttagagattattcactgtgaggcttttgcaaagggcacaggctggatgagtggccgtgagcgtccgtgttcctgagcagactgtgctgtggcccaatcctgtgcgtgtctcctcttcaggctcctgccggagcatgcttctctaatcttaccatttatcactgacccttcggtgaaactctcttctgtttaaatttaccagggtacactttgtaatacttgggaccaagaatttgaagatagtaatcagacaaatcaaacaactagtagtagtggagagacacgtagccctacaggaaggggtagaattatcattaaaaacacagacaaaccagagactgcctgaaaaaaaaaaaaagatgaactggaaagattcaaagtaggctctattggaggtgagtatggaaaacaagcttagctttttattttgaagtttccttccaggagttggatactgtgatctcttcaatcagcatgtttatatagtgaggaggaagaccagaaatgagaagaggaataagaaaatggcagcacagccttttggggtatggataagggtggtcttcctgctacagcagaggagaggggcatgtgtggcccatgtggaagagcaactgagttggtggctgactgaatttgggtccgaagcaaaaataggatatgaggataggtataagaattttattttgtgctatgtgtgtcatttggcttttaaactgtctagaaataaaatgagatgaaaacaatctgccctcatttcttggttgcttttcttaaatatcattggcccaaagcatagccaagccttttatttagaaaatcctaccttcaaaaagtgataggttacactaattatatttgtgctgttctacagattttctattttgcactggtcctttacctgctgctcgctgtgcgggcagctaaggtgagagtttgaagactatggacttttaagctgagaggctgctgtggtcatacagttttcaacacaaaacttgttctccctctagtgttccacttgcacaggggtaagttgcacaactttgttccattttgaattctttgcaagatttgtcttcatttcctctgttgtatcagattcctatatttccttgtactgtttggccaaactccattgttttcatcttactgagtggaacagtagatactgttccagctttgatattaatttcctctctagtacagcaattccgagtctggagtacattagcatttcaattttgaagagagattttgatctctgagcacccttgccttgtgtctgttttcttgatggttccttgtggttgctttcagtgttaggttaggtttctccagttaggtttctgatgcagattgaaaagcaaacaagcagttaattctgtgcatccctcattcttctgtaaacatgcctagtgcagtgtattgcctctccaagtgctcttgcttaattaacatgctttagtttgtaaaggattgatttgtttggcagaattatccatagttgattctgggagcaaattttctcggatatcaatttgaggaaataaa

SEQ ID NO: 65863 - DNA, 628 bp, Homo sapiens
tctctccttccataagcaggagcatattttataagctgcttttctctttctagtcgaggtacctggaggcagccccattcacatttgtgggactgatggtgaatggtattttgcagtggaaagtgagcctcttaggtcttaagctccatgggtttaagcacaggaggggcatgagctgctccaggaatctcctgcagctatttataaaaagatggactctttctcttccctaggggacagagtatgatggattgtcatggcagtgtgtgaaaataaaactctacaaagcagcacaggagagctgtgtaatcagtctggaatttaaaatatctacttgccaacttcaccagtgaatgttgaaaactgagacttggaaagtttttttttttttttctttgacagcaatacttgttcaaagtgcactggcttatgatggagaaattgggtctggatggtctagctctttgaagagtgaacattaagtgccactgcacagtgtatgaatgaggcatgaaatgatgccatcagagcagcagtggcgcagaggtgctgggtggatcttgtcagtttgaggttgaaccgaagcacagaagcacagaacagggtatgtctaaaacctgacatggct

SEQ ID NO: 65864 - DNA, 565 bp, Homo sapiens
tgttatattattgaaatattaaaagcatggctgtgagattgctcttaaagatatctcaagtcaaggggacctataaatctcacaatattataaaggatctgcaagaccatttgcaaggcttcttagtatatgtgaggcttatgaaatggaattctttcatttggccatataaaaactttcatgtggtacttccaaaacatttctattttagcagaaatgagattgctctttcttagaaaaggatttcctaaccagagtcctcctgtgttgggaattggaatctccctccctctctccctccctcctttgtttacttatgtatctatttactttccccccttttttgtgtgtgtcagacatttcaatgtttgagtattgattatcctcatttttttaatgttcaagtggtaattacattatttaacaaatattgtcctatagtttttggaaaggatgttctaattaacttagagccaaatggcatacctcctttctcacaactcttatgagttaaaatctcgttaacctaattcaatatacttcattgttttggtaaatttaatat

SEQ ID NO: 65865 - DNA, 3096 bp, Homo sapiens
ctcatggggataaagtagctttcaaactccaacaataatggttagttttgacgtatctgacctgtttgtgtgcaaagtgggagttcgcctccctggaatgccacttaaggcagcaatgcagctcttgaaagaagttttataaaagcaaaacaccaagctgtaaaggacaaggcattttaatgtgaactgctattactttcgcaagagcccagttgctttcctagaaagccataatgtgattcccaacaataactgtggacatgctgttcctcctgtggttaaatcacatcttgatttcagctgtggagcactgattaatccttctaaagtttggacaatgaatgaagtgaatgaagtttggacagtgaataaagtatcttcctctaccctccaaggtattgatggtcactatttgcatttgtgtgtgctctacagtttctcagtgacagtccagttcagttcttaatttaccctgatgatgatcctaaacttgcgttagccattgttttctgcggtgccattctgtcactttggcatttgaatatgtctgacatagcaattacaacttcgtgttttaattacttaattacacagttgcttactctgttagactggaagcttctgaggggccgtggacatgtctttttcatgcccaatgtcagtgtctgttcactgtaacaggctcacaaatgtttgtggaatgaacaaatgttgaatccccagcctgttctccatctgtggcctgtcttaatgcctcatcctggaggactcagctcagagttccctttctctaaagagctgtcactagcaccccacctccctgagctagcttcagtgccacttttgtgtgtgccctcagtgaatgttgaacgagggaggtgttcacaccattgcaacatcactgtcttcctgccacacctgacttaagaatggggcttgagttattatactcaactttgaatcagtggtgcttacgacagtgcctgggcagtgattactcaatacatatacacagtacattttaaagtttgctgtttctttttagaataattgtgtaaatgataaagaagaaaaaattaaagaaaaagtgtttctgccaatgagatacataaaaggatttaaaatgcctctgttgttattttttgttcatagtgcattgtggtagttaattcaactaattgagtgccaggcatatctcagattatccgtcattggtgatatagatgtatcaaattactgtttctgcttttttgtcagataaaattcagttgtcagcataaactggaatcatgtaagtggtgtaaaagaaccaccgttctttcacatattttaggctaagaatcattttggacaccatcagctccccagcctctcagtatccattcagacaaacaatcctttgattgtaactcaagatatcccatttatccttcccacttcctcatatcactgccttagattaccattggtctactattcccacctaatattttctcttcatgttattataaaattatattattgtgcagttattattcatattattttgctattctacccagtgtgtttatgggtacctggtttgttttttttacccggattgaaaacgattacttgaaagagttatttacaaaaatactggttaaatgaaagaaaaattagccttgaataaaaatacccaagataatcagtggtattacttcttgtacatttcttcccatttccttgtcggcaacaataaaagtgccatttatacaggagtgaatgttggaagtgattcacgtggcatctcttgacagacctgtggagggcactctgtggaggcagaagatgaagagcacttagtatcgagtgcctctgtgagtcatcacagatatgcttctgaccttcagaccattttggcacttaatagataatgtttgtcttctcttgggttgtgtaagctcagagaattggtcatctgttttgaataatttgatcttaaataacatttttaagtaaagccacatgagtgttattatatcattttattgcattaggaagcaacaagaataaaaatatcctctgggcttctgaagagatccaggggtttatttaattgtttatattatattaaatgtcttacttaaaattcatgtttttcaatgaatgttggtagtttttaaatgatagattttattttcatctccttatcttgcattctgtcactaattcttttgtttccttgagaagaaataatagaattagttttggttccatactgtcatcataagcatagtgagttttaacttttatttttaaataagagaatagctcatgtaatttgagaatcgattaattttactttttaagacttataattcaaagctgaagatgaccctaatagcttctaatgcacttttttttgttctctttttaattttctccagagagcatatgccaccaatatttggttatctgactctgagatgtgctatgaaaccttgattatatgttagactaaatcatcagctccagaatctgactgactggattacaatctgcttttctgtgtgaccttagggaagtttttttaaaccctcctggttataaaatgacaatacttctctcaatggttaccgaagggaccaaatgacataaagtgcttagcagagtggctggcacatagctagcactcagtacaggttcggtaacaacaagagcaacagtaacaccaccaccaccaaaaggagggagtgggggaagtcaagatgattgcttgtgcttagaacagaggatgccaagagacttcttttcttttgggctggaagctgctttcacattagccagtcttcttttctttgaagtaacagggccactttatataactttatataactttatataaaccactgaccatgatcattaataaattaaaaaatactattttcatgtctggagcagttgcttagtatttatattcaataaatcaaaaccctggaagattaaaaatacatataccttttggctagaaatctgacttgtaggactctcttctgtagaaatgaagaccattcacatggctctttattggatgttctttgtcgtagcaggtgt

SEQ ID NO: 65866 - DNA, 3468 bp, Homo sapiens
ctgagccatgcatggctgatcttggctgggttcacttttgcatctgcagtcagctgtcaggtcagctggtcctaactgggaaggctgaatcctgctccacattgtctcctgtcctccagcagtctagcctggacctgcccccgtggtagtgagcatgttcacatgttgttcctttctctgctatcttaggtttatttagctctgctatcttaggtttatgaataaaattagatattatttatatatatacttacaaggatataatgttcctcctgaagttatctaactaatgtgctgccccttaaactgagaggcagcttagtatcatgcttaagagcacaaagtccagagcacatttccctgaggttcatattctgtctccaccacttacaacctacatgatcttgagcaagctacttaacccctctatgcctgagttctgtccttgtctgtaatgagtaaaagagttaatatatgtaaaacatttggaagagtgctcagcacgtattaaatatcatgtaagtgttagctattatcaattcccatattaattgttaatatagatatatatttaatgatttgaaagtttttaataattggttttataagtataattagcagctttcataatcaccattaattattgtatccttttgctcttataattaaatatatgtatttataatttaacagacttggtagcatctaagcatttaaatcacactaggagatttttcactccacgttgcacctagaatgattatttatatttgaaaattcatgtttagatattgaagataaattcaagtgccatgcctagtttgtattactgaccttgttatgctgatttaaagatggatgttggtaacctgtgtaatcgcatgatcattgatacacataaattttatgggtgtaagaaatttccttgaagtaagaactctgttatcttgtcttctaggctaagttcaaatacatttggataaaaactgggaccaaggttgaattttgacatatatctattctatgccagtcacccttttaagaagtattttacgtgatttaccttatttaatttattcaaccacctctttgattaggaaacttgcaaaagagagttagttcacttactcaaggacatacaaggtgtgactgagtcaagatcctaattcaggttgtttggctacagagcttagcttttcctaccaagctcagggagccctcctcaggtcctgcccagcacagtccagagtactttgcttgctttagtccaattctttcacagtaggcactgtttgtttttgagtttatggacgaactgactcagattgagagtgattttcataaggtcacagaactagcaagttttgtaaggtgagatttatctaccagcctgctcttggcaaggagtgtgactctctctgtggcctctgctgttgggatgctgtgtgtgataaaatcccctgcttctttctttcctgaacccttgcaggagcttcaccagaacctcacaagcatatagtgttgaaatgtttatgtaattaagaaatttatccatgttaaaattatacccagcatttgctttaatttaaatttcttggtttagtggtaagataactattttcccagacatctccattctaattgtatttctgctaatgcagattgctttttcatattatttgctaattatttattggtattttgatgctttttctggttaattaatccaacagattacttaaattccagacttttgataatttataaacttgatactgtgttgttagtttaatgtggacaccgtttcattttctccactgactcaccttgttaaattttgaccattccttctttctgccttctgatcaagcagtgaaaattcctgcatgactctggtttctgaccctagttgggctaatgaaacatcctttggcttcttcttcaggaatgtggggagctgtcaatcagggatgtcaacagaacccttggagtcttttgaactgttttttaggacaaaggatgatttagcaagcttcttctgagtaccactagcaagtgtttgaatgtgtcaaagacagacctttaaaatatttaagtttggcctgcattttatgtaaaagctaactgcacaatttcttcttaaggcaagtcatagtttagctggtagactatcaccagatagctctgatctgcagaccatactgagtagcataggcttttttttcacatgtggaaaaaaaaggtttctgaatcaacactaatttaggggaaaaataaatggaagcttatattgtgatggcttatgtcattctgagatttacaacagaaactaacccgtttctaaagatgtcaatcaatgaaaaacttgacgtatgggaaattaaacagtctctttagaacgttctaaatagtcaacctgtcactactcaattgttgtatgtgtggctcatttcctgagatacagtcattagcgtcatcagatagttaaaaggttgtgtttgctttactcagtgtttgttttttacttataaattacaaagctcacacctagtattttctacctaagtcactgaagcagtttgtctaaatgacacactgtaatacaatttagttctcattaaagcttcccttttcttataaaaggagagcacattgcttgttactacagaacccaccgggtttcctctctgcagtgagcctcttccaatactgctttgtctcttatgataactgtgtttcacaagtcccttttaagattgatggtcctaaatccataaagtttacagccacttctggttgttacttatgtaactgttggtgaacttaatgatctgatttgctaattctgtgaatctctttttattctttctgtgctcagtgaaaacaacttaaaatatgatatacaactaaactgtgaagttcttgctgcaggaataggtccaagtttgtctcgtttgtagttctcaaagtgccccaatacataatgggtgctcagatgaatcctgccatggctaaaagtgactagttaaggtgaaataatatatttttcttcagctcaatatttttatgaataataaaaatggccgttcagttgtgctgtgaatcactaaattgacaattgaatatctttttggtatttaatataaatgtcttaaagcaaaggttataagcacatctgaggtatatgagctgtgcttattaattttgtagcacctagattcatgtggaattctctcaagtagaacagagtaacgtgaactaaatggcatgatttgtagaatgatccatgccaggatgatcccatcagctgctgtccctggtgagggagtgtattagtccattctcacactgctatgaagaaacacctgaggctcggtatttaaaggaaagaggtttaattgactcactgttccgcgtgactgggaaggactcaggaaacttagaatcctggcagaaggtggagcaaac

SEQ ID NO: 65867 - DNA, 614 bp, Homo sapiens
ctactgatcaataccggatgccgtatgtaatttatgttgttgattcattaactttgaacctatggcaaaggccagtaccactgtaactcatgctgactggagcgcttctaacatgtgtattttttccttaaggctcatcttagcgtccttgcactctcaggagcactagacagccctgaagcactatatttgggttcattttaaaaagcaacgttaccaaaaagaagcacaaaaatggaaaagcatggcactaactagaccacgataaggatactcttttatagtatcagagctgaaacaaggcgacagaacattgccctgcctgacttcagctaggaacatgtgtgttgagcaactcacattttttgctgctctgtgcatgtccgcagataccatgaaagctttgcaagtattgatttttgggggttacaaataaattttagggagtagcaaattcacaaatatgagccttgaataatgaggattgactgtattttctgtcaagccaagtcaaaaaaactaagttctgtgttgtgacaaaattatttcataataagataaggtgactctgtgattctgtcagacccacaacttttaaaataatcacaatttag

SEQ ID NO: 65868 - DNA, 1032 bp, Homo sapiens
cactacattgtgatagacttgctagaattagttagctgctaatggtaaacctctaaatagctaaaatgattgatatgctagatggggaagtttaattgtatgtccatcgttaaattccaaaaatgtttgcaaaatatattggttctcagcgttagagtaagcagtaccaggctgttctttttggcagcaatttgcttccttgtttgtgatgatatgttacacaaatagagagaaatattaactatttttattctggtggttgggcatgcatcccgtacatttcaacctatgccattacattaaaatgtaagttaaagcaaaagggggttaggacatagtcctcttgttccacttcagtttgcactttgatctcacaaattactcttctctgattttgttgctagtatttgtatgcagactctgaagaatcaataataatgaaacatctacaaaacgatttgtatcttggtcaatgataattcttggctttgggatcaaaggcttatttgagatcaattaatacacgaaaacctctattctttcttagtaagaagaaacagaatatggaagcgatgagaggataggagggttgtactaagaacatgtttgttattcatggaagatatttagtttttaaatctcctacaggttttagaagaaagctggcatagcattttgaaagggtatccaggagacaagtgggcctgtaaatttggagagagagagagaatgtttctttttgaatatgagatagattgaaatttctgttctaaaggtggtatacacctgatgttacaattaaagtagtatggcaagattcagagcatacagctcagcatgggatctacacttttctggccatagagctctttttcttgggctcttttccaggttccagtgatagatcagttattttaaatagtaaggaacatttttgtgggctaagtatgaggcacagagaacaccttggcttcatcaacttgtttattctttatatcaacactgcgaaataggtacttttaaaaaatctct

SEQ ID NO: 65869 - DNA, 3977 bp, Homo sapiens
aaaaggacagaaaaatgaaaaaaatgcttttatgctttaactccatccccctcacattttgaatttatgttgtttcagtttgcgtgtttttatacggcctatctcttaacaggttaccatacctattactgtttttgatagatttgtcttttgggcttcacaatacttacgaatagattgcacaccacagctgcagtgttagaatattctggatttgtctgtatattaatattatccgtgggttttatatacttttacatgttttcttgttgcacattagtgtttttttcctttcagattgaagaattccctttagcctttcttgtaagatagatctaatagtgatgaattttctcaacttttgtttgtctgggaaagactttatctgacctttatttttctgtggatagctttagtggctgcagtattcttggatggcaatttaaaaaaaatttccacactttgaaaatgtcttcttatacactcctgttttcattgagttctgttgccatatgaaccctgattcctttatatgttatttgcttcttttctcttgctacttttaggatactctctttgtctttgacctttgagagtctaatcattatatcttttggggtagccttatttgagttgaatctgtttggtgttctctgaactttctgtccctggatatttatctctttcatgttttggaaagttttctgtaataggtaagctttttgccccttgctgttgctcaactacctcttgagcaccaataattcttaaatttgatattttgaggtatttttcagtattttgtagataatctttttccttttcatttttttctttttgcctctctggctgtaaattttcaaatagctgtcttcaaattcactgattgtttcctctgcttgacccattctgttgttaagagcctctaatgaatttttttttttttttttgagacagagtcttgctctgtcgcccaggctggagtgcagtggcgcaaccttggctcactgcaagctttgcctcccgggtacatgccattctcctgcctcagcctcctgagtagccgggactacaggcgcctgccaccacgcccatctaattttttgtatttttaatagagacagggtttcactgtgttagccaggatggtctctaactcctggcctcatgatctgccctcctcggcctctcaaagtgctgggattacaggcgtgagccaccgcacccggcctctaatgaattttttaattcagcaaatgtatttcttagtttcaagatttctgtttttttttgtttgtttgtttctctgataagtttctgaattgcttttctgtggcttcttagagatcagtgaatttccttaaaatggctattttgagtttttggttataaagtttacatatcaccatcttgttcaagtcagtcactggttccttgctttgtccatttgtagaagctgtggttcctcatttgtttttgtttcttgtggatgtatgtctatgtctttgcattgaagggttggttatttattccagtcttcccagtctggcttgttttgttttttattggacatttttgcttagagcttctttgtaatttacctgttgatttccctttttttcctctgctaggttactgcctaatttttggcactagatgacaccttaagccaaagtttgcctcagttatggtaaacaatgagagtgctactttccctgaatttgagaggtcccaaaagggatataccagtagtgtgggaaggctggctaagggtttgtgcagaaaggatgaacaattctcctacagtgaggtgctgcttaacagccactctgatttggcatccctttggccaagttacagagaaagtttctaatgctggggtggcagtcctgctgccccgtacctttttctctgtccttagggatatttctcccttcaggcactttcgatgtttccattgggttggggaagggacagatttcctgccaggcaatccacaatagtggggaaattgtttacccactttgacctcattttttccaatgtagaaattatgagtcagaggaaattttccggttactttctgctgggcagattgggggttggggtttcacagatattgaagtctggttttcttccctctgctcagaaatttttcatgtctctggctcctggaatagtctcatcctcatatttgagttcttgggtattgctggtgataatctctgtgctgtatatttatttattttttgtgggagtgagtgaagccaacttgcttctatgccaccatttcagaactggcaaaaatgcatgtattttttaattagtaatttctaatagtttaacttataaaaaaaaggttttaattatgaaaacttttatcttagcattatatgtagtggaaacaaacctcagtgttcaataatgggggatgtttccgtaaacttgtttatgtatgatatgtattagggtttcttaaccttggtgctattgagattttggcacccgctaattttttgttgtgggggctatcctgcacattttagcagtgtctctagcctctgctttctgggtgccaatagcactgccttttagtagcataattctgctgcgagacaccaggagtcattactgaaaatatttaacaacccttcagcacaggctcagaactgaccagcttaactgagcggggtaaaatttagaatagtggccgcaagtgcaatacccctttaacccaagttatcctgagaaatggctacatacccagacaccttgtgttagagacctagcttgctgtagtaacctgtagctgggggagagcaggattaggtgtctgggaaatccactggagagaccagcaccagggagagaacctgttgttctgagtgtgccagataacttcagcctttaacactccacagggagatggaaggcggcgggggttggtcaacatgtggaatgaggcttcaaggcattgtcctgagatattattggaaggaaaacttttccttttctgatttgggtccagtggttggggacctgcagattaactgacaagagacagattaattgaagaaaagacaaagtttattttcacaggacagagttcccagcaatggaaaacccactaaataaccagagataaaggtttatattccaaatttaacaaaagattggggagtggttttagggcttcagtgggaaaatgtagaaagttctatcaggctttttgatggtaatggcaacaggcagtttgtctacctgggagctgaattagacaactcccttacaggggagttaatggcaactattttttctgggaaagctctgttttagtcaactacttgaagttcagataagatttctttctgcatcttcttttgctcaaatgttttcactttaaaataatctgtataccaactctggggatctgaatgggtccccgtattttccctatgtagaagttccttcaaaaaaagaaagtgggttgattgctgcgcagagacatttgtgttataaattgcaaggtaagagatctataaaagagagcgaatttagattagaacaaggaaacaaaaagaaaccaaagaataatggttggagcaaactataaactcagattctgagtccagaaggcagccagttgtgatttccgggtgttggatttgaagcgtcttcagtgatgatagtagtgtcacagccacggttactccctggagcagaatgtggaagaggcaggtattccagtgggctttctgagtggcccacacagtggtggtgattaatcttttgaagttttatcaagtcatccagcttcagcttgcacagctttgggagtatgcttagaattatttcattggggaattttttttaatgtttccagttaatgacacatgtactaaaatagatttattagaagaaatttgtttaaatttccttgacaagaaacagcttttggcttctaatatattcctatt

SEQ ID NO: 65870 - DNA, 1932 bp, Homo sapiens
aaaaaaattatccaggcatggtggcgggcacgtgtagtcccagctatttgggaggcagaggcagggagaatggcgtgaacccgggaggcagagcttgcagtgagcagagatggcgccactgcactccagcctgggcagccaagtgagactccatctcaaaaaaaaaaagagaatatgcagagtccccaccagcaagaaggccctcaccagatgaggccatttgacctgggcttcttagcctccattactgaaagaaataaatttcttcataaattttagtttcagatattctgttataagcaacagaaaacagactaagacatccagtcaggtcttctcctctgtgctatgggaggcagttcattgctctgtattgtaattattgccttgtctgtttttttttctagccagacaataagctcaattaggtaaatgatggttcttttaattttatgctctcttatatgatatagtgtgtgccccataaaagactgtcactgaatattggttgaacgaatgcctgaatccatgcacacatgaatggtttaatacaaaatggcctgcagatttgagtaagatgtgtgatttgctattcctgtgtagattctaagctaaaacgattgctgcttggtttctcctccctatgtactatttctcttgaagctgaagctgacttttcatgtgattaagtacaggagttaaaaatttattaaaggctcattcctgagcattcatatgactcactagagtcacgcagggctcctagtccgaggctgtttattttatagggcccatctgtggcatgaagacagtgctactgtgagtcatactcctctcagcatatgcataaatccaaaaaggagggtttcttttacttgagtgccctcagtatagccttgaatagttgtgaggggtcagtaagtgcaaacttgaaattgtttttgaataaacattcttttgatagatgcttctgtttggaaaaatattaggagattattacaaaaggatattattacaggattcatgccgcaagtaaatagataaataaatggatagatagccctaaggcctctttggttgttgttagcaaacaaatacttacagatatgcaatctgcctttatggcttaatttcttttcccttcaaaaaccagagatgtggttctttttcagtttggaaagaagactagggagtagtatgtctaagattatccttagggctagaatttgcttatttcctggggtggggtgagaatcagagactgaatatctatggaaagcagagaggaacctttctcctgttgtattattaatgctaaatttggttttgtttcattttttaacttcttgatgctgtctatgagaacaaatttagggcatttagtgaaaaaaacacacacagacttatgtgggactttattttctgacttacggcattgtgtggtataaacaagactgttttacagataatactaaagataatgttgatggaactgttcttccccactcgtgatgtttccttccaagtggcaggaactgtactattgcagcactcctgtctgctttctcactgcccaagctgaagctgcctgggaggaagggctgagcatgcctagcccagccccttctttggggagctgactgcctatgggaaccctctccctccatcctgtgagttttacagcagcactgaacatatgggaggccttgtggttttctagggtggcctgggactgggttagtgagtctgtttattctgtgcttcaggattagcaagcccattgttcctgcactcttaagtcatattcctcagtctcaggtttatcagtaataaaggtggtactttgatagccgctctgcctttctccttgaattcatcactcaggtgttccggcgcttgggcggggctgcatggtggaattgttatggctgt

SEQ ID NO: 65871 - DNA, 3261 bp, Homo sapiens
ggtggtgcgtgtctctctgaacctagtaaccaggttatgttgctgtggagcatctatttcccaagcctggttaaaactctctgagagaatgtgatagaggatgagctgcaaaagtgggtagggcgagttaccctgagctcccccagcatctcctgcagaagcaagtgcagacgtgtgtttgtgaacatgagctgtcatctggtcaacttgacagtgttgttttaaccgtcacatacagaaatgtataagaaatgctttgagaaatttaaaatgtcgtcttaaaatgaggcaatataaattaacactcaaagtcaaatacaatcatttagatcattggagtaaccatgaatacagtgggaagttctgtatgatttaatttagagacgatggtaaaaacacatcattaggtctgtagcagaagatttaatcaggtcatacttgatgagttgtgttggataaaataactttttgttgttgtttaactctcaggtgaacatagtttgaatataccatgatgtacatgtgcattttcaaaattctcactgaattcttattttgtgaacttacatgactcttttagtcagtgttagctcaacaaatatttcttggttgcatgttttgtgccaggcattgtgtgaggtactcacctcatttgtatcttgtttgtcctcataggcttgtagttctatatccaaaaatctatttatactaattttaaaacactcaatttttatatcatattgtacctaagtgactttatgtatagaaataaattgatatttactgaaattatagctgcttatgtgtttcataaactgccgtatgctatcagctattaattattacaggacgatgaagcccttgaaccaggtatccattgatgctcttagatctcaagattatggtccatactcaacaacaggaatttcaaaatactgctgtattacatttcacttacacttaaggtctgaaaaagtaaatcctgttccagggcccctagtttataatgcttaacgtttaacgtcacagctgaaagttttgaaatctctttcatgcgtgtgttctcatttatttcttcattactatgaaaagggaaacaggtactgctattcttatttttaagatgaggaaaaggtgtatttttggagacgaattgactcaccaaggtgactcagctgataatctgggggtcaaggcctgcactcctagccccagtgtttctttcaccattgctcatggctcgtcacccagcagcacctctggccagtgacagtattgtgtagtgtaagcatcagacctcctcttggtgaggattgagtcactgcccaatttactgtgaaaacaacaaaatatctgtcatcatgctcatttacatagttaaataattatataaataacacactagtaaatgtggaaacctgacaagtttgctgttttcacaatagattgaattagatagtgatttggatcattttcttccatcagctagatttcatcaatattgtaatttgtttttcaattcaccaaaggatgattaagcaatcagatgacctgattgactaaatattccccactcctattttctgagtcatttgcaaacatttacacagcaacaaactctatccaaagaacctcttttggggaaagagggacacattttaatatttcctgcataacattgtcattctgtttcataaaatcacagcacaagaggaaaccttggaagatattctccctccaggcaaaactacactgttttgtgctattttattaagttctacatggacggattcatcaaccctcctttcagcacagtgtaatgtttcaccaccttttagtcagaaaatgtgtccctattgatactagaaattctcttgcaacatgggaagccattccatcttgactacatagtcaaaacagagaaataggaagatctaataactgttgataccacagagtaaagatgtttaaaatgtagaagagttcaaacatcctgagtgtgtgttgccacatactgctcacagtgcgatggcttaattgagttttcagatacagaattgctttcctaagcaacattttgaatgtacaaagatttcaatgttctcctgaaacaactgttgacaagtatctttatagagaaagtatggaggtggatttgttttcactaagagctagcttataatttaaagtaagggtatgtctcttaaaaatatatttcatactatttataaatttaatgcagtgattattttaatcatattccaaagacatattttgacactcatcatcttaaatataaacttcataaaagttagacaggaaaaaacctaagctgtattattatatatctccatacgtgtgggggattgcctatatttttatgcatcctcttcgtttatgcacctagatgaatttcctataggtacaagttaactataggcaaactcatcacagaatattctctcttgagttaaaagataaagacaccataaaccagggtatacgtgatgtttatgtgttacctgcccaattcaagggattgtttttaattgtatagtggagtgaatagagtagcttttaaatatttcttaaaatctatgaaattgtatttttcattaacattcacatttttatagttggatttttttatgaccatttggtccaactgtgttttagtgattagtgtatgtgttttctttagcttttatattcaccatggtggtctcatggtaactagtagggtggaaactctttgcagctagttttagaaggcttcattgatgatcaattctaaacttgtagggtacactaaaaaatccaaatgtgttattagtaagttaatttcttatattgaatgaggtctattcattctaattgatgtaacaatcagtttaaagtatgcacattatattaatcttccataaaataagattttttcataatatgttagcaccgcatgtttgtccttggcagtatagccatttgggagctttcctgttgttcatttaaaaattatttgagtgcctccttgatttataaaagtgctttggggtttttttgggttttgatatatggggagcagtcatatatgttaatttgatcctctccttgctgttatttgactattgtctagctcaagcttgtacaacccatggcccttgggccacatgcagccccggatggctttgaatgcttcccagcacgaatttttaagctttcttaaatcattatgagatttggctgggcatggtggctcacgcc

SEQ ID NO: 65872 - DNA, 1659 bp, Homo sapiens
ctcttgttctttcttcagtatttactgctggttttaatgatggttagtcttacccagataaattcacactcaaataatatttcttttgcattttccatttgcatcacccatcaacttcgatagcagtgacactgtcttttttaagggatttattcatgagtcatactgcaagcctgagacttaattcattcagtcatttatttgacatttattgagcaccttatgtgtgccaggtatgaatcgaccaactcttttcaggagttttactttgtatggttgcctagacaccttggcatcaagtacatttgcattagtaaccccaaaacctacataagtgcatactcagatgagtgaaaaattggtatcatacttatcatttagcaaagctaagaaaagacagcagttttataactgatgggaaccaaaggacctgtatttcaaaccgtttctcactgtggtaaacagcctaggaagtggtcggtgtgacagctctgaacattttctatctgtgacccattcaaccgttgtgtttaatagatcaatcctgtcccttccagaagccaatagaagatataggaggtatacattctgaagtcttcagccattttttgttcattttgttctaactgtgctgacatcttgcccctaaaaatcctatttgatgctatacttgcactgggaagcttttgtgagatgatgagtcctttgccttgctgtccctgttgtactggtacgtggtgcttgctggttaggtttcccttggtgtaggtgggccctcccctacttgtctaccaccaatgaaaacaagaaccttggtgatctgaccccagcacctaggactgtgccaggcatgatagccactcaggaggctgaggcaggagaattgcttgaacccgggaggcagaggttacagtgagctgagatcaagctactgcactccagcctgggtgacagagtgagactctgtctcaaaaaaaaaaaaaaaagtgctcataaatatttcttgactgagttcattgaacggcccagttgtcaggagggttccagagaaggaatttgtggaatgctaggacatttcatgagcagtcctgtcattgcactagggagtgttgcttaaacttcttgaccccaatcaatgataagaaatacataactacccagtactgtatatacacatatacatacatgtacatttaactgtaatgaaaacttttagaaccgtacttccaacactactcactgcaaacataagatataccctgatttttgtattctgttctacattattctttttcatttttttaaaaaaaattctggttgctgccttctaaattgatttcatttcccgttaatgagttgtcatccacaatttttaaaaaaatgctttgctaagttactaactagatttaggagatagtaaaggggagtggaatgtctgattggaatgaaggttctgtctacctcagaaatcctactctaaagagtacacacagagtaagttctagaaattggaaatgcccctagtctctttcttccttttatctcgcgattcactgttcataatacagaaatgatttgggaagaaagtagaaagctatacatggtaggaatttctctttaaaaactttttatttttcacatatatctaggctttttaaa

SEQ ID NO: 65873 - DNA, 1533 bp, Homo sapiens
atgtccctgtgtgaaaaaatatatgtatacatatgtaggattcagtactccttttatagaacattgctgtcaactattaagcttaacccaaaagaaagttctctgttaataagagaaccaaagtgcacatcatccccaacaggatggcaatttatgatgtattttgatcgtccacatgacttgcaggagagtctggaagaaaggtcatgggaagattaactgcaggcgcacccggttggtactgaagcaggattttgctctgattagcaaagcactgaaggccagtcagggaaaaagatcaaggtcagtgaccttccagaagggaagtcaacctcggcaataataaaggctgccactctgtcaggactccagtctcatgcagagttggtgactaatatccttcactctagcttgaaagccctgttgacagtttagttctaattatttgtggatcagattgagcagaaatacatctgcttcttttctatcttgtcttttgaccctccttttttctgcccttttaaaaaatgtgcactgatttctcaattatgtttttacttttttcatatttcttctgtcaaccccattttctcctgcctttctgaggggatgtgttttcttattacttgttcaaatactgatgccttttggaaaaagctaaatgacttaagtattttttaacctttataaaagtatgagaagcatattcttagaatcacagtgtacactttctcagccaaccattcaaccaataaagtaagtagtttctttagtaattctttgcagtttccacacctctttgtttattcattcaacacattttttgagaacctactgttaaaataaaaactttagacaaattaaatttagcagagtttaattgagcaaagaatgattcacaaatctggcagccctcagaaccagaagaggttcacagagttccccttcacaatgcgagacagaaggcaggtacagaaaggctgggctggttacagcagtgtttcccttatttgaaagtgatctgattagttggttcctgtgattgacggaagctcagctgctgtgattggctaaggcttgttatacttgttacaaaagtatactcctcttagcagcagcaaatcagtaagtgttgggagcaacctcaattcttgcctcctcagaagaaagaattcaacccaggggcataaggctgagtgagagaatgaggcaagttttagagcaggaatgaaagtttattgaaaagctttggagcagggaggaaagtaaatagagtacatttggaaaagggccaagtaggcaacttgagagggtcaagtgcacggtttgaccttagatctggggttgtacatattggcatgcttccagggtcttgtgtctcttctcccctgattcttcccttgggatgagctgtttgtatgcacagtggcctaccagcactggggaggggctgtattcacagtgtgtttactggagttgtgcacatgctcacttaagacatttttcccttagcagttgaacaattctagaagg

SEQ ID NO: 65874 - DNA, 520 bp, Homo sapiens
gctgggattacaggtgtgagctaccacacctggccaccattgttcttattaatactactgaattggttatttattgtgattttactaaaagaatttttttgtcatcaaaatcgtttgagcctgcatttttttcttatgacatttcttggcaaaaactcagattccctttcaggaattttctttgctgaaacaacagtctagctattgtgtgaaagtccattctggtaatgtgggtcctccaagggcattagctctcggctgtttgcatttcaaaattgaccctcaagtttactttcatttactttcaactctgttgccttcttgaaaatgttttaaggcagtacatctaataagcatgaagcatcttacttttagtttaatcccaaaccttgtagttctaaataaaaaaattgaaccacgtgcccctaaggttttaatctaatatctggtttcttgaactggggccagctcttcatttttcaaagcatcaacagattctaaatacaacttctggcaacct

SEQ ID NO: 65875 - DNA, 481 bp, Homo sapiens
cttgattgaggggccctccagggtgttcatactcacatcaccaggaagcatcgctgtgcaggtggtgataggactgtgccactgaactggctcattccataaaacgtggtaaccagaaatccttggtggcttaagacccatggccagggtgacttcagagtgccacatgcacagtgcaatgcatcaggcacaaagccacaggttctgagccagttttgaggccaaatggaggcgcactaagttcagagtggaatggccttggcttgggtcccagctcttctgtttaccagctgtgtgatttcaggggagccactcaatgtctttcatactaaatttccttatctatacaacaggattaaaatgctcaccccccaatagagcttcacaaacctcataagcatgtatggatcaacaggaaatatatgacattgctgtggaaaaggcacttgtaaaatccctcatacagagtaatattcaatag

SEQ ID NO: 65876 - DNA, 697 bp, Homo sapiens
ggctcatacttgtaatcttagcactttgagaggctgaggtgggaggattgcttgaggccaggagttggagaccagccttggcaacaaagcaagactctgtctctacaaaaaaattttaaaaattagttgggcgtgatggtgcgtgcctgcagtcccagctactcaggaggcggaggcaggcaaacatgaggatggccctgtattgattgtttcctttctataaaacgtctgcaggctccccaccacgttccaagcaggttttctcctttaaacctccagagatcctgcccatttgtctccacttggcccgtgtgggtatttggtgtacagctgcttgtcacaggaacactgaattctgttcctgtacccgttgctcgtcacagctggacagagagtatgtacttaaaagggtccaataatccatctcttcattcagtaaatatttattcatcactttctttttgccagactctgtgggaggcactgctataaaaagataatgaaggctgaggcgggtggattacatgaggtcaggagcttgagaccaacctggcaaacatggtgaaaccctgcctctactaaaaagacaaaaattagctgggcatggtggcatgtgcctgtaatcccagctactcgggaggctgaggcaagagaattgcttgaacctgggagatggaggttgcagtgagccgatcat

SEQ ID NO: 65877 - DNA, 692 bp, Homo sapiens
tgcatataaaatagttttaatggtccttaaaactgtttattggcttttgctcttaagtaagttaacttttcccttatttacactataaatttgctgagctagccccttccaaatataaaccaacaccctacccaccattaccgcccctccacacacaagcatagccctcctaatactctcaacagttcctaattataattaactctaagcttaaggcacacaccaaatctccctgctaacgaggcagcccccttgcagccggctcctctttctagggactggcaattggagataatgagccagaatctgcagaagcttcccaggctcccttcctcctctcttctgatctttattcaacaagtatatattgatctgccatgtgccaggcactgtgccaaaccacagtcattctttcaacagatatttgctgagtgcctgttatacaccaggcactattctaggtgtcagcgagagagcagggaacaaagcagacaggatgctatgctggtgtcgtgctgcaccttcttgtggggaagacaggagcaattgctgagtgcagggtgtcaacacccatgttaggaggtgagcacccagcaaggaaaatgaagcagggaatggagattggtcagggtgggtgatgtttttagactgtggtcaagaaaagcctcccagaggggatgagatgccaacca

SEQ ID NO: 65878 - DNA, 4105 bp, Homo sapiens
taatgttttttattgaaaaaaaaaaacgttccgcccccttttttttccctttggggcttggtggtggcaggaatggccccctgcacctttccttctcagtagaggtctctgtgtgcctgccagctggaggagacggaatgtattactggcctgatattatagaaatttctagatgttacctttcagatttcccacagggggacaactgctgagattaaccgtgttgcctattgtgcaaacatctgtaaacgcaccaccacagcaattgcagtggctcccccccagccagaaactgcggaaatcaaatgccctgtcttgcaaacacatctgttcacaccttgagagagggaggcttttcagagctccttgctctgaaaaatcttgggagtttgtttgtttgtccactctgtgagcaatccacagtgatcttgggagtcagaggtcaaaggcaaaggcttactgacctcccatgctgttccccctgtctttaggtccttcaagggcatgggtgctaagaggagcctccctgtgtaccaggctcacatctttggacttgtgatgttggctcatgatggtcgtggtcactcagaccccaccaggagctgctgaatccaaatggagtagctcttggtgacagtaaagtccacccctcccctggcctggagggtatgttctgattttgccaggagacaggtagctgagtaatacttgagatcttgggaaatgatttgaaatatgtggaagagaaaagaaaaaacaggattgatacattctgcattaaaaaccttatttgggcaccttccctattttctaccctcaaaaaaaaaaccccacaaaaaacaggatttgaatgaacatttggaaaaatgcctggaatcatcagccacgaatcaccagtgcccacccctgagcaattttactgtagagccaccacagtgaccaggccagggagggagccatgcgtgtggcagaaggaacggccgccaagtgttggctgcacagcgccccgcgcctgcaggagagcggagacaggagaaagcgaggccagctgcactgcagggagatgtctctgcctgtactttttttttctttctgggatctatttagaataatctttgtgttcaatttcatttttagattttaacaccgaattctttttgttcttctggatccacatatctaattttagcattgaaaagaatttcacctagtttatttttgtatcctaatctttttttagcgtaggtcaatggataagaaaatcacaaaaactaagtgtatattatcagccaagtgagctgctagtgcttataaacaccctttattttaaagacaatgcgaatttcattatgtaaacatgtaaaaacccaggccatcttaactgatgcccagccgcagaggtgaggtggcatggtcatgttcctagatgacatgttatgaatggagttccttctacatccaagcaaaacaggattccatgattcacagagcttgcaggcaaggttagactagtcaggagattcagaacaaacaaatctttggtgtttcacagttacaactccataggagagcacctgatggttatactggaagacgaagccgatgtccttgatgctatagatcaggagagatctgaaaacacacccagacccacctccaccccaacccagttcagtcagagtctcttgggttaggacctgagaatttaaaaaaatctccacagtaattttaataagcagctagagttgagaaacattgcctcccgtagagaacagtcactgggaagctaggattgtactgtggttacctagggtgatggactgagctaagctgaaagcagagccttgggtggggaaactgagaggagtgatctgtatagtgcttgggagcagtggtttaattccggctgtgctgtgaggacagtgataattatgctccttctgaagaaatccttgcagaagatgtcacctttccatgaattgaaaaggaggaaaggtgctgtgttttcaagcttctccagataatcttagaaatgtaagtcgagaaagggaatcatacaaacatcatgtcttaatttgacttagtacctagtatgggtttaacataacactgtcataataatatggtttacacacatgcatacagacttaccatccattcattgattcactgggttcctgctatgtgccaggcatttcctagggcactaagaaaacagcagcaaacgaagaaggctgagttcccctccgggaggggtcttacaccgagcaatcccagaatgtcggctggcaagaaggggtgagtgaggaatatgctggaggcagaatggggcccctagcctagagtgcctatgagaagacccctgttgggccctgacaagggaagtggctttgctcttcctgcaggcacaagctgtccatgatgctgggacctctgattcatccactagagccattgtcatcagaactatttctggaagtttctgagtaggtggcacagccctgtgtacctagtgaagcccccccccctttgattcaggggtcacattgggctgtttgcgcaaagaaggactcactgcttctttttccccttgtgaataagtaacaagctgttaagtacacaatgaatgtacctctctgcaagccagaactgtagtgattgatggaatccgatgtttacttgtcccctctgtaaccttagattaaagtcactgaaatcttcagcctctacatcaggagaatggcacgcacatgccaagggacgtggccaaaatggctggtggagctttgtgggaggcagagtgcatggtcccttccccaaagggattagatgcagagacatcaggagagcaagtcagcttttatggggagggtaacagtgtagtcagaagcggcaagggagaaatgataggaatttgtgttgtggagagaaaggaaggaggcctggacagggaggaaggagaagaaacattacacaagaaccgattgctaattggtcaagagggatggggagtgactgaagggccccttgggtgtgtcactattattcagtgtccaggctgctgcaaaaggacagctattaataaacatcgttaaatgcatcttgttttctttctattgctttgttgtttataaaatgcctgagtatacattaattccaagaatcctcaaaataactttgagaggtgttactgtgatcagtatataaagaaagaagacattgaaactcatagaggctaagtaacttgcccctaatcacacagccagttaaaaggcagaagcaaatctcaaattcaaatatttgagctccagctccagcaatctgaaatgtcaagatacctagtacaattgggttctggtcctggatgtgcctgaacatttttatgatttcacatatatcatgtgactctccaagcctttgaagttgcatttctctcatttccttgcctttctacatgtcttataaagatttctacgcttacatttataccctcaagtatgcatggacacaaagtcgagtttgggtttttttaaaatctggattaaaagaaattttaaattccaactttctttacctgattctctctgtagcactggccttttgtaatatatatttttccagccataggaaagagctttttaatgctcagatcccaagagctaaggaagtagatggctatttatgttctgccaggaatctttatgttcagtgagaggaagtgcaactgcttaaaactcttaacttctctctcttactttagaaagtcaagcagaaaaaaaaatggattaatttgacagatagcacagaataagaaaaatattagaaacaagaagaggccatttttcctatagaggctcatttcattctatataccacttccctgggatatctgctaattgttagcagaaagagtaatgttatctattttttaaaatttcactcttgagtactatggagataatagctaaatgatggagaaataactttctttcacggtagtagtttaagaagggtaaaaagagctcaaaggcagatgtttgatgacatgagaaaattcagcgacaaatgacaaatttgatatttctataggtgcagttttagaaag

SEQ ID NO: 65879 - DNA, 764 bp, Homo sapiens
gattccacagaatatagccaatatccaggtttcagtggcagttcttagacaaagaaacagccttgatataacagcacattaacatcaaaattaaaatggcccactgctcattttgaagacctggagcactgttacttttctacaaggttgtctcgtatctcagatgacagttgaactgcaagccaattggatgaacttcagaaatgcttgtccaaggttactcaatataaatcaatatgaactttagccacattatcatgccctagtgatctctataatgattccaggatagtctctggtattgaatttgaccaggattgtgactattttgcaattgctgaggttacaatgaagattaaagtctatgaatatggcacagtcatccaggatgcagtggatattcattaccgtgtgaatgaaatgacctcaattccaaaatcagctgtatcagttggagtagttaccataagaacctgttagctagcagtgattatgaaggcattgttatcctatgggatggattcacaggacagaggtcaaaggtctaacaggagcgtgagaagaggtgttgaagtgtttcatttgatggatcctaaactcctggctttgggttctgatgatgtaaaagtgaagctgtgatctaccggtctagacaactcagtggcaagcattgaggcaaaggctgatgtgtgctgtgttaaattcagccgctcttccagatgccatttggcttttggctgtgcggatcattgtgtccattacta

SEQ ID NO: 65880 - DNA, 2266 bp, Homo sapiens
tcttctcgcactgtttgagttttaactcgcttattcccccaaaggagtatgccatttacttaatttaaaaattaaacagcataaaaacttctgaactctgagtgagacagcgatcagagttaaaaataactgatttcgcgcgtttccgtgcaaaatgggagacagacgtgacggagagagaccgagcagtgccacggcccggtagagggtgcgggggcttgcacccgctggtgtttgtgagagagcgctggtgtagacgcgaacgcagcgcaggcggcccggcggcgcggcctcaggtcggggcctttccagcgttccagctacaccgagcgcgcgggggcgaaaacatgtgcatggtgtttggggactgtgcgcatgggagtgttttcactgtcaaccagggttctttttcttattttgaacccattttcatgatgcaccggaatgctgaagttcaaaattgcctacggagaattttaagactaaaaccacactaagtttcttgtgttaactataaatgcgggtcagagtgaaagccgagtagggaggagtgaaaagggggaaaagggaagagataagaggaagaaaagatgaaagagccggcggaagagggagggaagcgggggcgggcaggcgagcagaggcagggaaagagcggcgcgggttgcgggaaagctccgcgcgcagtacccaaccgaggcccgggcgcgcggtcctcccgccggcagggggcgcccacccgcccgcctccggcccctcgcggccagccgccccgcccgcgcctgcgcttcctgcccctcctcgtccgggatgctgctgccgctactgcggagtagctgcttcccttcctcctctcccggcggcggcggcggcagcggcggaggaggaggaggaggggacccgggcgcagagagccggccggcggcgcagttgcagcgcggagcccacgggccgccggggccgctccagcgggcggaagccgagcccggggccgaccccccgcgcgcggcggaggccgagggggcgccggggcccggggcgcgcagccggggggcgggcggcggcgggcggcgggccgagcgggagccgcatgcgtgtatggatccgggcgccgcgctgcagaggcgggccgggggcggcggcggtctgggcgcgggctccccggcgctgtcgggcggccagggccgccggaggaagcagccccccaggccggccgacttcaagttgcaggtcatcattatcggctcccgcggcgtgggcaagaccagcctgatggagcgcttcaccgacgacaccttctgcgaggcctgcaagtccaccgtgggtaagggcgccacggcgaccctgggccgggcctcctggcgcccgggcaggtgcccttcgccccgtgggcttcgagtctcatcgagcctgggagtctttcggggatgggcctctcggtgaaactaggggcgggggtctccttggagcgccctgcatcccaatcccaaagcctggcagaggttttcgtgccgcctccgggcagacctgcccttggcccccggccctgcctcagaggtcctggcagcccccggggcctgtgggggcggctctccacggaaacttcggcccttagcatactcgcccaagaaaaagctgggttcgagtggagcgcaggcaggcaggggagtgaacgcctaaggccgctctcgcccggcccgccaaggccagcgcgcgccgtctgctgcgggtgtgatccctgcgcaaccagggcagttttcttattttgaacccattttcaagaaatgaagtttaaagtcacctatggagaatgttaaaactaaaactacagtaagtttctcgtgctagccgtacgtacggggcagaggagcttcagctgtatttatccatgacctcaaacaacccggtgactggcgggcatggggttgattcctccagtaccgctgttttcggtgagggacaggagtgaagtaagtacaggaacgctccagggtcaaggaggaaaacagccgtggatctgaaatggaaactgcaggggaaatttttttaattaagtcatgcttagaggacttgacattgagatttctcagttggatgtgggtagcagttgtttctatggaaaaccccttaaaagatgtccaaactaggagaaccccgttctttaaaataaagggcagtcacttccgtgataggaagtgagagatttccccaggggcggtccaagaaactgagtagtcaggagatttgatagaattaaaagcataat

SEQ ID NO: 65881 - DNA, 2785 bp, Homo sapiens
tgttctggtatttgctaaatcttcacacatgctcaggtggcagtacgttttaatgatacaggcgagggaactggggctcagaaaggtctagtgccttgcgcatgggagactcaagtggtagaaccggtggccgggctccgggctctgagcggaaagcctgcaggactcggaatcctgaagacctgggtttaaacccgctcagctagggactgggtgaggcatcgcaggcaagtgacttcacctcccagcgccggtgccctagtcttcaccgaagacagcaattccaatctgggactgtggtgaggcttaaataaaacactgctcagtaagtggccagcaggcctggctcgcagccggaactataaatgtgagttccctttctgacccccaggtttggcgagggctcctcctgtttgggcagcagctcctcctgagctcccgaggccacgggggtgccaactgtggagcgcccgccgtgccgtttagacgcgagagctgcgtcgggtaccagcgatccttaaaggagctcggggaccaggggcacagcttggagaggacagcgagggaggtgactggcctcggggaggcgggcggtggatggagaggcatgagaggggtgttgtcagccgcggcacacgccttccccaagtggccggcgccgccccttgccaccacttcacctccgcctcttcccttcctccctagctcctggcagcgtctctagggcctcaaaaagcaaggagggtccccgggcagcgaggccccatggatccagcctgcgcctgctcccaagggcgcgcaggtcccgcccctgccgggcgcccgccccccggggagcgcaagcccccgccccttccctcgcccctcccctgcacggcgccggctggctggaggcggggcatgcgcacgggcctgggcgagggcgctgggcggcggggaggtggggcgcgcgcgtgcggcttctctcagccgggagcggcgggggcgggcacgggcagcagcgggccggcggtgggcggggagcgggacgcgggagccgggcgcgcgccgccagcgccgccgcggcaccggtgaccgcgagcccggagcgcgaggtccggggatgcgagcggccgggagccgccgcgctgctgagccgggagaactcgatccgcggtgacctcagcgaggggcgagcgcggcggcggcgagccccgcgggaatcctcggggccggggtgcggggggcggggacggcgggagcgcggggcgcagcccgggcggggctgggacagtgatgagagagcgcgcggggaggctgcacgccgccgccgccgccgccgccgccgtcgtcgtccggagcatctgctgcctgagctgctgccggcggacccggccatggagacactgaacggccccgcgggcggaggtgccccggacgcgaagctgcagccgcccggccagcaccaccgccaccaccacctccacccggtggccgaaaggcggcggctgcaccgtgcgccctcgcccgccagacccttcctcaaggacctgcacgcccggcccgccgcgcccggcccggccgtcccctcctcgggccgagccccggctcccgccgccccgcgctcgcccaacctcgcgggcaaagcgccgccctcgccggggtccctggccgcgcccggccgcctctctcggcgcagtggcggcgtcccgggcgcgaaggacaagcccccgccgggcgccggggccagagcggcgggcggtgccaaggctgccctgggaagcaggagggcggcgcgcgtggcgcccgcggagccgctgtcccgggctgggaagcctcccggagccgagccgccgtctgccgctgccaagggccgcaaagccaagcgcggctcccgggcgccacccgcccgcaccgtcggccccccgaccccggccgcccggatccctgccgtgaccctcgcggtgacctcggtggccgggtccccggcccgctgctcgcgcatcagccacacggacagcagctccgacctctctgactgcccctccgaacccctgtccgacgagcagcgcctgctccctgccgccagcagcgacgccgaatccggcacgggctccagcgaccgtgaacccccacgaggagcgccgacgccgagccccgcagcccgaggagcgccgccgggcagccccgagcccccagcgctcctcgccgcgcccctcgccgcgggcgcctgtcccgggggccggagcatcccgagcggggtttcggggggtttcgcggggcccggcgtggcggaggatgtccgggggcgctcgccaccggagcgaccagtccccgggacccccaaggagcccagcctgggcgagcagtctcggctcgtgccagcggcggaggaagaagagctgctgcgggagatggaggagctgcgctcggagaacgactatctcaaggtgagccgcgcctcggccgcaggtgtcccggggcgcccccggagggcctggctgcggcggggacccgccaacccctccttcccgggcctgtccagcgccttctccctcctgctctccacggtcctacccccgcattgtcaggcattggcaacttaagcccaaacttctggaaggagaagcaagacctgtgggaccccgccagttcgcaacccacttctcttttctcgcgtctagaactcttgcgtctcttcgctgatacttttacttttgttgacctgttggggcagaggaggctgtaatcgttttggggacatcagcggacgcccccatccccgctcagaacgtgccagcctcac

SEQ ID NO: 65882 - DNA, 436 bp, Homo sapiens
cattaactgctgggtgatctcaagcctaaatttcttatggagctgctccaaccaactgagccttgtggttattttactttgtgcaagaagtaacagtgaggcagagaaagagaggtgataaaagaaagattgggacttaaagcaagatatttcagatagtatgtttgtttttgtcacttactcttaggtaatagacaacggagtgaagttcaaaggcaactatgttgtgggtgactccatcatgaaagcagctcttttgtaaatcttcaacaaatgtaagctccctgagggtgaccaagataatcttgttgtttttgtatccctggctcttagcataacccctgacttactttctgattgaatgatgtttatccaaatgactgctgtgcaagggaaaactgtatttctttaaagaagtttctcattgcatctttga

SEQ ID NO: 65883 - DNA, 785 bp, Homo sapiens
ctccatcgaattacttttgcattgttgtcaaaaatcagttgggcacatgtgtttgggtctgtttctgggttctctgctctgttccattgatctctgccagagccacccagccttgatcacttagctatatatgtcctgaaagtgctttcttggtgcggagtccgtgccagccagcagatccgaatcccatttgatccctcaatggcattttggcccactcacctctttgccttttggtatgtctgtgtctctctacacagccccgtccttatgaaacgctggataaatatttgttccatgggtgaaggttttatcatctttatttttcccttgagaaagagccaaaacattatttaaaaatctcttgctgaggaatttctgattctttatatcattacctaaggatagttaataaaggccagtaattccactgtaggtcaagttttttgacaatgactgtgagtcatgaaattggcctgtttggttagtgataagcgaagccgcttctgttcatcaacttcctgaacgtcagccaggctcctcgctgggcttggacaacgccggcttgtcccctgtgcgctgtacagctgccttctttttatttcctgtgcagtctcgcccacagcactgcaggctccgggggaccttttagggcagattatggcacccttgggatggctaccttggacgcagcgatgctgtgtgaacattactttgcagacttcctgagagattgaagatccatctatttctctccttctctaagacagcctttcttggaagat

SEQ ID NO: 65884 - DNA, 1803 bp, Homo sapiens
ttctaaacaacagtcatagaaaatgttactgtcagggtggaaaataacgtgaagtcactcagctggaaccttacattcagcatattttattgtcatttccctttgcctcctgcttcttccaacactagtttttagcgattacccacgaaagtggagatggacccgtgagcttccactgcgggccatgtgtgatagaagcacgtggcggggtggggtccagacactcagacccaggtctgccaagtgggccagtgttcacagtagtgagtaaggagctcactaacgcatgcacaaccctctgtctgtccaaggacggaagatggacgagctctactgtaacgacagctggttctctgggagggaacattcccggttagaggatttgcctctctgtgactggcatgagtattagccaggcagctgggatgcaagagccagggtacgtgtctcacagagctgcacagagccgggccgttcccgaaacgccgagcacctcgcaaggcgattagtagcatgggaaacctagccaagccgttttcccaaggacaagttctcagtcacagtattcctcaggccttggtctttgctttgtgacatatggaacgttctcacaattgaactcaagtagatggcaacatttatcacgtccacagaggtttaaaaaaaactgcatataccgatcaaccttgggatggctcataacaaatcatcaggttggcaaacatttggctccgcagacattccctgtttccctgtcttcagccacgtgagctcgcagtcatgacctgggcgctttagagccacagtgaatgctttcagtttccccagccatcctgaagagcagaggctgcgcacacgcaagagggaatcttacagttttccttgagctccaagactcacgccactgcgttaagcatttgaggccagcattcctaaggctgtttatgcatttcatgctgattagtaattcctggaatccagctacttcacacaaggtgattaatggtgtgggaatgatggccctggggtgccaacagcttgttttccctacttggattaactgatttgaaaagaagttactttttcattcagggatgtgacctaattatcatttagtaaaacaactaagtaaaaaaaaaaaaaagtgtgaagaacttaatataaaattcatagcaagagctgaaggaattgtgtttcatatttaagtcttcacctgctacaggccactgaagagcctcatccagtccagcctcaggactgagtagactccacttccctggacctctgctccttgtcggggcttctgtgctgcgttagggccttcgggggctgcctgagaagtcagcctttctcctgcagacagagagcccttggctccctgggcttccggggctgtggctctcccaggccccagcagtcttcctttctggccatgcaggctgcccacctttgcttgcccaagatgaaaaacttccagaaagagcacccttgccagaggaggcctcacatcagaactgtgatctgcctgactttttttttttttttaattagaaagttatcttgagcctagatggtatttacatttcaattttgtacgtcataccgtgattcattcttcagtttatcctgcaactgggaggcctcccctataaggcgtgctactctttctgtaagaggaaccagaccagagcttaggatctgaagcgttttatctttgccgtgtacttgtggtggcagttgttctgtcactctttaagtagcccctgcgtgaggtaaaaattcacatgtgcagatgggtgcttg

SEQ ID NO: 65885 - DNA, 921 bp, Homo sapiens
aagtgatgagaaaaatgttgttaaatgagtagggcaagatgctagtctcaggccaaagtactaggacagggactcaagtacaagattataggacaagaccagttaaacaaacacaggggaataatagtaataatggccatcatttatttattggatactcactgtactgggccctgaacagggcacttctcaaaactcagcttgcttaagccttccaacatacccattttacagataagacactaaagcttagagaacttatataattcatcctaagccccaccccacagccacaaagtgggtgagccaagttggagccctggtctatcagatcccaggcatcatgctgttcctcctttgctatacttcagagggaaggctggagctacttgaaccaacagcatttaagattagagcagggctgatttgatgagtcactgggatattagagtccaatcctgtgttgcttaacattggggatacattccaagaactgcatccttaggcagtttcatcatcgtgtgaactcatggagttcatttacacaaacctagatggtgtagcctactacacacttagatcatatgctatagtctactgctgctaggacacaaacctgtacagcaagttactgtactgattattgtagacaattgaaacacaatggtaaatattttatgtatctaaacatttctaaatatagaaaagatacagtaagatttgatataaaggttaaaaaaaaaagatactcttgtataaagcacttgccatgaatgaagtttgcaggactggaggttgctctgggtgagtgagtggtgagtgaatgtgaaggcctaggacattactgtgtactactgtagactttacaaactctgtacacttcggctatgctaaatttatttttaaaatacagtaagtgtg

SEQ ID NO: 65886 - DNA, 2482 bp, Homo sapiens
acaaatatgtggtctattccacaaatgttctttgcccagtctgaaggaaaagactagtatgaagatgatagttcctcccagggttgatgatcaaagaaccagattctgtctacactggatctggttgcactggctgacttgaactcatcttgttcaagaacagagtgaggcccagttaatgctgctgggagaaactgagtagtttgtctccaggtcaagatgtacaggaggtggtcattgaggaaaacaagtgcccaactcatccaaaagctgaccattgagaagaccaaacacctaaactgcttctgtggaatttgaggatttggccaggctatttccaatgcagtgaaaaatttccatttgattctgaataactgcttgtaaaacacaaataaatgcagcacagttttataagttttcttcaattctggcaataaagtaagtgaattcattggaacaatccctatgctaacctgctaaccagctgacaaaccagatcaataggatactgtctactcctctgacagctacatttgtgtcttaccacctctaattggtatttgattttaaatctatttccaaaaaaagttttttagaagtttaagaaatttactattaatattaatttgaaataataaattataaaattataataatgtggtataaacatttaaaaatgcaattgaacacattataaagttgagaaatagatccatatacatacggaaatttagtataggctaaggttagcatttcaatcagtagaagaaaaatagtttattcaacaaatggttaggggacaattatcaagaaaacaatttgcagcccgggcaacatagggagaccccatctctacaaaaaaaattttttttaattagccaggcatggtggcacatgcctatagttccagctactcaggaggcagagatgggaggattgctcgagcccaggagctcaatgctacagtcaactatgataacaccactgtattccagcctgtgcaacagagcaagaccctgtctcaaaaaaaaaaagaaagaaagaaagaaagaaaaaaagaaaacgatttgaatctataatcacacttttatgttggaaaaaaattgaatcattcaggtactagaggaaatcatggggtaatttgtttttataataatcttagaaaaggaagtgctttctatgtatgaaacaaaatccagaatctgtatcctgagtaataaagaatttattgggctttgtccctggttcctggttcctgtgagttaatctctaacttcttggaatttcctgggtgataggaatgtctttgttattcatggtatgccctcatagtttattctaataaggtgactcataggaggctcttcgacagtttctaagagatgactcgagacagaggctggccactgagagagagaccaattatgtcattagagggttggaatttgagccaagtgatatcagcctgatctccagggagggaagaggggtgactggagactgagttcagagggtgactagtgtttcaatcaatcatgcacacataatgaaacccaaaaaaactctgaacttgaagctcaagtgtgtatcctagttgacagtactctgcatattgtacacaccgatgtgctcggaggatgatgcatcccatctctgcagggagaggacaccagaaacttcccatctaggaccctcccagacctctacctatctgtctcttcttttgattggttcttattcgtaatctttttgtgataataaaactgtaattttttaaatcatatagctcttccctgaattctgttagtcattctagtgaattatcaaacttgagaggatcgtgggaaccccgaacttgtaaccagttggtcaggagtgaaggtggcctggggacccctgaacttgcagctgatgcctgaagtgagcctcatttcagacatcagctgcaagcaagttcaggggtcccgaggtccccaggaagtttatcctcactctgggtgcttattgtcagaggccattgcactgttttaaaaaggactgataaagttgataatattaaactcaaaattttctacacagcctcctcagaagtaatgtaaaaagaccagtacaaactgggggaaatgtttgcaactcatatcactgaaaatgactaatttttctaacaaataaagaacatcagtactttgggaggccaaggcaggaggatcacttgagccgaggagttcaaaactaacgtgggcaacattgtgagacctcatccctacaaagaattgttttaaaattggccaggcataatggcgtgcacctgtagttctagctactcaggaggctgagatgggaggattgcttgagccagggaggtcaaggctgcagtgagctatgatcacctcactgcactccaggctgggtgacagagcaagaccctgtttcaaaataaaaataaaagaaaaaaaaaaaagaacatctacaatacaaaaag

SEQ ID NO: 65887 - DNA, 3428 bp, Homo sapiens
gggtggcacatgcctgtaatcccagctactcaggaggctgaggcacgaggatagcttgaaactgggaggtagaggttgagttgagattgtgccactgcactccagcctgggtgacagagtgagactgtctcaatctcaaaaaaaaaaaaaaagatgttaactgaaagtaagaaaacaggagcatgagacaagtggagaaagatcaagagtgatgcatttttatgttaattatcccatcccaactgaagcgcaggatccacccccttccctgtcctcaccttattgcaggctagttcttcctaaacacttcacctgaccgggcctctcaggggagggaggatggtgctgaaatattgaaagagataacggagggctaggccgagcaatgccagcaccgcagggagtactgagtagctctttgtgattggaatttctggagtgcaccggagaatagcagaagataaggttggaaaggtaaatagagatctgactttagaaagctggacatttcagcttaagtgctttggacttttctcagtagtcaatggaaaattttgatcagggaatcaaaagcacaatcaaaatagtgctttaataataggaacgccttgagtatatttaagcatatgtttactgattagctacttggcagaaagccttgggtcagcaggaaagagacaaatattcaaagctcaagggttagcaattagcattaagacccttattgaccggctactcagctggcactggtcacctactcttttgaactacaattaccatctcatgtgcaatgagggctaggaccaggtaacaacattacagactctctgggatggagtcagcagataatgaatggcaaatgctcaggacacgtttcttattagaaatgatgacaagactagacatttttttctttttttgagacagagtctcgctctgtcgcccaagctggagtgcaatggcgtgacctcggctcacttcaacctctgcctcccgggctcaagcaattctcatgcctcagccccccaagtagctgggattacaggtgcacaccaccacaccttgctaatttttgtatttttggtagagacggggtttcgccatgttgcccaggctggtcttgaactcctggcctaaagtgatcctcttgcctcggcctcccaaagtgctgggattacaggcgtgagccaccatgcctggcctgagactagaaattataaaggaaagtaaggggaacaaaaaccagatttgtgaacccttgatttgtactcaatttttagggagtatttacagagcagggagtagaatttgtgcataatttgcatatgtttgtgcagaatttgtatttgagacaggaacagtatgtgggaaaagttattatgtctgttttaacgcctattccagcatgaacatattttaaaacccatagaaatacattttaaaatcataaataacagcaacaaataaagtcttttgataggtttatttccttcatttgccagagtaattacggtaattcccaaatgaccaatttgaacaacgaagcctcttgttagtagggtcaaagtctggatccgttaacagcggcattcctgtcaaaatctgatctttcctctaagtgcccaaatagcctaggtgtactagataccattcttcatgtctctaatacgtgcaaacagacctgacaactatttcagaacctagaaaggccagccaaaagttagtcattaactaagcaggataaatcttaatcaactgaataaatgcaaagtatgtaacattttaagtaaaacaaacagggtagagttaaccaagagcccttacgggaggaaaaaaatcattatttcttccttcgggtgaggcaaaaaccgtttctttaaacttgaaatgcaaagagcattcatttatatatttcaggattagattccggtctcagactgatatgcatttcttaaatgtgtcttacattttccctgttgagaaagtgggtgaatcagaactgactcaggccagacacaccacagggagaacaggtcagcactagagtgagaatgtctagtatgctacctttattctgtattactatgatccatgtctattttgtgttaattattgcttgtccaaagggaccaccagaaaaatctgttgatcaagcaaatctaagtatattagacctacagcagtaagggacaatactacagtgtcagtcttagaagtgtctcaaaacagagaaattaggaaagggtgttggagggtgttatggcccagattatatgattttaaggcatgtcttgcaaggcaagaaacgagattgggcaaaattaagatataatagtcttgaagaggtgaacacaagagggtgagggtcttttgttttggtttgttttgaaacagagtctcactctctcacctaggctggaatacaatggtgccatcatagcccactgcagcctcgaactcctgggctcatgctatctttctgcctctgtctactgagtagctaggattacaggtgtggcaccacagccagctaattttttagtttttatttttgtagagatgggttctcactatgttgtccaggctggtcttgaactcctggcctcaaatagtcctcccatcccagcctcccaaagtgctgatactacaggcgtgagtcactgtgccccactgagatgagggtcttgaagtgagcctttatgagcaggctgttcatttttgtaagaagctgctttaattggttcacagcgttatcttccaagagcaagaatttaatggagcaggtagcaaagtattgctcccagcattgtctaacgcaggagcaggtctcacaatcagactccattcctccaccttctcttctagcactgaaagtctttgctaatacacatccctgaagtcaggaggaaaggaggcatggctcctcagggggcacttgctgccttggtgggtgcggggaatctgcaagcatctgccagcttagtgggaacgctaggccttcctagggaggagtgggccagctccacaagcccatgggattgagcagggtgtacagtccagatcttcagaggcattctggtagccaggacctacacagccctgtcccatatttaggatcctaggttttccccacaggggccctgacctttgcgtaacagacctgccttggccaagcatttcaacctctctggagctccatgattctaacaatcaggtcctcagcctgcctctcagctgtgtgtctgttcttcctctgcaggagatggaggcctctttgtcagctgtcacagggccctgcataaacagacccttgtctctccttcctctgtgtgcatcaaaacagcttagtgagatccagcccactctgcctttttttgtaggcatttttccacccgtattgttaaaatgcctgcatcacggcacacacc

SEQ ID NO: 65888 - DNA, 1835 bp, Homo sapiens
agttatttgcattcaaatctgctcttataggaggaggactgtcaactaatggtgctgtatataacaaaggcagaaatgggattgaccactgagagaggaagaggggaagagagagctgcagccagactggtggcaggaccacctgggaacagtgtcttggttcacatattttggggaaagtgatcagcaggcagggagcaaagagttctgttggctccatcctggagcaggctgagtagaggcatcaaggaaaaaaatgtccctggtttgctgactcttcctcttttttttttttttttttttgagacgtagtctggctctgtcgtccatgctggagtacagtggtgcaatctcagctcactgcaccctccacctcctaggttcaagtgattctcctgcctcagcctcccaggattacaggtgctaggaggctgaggattacaggcgtccaccacccacgcccagtactgtaaaagtgctgggattacagtcctccaccaccatgccctgctaatttttgtattttttttttagtacagacagagtttcaccatgtttaccagactggtctcgaactcccgacctcaggtgatccgcccaccttggcttcccaaagggctgggattacaggcatgagtcaccgcaccaggccaggtttgctgactcttgggagtctggctgtgttgtaagtgacaggctgccctgggttctccaccttcagctatgagcaccatcctgcatgaggttcctcagcaggggactgagcactcgcaggtcgctgccaggacgtgcagaggaaagcaagaccatcgcgtcagtgtgggaaaagtgaagagcgaggcccaggactctgagagaaaggagtcctggcccagaggttgtgtgaggaaagcgtgggataaatgggatgcccgaaagcagagtttggggtgattagataggaaaataaagattggtgggtgtaaagaaaggaaagaaataacaggtgtagacagaaaaattcacaataagaatgaccgtgggcgtgggacacaggccggtcaggcagatggtcagacacctggagaggtgcccagcagcttggagccctcgggagctcagggcaccagctactgacccggacggagcagcacagggtcttccccaccgctgctctcatggggcgcacaccggctgaatgtctgcaaggggtataggaaagaggagagagaaacatgaatatccgaggtcaccaaaggacatgcaagccagtcagtgacaaaagggaacgtggcacagcatggaggagccgcccttaggtcagatcaggcctgtcatcgtcactggtgaccctccctgccgggggaggtggccctggcagcaagcacctgtcctgctggctgagcggcagcccacgtgtccggggcagggtggccagctggccagctgggccagagcccagagtgctgaggctcgcagcccgatctcggcagtcctgtaccgtcgcatcaggccacaggccacaggccacaggtggctcttcccgcatgccggaggaaacacaaaatccctgccagcagagaaggagcggcccagccacttgcctgtgggtttcatgaaatgtgcgactctgatctcataccccttagaatttctagtaaaagatccagaatgtctgacttcccaagaaggaaccttcatgggaaagaataggcaggaatgttttcagagccagttcctcaatttctccaggttccaaaaagctgcaagaccatactcacctcttcagggtctccacatcccctgaatatcatattcagctgttgttctcatcacatcttgagtaaatttttgtg

SEQ ID NO: 65889 - DNA, 1417 bp, Homo sapiens
tacatctgtatctgcctccccagcacctagaatggaacatggcatataatgtgttcaataaatattgattgaatggatagatgagtagatcaataaaggagtaagtgacatttgggtaaaggtagataaagtatatccagaccaataccatatttgtcctccttcttccaggaaaatgaagcacagtattaatttgtctcatacagaagttaccaaaaatatttattgtatgtgcacaaatgtatccagaccactctagaaaccatctcttctttgatctcttctttcccccagcctttcctctttttgcagcctgcaggactgcctagcttcaagggagctgagaggaaggttgtgttcaggtgatcaggaatggtaacagatggttggatgccctcattttgcagatgcctctatatttgtgctgcttaaaagcattttaactagtatagagcaaaacatgtattatcttttagttgcagccctagtttctagaatcccggattagtgactagccccctaaacctcacagccactaatccactgggatggctcctctgcctctgttgacgttgggtgctttcagcccccagtgaattctgcctctttaatcttgtttggtgctgatttttttttttctaccattagcgctttggattggaatgtggttgcctcatatttttttgtcagactctttacagacaagcaaataaacttggagagggtaagtaaggtaacacaggagatctgagatagagctaggacttttgccatctatccttgtcatcaaaagcactcattaatcttatcgtcattctgtggcagggtggtggaacagcacaggtcaatttagagattcaggacaatggggaacactcactctctccagttcttttgtgcaaacagctgacctaagaataaaacttaagcatccagaatgtcataaaagcacagtctatgttcatatttaagttcatctgcagcatttttgtcacttttagctacgattaggatgcctttaaagcagttattgtccaatagatttccatttgaaggaaaggatgtttgtcatggtaagtaattaagtaatagaacatttcttagcttctaagggaaacctttccaggttaagtaatttgcagagggggaaatgtcatcttttattttttttcttcagaaggaattgattagacagaacaactacaggaaaccccaaatgttgaaatcagcaggagacctttaaattgcacagaatcaaatttctaaaaacataattctacctgtattgttgaaaatagagaggccagatgcggtgactcatgcctgtagtcccagcactttgggaagccgaggcaggtggatcacttgaggtcaggagtttgagagtagcctggccaacatggcgaaacctcatctc

SEQ ID NO: 65890 - DNA, 1079 bp, Homo sapiens
agaataattatttttgagggagttcagtgccatcaggtgccaaattatttatttgcaatgccaaattgtatggttttctatttaaacagagctttggtctaggtgtaactgtaatattctagatagaatattacttgtctagtggcctatctcacaagaaaataaataaataaaataaaaatattgctggaatttgaaggataaatcaatatagatgcctcagaaaagatggggtagggtgagtggagtaataattttgggaaatgtaatgaccagaaaataaactatcactattgctgcattttgcttttgtccaatattctcttggcatgtatggacatgaactaccattcagtgaaactgacatgttctctctcctttgagaaggatcatggaggtttctggtgccatcgttttaaatgttccaaatagaagcaaacatctactgttagaaaagtaaaccaagtgaagaaaagaaaagaaaatgacttgcattcttttgcatagatatggctatatcaagtaattagggttgtactaaagaggttgggaatatattttatttatttgcttatgtgacttttactcattattttcattttgtggtgagtaaagggaaaaatgtagtaagaacaaaatgacctttccattttgtcctaaaaccaaacaggaagagggagtactgccatcttttggttacacaatataataattttaaatcgttacacttaacaacagccagatgaatgccaatattagtcatcaccaaatgaacagaaacactgacttacctggcatgagttagttccttagactatttcttcataatagctttcttctgcaaagtaatcacagagactccaaaatctcatttttctttcaattgtagacagaaagagaaagtactggtgggctaagtagattatcttaaagagcactgacagttctaatatttgtatttaatgattctaaagcattcagagtaaacaaagataaaagagaacttttaattactaaagtcaatttcacaattgccccaggggtgaagaacttgagtgcaaggctgaacttccttagac

SEQ ID NO: 65891 - DNA, 1428 bp, Homo sapiens
tttattttatttgaatcatccacctcaaaatgtcactagttatatattttcttttctttctttctttcctttttttttttttttttttgagacagagtctcactctgttgcctaggctggagtgcaaacctccgcctcctgggttcaagtgattcttgtgcctcagtctcccaagtagctgggattacaggcgtgcaccaccacacatggataatttttgtatttttggtagagacgaggtttcaccatgttggccaggctggtcttggaactccagacctcaggtgatctgcccaccttggcctcccaaagtgctgggattacaggtgtgagccaccttacccggcctagttatatattttcaaacacacattaactaaacaaataattataagcactgagtccatcaatgtcaatatgacacagctttttttccaggaaacactcgcccaggaaaataagactgtaagccaatatgtaacttggcaatttgcttcagaaaattcctgcaaatcaatgtatttgggcaggcagtttgcttacctgggcaaagagctcgtttattagacaagtttactcctaaggacctttgcctcacatgccttccaatcctgaacgattatgtcagaaactgagcccaacccaaccccaatctgttctcatggttttgccgccttgcccagaccggtctcaaactcctcaactcaagcaatccacctgcctcggcctcccaaagtgctgggattacaggtgtgagccaccacgcatgacctgacattttatttcttttttaaatttattttattttcatcttttttcattttttgttctgaaatttcatatgttcaactgtttaccacctaaaatcatctcatccattaggagtggtaggcacagcagcctttgatgaaacatttcccctaaaaacacaataagaaagttcctcttccagctctccactgtctctcccacgccttgcctttctcctccagtctcttatgtccctcctcctcccacacctttaccatcaatgccttttgcacctgaggtctgcctgccttctatgactcagaaggacataaactaagggagaaggtgatttccagcagatgagcagacagtattccagtgagactcataaagtggtaagcaacctctgtgctttgaaaacattgttaacttaaaatggaatactagaccatcatggagctcatcgtgacactggccactgtgaagccaaatttcaagtacggaaagtcacccaatacagtgcaatgtcactgcaatttacacgatgtgatatgagagtctgtaccaagaaggctcctctgccccaaatttcttgcctttcatccatttgccccacaactcacgggtgttaaagggcataacattttaactataacttaagggaaactaacttttttt

SEQ ID NO: 65892 - DNA, 1630 bp, Homo sapiens
actcaggaagcggagtttgcagtgagccgagatcgagccactgcactccagcctgagtgacagagcaagactgcgtctcaaataaataaataaacaaataaaatagatctttcctttttttgatgctgctcatattgatatcaggatccactaatacgttgtttctacaacaatggaacctgaagcctgggtctagcattgttttgcctgaaatgacacagtatagtaattaaaggttcaaaagtaaataggaaagacagagaaggagaaaaagagaaatttaaaaacttaattactgacggctactcagtggaaatattaccacctttatgcatttttaattcttgaagagatgccatttataaatgctgcttattttttcctacaggctgatcgaagatgatgaaatgccacattcgcttcagtaaacagacatctcaaagtccaaaggaaacaaactcaaaggttagttcatttgtgtctcaaataatattcatcagctggtttgctaactagggcaagtctctctgaagcaaatgcacgaaggaacgcgggtatcattatccactaggtggcaatatagaacaggagtagccttagccttagcctgtttactgacacgtgggtggtgtgaaccgcaaaagaatttcgaaatccaggactccccagtaattcacatggattcagactgaaagtttactcagcgctcctggcatgtttctgccctttcttggaacagccctgaatttcagcttcattcttgctgacgggctggtatttaaaattagtaatatccctggctacttccttgtggcaatgtagatgaactgttgctgtgtaaagtcagagccatagtgttgcctgtatttattaatgatctacaaggtaagcatatgccgtgaaggttttatctctcgccccctaccatctaacagcttaaaaatactgagttcctcacatcattcccattactaacgattttcatatttcttttatttttatttttatttttattttgagacagagtctcactctgtcgcccaagctggagtgcagtggcacgatcttggctcactgcaacctctgcctcccgggttcaagtgatcctccttcctcagcctcccaagtagctgggactacaggcacgtgccaccacacccagctaatttttgtatttttagtagagatgggatttcaccatgttggccaggatggtctcaatctcttgacctcgtgatctgcccgcttcggcctcccaaagtgctgggattacaggcgtgagccaccatgcccagcccaatttctatatttctcagttgctctgcaaattgtaaagtcactggacatatttgattaacattttggttcttgttgttcaactgaaaaggatggtcttctcaagtacatattggcaagacattttccctgcaagaactaatagttgataagttagaaatgtatcataaacaaaaatgtacattttatgcaatgtgatcatattcttttgaaataaccacatgtatgagagattaaaatccccacaggtaacgcttgttcataaaatttctttatattaacttagaagttttacttattttataatattttttgaagtagctaaagagaagac

SEQ ID NO: 65893 - DNA, 1301 bp, Homo sapiens
gtatttttagtagagacagggtttcaccatgttagccaggatggtcttgatctcctgaccttgtgatccacccacctctgcctcccaaagtcttgggattacaggtgtgagccactgtgcctcgttataaatttcatattctttagcagacaagtccactatgaacccagtcatgtactaataactagactgtgagctccgtgagggcaagactatatccaatatcttgacatcttcaatactcagtgtacccttccctgacacatgaaagaaacttggaaaacattaaagggattgaggaatggtctagtgaatgacaaaatctatccctcttatcccatgtcccagggtacacgtttaacaaaatattatgaaatttagaaagtggtcataaaaagaggaaatttactattgcaagattttttttttttttttcagatagagtcaccctctgtcgcccaggctggagtgcagtggcatgatcttggctcactgcaacctccacctcccaggttcaagcgattctcctgcctcagcctcctgagtagctgggattatagatgtgtgccaccacacctggctaatttttgtatttttagtagagacggggtctcaccctattggccaggctggtgtcgatctcctgaccttgtgatccacccgccttggcctcccaaagtgctgggattacaagcgtgagccaccgcgcccagcctatttcaggaatacttgattaaatgaatgtcaacaaggctttccccctgttggccctgcctatcttcatttttcaataatacttttcaaaatgcaaatctgagaaaacctataatgtggacaaacagaaactgtatccagtaaaatctgcacttgccaggacggtcggatgagcctttagagcccagacattgtgcaaatagaatgtgaatctaggtttatctagtgaggtcaaccagcaggcatttaggaactgcatatgctctggggagtagtgtccacagagattcagagtcaaagttcagcagaagaggaaattcctctgaaaatttgtgtaaaattgtcctcactacacaaggacagctataaaattttgtaagctcctacaagtctgggactgcagtgggtttaagaatgtgtccattgttttagcatttacctcagatgaaatgctggttagaacaggaagttcactagttcaaccattgtggaagacagtgtggcgattcctcaaggatctagaactagaaataccatttgacccagccatcccattactgggtatatacccaaaggattataaatca

SEQ ID NO: 65894 - DNA, 2387 bp, Homo sapiens
atgtaccctagagcttaaagtattaaaaaaaaagtataattgacaaaaaaaaaagtgaaggaaaaaaataaatatttttaaacatgcaaaattgtttaaaaaaaaagaaaaggaagttcatttattaagagaaattactccttggtttcaaactaaaatacttaccctcattcattctttctcttcttccttcttttcctctctctttctctccttcttcttctttctcctccttcccacctctctttctttctccttctctctttcgtttccagctttctttcagtacatatatgtactgttttcctgggaaattccataaaaatgacaaagattttctgagtggttctcttatttttaagcaaaatcaatattcacaaagatagcctacttgcataacccgattaagcctcagttggagtaaactgatttttttttttttttgacacaggctttcatttctgttgcccaagatggagagcagtggcatgatcatagctcactgcagcctcaaactcctgggatcaagcaatcctcccacctcagcctcccaagtagctgggactacaggcatatgccatcatgcctggataatttttaaattttttgtagagacggagtctcacaatgttgcctaggctgatggtaaattcctggcctcaagtgatcctcccacttcagcttcccaaaatactgggattacaggcacgagccaccatgcctggccaatatttttaatagataatttcatattgcgtttcatgactcttcttatttagatacaccatgacacttgttgctggaggcctttagctaaacttggaatttctgtaaccactgtacatgtttattaaatgatgctagccctaccactttccattcccctgcgtcacatgcttacacaaagtcaaattggcctgctatggttatcttagaagccagcctttcacaccctgctgtaggtatggtccctgagaaagtaagggcagactctctttcctttgataaatttgtctatcatctctgtcttaggaggagtgatttcctgattctatacatgtaagatatttgtggaaagtcacaaacattactggccaattcaacattcttattccgttttgggtgacttaaaccatacatattaacactagcattccttagatgttgatagatgagtaagaatcagattgtgcacttcataagtacaatggggtggtagtggtggggtgcggggggaggttaccaagaactacggatactgcaaaacaaatcccttaagtaaatagtggaaaatgatagtttattttaagccctttgaaaagttgaaaaatgatgcaaaaggaaagaactcgtctgttcttagtcagcttttgacctttgactatataaacataagaaacacatgagctagagctaggtaactaagcaggacttctctgccagccagatgagcaaaatgaatcttcccattaaggtttatagagcaccactacacaaaactatcacactcaataatttattcatgaagaaggtggttgctaagatcttggcattctcagtaactttttattttttaacctataaaatgaggagattggacaagatgttttctagtctttccttctctaaaatgttgataccaggacccaccaagtcaggctatctcagaatccacacaatagttcctgtcattccactgctctcatagcaaagccccttattatctggcttgaaagttctgtcgtatgtcatcttgccattagcacgcaacaattcacacacatagtatgcaaggccctgccaaaagcatccacgaaggacgatgaaagcctccgcaccaacatcatgtgcctctgttactatgcactgaaatgacctggcaggaagtgggccccagaggaagaaggggaacaacgactcctctaacctttattatcagaatctgtttaggtttgttatgtgccaccttgaccttctaactgctctatagcaatgcttatctttcatttctttcaggtgaaaacatacctccaagaaaccctatttatggcaaattcctgtgtaaccttcaagtgttacacgccctgtgacatctgacatccccagtaagactttgggattccttcctctctaagttcccaattcatgttgcacatacactcgtattataatcttttccctgccagcatgtaaggtcttcccaggaagggctatgtcttttgcctttgtatctccagtgccctagtgcctggcatataagaggagctgaacatatatttgcatagtaaatgaataaatgaaagtcttttctgaccagtttcatcctgctccgaccactctttcattatacagcttagactatttacatctcaccacacaagcataca

SEQ ID NO: 65895 - DNA, 3883 bp, Homo sapiens
gggccagactgtcttttccttttaaagggaaatactgaagctaatttaggagaggcaaactaacataaaatataaggcaaaggagtgggaaccaaggcatttggtatctatttctagctcactgggcagcagtcctctgtgtcttgaattctgtgatttgcgaaatatgattcataggggttgcaatggaatatttctgagtttttaaactaatgagggataaatttttaaaatccctgtgctgctgtgaatgttctagaaattattcacaagtttattatagcaaagaaaatgggcaaaaggaagggggtgggtacaggacgtgacactccagaaaagaaggcagtgacgtaaaaaatcaagaggaagtccacaccaggaaatagtgctgtgcacattagagctgttactgaataaatacttgttggaatttccagagataaccaaacaaacatgaagaaggaagtgggtttttttttcagctttattatggaaaatatctaatatgtacaaaagtaccgagaatagtaaataagaacgaccatgcagcttctatggccttacttaacggccaacttgctttatttttcacctcccgctccccactattctcaagcaaattccagacatcataccatttaacccctaaatatgtcgcacatatctctaatgcaaaagattgggaaccaagacatttggtgtctatggctagcacactggatagcagccctctgtgtcttgaattcgtaacatgtagaataagatttatagtgggttgcaacccgactttatttttaactaacagcaatataagaggaggtggctaatcctcacaaggctctccatgagggaagctcacccctataaatccaggcgggcgcttcgttacccaggagcccaaggtgcagctccgggacgcttcttttcaaggccgggacccctgcagcggcccgtaggacacctccctttccgagcacggactggtccccgcccctcccccgggaagtctccgcccacagggccccagcagcccccgcgcgccctcgctccctcccgtcagcccccgcccctcggcgaagggagcggcgtgccgtccgggtcgcctaggcctggggtcgggagcgcgcacgctgtgcgccctgggcgcgctcgggattctcgcctggcgcggctggggaaggtgaacagtgtggcccgccatgttcttctccgcggcgctccgggcccgggcggctggcctcaccgcccactgggtaaggaggctcaagctgagcccggcgctgccgccgcccttctcttgctctccgtgtctcccttagttttgggcgcaggagagccctgggctctgcacgggcctgcaggcggcggcaaggacactgcggccttagccctcttagggaggccgctgcagccccaccgtgagaagccccgagggagggttgccatactgggaagtgtactcctagtttggtcgaggaggacagaaaagaggggctgcttggtgatatatatatatatgtttgtttgtttttgctgttttgctgtagcgcagaatctaggcctgctctggccagatcagtttcgaagaccgtcgctccgaaggaggcacctctcgtttcaagcctagtgacctcgatgcttttaggttgcagcatactggagagctctggcttgcttcgtgaaggcttagggagaacttcattagggctggaaaagggtggccaatgtttgatttactgcagttgtgctttgcatatcggaaatgctggctaaataaacggtatcaaactaactctgaaagaacggcgccgcaaataacagcacccaattaaagaaccacaggattttagagattaaatgatctttttgagatccaagtacatctcatggtaggcaaggaaattgaattgcagagaagttgaaacactccttcacgttaatctaaaaatgcagatttccagaaatgtcgattataacaacagggcctgttacacaagtaatactggaaagaagccttagttttgtttgttttctaagagtgaaataggttaagtcagttctcagcaagagggagctagtgtatattcattgagaatgaattcagggctttagagttagactcgagtttggatgttagcttaactgccttttgtggctctatgactttgtgctgttaatcttcctcagtttcttcagttgtaaaatgggaatattcctttttgcagagttcagtctttcaataaacatttgaagtcttactgtacgtcatgcactgctgagctctagttaacagtgtggataataatgatagtcatttgataactgttttctgtatgccaagcaccgagttaaatatctacattccacatctcatttttgaggctggtattactttttcctcatattacagataaggaaaagatttagacagttcccgttcttttggaattgatagtctcatgtaagaggaactttaaggttgagacaatgtaaaagtacagtgttagagagatgaatagggtcatccaatgtggtttcaaggtgcataagatttttcctgaaggtaatactaacagattgggcatggggtccgagggtattctaggtggaaaggacaacttaaagtcttgttggcaagaaaaagatcggtatgtatgagaagccaccctctgctgttggaggtaaggtgtgttcccaaatgaaataagggagagacaggggccagatattggagctcctggcgtgccatactaaagaatttgattttagaggccgtcaggagtcagtgaaaggttttaaagtagaggaataagatgtggtttctgttttggataggtcactggataggactgagggtggaatgggtttgatttggacccagaaacagggagactaagtagataagaggctcttgcagaatgctaggtgaaagatgatgaggatcagacatggtagaaagaaaagaaattagagtgcttgtagattttgtttcttttgtttttgaggcaaaggggctagaagtataaattgaaaagcagttttaatgaaaaagaacaacttgaggtagtggaggaccattgtaatccaggtttaatgtttctggaactctctttctctccctccctccttccttccttctctctctccatccgtctccccttctccctcccccttccaccctccccccttttttaaacaaatagtacctgatatgcactatgtacacaataaatatttgagttgatgaataagtttaatttttattacacacgtcatacgtgtgtagaaaaaacaatactgagactagcaagtagagtaagctcaaaaaataaaaatcatccattgtcttgtcaacctggaaattaccattgttaacattttgatgtctacacataacagaccttacagacaatttgtttctacaaaaatggaaaggtatttatactgtttggtagcctgctcttttgtaatgtattctgaacagctttccttatcagtagacatttctatactgtcattttaatgctacatagcattccattgtgaggatgttctattacttatacaaccaggcccttctaacctttcacaagtagtgagatttcacattaaacctagcaagtatcaagaaaagtacaagaaaagtctacctaagttcctttcctaaatgagaaacctttaaagattatttacgctttcaaagaaattgcctaatctaatttctgctttgctagctgccattctcttgacgaggcttttcagctcatcattgcttaaaatatggctagaattaagtattagtttgtgtgatcttgagccatcttaatctctttgagcctcatttttcttttctgtaaactgagataatacctcataggtgatt

SEQ ID NO: 65896 - DNA, 3282 bp, Homo sapiens
actcatcactgtcaagttaatggatgagttctcagaggcaaaggctttatagagaaaagaagataggagtgtgaactgagccctgaggacagcctgcaaggagtggataaaaagccaataaacagaaaatgttagtgttcagaaattaggagaagactgaatactttccctactcttaaaattaatccttttattataagtatacagtcttttctctcagaatttagttaagtaactcactgatgttactcaaaaattgttactcgattaaaaaaattttctgagctaagatgacagtgactgtcttctaaattttagtttcagttaatttttcaaaacaaaaccaacacaatcaaagcccccttgtgcacctctgactgtatccctccctgccttccaattatcctgaaattgatatttatcactcccatcttttgtacgtgtgtctcacatcctgtaccttagtcttttcttgttaattaaagcagatgttccatgtaaacttatttattaatatttcttcaactgaaatatcatttggacctagggtaaagttaaatatactattgtgttatattactccgtttactttcttctatgtttgcctttgaattgtccaactctttgctagttccatgcttggtttaacccagccagtgttctgccgtctgtggttagtagaactcagaaattggaggaatccagaacagtagttgaaatacttgggggcgggggacagggtaggagtggagggtaggagcaagagggcaaagagaaatgaaatgcagctgagagaataatcagattccttccaaagcaactgaacattgtcagtccgcatagcatcataaatagctttctgaaactacttttttttttttttttgagacggagccttgctctgctgctcaggctggagtgcggtggcgcgatctcggctcactgcaacctctgcctcccaggttcaggcgattctcctgcctaagcctcccgagtagctgggactaccagcgtgcgccaccacgcccagctaatttttgtgttcttagtagagatggggttttaccatgttggccaggatggtctcgatctcttgacctcgtgatctccttgccttagcctcccaaagtgctgggattacaggcatgaaccaccacacccggccagaaactactttttacggctggagtttcagaactaatttagtaaaggattgaaaaggaaggaggatacagttgactcatttgtacagagtatatgactcatttgtacagaatgaaaacatgtttatgaaggttcacactaagtgaaagctggcatccaagttgattcagacaaaagtgaaagtcaagaagttaatagtacattaattctccaaatgcatgccagcagagcgtggcaggaaggtacacaagtcagcagatctgggttgtcctggttctcctattgactcgtgtgtgtgatgttaggtgggtgaatcttggctttgaatctccatttgtaaaataactctcctgaaatagagatggatagggtagaataccatatttcttaagatcttttataagttgattccattgttgtaaattatgaatcctaaagtatttctttatgaaaaattttttaaggctatgatttactaaactttcttaaaattttaaattttagggaagacatgtaaggaatttgcataagacagttatgcaaaatggagctggaggagctttatttgtggtaagtaattacttagatttctttggaaagaaaagacttggaaattggggtaaatccattgtaaaaatccaaaatatcttaaataccattgtctttgatatatgatggtcatcgtgagaatttacatacagctaattgaatttactacatttcaaaagatgttggttccagttgaacctcatgagtttaaattagtatcaggaaaactctgggaataagaatttatttccagtgaaattactgtgtgagccctaacctgattctcatcacactttgggttctcagtcatgttggcttactgagagtttggagattgtaacttgttgaatcccaaaatgacactagtttgaaactcatggattttagtaatgtagtaactagattagcagctggtctttatatttttagtttccggagttttaactataaatagaagtctgtgaactccccagattagttgcacaatttggaaaggataagatattatatctcccttttctgacaaggtgctgttttcagggattaatctagtataaaggcaatatagtggacttgtgtgatgatttagagttagtggtgtaagaagtagcttcctgctatatatcaagcatcaaattggccacatatttgagatcattgtccagagtgtctgttttctttcctcttttggcttatgtcctttaaaaagcagaactccgagagttaacatatcaagagattcatttctgtattcaccacacatacataacattaattgatcgtaagtgttaatctcagtgtgactcatttgatttcctgttgacatgccatttcttgtcagtttttgaagagggcctgcttctgctcttttaagaagagataaagcttcttgctgttggctattatggaaaacgtgggaaagagatggtgctgtttttttttttttttttttttttttaagatggtccttttgtaccctcctaaagtaatgggtcttaacccttttggatcccagatccctttgacaatctgataaccttgcttttgggaaaatacacatatgttcacatttaaaattttgtgttttaatttcataaaggcttccaataattggtaatgttttggtaattctatcagaagatcttactctctaatgaagctggataacactttttgttgtttgggtttttttggtcctaaaggtacttctcttattctttaaatggtcctttgtaaatttttaaattctgctaactttactttggtaatcatacttatcaaatgtgtgtttagacattctttttgatggaaggatagggtggtatatatcatgttggaattaaaatggagagattaaacaataagtaatagtatagtaatgtacagtgtcattcacacttgagagaatttggataagtctgaaaaactgtttttgttgtgtagcacagagatactcctgagaataaccctgatactccatttgatttcacaccagaaaactataaggtatggctaaattaacattataattaatttaccaaataggtaatattttctagatgtataaaa

SEQ ID NO: 65897 - DNA, 2942 bp, Homo sapiens
ccaagttaaatgtaacactattccacctctagccataaggtgctctttttctagtcttgttgaccctaaagatttgtaggtgggagaaatcaggaacccaggaaaggaaaaactcctgatctttaatgcaggtttatgctttacatagtaatttgatgggacctcgccgtccctgtcaggtctgaatgtcacttcatctgctgtgatcacacctgaaccctcagttcatcaagacgttaaaggacagtgtaacataaacttgtaactgcatgcactaagtcataaacagacgctgttgttgcagattaacctctacgtaaataacgcgcccagaagggagtgagtacacgctgctgccacgctgcgacggtcaattttcctccggcacccttcctagtacctgagcagctccctctcaaatccccaacactacgtgtgggagggtgcactgaattcctctttaaaaaggccactggaaggcgtggctgggaggggacgcgctctagaccccctggtgccagggcaggtgcacgctaccgcgctttcggggcggggcccagggccccacctgaggcggggggccgcgggctctgggcgtaggtgcagcttctccggcctggtgcggggccagacggccgccgccggcttagcgggggaacttcgcctagtcctcgggctgcggtcgcagcgtcattttgcctgagttggatcacgctcgtccacccaccccgtgtaaaaataacaggtgaataccctatgtgggggtcctcatcgccgccatttccagaagcttccagtcacagccactgccacggtcgccacaaatgctactgcagagcccgcttgcccagcagcgtcaccggcgcctgccctgcctcttcgcccagcctttgattccccctcctttgtcggatagtgtctgcggcggggaggcggtgacactagtccgagtggggcgtggagaccgaccagcacgaagggcggagttccggcccgcacccctccgccgcctgccgcttggtacgtcccgcttccccgccctgcggctcgcggagcctggctgagcagcaggaggggcgggcgccggggggcggggcggtcacgccgcccgtcccgtgcccgcggtagtcacgtgtccgcgggtgtcacgtgctcgcgtcgcagccaatcgcggggcgacgctgtcctgggagcgaggaggctgtggtgagagacggaccgagaccggagatgttttcaagcccggctccggcggctttacaggcggctgcagcggcgacgaagacaacgacagcgacggctacgccgaagcactcgttccgggggtgaagcctcctgcgccggccttgcctcgggtccgtacgggtgaggggggcgtggcgacaggaaaggaggaaggaggggcgcggtttcgagcttgtccccggcgccagggaggagatcccctcagttctgcgctgctcccgttccccctccccagagcaaggtaggggacgcgccctgcccgccccccccggtcccgacgcgccgcccgcccagcctggcccgagccgtagctcgcctgacagtgacaggccgttagtgccccccggcgcgggtccgccggggccccgcccgccgccgcccctcccggcgtcgcgaggagccgcggcgcaggtgggagccgccaactgggcgggggcgctgcgcggggcggggcgggggccgggcggagggccgcgagctggcctcgtcgcgggcgcccctcaccgcggctggcggggctgggctgccgccgcctcccggaacatggcggggccggaggagcgtgtgcgtgcgagtgtgagtgtgcgcggccgagagggcgccgctggcgtgcggcggtcggacccgcgggggcgggggcgcgcccggcccgccgcgcgttcccgccgccagccgccgagcgtgcgccgacgccggggagtctgccgcggccgctcgggccgggagcgtcggaggtacccgggtcctgggagaggtggatgaaatcaagaaggggaaattgctgctttagtagtgtccggggaaagagcagccactctacagttctgtcttaaatgccagtgtaaaataaccttgccgcattggacaggcagttcccgtcatcgtttttcaagtacccacttgtgatgcttcaagacccctggagcacgtcaggttcttagatctcgttttgaggagtgatgtggagtgacgcatccttacagatcccaaagcgttgaataaacggttgtacaaagaggtatgcgaagcttagctgacagctgttttagtaataacagtaagacgctgtctgggataggaagttactgttgcactcgttgaaaccttaggaaacatttaaagcagtgtagtcaccgggattgtaatttccactggacacccgtggttaaactgcgaactaaggtgaagtgtgttgcagatccagtgctgtgtatgtaatggttcggaattacctctaatcctaaagttgaaatgagcctgcatctgcagtcatgtatttcgttttcattttagaatggtttatgtaaattataaagaaaggctagtgaaatagctattttatcgtaaattaactgtgtattaaaaacatatgcacagccgggcgcggtggctcatgcctataatcccagcactttgggaggccgacgtgggtagatcacctgaggtcaggagttcgagaccagcctgaccaatatagtgaaacccccgtctctactaaatatacaaaattagccaggcgtggtggcgcatgtctgtaatcccagctacttgggaagccgaggcaggggaatcgcttgaacccgggcggcagaggttgcagtgagccgagatcgtgccactgcactccagcctgggccacaagagcgaaactccgtcgcaaaaacataccaaaacaaacaaacaaacaaacaaaaaaa

SEQ ID NO: 65898 - DNA, 578 bp, Homo sapiens
tctattatttgagtgcctactcaaaagcagattttcaaacagggtatttacatgtccttctaaagccatttgatgtctgaaaatatttttcgttaaccctcaggtatagctgatagcttagtatcaccaatagcttagtttgagtaatgattttggttttaaatagtttccccttaacattttgagaatattactacattgttttcttatctctgatgttactttgggggaagttctgttggcagtttgatttcttttcctctctagaacattttgaaatcctttgtctttttcagtttcgttgtaatgtgtctgtgtatagttcattttcctggtttggcccttggattcatgtttacttactcatttatcaaatattgaatttgtcaggagcctactgtgtgtcccaggatgtattccagacaatttaatctgagttctttcaccttttcttatttgggggaaattactggtcattttttcaaatattttgttttctccattttcttctctttatggaaaaattattggtcatttttttcaagtactttgttttcttcattttcttttctttacag

SEQ ID NO: 65899 - DNA, 1355 bp, Homo sapiens
cgatgcagagctcagcgccagccactcacaaggagcctggcaagttttatcgaattggtgaacgaagttcgaaagctctacccttggagatccttattcagtaggtctgaggtagacctaggaaacgcgcattttatataaatcctacctctgacggcaaacgacaaggggttcacgtgccagctctcctcggcgacgcgctaggctactcagcgccccgagcctcggcctcgcatcgctagaacccggccatggccgcttccttacagggcagctgtgaggagtcctgaggaattttagtacacggcatatcctcagcgtagtggctagcacatcacaaggctttaatcttaacactgttgatcttaacactgcaactgagggggcccggagaatgggcctgacaggagggtctgtcggaacctgagggactggggatcccggtgcggagaagcgcgaagggaaatcgcgttgagcagctggggtgggtgcgcctgggggcgtggcctgcgggccggcgggcgggcgggagcctgcggtggaggcgtggcacgagggaggggcgaaaccgggtggcgcggagggggcgtggcgttgggaggggcggggggagtgggcggggccgagatgggggcgtgcgcgctgacaggagcgccgggggagtgagagacgcctcctggcgggagctggcggctgtggaccccagcgggggcggaggggaagaggggagcaggggcggggagcaaggagccgggaggagggcggcgggcgggcctgtctctttaaggtgcccgaggctcgcgggcgctgcgctgaggggacggcgggaggcgcggcctggcctcgcactcaaagccgccgcagcgcgccccgggctcggccgacccggcggggatctaggggtgggcgacttcgcgggaccgtggcgcatggtgagtgggagcggctggggggttgtgcagcctcttggcctcttggttgggaaggggccgggcgccgagctcggccctctagaggcccggggccgcggcgagcttcgcgggggccgggagaagcctgggcccggctgcgcggaggacaaagtgggggtgctgggcgcgggcgcacaggccggacgccgggagccagcagcatctctgcgccgctttggtccagaccatctctgggccggcccgcgtcctccgcagcccgcgtcggccgagccggggtgggggtggttccgggtgcccggtcccccacaccgctaccggcctctgcctcgcggggcgtccggcgccttcggggccctggcaccgctctacagaggctcggctctgccctggtcgctgtcagtgccatctcccttaacgagaaac

SEQ ID NO: 65900 - DNA, 2346 bp, Homo sapiens
taaggcccagcgtggatcagtgcctgccccttggccgaatcagtgctgtcacaggcagagaattgtcactgccatgctcacctgcccaacccagtggtcagagaagactgttctactgcgagaggagccatgagaaggcttttccgaaagtcaaagaccaatggctacctcagaccatcccgtatccactcgtgggaggcccctgaatgaatctaaggccccaggggttgaactttactgagtagggagcgcagagtactagggacaaatttaccgcccgctttgaggaaagctgatgtgggagcagagagcaagatggatagcagcggccaatctaaacgggcaacgaagtgccacagagtgctgcacgtaggaatgcgagtgacaggtagggtcgtctattccaagtccctcctctcccctaataaactgccacatttcagaaaacacgaagactgctgaagccgtttccagccttcgctacgcattagcagagcaactcaacaagcctgggtgaaaggcttctcgaagaaattcagttatctctactgccagccaaacacggactgggcagctttcctcgggggctgctcggtaactgctgagccgggggcgcgctgaagccctgcagaagcccacacccgcttcaggaattccgtggatgttcccgacagaggtttattcccgcctatccctacaggcccacggcgctctttcctccaatcccacacccagtcgaaggcggggcagccgccccacccagcggccagccgggcggcccccagtctggtttaactggttggaacgactaaagcacgctggcgcaaggaaagctctcaacttcgggagctgaggcgcaggctggccagagcgtggagaggaaagccctttccatcctcaaggccgttgcaggagatgcccgcgagccaccttcgccagcaccacaccggggtaagccgtccgtccccgaaacccgcaaggccaccgactgcgcaggcgcctgcagagcactggccctcggcgcgttctctcgcgctcttcttcagtctcctcagcgagcctggggacgaagggggcgcggtgcctcctgggtgttgtagtttgcttccttggcgagaggccttcgggctggctggacgccggggccttgggaactacgcctcccagcgcgccccgcgcgagagcccaggtcgcctgcccttgacggcttcagccgtctgagcggagaggaggatccgggaagccggctgcggcgggaggagggaatgcgcgtgcgcgctggaccgcctcgtcccgttccgtcccaatcattgtaaacaggcagaggctgggcggggtgggaatggggcgcccgaggccggcctggggcgcagcgcaggaggcggctccggtggctgcggcggcagcgtgagcgcgaggaggcggaggctgcggcggggcggacggtcgcgcggcggcaggcacaggtcagtcgcagggagcggtcgcgtgctagggtcgcggcgatacccctggagtgcccgaggaaccctctcccgcgccggcctcgcgcccgcgtctgtcaggcagcgtgtggggctcggtgctcgcagcgctcgggtttgaagttgggggtggggggcgtggctgcccctggcgtgggttcctccccggaaagcttcgccccagttttcgccccccttggccgtgcgtccctcccactggccgacgggcctcccttcgtggcgtcctcgtttgtggtgctctcgggggccgggggtggagagttaggagtccccaggcctcggggaagctcttggggggcgcctggacagaggctaggggacccagccctcacggttggtggatcgtgcccggcatagtggccaggctccagggcttacccaggggaccaggacaggctcctggtgtcgcccaccgctggcactgagcagtgggcgcctttgggtgctgcgatccttccttcaggtttcagtgggaatggacagacagatctgaagttgaaaattcttttcacaactcatgttcaactatgtgtgttgtcagaatgctcttaatgaggtcagtgttctccctcttttttttaaaactgatcgttgtgagagtgaaacaggttttacagaatatttaacacctccgtcttccctgaagtaattctgctgtttcaagttttgggattcagtattacaaagccttcctcttgagcaaggcctagtacaattcttcaaggtccctagcatgttaattcgaggtgttttgaacgtgcatatacaggaagtgcagccgtttggccgttgagttagtgctccatccagccttgttagaaaagctttcgctgaattttta

SEQ ID NO: 65901 - DNA, 649 bp, Homo sapiens
gaacacctatcctgacttcatcgaggtcttttaaaaatccattaaaaattggaaccagatctgcagctgtcaattgatctccaagaataactgcaagctcgtggatggagaatgctagagttcgtcgaactttccactgcagaaatgaaaacacattagtaagctaaccacaaagtacgcagtactttaaccattaggcaatatacaaaggctaatttatatatgaatgttactaacctcaaaaaattaaatcagaataacagatactaactttaaatgcctaaattatgcatcgaaaagtgtaacagaaacattttaaatccctgcctagtacgtattatcttcctttcatttatgaggagaaaatgcttagcaatcgtgaagtttttgtagctctctgaacattggaccctggctctgacagtgcaagaagaacatgctctgttattactcctaagctcttccatacataatttcctgtagcactaagcacatgctagaacatgccgacgtactgaggctgcacatggctttgttattactcctaagctcttccatacataatttcctgtagcactaagcacatgctagaacatgccgacgtactgaggctgcacatggaccaaaggatctctagcaccctccccgg

SEQ ID NO: 65902 - DNA, 688 bp, Homo sapiens
agacttctgcccaaaacactaagttaggtttattctcagctccaatttaaaaacaacaacacaactctaattcaaatttaggaactttcaaattcttttactccaaaatataaaaaaaagatgtaatacaaacataggagcaaggtaacaatagtttaataaacatacattcattgttttgaggagactgagagaaaaggaccagaaataataaaccagagatcaaacaaatgtggcagcagacttctgaactttacctcctgaggtctatttatctttcacaggcaggaacaaacaaaaagtatgcatttaggtgtcttggttttttattttttggaggggggagggcagtggatcgtgtagctacaggcccaagcatatttacaaaggggtttttctctctgtctctctctctctctctttcaattttatgtgggaagttgttagcagaggtatcattaattgatccaacacacatgtgggtaccactgaaaccattttaaaagcactcttttctaagatatcaatgatattatctctaaataaagatctctccatccaggcttgttggcagcagtcaaaacaggctaccaggtctcacgactcaccctcccaaatccctatttaacaatactcctaaatatgattcacgttcaagggcaccttccaaaggtttctgaatgattcc

SEQ ID NO: 65903 - DNA, 2608 bp, Homo sapiens
attttctgaggcttagaaaagtacatataagacgaaaaattcctttctaaatatcaattccgtcgccatcaggaaatgtcagaaactttgtctttttaaaaataaaagcgtcaactctttaaaaacttcagtacctcaaaggaaagctgcactgttaacactgaaggagggctgggtgatttctgaacatccgcattaaagaaatatgctctccaaacctagtaattcctgcggaggccacaccttctaaccttctcgtaatccactaatcaaatcgggagcatctgaaaactgctaccagccaaagtaaaatgacaggtatgtcatcctcaaacaatccaaaaccgggtcggggagcccagacggctagccggggcccaggctgacccccgggcgctcctggaagagcgactctaaggaaacacacctcccgcgcgagcctcttccttcctagagtgacgggggaaggggacaccaggggcagaaacacacccaaaccccacttcaaatcctgccccaccgcttctccttccaaaacagccgcgccactgctgagcccgcaggcgattcgggggcgccgggagaagagagcgaagggcggaaagcgaacttgggcgttactccgggcgtctccctcccccagcggaacctgggcgcgccgtttcctcacggacgcgagattttcccccccgatcgccaccccagcccgcctggggccgccctcgcccaccgtcccctcagccagccagggcccggcccaggcctcgccgccgcccgccctccccggccgctccccgcggactgccaggccaccgcgaggccgggccactcacatccgtctgcgtcctcctgcaggtcctcctgaagcagcgagaggtctgcgccgaggggagagaagaaaggcccggtcagcgccccggggcccggcgcgacgccccccccccgcccgcctcccccccgccccgggggcgccttcccgcgccgggaccccacgccggccccggcccggcagccactcagggctgcggcggagggcgggtgggctcgaggagccgccgccgcccggagaacagggggccacgtacccgccatcttgtggtcgccccctcctccgcggccgcccggggagccggggctacatggagcggcgcgagccggggagccggtggacgcgcgcgggaggggcggcggggaggaggagggccgggctggcgggggcgcgcgcgcggggcgggccgagggcccgggcctgccgcgggcggcgcggctcccggccgcccgggcccccggccgcgccccgccccgccccgcctgcccctccgcgcggctcccgggcgaccggcgctcccgcctcccgcctttcccgctgcttgccgggtcccggcccggcgacgcgcgctcacaccctcctcccgagccgccctcacgccgagcgctgcggacgggggcgcgcaacctgccgccggccgggaccctgcggcgagtgccggaacccggccgggcggggcctcccgcggcccggccgctttattgggtcaccggcctcgcccaccgccctgccagccgcagccatctcggcgggcgcgccgctcgcagccagcgccccatccccaggcctgcacgtacgtcgtcggcgatccggggccgggggcggctccgaggtcgtcggggccggggtcccacctcctcttggaggaagcgccgcctccccacccgcccggggccctcgccaagtggctgctaacaaagcccagggcccggctgcgggatggttgactgacaaagtcatgcctgcctagccagcttcctcgtgcagcacggtgaaggctggggcgccgggtttttactcccacgtcctgccaactcgagctgacaaggcgggcaatccaccagcgggagcgttggcaggcccggggtcagatcctgattcagccagttaattggtaggagtggggcccatttgtagaatgaaggtgataactgcctcgtggggttattggcattaaatgaagaatgtagggaacctagcatggttcttgatgtctaggaggtgctcggtgaagggtgcctatgattcgctttgtcttctaaatacttttggcagcacttgaggtgttaaagtctgtatcccagactttattagtcttgttgttttacgtgacttaagcgattagctcaaacgcccaagtacaaaatggggctaaacccaggttttccgacacgattctacctccatggctctatctccagctccacccaaggcctccaaaatggtgttctcctaaagtgaccaacaaaacaccaagctgtgtcatggtgccactttggcgatgtggtctcttaggagagggaattctaagtagttaattagcttgttcctttctacgttgtagtcttgaccaaggacaatgtgttggcatttaatgccactgaagatttaagagactaaggaatcagatcctctgagattcctaaatctgtgtaataaaatgggttctacacatagctattccaaaaaattcagtcagatattactaacaagatagacagattataatctgtatgaaatttctaggagtaataaaaatcagaatagaccccgtaaccc

SEQ ID NO: 65904 - DNA, 617 bp, Homo sapiens
taaatacctcacaaagaataacatgttaaaaatgtcatattagcactgggcagggatcaactccatctatcagccatcaactggatgccccatgtatctttttctaagttatgatttttccagttctaataattcaaaaatatccataatcaattcctcccttacaaccataaaggaatcatatcttgtgaaagatatggggtttatgtatatagtttttttcttccttatgcatttaggtagatttgcataataaataatctaattgttttcacatttagggaagggaggaatgttccaagctctttatgctgagggaagagtaatggctgtggaatgcagttgaatgactttctgctgacgtgctccttctggttgctagggtactcacccatatgtttatacacttctgtaaaaacgacctaaggaatgaagaacggatgcaagcacttcagggatttggagatcactttcacaaacctattaaatttttctttcatctgtccttccaaagtcagaaccatatatttaacagaaaacatgaccaagaaatgtttatataaattcatagttggatcgttgggttttgatagaataatatcattggagcaaatatt

SEQ ID NO: 65905 - DNA, 1582 bp, Homo sapiens
aaaatcattgtatataagaaatacctgttttcaatgtaaatgaaggttttatttttcatttattcactgaataatttttaaagcctccatgttctgaatttggtactagccagtaagaaaataaaaatatcctttatatagggaaatagaaatcattccagcatataaatgctatcagagtctcaggaatgcttttctggaacattccaaagctgaattggcaggctctggcttttctctggctcgcatcctcaccacctggatggtttccctagttatgatctccctacccataatggaacaagagttcttagaactggggtcggctgggcacagtggctcacgcctgtaatcccgtaatcccagcactttgggaggctgaggcatggggatcatgaggtcaagagatggagaccattctggccaacatggtgaaacctggtctctactaaaaatacaaaaatcagccaggtgtggtggcacacacctgtagttccagctactcgggaggctgaggcaggagaatcgcttgaacccgggaggcgaagtttgcagtgagccgagatggcgccgctgcacttcagcctggtgacagagtgagactctgtctcaaaaaaaaaaaaaaaaaaaaagagagctggggttaatcattcacctgcattgacctgagatgccttagtcatggttagttctcccacacttgttcttcagaaacctctgaaaccacacccttgtgaggtaagaggccttccagtcaacaagtcatgcagttctctagctaccagggaaacctgattagatactaataacaggaacctctcggccagatggcatccactcacctctgtgcaggggtcaggcattttagtgtgcacttcctcaaacagtctaaccatttctcttatgtgttgtgcatggtgtcaaccagaacgaaaacttcccactctacaagtgtataaggcagtaaaagatgctgctttcacctatgagtttctgtagcacacatgcttcctcttcatggcttgataccagcacggtggatcccacaagggcgttttagcttagagtcactgccctctaatgttagaggttagaaatcacccagaggctggtccaacctctttgcaaagagcagattgctcaaggacacaggcatctgggagaagagggtggttacacacccttattcccaacacttgccattcccatcatgccccatatttctcatctgtcaaaaacaggaagcaatagcgttattgaatactattagtgtgagtactaaagaagaaaatatataatgtgcttagtgcagtcactatacaaaatttaggaagtgtaggcttaaaaaatattttattaaaaatgaggtttcactgtgttgctcaggttgcactagaatttctgggctcaagggatcctcccacctcagcctcccacgtagccgggactccaggcacaacaccatgccctgcagtgtaggcttacattttaaaaaacgtttcatctggaatcttcaacacttcaatagtcatggtgtccctgtgttcctagaaccagatggtaaagaaaatagaacagtctt

SEQ ID NO: 65906 - DNA, 1144 bp, Homo sapiens
tggaaactctctgcactttcttctcagtttttcctgtaaactaaaagtgctctaaaaaactgttattagtttaaaaattatgtcttagtttttaaaattatgaaaaaatttatactatgtagaaatatataaaataaaaagtgaagtcagaggattttgctagctcttcaatcccgtattcttcaatttacataaccaatatttagagtccaaagtgcatgttaaacatatttcttataagtactttctgtggacatgcaggtatacaagctaaaaatgaaaacgtatcacactttacctaacaagccacaacatacattcccagtccacttaggtcctccttattctttttcactgctggttgccagcctctgggaaactgagtcaggctgccaagtgatgactgttaacttgttattaagttgcaggctgcaattagggtataatacaagtatgccccgtgcaatatttgggacatgtgtatactaaaaatttattagttctttatctgaaattcaaattgaactggcatcctgtatttgtgtttgctgaaggtcacaacccttacctcacccctcctttgggcttaagccaagctggttgggtttccgagtcttgcaaccaaagggacctcaatagaagcaggcagttgtgcaatagggcttacacaggtgactcaactttaattgtgacacagacaagattaaagtctaattgttttgattataaaagttcatgttcgactgggcgtggtggctcctgcctataatcccagcactgtgggaggctgaggcaggtggaacatttgagcccaggagtttgagactagcctgggcaacagggcgaaacttggtctctacaaaaaaatacaaaaattaactgggtgtagtggcatgtgcctggagtcctagctacttgggaggctgaggtaggaggatcacctgagacctggaggttgaggctgcagtgagccatgattgtgccactctactccagccagggcaacagagtgaaatactgttccaaaaaaaaaaaaaaaagttcatgttcactctaaaaaaaacccaaagaacacagaattcatgaaactaggaatcttagtgtacatacagtttttttttactctgtgttttctacttaatat

SEQ ID NO: 65907 - DNA, 655 bp, Homo sapiens
cctatgtcctattccaaaacccattgttgcatctcaagaggaagttttgacaggggagttaagggttaaccagctcaggctggaaatgctgaatcacccaattaaaggagacttgctgctttgatgggaaggtctgatccaaaactgctggggtgactctccttgaccctaccgtttgggcagcttcatttatcttttctgtgtccctgaccttgatgttgaaaccattactcaaccctcagtgaagttcttaaccggcttttttgaaatgactcatgcatcaaggtccagccatcttgactttgtagggcccgatgccctgaattagcttctgagaacccagtgcccaaactggtgtccccaggtgggcctggcagaccataggtggcagctttctcggttctccttcacttcacttctctctggatgtgtgcgtgctttttctctcattgctaaggcacgccccaagctttttgcttatttgtttttattttcatcttaaaatcacccatgcactgttttacccctcccatcaacctacctatatgcataaatcttctctagttttgatcagctgtctttttttcctcctccaagccaccctctcttcccttctcactaaagaaattcttaaatgagaatcatgatgtactca

SEQ ID NO: 65908 - DNA, 904 bp, Homo sapiens
tcagattccaggatggaaaaaagataatttatatgaaaatgaagaagttgatgatagaaaatggtagataggaagaagttagggccagtaacgacaggcagtagttgaaatgaagaaatgtggattgtgaaaatgaaaagaaaatgtgatcgttctactacgtattgatttgaagtgtatattacttttacacacacaagttgagggtcatctttgtttaggttaagatggtagtttcaagtaagagggagatatggcatggggaaggacagggaagagtaaggttgtccctgtacattacgtttctgctgaccttaatgctgttttcgcgaattcctggtttagaaaactaaaagttctctgatctctggagaggcacctttctggtaggtcttgagaaaaggtgaaaaaaaaaaaaatgctgcttctctctccctgctctatgaaagccacaaaacgttggtgtttaaaagacaaagctaaatgcaactctaatgactcatagatcaatatctttcactgaccttaggaagatacacgaggaagtcaccagttagctaatgattctcagtttagaaagggcagaggaggctagccacctcccagagaaggctttaaggaagacttcctttaagtcataccagttaacatggctagacggtaatatattgtcatgctatcagaagcagctgcgtaactggaatttgagagcactcaaccttaatggatttttttttttttgacagagtcttgctctgtcacccaggctggagtgcagtggcatgatcatagctcactgcagcctcaatcacctgggctccagcgaacctcccacctcggcctctagagtagctgggactgtaggtgcacaccaccatatatggctaattttaaaaaattttta

SEQ ID NO: 65909 - DNA, 2495 bp, Homo sapiens
caaacggacacatccccccacgcctgttctccacagggcagattttattaatatatttctaacattggggcctcgtttcagtcttcaagttttttcttttttagcgcaaactagacgcgctctgagagccaaaattagcgtccgcgaaccccaccccattgcctccaacagacctagctctcctttccaccctcaaacagccgttactacagttcccagcaagcaccgcgcagggccgcaaagggccaggccctcggcgaaggccccgccccgcagggggcatgccgggagttgtagtgagtgggcgcttccctactactacttgtcccttccactgggcattcccacttggaagagtgtgatgcgctgccagagcagtttctctagttccgtactcggagctcaaggtgacagaggactgcgcttccagccctgcgctgcgcatcgcgtcggtcccgcggacctttgccccgcctccttccacacccgttcccttgacagctgggctgcgctccgggccgcggcaagccgcgagcgcgcaggcgcagcagccccgcgccgcgctaggccggcctggagggcgggacaagcgctagaagctcccggccgggggcgcgcacgtaggcacgcagaggccgtcacgtgggtcgccgaggctcgcaagtgcgcgtggccgtggcggctggtgtggggttgagtcagttgtgggacccggagctgctgacccagcgggtggcccaccgaaccggtgacacagcggcaggcgttagggctcgggagccgcgagcctggcctcgtcctagagctcggccgagccgtcgccgccgtcgtcccccgcccccagtcagcaaaccgccgccgcgggcgcgcccccgctctgcgctgtctctccgatggcgtccgcctcaggggccatggcgaagcacgagcagatcctggtcctcgatccgcccacagacctcaaattcaaaggtaggcagaacggggacacccccgggtggggtggggcgcgcggaccgctggctgtcggcgggggggcgcggagggcacgtccgcggccctggcccgagggagcgccccctcccccacgccccggcgccttccctttcccggctgctttcttgccgccacctcggccggcctgccccttgctccggcccgcttcatcccctcccgcccgccctcgctgcggtgcgcgcgccggccggggcgaggcggaggggagcccggccctggcgccgccgccgccgccatcttgcggtcccgcgggggcgcctcctgggcgtccggtcccgcccgcgccgcggtccgcctgggcccgcgtccttggccccagaggccgacggcgtgcttcggcggggcgtgggcggctgggcacccgagggcgtgcgctctgggctgcggcggggagtgggctctggaggtggcgcaagctgcgtctgtcgcccgctcccggctgtcagcggcgcggggaggctagggcacggcgcgggaccccttgggagtgagagccgccccccgacccctgccccggcccggggagagctcgctgcagccggccctcgggttccgcggagggcgtcgcttgtcacctttccgccaggtttagaactcggccgtcaggtgtaggacgcgccggggaggtggagagtccttggaggtgcctggcgagggctgcccggtgctgttggcacggacccaggtgcgtgcgggcaggagcgatgcgtcagccgcaaacggagagttgtaggttcatagtagcggggcttcctgccttctacgacatttcagtgtgccacccgcgtgcttttatttagccctttagttgagctcctctgctgagaaaccttcagtgcgtgtgacttttttgcttttacgtttgcggtttccgacagatcctgagaaggctgataaggtgtcacccagctctggaactttgtaggtttttgtagtactgcctgtgataagttttttagtctgacttggtgatcctggaagaatcccaggggcttttggtcggtttccttgtcaatatgtagtgtactttaggaaagagagttaaaatgtacagatttttattttttttctttgtttttaaggaatactgaaagagtgtgaacatctaatagaaagtaggttccttcctatctttagttaagtgtaaagtgagtcccgttttggaagtctatgtcttgtatttcaattgttgaatgagaacaatttttgtgaggtgtatagcaattctagtgctaaaagaaaaaattaaatcctttattgttgtgtaaggctgagtccaagagaaagccaactacattgttttccataggaaaaacttcaggtttaggaatttaaaatatattctggaattatgagattaatattgcataactacattgcaagctttttagtgcgtttacaaatttctttgaatagaagtgtaagtgagctacttgttgggtaaggatttggttttaaggtgcagtgaatgtatttta

SEQ ID NO: 65910 - DNA, 1341 bp, Homo sapiens
atacagagaaacttcagatgtaataaattataaagccaattaaccctacaaacaggatccacagcagtttcacattaatgaaaaagcaagacttcaagagggcgggagtttttgtctgctgatcttcccgcatctaaaatagtgcctgacacatattaggtgctttgcaaatattgaatgaaagaatacgccccatcagtatctcaccgcgcctgcgctagatgccctaggtggggccagccttgacgcgctgcgcctgcgcaatgtctctttgcggggcgcaccggcaggctcccagccccgcttcgtcgcagcggcttgggccctccggccctccgtagccgctcgactgtcgcgctgcaccagcttcctcctcggcgttcccacgcctatttgggcggattcttggcgccggaggaagaggcagggtcaccctctctccacgtcagagacctgactgtggagatggcggctcagaagataaacgaggggctggaacacctcgccaaagcagagaaatagtgagtgagaaccttccgggggcctgtgtgtagacgccgggtccgtctctcactggcgcggccttagcacccggggggggcgggagggagggctcagggctgaggggcctcggcgcgctggtgcccgcagggctgccggggctcggtgtcctctgggtcacactcccggggtcggggtcagctctgcggcgcctcgggaagcgccgtgggtccaccccgccggaagtccgctccccagagccggtgtgggcggggactcggcgcagtgctgcggggcgagggcttctctacttgggcgctctgctcctgaagattgtggtgggggctgtctgtgcatcggaggctcgttagcagcatccttggcctctacctgctgggtgccggtcgcatctcttccccatttgtggcaacccaaaatgtcatctggggaacaacatcgctctgttgagaaccaccgccctagaagagccccctgtgtggaggggaccataggtttaccccaaaaactcctcggtgaacctttgtcatctggcattttactgtccctgtgggcagggactgtgcttcgttcgtcctttgatgtgtatgtcctgccacctctggtacagtacgtagtaggcaccctgcaaatgtttgtgggactgaactgataatccttaattcatccttttggcagcctcttccccccgtttcattactccagtgcatttttatctggcagttacagttaatagaaagtcagcattgtgggccgggcgcggtggctcacgtctgcaatcccagcactttgggaggccgaggcgggcggatcacaaggtca

SEQ ID NO: 65911 - DNA, 1196 bp, Homo sapiens
gaggagccttgcgtttctgacctgggtcacacgcgggaggagggggcgagctgcacacttcctggatttctttgcttcgcatcctctgttctctccggagactggcagccacttttccatgttatctgattcgtctttcagatctctcagaggtcagggttttgcttttctttttcctattttattttattattattattttttaaaggtgacccctttggaagctcaagttcttggctcagcaaagcctccgaggaggactctgatttacgcacagaaatttgaaatgggttagatgggatacttagcaggatgcagtttccaggtctgtttaaaggagacaggttgcagcgcaggccgtgggtgggggacgccttggctcccccaggccatcggagaggagctgatgtaacagttctgtgacagccaagccttttcttcagattcatgctttttactgataaatattgtgaacattacatttacacaaaagaatgtctgactaatctcttggcacagcgcagaatcccttagttttaaatttgaaccagttgaaaagcaatcaatacacatttaaagaatgcagcaaatatcagacttttaaaaagtctatatatatatagtgttttcaaatttgaggtatttaatcgtacctaaaatgaaaggtaaagcgttcttagacaaactacagaattttcctctctctgtggtttttcagtagtccagctcaaagcaagccagactagtgctgtctacaactcgtaagcttttctggggttgataactatagcaggctcgctttattttattttatactctatttgctttaggtcaaattggagatataaaaactgcatttttaggggaataaaatgtgtagaaagagggcaggagaccaaacccaaagaacttagacgtggattaatgtatttagactaaggaagattcaaaatttcacaagcatacccttccttaataacaataccatacactggtgtggtgacgccccactcatagggcagccttgcagctgtgatctcacaagaaagcaatacgtgaaggctcatacacgccattaggaaagaaagaatgaagtctggctttgaataagtatcagtttccatattacagtaagggaaagcgggggagctatgagggaaaacctgaaggcttcaaatcaaaggaagctccatgga

SEQ ID NO: 65912 - DNA, 2370 bp, Homo sapiens
atactagcacacagactgggaccatgtggacacaccaatttacctaacatgtccagctctgggacgtgggaggaaaccagagtacctagaaaaatcccacacagacctggggagaacaagcaaactccacatgggggtggacctggaaacaaagtgattttttcccctcattgacattggaacaaaacaatattcaactacatttttcagggacctgctaaataggactaatggaagagagttaatagtcactatttttgttgcttttactttgttttctaacccatgttatgccttccacaactctgaccctaaacaaatgatggtttccatgtttttctgcaaaggcctgagaaggggtagggagtaagtgtgggcctgcctgcagaaactccctgactgcagacattttctttctgcaggaatttcctgtcccatgccctgttcgttcccagggatctatgagaagcacatgggttagaggtgtgagtagtgacacccctgaggactgtgagggggtccaggtgtaccattcctgagtccccctggatggaaatactgcagacttcagagaggaacagaagagagaggaattaatgtagatatttaccagacacaacttccaaatttccagattgggggcttggccctactccatctctgattctgggatttcacacgtttctcagactgaattgctgcccccacagcccccgccccatatttctttcaaaggactacatatcaacccatctatctcagggagtagccatgtgggaagaaaaggtatgagtaatttgtttgatgattcagaacatgaaaagtatggtttaatgttcacacagttgctctccacccagttgccttagggagttagtttagaacggataaggaagggagaaaacgcaaaataaaccaataatatacaagaaatggctgctttgttgatgaagctgtcaaaatcagaagggagattcttttgtgaagaaatgttgaggccaatggatctccttgctgagaacttcagtgctcttgataatctattgttcaaaggaggaaaaaagcatcctacaaaaatgtgtaatttcctaaagtgaattgtcatgacattcaacaaaatgcagttttgtcagagaagtcatttccatatgtttcagataattgatttgtgcgtttcctactgtgaccagactgtaagcttcttgagagcaggagacaagtgccatgcccctctggacactcctgagtgtctagcatggggctttgcacataagatgtgccattaaatattgactgagaggctatcataataaatgcaaatcacaataatgaaaaaaggtgatccctatgtgatgatttcaatatatgttggcaagaacattccacttcaagccaacaagaagtcctcagacttcttgttattttattcagccagtgtgccaaattctgtcccaagggacctacaaatggtaatgaatgggggaaaaacaattaggctattgagtccattccccttcacatcaggcttcttccctgtggagcattcttccagcaattacctagagatgtctcctgtacagagttatcctgcaattcctttaggaaaataataaatttgaccctgatacaaagttcccaccatgctacacttcattctcttgtgcccaatataactttgcgtttgtcttttatttttttcctttcacatatctttggaagaaatgtagtttagcttaacatgtattgagtatcaggcatgaacagttacagaaaggacttactgcctctagttcacgcagattgaggttcagagccttgatcaaggagcggtatcagggatgctgggggcgtcattacacacctgagagggtgctcataacagacaggtgtagattagcgactgctaatgtgcttcagcctgcttcccatcttcctcaagctccttcactcatgcattcccagtggcgtgagaggcccagcttagctggccgggaggagggactttttgtgctgttatcttcttgtttttcccacaaagaacacacaccaggttactatgactaactgccttgtgacctgctgtgtttattctccttaaccctgaactgtgctttcatgccctggaagccaggccaggcagctgtcagcctgcatggccttctgtgtgttgtttgtatgtacacgcaaagagcagtgactcatctacaaagggagtctccagtaaaaggctgagattatcctccacttctcgttccatcacattttaggaaacaaaccttcttatgaatttgtcttcattgctataatgatattttttcatttatctataaactggcaagaagacaattccatttctctcgttggatctta

SEQ ID NO: 65913 - DNA, 4368 bp, Homo sapiens
cagaacattatagaaaatagtaaggcaggatcgattgcatctaacctttggatctcattcaaatgccaaccaatgctggaatgtttcataacagaaataatgtaaaaagagaaaacataccatcaagaagtggaatgaaaagtatgagaaacttctcacatgccctgatttattgaaaaataatttcctaaggataagtcactgatacaaagattgggaatattgtttcacaatgagtttttaacttaataagttggtcaaatgaaaatcacatcctttagatcaggttaattacagaaaaaaaaacagagagagagagcgacgtaaacctctgactctgcaggaaaaatctgtagtacaagtaaatatcttagataacggttgcagacacagttagacccaaggcaagaaatatagacacaatcctactggagaatttttaattcttcaccttcaaagcaactggaacatagaaaatctatctttagggacacttatatcctgtcgtgtagttacattattcttgcagtttccctagtagaacctctaaaagaatatgaattggttgggaggaggaaaataagagagttgaatctacatcttcactaatttgtagtaatactaaaaagataataagaatagttatttgggtgaatggaggaaaagccacggaacaaatatttgcttttttttttttttttttgagacagagtcttgctctgtcacccaggctggagtgcagtggcccaatcttggctcactgcaacctccgcctcctgggttcaagtgattctcctgccacagcctcttaagtagctgggactacaggcccatgcccagctaatttttgtatttttggtagagacagggtttcaccatgttggccaggatggtcttgatctcttgacctcgtgatccacccatctcggcctcccaaagtgctgggataataggcgtgagccaccgcgcccggccaaatacttgcatttgattaaaaataaaaccaagttatggcttaattaaaacatcatcaattgataactgcccttgcctaattatactttaaaagaactgtgtttgtggctttctctgctaaaagcaaaaatttagctctatgagctatattaacacaatgaaatattacgaaggtagcaggggtttagagtagggacgaggcaacaaaacttggttccagagtataaatacagcacttgaaccacctccatgaagctgagtgtagccctttgttccatctaaacactgcctcttgtcatagccagtgccagatcacactagaggaatagatgtgggaggcgactgttgcaaaatagctttcctttctgtggcttaaaatgcattaaactattagtctcagagtttcgaacagtaaataaacaatagtaagaatatgagaacaatgaaaaatcagccacaacctgaaattactacctagttgatacttcataaattgcaattgtttttgcacccaaatgtaagctttagagatcaatgtacctccatgttataatttggaatagtcataagataatcaggataatcagtctccatccatcagaatcagtcggaattgcacagggcactaagtcctccaccaatgtggtcgtgttgcaatcatattaccaaccagcattccagacctatctgtccctaaaatgacgaccagccacagataacatcagtccagaatttgttatgtaatacttggttaataaatcacccagtcttcttttaaacttctcatctgttacaaagcaccaataaaattatattgccatgactcaagggcaagttcggaggcatcttttgcatgaaaaatatttaccacaaaatatgtttttttttctcaaaaagatatggtttgttgatttgcattgttagctaaattttctttggtgcatttttttgcatcctgagggaagtcagtcacttcagcatttaaacaggacaaatgcagaaactggcaaaaagaaaacaatgacagaggttttcttgagcacctgctattttacaaagtgccttggtaggggcaaaggcaggaagacaggaaagagagggtttcgaagcaggaaaacaaacaaatgattccacacaccatggagttaaaggactactgaacagcctctgatatgatcccaaaaccttaaaaagaagaaaatttaaaaaggaagctttaaagaagtaccatcaatttatgaaaattctaaatattaaatcaactgtaaatctaaggacatatctttacaatcttggctacaaggctttgaggatattcatgtaaacatgacttgaatacctaactatgcaaggctgtgttaccatttttgttgcatctatggatctgggacctgcggtcagagaaagaatatatctttcctggtcctaaatttacttgcaattttttttaagtcacaaatatatgtaaattaaatcacattttaatttaagcaaaatgttttattacaaaatataaaattggctggtcacattgactgggtgtggtggctcacgcctaaaatcccagcactttgggaggctgaggcaagtggatcacttgaggtcaggagttcaagaccagcctggccaacatggtgaaaccctgtctctactaaaaatacaaaaattagctgggtgtggtgatgcacgcctgtagttccacctactcgggaggctaggcatgagaactgcttgaatccaggaggtggaggttgcagtgagccaagatcgggccactgcgttccatcctgggcaacacagcaagactctgtctgaaacaaaacaaaataagaattggctgggcacagtagctcatgcctgtaatcccagtactttggtaggtcaaggcaggagaatcacttgaagccaagagttccagaccagcctgggcaacatagtagaaccctgtctctacaaaaaaattacaaataatttaaaaattagctggatgtggtggtgcccaactgtagtcttagctactggggaggctgaggtggaatgatcccttgattccaggagttcaaggcagcagtgagttatgattgcacctctgcactccagcctgggcaacagagcaagaccctgtttttaaacaattttaaagctgatggagcatgagttcattctcacatatctgaggaattcggcttgcccagtaagtccggtgctccccagccttctcaaatatctcttggcaaggctttcatttgaattccaaaagatttcagtctgaaaggtcaaagtcttctctgatagcaaatgtggttaagcagtgaaaatgatctctattacactattaaatccagcaatgagaggacatattttcatgaccaaatataggtgcattcaacctctctttgatgtgtagataagttctccttgttctctgctcaattaacaagttcaattctcatgtgaattctacttataagcttcattataaaaatcatgtaccaaaatgagaagccttctttcttttctttttctttttttttgagatggagtcttgctctgtcacccaggctggagtgcagtggcgctatctcggctcactgcaagctccgcctcccaggttcatgccattctcctgcctcagcctccccggcagctgggactacaggcgcctgccaccatgcccagctaattttttttgtatttttagtagagacggggtttcaccatgttagccaggatggtcttgatctcctcacctcatgatccacccgcctcggcctcccaaagtgctgggattacaggcgtgagccaccgcacccagcaagaagacttctttcaatcttatttagaactttttaactttcccaggaccattgatagacattatcaagatttactttttaacagtctcattttaaacaatcagccaggaactgttttgtaagctcctcagcagttgcaaatgacaatgaatatcatcactaagaattttatttcacaaattttacctgaaaaattaaaatgttaattttccttcctctaaattctgacctgagaacaaccattcacacaatatcttccatctgatatggtcattctcttttcatctgccaatatgaaaactagtagcaataatgcatagaaaaaaaccgaagttctgaaatgaatttttcaaaatcattattcacaagaatgtatttctattaattaaaaaacgaggtgaaactcattagtaacattattgaggagagatagtctcagagttctagtccttgaatatgggaagatttatctataagacacttggataaaattgtcttcatccagatgcagccaggatgatcattctaacaggctgacagtttaattttataaaatccgcagacatcagagtttcaa

SEQ ID NO: 65914 - DNA, 549 bp, Homo sapiens
ttggattgtttcctcaatacatctgcggaaaccaagacacactccattccaaataaagattaccctgcagagaagagcatcctggttttatgaagtcctgttgtaaccataatgaaagaggaaaagaaacttcaaagccaggattgcgtaggtctatgccaggaaaagagagtctagttcagggcaggacaacattccagcccccactgacagcaactccggatcctctctctgagcagtgccaatttttccaaagtgtttagaggtccctgccagcattggctttcatcaatttgattgtatgaagtggctgagtgagtctgagataagatagggcaagagaaatacacagtcattcacacctgctaacttgagggctgccagggcagctctagtgcccaacggtagaggaagaatggtgcctaccataagatggacagacaagtagcacgtgactgtggttttatccagagtgttgtcaaagcatgcataatgactccatttattttccaaaatacgttaactttcagtctgtacttacccttagac

SEQ ID NO: 65915 - DNA, 816 bp, Homo sapiens
caagctgggagtgctgtgaaccaggccagctccccttgggagggcagagtactacagccctactgaaggagtttttagcataggccaccaacctttagtaggactgacaggccccaaccccagcatccgcggggcttggaggcaggtgagctgagtccagggagcccaacctgcaagagcctatgctcagggcaaggtcgcaggcaatcgctgctggcacttcattccgccactggtgccaagtcacagagtggaccgagctggctgcagggaaccacatgcctaactcttccaacagtcacagtgagctgctgtcccttggagagcgggatgggggatggggaagagggtgtccatcctccaggaacagtggcgaggaggacggtggatagagggactgggagggagcagagcggcctttaaccttagtgccactccccaggacccctccccggtctgcactgaggaccataaatcacgcttcatgctaaaagccctttgttaactcggtcactagcttccaattcacaaatagtaaatgtgccaggcacagtgccaagcgcttaggatacagagatgatccctgagcagtgacaccctctgtgtgtaaggcacctgaagaatccctttcccaaatcgcttttcaagctggcggggagagaggtgcatatccgctctgtggaagcttagctcttcatctatgcgagtgagactagacccctgcaaaatggaaactcaaactgcaaagtagagaacgaggccagcatccacccgtgggtccctcctgctgccccgggaccccgcctggccacacct

SEQ ID NO: 65916 - DNA, 1566 bp, Homo sapiens
agccacccgagcatcgcctcggcgcgggccgcgacgctctccgccccgagggcacgctcccggggctcttggccgcccctcgcccaccgggctctgggtagcccctcaccaggctcttggcggccacctagcccggcgcccggccccctgcggccggcccatttagtgtgaatcctggatccggcagcggcggcggcttcttcaggggtagctgatgccggggccttggagagggacgctttgggagggtcctgggaggcggcgcggcgagcaaagggggcaagaagggcgtgctgtgctcccgcctggctcccggggcgtcgtttgggggcggccggggagttttctacttggaagcccctctgaagccaccgcgtctcctttgcccggcctcgtctccgctgcccacgcaggctgccgcgctctggcctcggccccggctctcggagctgcccggcgggctccgggtctcgccctccagcccccaggcggcccgcggcggatccccgagaggcagcgcagctcagcccctgcgccccccagcttcgggccggagagaccggggtgggagctgccaggcgcgcagaaccatccccgccaccacggggctcgccttgtgggtccggtgcgcgggcggcgctgcgagtccctccctcactcgaaggaacggcgcgagcgtggggagaaatggagaccagagcgcatatcgggtgagtgggtctcccactccctcctccaccgcctcaatttaaaactcaagagaaaaaccagcgccgtcccgtcgcccagcgcgaccaccgcctgccgccttgcagcctcgccctcgcggcgcagccggggctccccggcggcgcgcgcttctccaccttcaatgaaactttcgaagccctcactcggggacgggcgtgtcccccggccaatgggatggcggctccggggcctgcgcgcgcggagcccgcccctgagcggctggggaagtgagagccttgcaccggcgcggagggcaagcccccacccgcggctcccgcgcctgggagagacccggcctggcctgccagtgggctgcgcgccttggctcgccctccgcgggcactcctgccccactggctcccgcagccccgcggctctgcgtggttctgtcattccggtggtgcaccctggcatccagtccacccggccgggccctgagcttgcccaaacccagggaaccgtttaaggtccgagggaaacgcacaggcccggcaggagagaagccaggggcttggagagtcctgtgcgaccccgacttctgctgggtccacaggtgcacactggcattaagaagaatagagctgaattcatctacaccgttgaccctgcccatatttcacatagcaagaacttgccattctgaatagactctgggaaatcccgggtcttccccaacagataatgcacccactttgtgcatttgggggaactctccgttttcacctcagttttgctccttgcttgtcgtggctctggggaaagagagcgttggcactgagaatattctccctttctcctagtgcactgctttttgcc

SEQ ID NO: 65917 - DNA, 871 bp, Homo sapiens
tatcaaaagagccagacttcactagctagacgtggccatctcaacaggcacctcttgctgtcacttgtgatcactctcctcggactggttcattaatcctttttcctgcacccttttctcttgatgttaaatcaaattatgttgacaaaaagctgtactggagatcacattaactagctctacaatgtatttcaacaggtgagttttggatttaaatgaggcccatcaatgattagccatctgatgactgccatgcatggcctgtgacactgtcgttcagtgtgtgctgtgagataactctccatgggtttcttgggtttccgcacaccttacaaatagaatcgctgactgcttttttattctgagctacttttcccagaatgtttctctagtgaacagcctttgaagattgagatcgtgttttcctggagcaatggtcagtcatgactacagcccggggcctaaggtcaaagtctcatcctggaatgcaaccagtatgtgtgctgatgttacatggtcctctttgtgtcaccctagaagaactggaactcaaggaaccagtacaacaaaagccgattctctgggtattgctgtttttgtgagtaataaagtcttagtctcaggccaggcagtctagtgtctttcaccagcatccatgaacctgtgacttgctaagctgttatctcacaaatagggtaaaatctcagacttttcacagttctcaacagatactatgcttctcatttaggcagccacatatggtcagagaattttttgcctgcaaaattagtgcctttcttggcaaaatggtctgccttttttaattcaatgatgaaaattatgcaaccctcatgattttttttgtttgtct

SEQ ID NO: 65918 - DNA, 617 bp, Homo sapiens
cttagaaatatttcagtagtgttttttttcatttaaaaatgcatctagatcatggatttagattgcaaggctccaccttaagggaggcagctcgtccatgtcaggcagctcctctcgtcctgtccagctggcttttgctcacttctcttcgacaccagacctctggcatgtccatattctgactgcagccacactcgcaatggaacaaggggacaaaaacaatgtttacttaagtacattgtgaaagtccagaggaacgcttctgttttctggctgaaatctcacacgggaataaaagcgacagaaaactctaccctttcctgcacgtggccagcccctgtggaccctggtgacaggcactctgctcaccttctgcctggaagttttgccaagcccatgatggttttatgaaatcctttctttgatttggctcctggcagtttgcagtttgaagtcgtaccttgtcctggatggaaaccatgtgaaactatcacattctatattgttcccattctagactatgaattcactgggcttcatccaacccaaacctcagcactgatttcctcaatgtttggcccacatttataaacctcaaagaacctcccagcaaacct

SEQ ID NO: 65919 - DNA, 721 bp, Homo sapiens
agttttgcctgtaattatctttctctctaaggcagcatctgtaccataccttgcttcccacgtccatttccatccactagggcaacacgggccccatgcttgtttgtcagaggttcgctctgtggggcgtcatgtcacgtggagttctggacagggcgaggcccctgaggctctgactcttctctgcccacagccctgggctctctgtgcctcggggccacgtgtcctcatccagcctcgcagccaggaactggaaactccctcagattaacatcaagttcaatgccaaattcctgggaaaaagcccaggaaaccatgagtgtctcccagggtcctgagactgaacaagagtgactcgcagagacccgctgtcttttgcttccacgcccccacccccagggctttcttggcaccccagggatttatctccatctgaccttatctttcacacagttgttctgactcatactcctcttggtgtttacagatccctccatgacatgtagtatttattttttacacaggttgttctttaactttaaatctaatttaaatttaactagccgtgtggccaccgtattgggcagtgagggcttaggcagtctcactcactagctgcgatgttcacacctgccccaagaaaatctcattttttaatggaaagaagttaacaattaacaagttaatcttgttcaggtactctgctgagtgccactgtata

SEQ ID NO: 65920 - DNA, 847 bp, Homo sapiens
tatattcttgagttatcagtcaagtagattccctctcctcccctgccctgtcctcaaccagcctgacttcagcaatttcactcattatttgtcttctagaagagacaacttgcctcctagagatagatgagagggcgacttactctgcctacttacaggtcatgctagaaacgtttttctaggaaaggtactgaaacccttaacaaaaatcagtttgtggttcatcaattcacattgtttaaatgcctcatgagaatggacaagtggaagtaagctacagctatttttgtgactcaccaaaactagaggtcacagctgtgccccagggcagtcctgcccaaagctacttgctttcaacctcacatgagtcaccctgtgcggctggaaagagcaaagtcttgacggagattccattttttttttttctggccgaatgactaataaaagatcaccttgtcaaatttagccttagcaacaggcagtaaatttgtaagtgtactgttgaattaagttcctgctcttaaatttgaaaggatagatttgtcaccttaaaaaaaaaagattttaattttaaaaacaagtgattctctttatcctctgtaaagattcctggcaagttatctttgccagggcaaaaaatagaggcctggaggctttcatgtattttctaaaggtgagcaggtcaccggtcaaaagttcttcactatagacaaagggatggtgtatttactattgcttatacagatagttgtgtttaaactggttggcctttaaatatttgaccccaagaagagggcatcttttctttatcaggctaaaagtttttaaacgtagaaaaatcaaataa

SEQ ID NO: 65921 - DNA, 502 bp, Homo sapiens
gtgggtgtaagataatgaacagaaaagggagtggcaaggtgcagagatctctgcaagaaatggattggggaaattgaaggctttaaagccacggtctctattcctacacccagctttccgtcctcggttactatcgcccaagatcaaagccaccctggttttctgattgccgcaactgcggctccaggtgctgagtgcacagccactgcggcactgtccgcagctgcgcgccgggctcagacggcattatttacggtacagaatactcgcccgcgcgacggtatttacggtaacggggaccagcctgggcggcagtatttacggtaacgaaagccagctgtatttacggtagcgagggctggaccggcggcggcatttacggtaacgggggccgggctcgcggaggcccgtcggttcggtccgctctgggcgttagcaagtgatctccagccaaggcggccgccaccccttgcacacagcagaaaatgcaaaatgaccctct

SEQ ID NO: 65922 - DNA, 2709 bp, Homo sapiens
aaggaaccatagctaagctgctaactagggtaacatcctatcccctctgaaatacaattaaattcagcaacgccatctggattcagtggctgctgtgtgcagagcgcctgctgggctccatggagaggggaaggaatcagtgtctgcatccaagtagttcacactgtaacaggtgacctatacacacagaccccttgccaggcaatgtgccctgtagtatggccacacagaggaggagtcctggggaggctccatggtgaaggtggcttttgaaggactggcagggtgtcaataggcagagatgcatggacactaaaatccaggcaacaggaacagcatagccacaggaccgggcgtcagtcacattctccccgctggccgaatgacgcaaataatgctcaaattccatgctgcggtttgctttgactggcggaggtggaggggcgcgaaagacgagccagcatgctgcacagcaggtttagcctccatgcccggggtttggagcaagagagtgaaaacatcagagctatgtcttcagaaggtcttgtgttgtgaaactgactggcaagctatcacaggaagctaagcgaggtggcaggctgctagattaaaatgatctctaaacagaattcgctctcagagttcattttcagcctacctcattagggcagatttggtcttctcacattgttattgctgtatcggaggaatctttctaaagagaaaagtgacagcacacattgctgccatttgaaagccagcatttttaaagggcgtaatacatagtgacagttttgatgtatgcccgtgggtgtgggtcctgatatctcaacatactctgcctgcataatttaaaatgacagtttagcctgtcaaacttaaatgtgagtgaagttccttggatatttataaaacatcaaaaagacagaatggtgtcagcaaaagatgggtctttttattactaaaccacgggacgatttttggataattgctggcaactcacctagaagctgaacttccagacaaagtataaatttggtggtgccacagttttgaagattattttcactcaatgcaataaaaggatattacagaactctagcacaaattgtagtcaaagatggagacgcgtcaatgacccgtttgtttttaatgtgttttaatgtttttgtttttaatgtatccatggtttccagttcccctgagaaagtggaaattacccatgctaataaagcaagcgttagtgcgaagacctagctgatgtttggctggtttttagcccgctagccagtcaccctttataaagcctgccaagtttggagcgtgggtaattttacacgcgggtctccacagatcctgtctacttcggtagatttattactaggaaagtgcgtgggggcactaatttttgtgaattgactaatgcgttagaattttaaaaaccgggtagaacgcagcgcaggaagcgagcgttccccgccgcagcgccggagcgtccagccagaatccccctgcatgcgcagcccctggcgtcttacgtcccacaggccccaccccggcgccttccgtcccgcaggctccgcctttggcgctgggctctgacgtcaccacctgcgccgctcacagtagaaacaggaagtgggaccaaaacaaaggagcggcggccgggagcggacttaccttaccttctctgccttcggcgcgcttctcagccgggccgccgacccaaaggagccgtccgactatgtctaacatggagaaacacctgttcaacctgaagttcgcggccaaagaactgagtaggagtgccaaaaaatgcgataaggaggaaaaggccgaaaaggccaaaattaaaaaggccattcagaagggcaacatggaagttgcgaggatacacgccgaaaatgccatccgccagaagaaccaggcggtgaatttcttgagaatgagtgcgcgagtcgatgcagtggctgccagggtccagacggcggtgacgatgggcaaggtgaccaagtcgatggctggtgtggttaagtcgatggatgcgacattgaagaccatgaatctggagaagatttctgctttgatggacaaattcgagcaccagtttgagactctggacgtccagacgcagcaaatggaagacacgatgagcagcacgacgacgctcaccactccccagaaccaagtggatatgctgctccaggaaatggcagatgaggcgggcctcgacctcaacatggagctgccgcagggccagaccggctccgtgggcacgagcgtggcttcggcggagcaggatgaactgtctcagagactggcccgccttcgggatcaagtgtgacggcagaacccgctctgaggtttcctggccatagccaccctttgaaatgctctctgtgtgttagagagatactataccctagaaactctgaacacgccagaatgctgaaatgcccttctacctttgggtttacagccccctccacataaattaagaaattcagtatttctgcactcttagctggattctaaagttctgtatagctcgtaatgatggtatttttatagcagccttttaacagaactagttaatttcgtgtatatgaatctttctcgaagatctggtcaaaactgtattcagtttcctgcccagaatgatcagattgaaggtggttggtttttattattatttagtgtgattgatag

SEQ ID NO: 65923 - DNA, 1599 bp, Homo sapiens
atttgtccacaatgaaatgtttgcctctgttcttcagggtttgtacatcctctccctgctgagaaatgccaggacaaacaattcagcagtgtttactcaaaatgacaatacaggtggggcgtggtggctcacacctgtaatcccagcactttgggaggccgaggtgggcagatcacctgaggtcaggagttcgagaccagcctggccaacagggtgaaaccccgtctctactaaaaatgcaaaaaaataattagccaggcatgatggtgcacacctgtaatcccagctacttcgggaggctgagacaggagactcccttgaacccaggagggggaagttgctgtgagccatgattgtgccactgcactccagcctgggtgacagagtgagactgtctcaaaaaaataaaaataaatagttttttaaatttaaaaacgttttaaatgacaatccagggaaagatttagtccaaaacatgcatgccatgtggggcttctttctagagatgagaacatgcttctgcccttaaatgatattcagtacagataggtagataaaacatacaaagaaaaagaaaaatggacaaggcgtacccagatgttaaaaaaaaaaatcaagaacacttaagatcaggactgtttacacagtttatgttattttatacctcaacctttaaaaaggattaaatcacagtataaggcagcatgccatgctcaccaaattgtgaaacagtaagtgccggaggaaagggatattgtgctgtgtcatggcagttagaagtggcttcccagagccagcagggtttaatctcaggtttcaaagggggaaaaaaagcaggaatgacacaggatctgagaggccaaaaactacagggagttttgactggagtggagggttcacgtgatgttaaaagagactgaaggggagactggacagactgcaaagggctggaggccacattaaaagtgtggactttaccccatgggaaggaggaagcgcaggagtcatgagaaatgatggttcaggcagagattagagcataaagcagggaggtggggaaagccaagaggaacacgctcttggatgacgagtcaccatgaatcactgatcacctgggacatggttcagctgcacatgctgacgcagtgggtctgccagtgacgccgatatgctgcgagtctgggaaccccttttaaggagcagggaatcttaactctggctgtgcattacaactgcctggtactttgtcaccacgtgagtaatgtttttctccaccagtacgaactcctgggctccagtgatcctgctgcctcagcctcctgagtatctgggatccatctatatttttatgtcttgtagataaatatcatgagtcaaatttcattaacattgggaaaagttttttacttgccttgacagatttccaattgctatatgttttcacacacaaaaaattttaaatacatggaaattcagttggtactttttttctcagatccagtagtttgattacaaaggcatttaacagaatagttttcatcttttcatgactctccttgttcctcttcatgatcaattccatggccataagaattcttt

SEQ ID NO: 65924 - DNA, 756 bp, Homo sapiens
gtaagatttcaaaacacattcttatgattgaggaatagaattgttttattaatagtcctgtaactctaattcacatacctctgatgaatcaaagaaattcactttatttaaatcaattttctttctactgcccatatcctaaagtattagagtgttacaaggtcctatttgtaatcggatcccatttgtaaatgtttccgagtttgactttccattgaaaccgtgcagcagaagaaagagccattttgggatgtgactgtgtcatgctggtatgagctctccctctagtgcctttggctgggtgtgacatgacaggtgccttgttagtccttgatacagaccttctcacttcaccctcagatgaccctgcatggtagtttctattattttttcccgtggaaagagagtctgagagaggagagatagcgtgttcaaagccacacgggtagagtcatgcaggcaaggcagtccttgcaccctttgtccccaagcccatgctggcagcagccgcgcttatctgctcctgtctctagccttgctgtggctgcagccttggggatttccagcagggccagcagccatcccaggccacctgagactgaggggtttccggggcacgggaccgtcagtgctaaagctgggaaggtagaccaggaagagttggtcactccgtttccagtcgcttacacttcagtttccagtgaacaccaggtctaccagaggctcataggagtgatttaaggtgaaataacaccg

SEQ ID NO: 65925 - DNA, 701 bp, Homo sapiens
ttttcatttactttgaatttgaaaatgttagggtttcctccacctttttatgaagtaaaagaacctgtcgtaccagcatcatgagctggatgcaggagcccatggctgaaaggagttaaaacgcccagtggtcattaagtgaaacatcttttatcaacctgcaaaagctgcagcgttctctgccaggtcaaatgggcatgtttagaaaataagagaagatggctgagtatagctaatgaataaatggttgtttctttagaaaattaaacacacacagagtgtaagaggagaggatacggccctccctgaaggataaagtccacctggacggtgccctgccctcgcttctcacattaactgcccaggaatgtcatgctgattggttcccggaagggtgtttggcaaggggcagtgtatggagctacgtgtagaaggagagaaatttgtgtgtggcttttgtaaattttgaccgattgcagcaattaaatagttgattactgtgttgatttaaatacttatgaaagctttcagacaaaaataaactttcacgttaccatgatgaaactggggttgtttctgttcctccaactgaaagatgggacgctgagctcggggactcggcccccgtggtgcacctcgcaggcgctgtgcgtgtggccactgagaaccaggcgcggctggagccaccacagcagctgaca

SEQ ID NO: 65926 - DNA, 731 bp, Homo sapiens
acagacacacacagcaagtaaggcagagggtagggtgccggttagagctaactgggtatggataatcccaaactagggtaataacaaagtccattgtggttagactcagcagccacatttttttaaagactcccactaaatacggttttatctcctacatgcataccatcttggaatgacgaaagtacctgtcagtaaagactgcttgaaatttaactcgttttagagataaggagtggagttatcaagtgatcagcagtatgataagctgtttgaagtgtcttaaacacacacttagagggaaataattcaaactgtatcatgcttctattatgagtcagcagagaaagccacctactagagactctgccttcctggcagagggaaaggtgagcattggtggtgaagccactggacagaaatgacctcacctgcagacctgctgtgtccaaggtcaacagagtgctgggcacccacaggaaggacaagattaaaagagaaaaggcttccactcccacctgttttctccaccgcgtctataatcagtatagagtatagagtcctgtccactgtgctgcagccacatacacagcccagaaaggatgtagagatgggcactgaggtggcctcgcagagcgggagctgctcatggtcaggctaagggtcaggatgctctggtctaaaagcccaggccaatggagatgggtggcacagagctacagaggaactgt

SEQ ID NO: 65927 - DNA, 2405 bp, Homo sapiens
gcgggggacttgctatgttgcccaggctggtctcgcatctctgggatcaagccatcctcccacttcagcgtcccagagtgctggaattacaggcctaagcaacggcacccagcctatcttttaatttttaacttcaaagttatcgttaaaaatctaatccccccaaaatatgaaaaaaatacttaatatgcactgacctgtagtttttctctaattcactatcttaaatatattaattgcaatctcatcaactgcgacttgcatttgaaattttccaccttaaacggtattttttgataagatggattttttaaaaaatctacaccagcaaactagagtgagagacccctgcaaagtaatacatgggccttaagtcaccgagattttccagcaaataatttgcagaatgctgtttttcctaggttaacttgcaatcctaacacggaaggaggttccgtttttagaagtttaaatgttgtcacacgggcgcaagaatacatacaacagccatgctttccagctctgcgcacaacgccaggcagatggggagcaccgggcggtgcgggagccctttcaccagggcagggtggcttcggtggccgagggacccgggaactgcagccggagccggcgcgcacccagccaacttcctgtttccgcggtagcgcgcgggcctgtcactgaagccccgccccggcgacctcaggcgggcggggaagaccgagtcttcccggagccgcttcgtccgcccggcgccggagtcccacggccggtttgcggaagcgggtcgtctgaaggggcccggcgggtggctcccgggtctccgcggcctgtgatccccagagcggacaaccgcagctggggctccgtgcgcaactcggagtaaaggccggaacctacgctcggcggccgcgtcccggcccctagcgccctccgcgaagtgcctggcaggctcggcagtctgagtgtcgcgttacagagtcccctgggcagtcaccgctgaagggcgggggacgcgggaaaggcattttggggacacaggagagctgcgagggcgaagcacgggcgagctgtcgttagggcccaggaaaggcccgttgcggggcgcacaggcgggcaggggaactcgcgccccgcgccgcgcgcccggcctcctgacgccagggccggcttctgagcacagccaccgcggcggccgggggcggccactgctccccgcgagcccgcttccgcgccccagaagcccccagagcccgcgtccgagctccaggccttggaggagccaggcgggcagctgacagccccggagccgctcccgggttccgcgcgcggtggcagccaggccgtgcctccccgttcccctcccgcgccgcgctgcccctccgggacccaccaggcctggctgcgcctctttcctctcctcccccggagccttggaaagtgccctccagagatgtgcttaggaagtgtgtgatgaataaaggagacaatcaggataactataatatttattatgcacttgcttttttctcactgatgttactaattttaatggtgtagcgcggcgcgttccagttttctaagtgctctcacatccgttcaaaaaatcctcaaaataagcctgtatattaaaagcaggagccattatttcatatttcaagaagtaaacatgctcagagtaataatccacatagagccttccaaccagtcaattctggtacattttcacaaatctatgagtgtggttaatacacggagatgtggtttgaggaattatataggacacagccagcaaaatgcctggtatacaataagtatgcggtaaatggttattattattaagaatattgtaatatcttcagatatgatcaggtgaacaactttgacataatcgaaactgggacagcctgattccataaacacactaatatggcaccgtggattgtttgcagcctcacctctaaagtattctctctgactaacaaagaaagggaaactagaaccagttaagcttataacactaatcacaggctaaaggaaatacaggggccaaatgaacccattagattacaccaccaggaagtaatctgccaaatccagaatgtgggaaattctacaaaccaaatgacccaatttcttttttcaaaaataaatgttcagaggctgaagtgggaggattgcttaaggccagagttcaaggctgtagtgagctatgatcacagctgtgaatagccactgcactccaggctgggcaacacagctagaccccccatgtctttaaaaaaaagagggtggggggaccttgagagacacattagccaaatgcaatttgtggaccttgtttgggtcatgattaagacaaacaaacttttacataaataaatggcatttttaaaaacattggc

SEQ ID NO: 65928 - DNA, 2158 bp, Homo sapiens
cacaggcatgtgccaccacgcccggctaaattttgtattttttgtagagaaggggtttcgccatgttgcctaggctggtcttgaattcctggactcaagccatccgcccacctcggcctcccaaagtgttagaggcggaggttgcagtgaaccaagattgcaccactgcactccagcctgggctacagagcgagactcagtcacaaaaaaaaaaaaaaaaaaaatgttaggattacaggcgtgagccacctcacccatacagaaatgtgatccacactgtaagacgcgcctcttcttgaaatacttacccgattctttgttctctcactgatctctgatctctccaccttcccaagtcttggaaaacttgtcttctgatttcagagttaacccttaattacgtagaatcttccattgtcatgtattacattacacgtgctggttttatcttcccaactagaagataaaccatagaatcagaaaaacaattttatcattttatttccaaaattacatagcccaggattgaactgtccataaacatctatcggatggtcagcttcaaaactaactgcaatgctgatgagttaaaatagctccttttgttggcaccagataatagataaacatgagaagccagtgcagtggctcatgcttgtaacctcagcacttcgggaggtctaggagggaggatggcttgagcccaggagcccatagtgagctatgattgagccactgcactctagtgtgagcaacagagcaagacctcgtctctatacaaaataaaattatacattttttttacataagaaaacttgagagagatcatacttttgggtttctttattaaaagaaagaagaccaaaaggtgacccaagtaaaagtgtacaccccttaagggaaaaaaaaattattttcatttaaaatcgttttctttatctttaaagtgaaagtgccatatctggcttcctaaggaggaaccacaaaccgcgtagactcaggccagccgctgggcctgggcctgtgtgtccctcaggcggcgacctttggcccacttcaggccggccgtatttaccagcttagaggcgccgcggcgttggcgagtcctttttcacccaccccttccctccgttctcaggcttgaacttgaacaggcactcatgactcagcaaacggtacttgatagggttctttacacgtcagtcaggctattttttaaaatcactcttcctggagatcttcaaaccagaagcaccgcgggccctccccaacgggcttctgcttacctccactacgtgatgcagtatggcccccgggaggccgcccccagattctagaggggcttaccccagacacacccgaaggaccacctcgtgacctcagaggaacagccctagacccaggagagactgccagacacccccgtggcagcccgccagggcccagctctacttgtcgcctggaggtgctgcctcccttccacgccgccccagggaatggccgcccctctggggctcctcccaatcccccttcccaggactgacaatggcccggcgccctgctttgggccaggatcggcctcgagccttcctcactagcggccaagagccggaaaccttgcgtctcagattccccgggtctgtgcacccccaccccaaccggtcttcccacccaggccccccctgatgccagctgcgggcctggacctagcccggggccctgcccctccgcccctctcgctggacagcccaggccggcgcccgagggataggctcgggagcgcggggaagacgctgcagccggagctggagccagggcccacctgtccagcgccgtcctgagctcacacaaagacccttccagcctcaccgaggccgcgagcccaagccaagatcttacagatgtcaggaagtctggtttaaaacccattggttaagaaactaatgacaatttttttttcttaataggaaatctgggtgactagaaaatagagggaagggagacattttcataacaccctgtcacctttgcatttcatgcacatgcagagttgcattcatattattaaaatatctttttagctgggcgcggtggctcacatctataatcccagcattttgggatgccgaggcaggtggatcacttgaggtcaggagtt

SEQ ID NO: 65929 - DNA, 2672 bp, Homo sapiens
ctcgatctcttgacctcgtgatccgcccgcctcggcatcccaaagtgctgggattacaggcgtgagccaccgcacccggcctctgtcttaaacatcataaaaacataagaacccaaaaaagatggaggggagtgcgcccttagctgccccaaactggcgtggtgggaggcagggcaattggtctagttttctgagccgtaggattagggctctgggtgaggccagagtccctaaagttgtacccatatctgcgtgtttgtatttcctgtttgtaattcctcctgtttgtactttttgtctcttatacggtacacttaaagtttctccacaaggtgtttcagcataaagtactcaaaaactaaaaacgtttaatttcattattaggttaagtgtgtaaaaaatgccccatcaaggttcttgtacaaactcccattattctcccagactccgaagtggcactccagaataattttacgtgggttagcatcttttataaaacgggcaggcagagcggcttatgaaattaaccttggaaaccacgcggccactctttcgggaaatgcctcctatttatgtttacatgggccagcaagagaatccaaggttggaaaggtcattcctcactacagaggctcatcgcaatcacagttccgtctccaaattcgagttttgggtgtgaagagtttataaagtccagccgctgtcctcgcagtgtttggggttagcggagggagagcttgtttgcgaccaaacttgccgcgcggggcggccgcttgcaggaacactgcggccttgtgcgctcggcggtctgagctcctgcgaggccgagaacgacgcctagcgcccagcggcctccgcgaacaaaaagcgaccggtcggaaggtgctggcccagccgcccctggcgctcgagcccgaatccggccacagaccatgaagggacgcccggcaccacgtgcgcggggatccgcggacgggacgctccccggcacctccggggctgggccggcaccgcacggtcccacccagacagtagctgccccgggcccccaaaacagccgctcctagctcctccctcccagctctgcggtggcccaagccgccctccgcgcgcttgacccagaacagtacggagttctgcacgagccgggggtggggcctgtctcagcgcgcggcggtggggcggggcttggacacgggcccggctcaacttgagggaggcggggctcgaggctcagaggagttggagcccgctctgcgcgctgcgggacggggcacggcggagcagggttgggtccgcctcgagcggggagggtgatgctgcaccacaggggcggggctggaggtaaagcgcggagcggagagggaccaggctcggcactgatttgtgttcagggctagcccagaggggcggggccaggtacggggcgcagccgggagcgggaggggcggtgcaggacggggccgggcacggcgcgggaagaggccaggagcagcaacgggtgcggggcggggccgggagcgtcaaggggcggggaagaggggggaatgggcggggccgagctctgcgaggggcgaggtggggaatgcagagcggggccggacgcgggagcagggagctgggcggggagcggggcggggagctgggctgggctcggcacggggcggggcggagggtggggagcggaaagcaggacgcacggctcccgcggcccgctggctgcccttcccgccagcgcaggtgtgggacgggcggcggactaggcacagagctgcgggagcaggcacagggagtgtggagcctggcggcgggacggcgggatccggtgggagccggagtcccgccgaggggggctggaggtggaggggcccggcgaggccgcgatgaagccgagcggcgaggaccaggcggcgctggcggccggcccctgggaggagtgcttccaggcggccgtgcagctggcgctgcgggcaggacaggtgagcgccacggctgggctcggaagtccgggcggagcagaagcgcgtgggccttgggagccgcctggagtggcggggtcctggcgcgcagccggcgggcgcccagggtccgcacccgagggcgcggggcgcggagcggtgaaaggagcctttgtgctggtgtcctggacacacctcccgcgcccttctccaactcccggagccctggcggcgagcccctctgctttggagttcagcggctaacgtgacctttgcgtttgagtgagtggtcagaatgtagaaatctctccaggggtagcgtacggggctgttgatttttaaggacctatgaacggattcagctcgcggtaggaagcccggggctaagccccagccgcgtggggatctggctgggctgccgtttgattgtcctggctgcagcatcctcaacccaaacttactctgacccacaccctgaaagtggctcagctccgcgacggccacggactcagagttcaggaggaacttgttacactgcccggaaggatgaaaaccgagccgcagagctaccgaaaaccagcgagcagagtttaaaatggagtgcagttcctctcttctctttttcatttttgtgattgttccttccactttcctcagtacctttagcagtgcctgacacaccgacggtagtggtaggcaagcgagtgttggttc

SEQ ID NO: 65930 - DNA, 794 bp, Homo sapiens
gcgctactgcactccatctggggcaacagagagagaccctgtctcaagagaaaaataacaacagagcataacacaacacagcatcctgcctctgaatccactcttcccactctgtaacccatgactcggccctgttttcctggcggacacacccagattgcagcattctccaagctgccccaagggcccccagcacccgcctcctccacacacacagctgtgtatgttttgaatgtggaaaactgagtgtataaataccagtgagcttcgataaggtgacacaaaaggacatattacaaaatcttctagcatttagttaactgtgagctcagtgtgcagcagccaaggactctttatgcattcactcagcaggtgttcctggagacccccatgaggcagcccccatgcagggtgcaccatggcctgttggaggtggacagagacagagagggtagggttccttacccaggctggttgagcagacacatggagtgataagtgctgtgggtgccagttggtggcttgtgtaagtgctgtagtcacagttgggtgagtgcccctctgcccgcagaagctggaggctcctcatgtggaaggtgatgtttgaactgagtcatgaaggaggaggacagtgggctggctgaggcggttccatcaggagactccagggttaatgattccatgtgacagggccatggcattctcagagctcggaggggaggggaggggagctgagaaaggggtcgggaaaggcccgcagctgctgagtggatggtttgtttggtttcttcaca

SEQ ID NO: 65931 - DNA, 474 bp, Homo sapiens
ctcaggtgatctgcccgccttggcctcccacagtgctgggattacaggcgtgagccaccgcgccttgcttgtttttcacttattttctttttcttactctctgcaggtctcctttttctctagtacacatgtgaacccggcacaggaactggatagaaaacctctcggcaaggccacatagtcatgcacagaacagatgtttgcttagcgcctgcccaaggcctcacccttagtgaacttgggacagtccaagagtgtcaaaagcactgccctgaatgctttagatctagtcttttctttgatcctgagaatgcctttggaaggtgtaaacagcggccagctccacagggaccagcctgcagaaggtgggctgcgaatacacctgaccacagcatcttccctgtgtgtgtgggcctgcgtgtgggtggggtgcaggaggaagggtgacagtgcatggggcgagagtgctttccc

SEQ ID NO: 65932 - DNA, 841 bp, Homo sapiens
cctgccgcctcccctcttgacccacttccagcctctcttaaaaattcctttcctggcaacctttcttcattgtctctatttattcctacttctttcctccctggctgatgcctgtgtgcccagatggccttcgaggcagcgagaggagctatggccatggcccatctctgctgctgtgagcccgtgcggccaggaaagtggcgggccaggatggatgaggtgtcaggagagggcccgccactgtgtgagggacacgaagggcaagattgtgcaaaggagaggaggtggctgcaggagagcccagagcaggggaagggagaagtcatgggggcctctgaggggcaaccagcagttggactcaccagttagagcttctgatcccagagaggccttggaatggcctctggccctgcctcaccttccctctccagaagtgttttgtttggcagtgaaaaaagtagctttaattacagctgtgcgtgccaggaggtgcccactccagcctcattgtgtaactggtggtgaggaagcatgctactaagcatgctcgggtgaactttgctctatatttcactggattataacactgaactctattaacatgctcttggcatcctggctgcccgcccgtgtagctcagtcaggctgcaactctgcgtcctcccagcctgcaggctgctagctcaagcaccaactccactagggcaagggctttgtccagggcccctttatgtggcccccagtaggcctggtaatttcgtagaatgaaggaaacatgaagtgctcatgttctgaaactcatttgtgactttagaaaaattctgatggataaaatgcatag

SEQ ID NO: 65933 - DNA, 597 bp, Homo sapiens
cttatttctattatgccttgctggaatatcttcaactcacaagttaaaaaacagcactggatagaggtaaaggattagaagaaggcaagaattttattagctgcttcttcaaattctaccatgcaaatttcagacatacacaaagtacacagaaaaagcaaaatgatgccccatgacccctcacatggcagcacgcctgcttcgtgtgtgtccaccagctcccgccacccccagctgcctggagccaatcccaggcatcaggtcacttcctagtcagtacttcagcgtgtctccaaaaacagactgctctcttacaaatacaatcacatcatcaatatcactctctacccaaaatgcatccctaaaatcagcaaataatcccatcagtgttcaaatttccaattgtctcgtttttatggaaagtggcctcctaaggtcatagtctgcgttctggggggacttcctgttcctgggtcagtctttgttgccttttcactggactgtgctaggaagtacgtattttttatttgttttgttttgttttttgaaacaggatctcactctgtcacccaggctggagtgcggtggtgcagtctt

SEQ ID NO: 65934 - DNA, 1237 bp, Homo sapiens
ttagccaacaaaattctgcctcaaacatttctcccataaattaaaatactagtaatttaatgaaccaaatcaaaacaaagactccaatcctaccttcttgagcgctggcatttgagggaaagcactcattcattcagtaactgtttatcgagtgcccactcagcctgggtctgctgatgtctctttctttaatggaagccttccccacccccaccccggaaaaaataccatctgtttgtggccaggtgagggtggggtttggagggtaaggaatggaagggttgctggagcctgtctgcagatcctgtgtggattagggagcacctggaacagccgccttttgtcccagctgtgggtggcagctgcagggctcaggtggtatctgtggagggcctgctgccagtcccagggcaggagtgccctcatagctcagcttcagtgctgggcatggccggcggtgaatgatctggacctcctgagggcaggcaggttgctttggtgtggagccaggtgttttgcagaaagtgctttaaggtgtaaaatgagagtttccatggaagaaaagggacacttggacctggattctggctgagagatttcctgggtgagcggagaatttgaaagtggtgacacagaactgggtccattgagtgcagtaatgtgataggatttgtttcccccgactttgggagtggctttattttgtcatggagcacacctggtttggcactgtcctgcccgggcagtgaggcctgacgggacatgaccgaagtttggctgtgtttgggtgtgtggcacaacaaggacaaactgctctgatccccagcagtgagtcagggacaggagcagaatcccggtcacgtcctgccctgagccaggcttgccagccctggcagcctcgcctgctgttacataaacggcaggccatgaattccaggtgtcggcacccccctgcatccagagggctcactcctgcagcttccctttccaaagcagcattatttaaaagttgctttctccaagaaaatggtatttctatcgttgcgattgcagcagttagacgattaatgaagcattttttccctccaaacattgagtgttcccagtttggagtcattttgcttttctttttggttgaatgatggtgatttttttttttttttttttttttaaagaaacagggacttgctctgtcctccaggctggaatgtggtggcgcaatcatggctgacagcag

SEQ ID NO: 65935 - DNA, 1234 bp, Homo sapiens
ctcgcagccggctgtgtggactctgtaagggctcctgaggaagaggaatccgggggaccggttcctgtcctgcagcctcagggtgggccgctgccaggcgcgtccctgcacgcgtagaaggaaggcgctttcagacgcgagggcggcttcgtcatctcctcccggtgggtgcgtgctgccagcgcggcctttagatgctttgggctccgactctgtctccctcttcttcaaatcatgagggcactcgggcaccccggtgtgagaggcaggtggtcccagagtccgtgtcacctgggtcacatctccaaggccccaggccgcccccgggcggcccgcccccagtccccgcagcccggagcaggatgggcccgggctggactgaggggctggggcgcccgtctgccctgatgggcgcagctgtctgggaccacgcggtgccccgggtcggcccccagcgtcgccatcacctcccccaagacgtccccacgcggcggccacactgcgctccaacgacccgcgctctcggacccggtcacactgacggcggtgactcccgagttcccgggaccaagcgggcccgccctgggagcctgagctttctcctcactctcagggagccctgggctgcgaggcgacagcacaacgggaacagactcgccgggaccagccaccacttggggttgtctctgcaacccacgctccgcgccgccctgacccggtaccggcccgcgcggcggtataggcgggcgctgggtgctggtcgctgggcgcggaggctttctttgccaagggcagcgcgccccctgctgtccgagcggaagaactgcgcagcacgcgaggccgcagacgccctctggtcagggccctgcagaatggcttgggcttgggactcgtcctgcgcccttgggcgaggccatttgtccctgggtcgggaggagcttaaccgtggggctcggctgtatccgcgaatggcaggggcacaggacagcggggactgtgacggaacacatgccgttattccatgcgttgtgccgtgctgtgagtgcataaccaaaaaataccaactcagtccatggctaaagtaaggatatgcaataaaaatttaagcctgatgagaaaaaaagtgagaaaactagttcacccagagtttaatcaagtttttgacaagagggtgttgtttttgttttttaaattgaaacaggatttgggggctgagttattgcatgcagcaggg

SEQ ID NO: 65936 - DNA, 365 bp, Homo sapiens
agtgaattcacaacacacccactgttcctccggagcatgggggaaggaggtgtgggctgactcgcactaaccaatcctggttggcctctgagcaggattcaggctgagcctgtccctgcctctgactattataacagctcaccaaaatccaaaatgcatctgtgtggggtctctgtgaggtcgtgtgaagtggaagtgacttgcttatgagctgttgacaaatgaaacattgggaaaccttgagtctcctaggacacattccttccagcttggctcatcccaggagtgaatgactctacctgttatggacaagctgttgctgcagttctttgaaatctacctgcttccaggctgaactactgtca

SEQ ID NO: 65937 - DNA, 1157 bp, Homo sapiens
ggtggtgggggcgggcgccgcgctccttcccgtctcctccccgccagctccgggcccgtccttttccgcccggctcccggcaagggtcccccgactggcgcccgcgcgtcctccctcggctgctgcaggccgggccgcggcgtcgagcgggggcggcggggcggggcccgcagccattggcgagcggcggggcgggggcgggggcgcggagggtcggccccgggacgcgcgcagccggcccgcagttgccgctgtcgtccgcagagccagttcctagcgcagagccgcgcccgccatgagggagatcgtgcacatccaggcgggccagtgcgggaaccagatcggcaccaaggtgggcctggcgcggtgcagggcctctccgcgggtcggctgctggcgggccccgggtctcccggcgcgacccccgccggggcgcgcacccgctgtgcgcccctgggtcctcggagcccggtgcggacccgcgagggccgcagggagggagcgcccggggcgtggccggccggggaccttctactcttcgctccccacccccatcccaactgggagcggctgccggcggctcaggcgcgcctggaattcggccgccggggcgcctggggtgggcgcgggtggcggcgtcccgggctctgggttctgagcgtctgtccccccgccttgccctgcccaagttttgggaagtgatcagcgatgagcacggcatcgacccggccggaggctacgtgggagactcggcgctgcagctggagagaatcaacgtctactacaatgagtcatcgtgtgagtagcaaggccgccgcgccctgcccggccgggacccgcgtggacgctccggcgccgcctcttagcgcggcgagtttgcttcgggaaaagttctctcggggtgtagcaggatgcccggccactcccttcgctcctccggggcgggaaatccgccgtcagtttattcaaacagctcgattcagcctatcctgagggtctgagcgcttgaacgggaccacccgttagcgttgtgaaatcaacgtagcggttcctgcccagccttctctgtctagccgggcgcggtggctcaagcctctaatcccagcgctttgggaggccgagactggaggatcatttggggccaggagttcaggacc

SEQ ID NO: 65938 - DNA, 459 bp, Homo sapiens
aggtacaacaacgacaaacacaatgctttcttgtggaagttcatgagcaagccacaagcaaggtaactttcacgtaccaatttcctacttagcagtttggctgcttcttttacttgccctttcatctttcactacctatttattttagaggtgaaacacaatggtaaaccaggcaatcatgcttctcattaggagtactgtgaactatctggtgagggagagtcctgatttgtttactttgtggttactgacagacttcattaatcattcagtcacattcctaagagccacaggagccgggacagtgtcaacttctgctcaccacattgcaacccccgcttgaagacagagcagacaacgaaacatcagaacgaacggacccatgggtgagccagagagagggaattctgcagtctacacaccaaccaaaacagtctatctatcacttcaatctttttt

SEQ ID NO: 65939 - DNA, 2586 bp, Homo sapiens
ccacccgcctgctgggattacagccgtgagctaccgcgcctggcctctccagaaactttttaaaaatcaaccacggtgctgtagtcccagatactccggaggctgaggcgggaggatcgcttgagtttggggctgcagtgagctgtgtttgcgccgctgcactccggcctgggcgaagaagcaaaaccccgtctcttaaaaaataaaaataaaaataaaaatcgtagatcggagggtctgctaccctacccaagctggtttccaactcctggagtcaagcgattctcccgcctcggcctccctaagtgctgggatcgcaggcgtgagccccggcactagcctatctccccttacagtgaagacgttgagctgactacaagggcgctgggatagcaggaggccaagccaggttcccgtggccgacccggggacctcaaccaccacccgtacaccagtgcaaggctgaggaaccgtgtcacttaaacagtgagagcgactattcgacacgtgaacctttcattgagactgatcacggccatggttctgtcaacactctatcattatgtcagaaacacgtatcaggtcccgtgtgtgtatctagagggatggctaccaacagagaaagagcctcctgctgagagcaggccctgatatgcaacgaacacagagtccctgctatgaaaaggtgacattcttaataataatagctaatactgccagtcctggaatgcccgcaatggccccattcaacagacgggaacacggagactcggagaggttaggcagcccgactccaaaacccgtccttgcgactacatcgtgctcgtgctgctgactcaaaattacagacgccttcgttccgtgctccggggacacgaaagcggggacaaggacggccaccaagccaacatgaccttcgaggcttcaaccgccccggtgaagcgcgaaaacccggctctactgaagctgcgcgttttcaaaacttgaatcccacaggcagggctgagcgcgaatcggcgctcccggggccggctgagagacagcgcagggcgcccaggccctcggcagggacggcccgcgtgcggccggagggcgggggccagtgaccttgacgtccgctctcccgagccggaagtgggcccgaggcagggtggagggcgccgggcgcccaggtaggactcaccgtccggaggcagggctgctcgcccgggcccacgccgccaggcacgaggagctgctgtaggccgcggggccagcagccgccccggccccacagccgcaaacagcggtgcgccatggccgccgccgtggccctctcggcccgggacgctgcgcaggcgcgggcaggcgacgactggcggcctcgggaagcgggctcggctcggggaaaggccgccaggcagcgaagcgcgccggcggctcacggaggagcccaagctctcaacgcggcgtctcctgccgccagccccgccccggcgcgctgacgtcggcgtctcctctccgaggcccgccgcgacctccgccagtgcagaagacaggaccaaatgggaggagcatgggggcgggaccggaggcgggggccgacggagcagcgttgggggcgcggcaggaggcggggccgagaaggaccctggagggcaagggggagctagaggcggggaccgggccgagggaggactcgggagggcgagcgagagctgggggcggggctgatggcgcacgtggggggcgtggctggaggtggggccgaggaaggactaggagagcgagcaggagctggaggcggggccgacggaggggtgtggggggcgtggctggaggcggggactaaggggagacgcgtgactgggatcctgggcttccgagcctgggcagccgggtgggccagccagtaggagcgagggggaagtagcgaaggccccagcggcggcagatggaaggaccctccgagcgccagctgagtcatggggtggtgctaggctctggagacaccgaagcacacattcctgacccctgggagggcgatgcgaagattcacaagcagcagggaatgttggggctgtgccgtgcagcctgcgctctaggaaccctgtcggggaactggttctcggagagcaagtcgagtcttccaggtagtggaaactacacattgtttcctgtaccgtgacagcggaggaaaaaggagaggtctttgaactgaggtgggggacttgggggtttttctgagacgggctctcgctctgtcgcccaggctggcgacgctggacctcaggcaaaggacagtaatccttgagagacaggagacaaaaccaggtgagtcctgtgattaccccagtggcagtaaaacaataacaaaaagatataccagatacaccatcataccatgctcacacaaaagaaaactgagtagacaaatagattttagggcaaggaaattccaaagaaaattaattgcagggaaaagaatatcactaaggatgaagaggatcgggtttcttttccagagacagggtctcagtctgtcacttaggctggaatgccatggtgcaatcgtagctcactgcagcctctaactcctgggctcaa

SEQ ID NO: 65940 - DNA, 995 bp, Homo sapiens
gcccgccacgaggctctgacctccgaggggccccggccagccacggcctgacgccgtcctcccctgcgggtccccgccggatcctcccgggggtctcccgtggcaaaatggggggggacggcgggggcggaagggccggggacgctgagggtaaggcggcccagccgcgggtgttccaagaactacgagggaaaggggcccggcggcctcacccgcaactgggggcggctctcccgcgtcgtcggccgcgggcgccagggtgacggcgccgtccctccagacgcggatctgcgcggccgagcgcacacggtggcggggctggcggcggcgggcggcggcgcgcagggaaccgcagcactggtagcacacggcccacgcctgctcctcgttgatgggctggttgtacagccgcaggatctcctccaggctcagcgcgtcccgggagcccccggccgcgccgccggctgccccgggctcccgcggcccctcgccgcccactgcctcagtccgcggctccccgccgcccgccgggccagccgcctgagccatcccgcgggtgggcgctgcgctcggcagtcgcgccgtgtgccggcgtctcctcagctccggagcatcgtcgtcgcgcgccgccgcctcaccatccccggaaccgccgccgcccaacgcggccgcgcgcgccgccgccgggaccaggcgagtgcccgggaggcgtgggcaagaggagggcggcgaggacacggctgcagtcccggtcagacagccgccggccggtagcgacgcgatggcgtccggcgccccgccccgccccgccccgcctcgcgccgtccagcgccgcccagcgcccgccccttagggggccgcacgggccgggggatgcacgctctggaggtgaggaccaggcaggagggcctcgcctcgaggcgagatggccgcacggtctctagcccgcagggctctcagagtcgcaggcggtgacgcccggtcggggggcccgg

SEQ ID NO: 65941 - DNA, 1850 bp, Homo sapiens
aggctgaggcggagaatcgcttaaacctgggaggcggaggttgcagtgagccgagatcgtgccactgcactccagcctgggcaacagagagactccgtctcaagaaagaaaaaaaacctgatatcttacagcagaatataaacctccaaatacaacttacactcgatccgacttccagaagtcgctcgctaagcgcttcattctcacggccgtcctaaaacgccaagaccgctcgttctatcgccccagactcttgctagcacctgctcggctcgttttctttctcggagacgaggacgctctcctgcctcaaactcaaagctctgcctactctgcgttgcgcaccccacaatcctcgctacagtcccggcaagcagatgccgctgtcggcccggggccgccgggcaggagggaaaggttatgggtcggcccggcggtctctcccagcacccgcgactctcaccttgctcagctgctggtggatgagctgcttcagctcggaggctttctccggaggcagcgacatgctggcagccggcgtctccccgccgcttctccccgcctcagatgccctaactgcgcggccccggccgggccagggagcgttaggagcgactggagcacaaagcgccgcagccgttcgcctagcgcagctcccgggggacgcaacgccgcgtcaggccgggggctgacctggaaatgaggccccggcggcggcggcgccaactgttttcaaacagtggcggacaaacagggcttggggctggcccgcacgctgcctgatcgtttccgcccgccgctccacctccccgcgggccccgcaccccgagacctcagcgcaccccatcgccttgcttgccagggtctccgaaagcgctgctggcccctcttcgcggccacccggcggcctctttccgccctctgaaccggcagttagctggacgggcctcaagggcccggcgcccagggactcaaaggaccctcccgcgccccgcgaggctccggggtctcgggcttccgccttcttgctgccctcgttcttgccagggccgcggttagtccctgctggccaccccactgcgaccatgttcgttccctgcggggagtcggcccccgaccttgccggcttcaccctcctaatggtgagtctccatttgcgctcggggctgccgcctcccgaggcccctgcggtgtcgccaccccgacgcggggtgtttggcggtgccttgggagaaatagggcactagtttctatttcatgttttcggccggaaaaaacagggaggttgtagccggaggcagccgtccaaacagaacctttgtcggctgtaaaaccaaacgtagtcaagtctacaatttgtagtctctgtttcctgtaaaacgtgatgtgttcgtacgttctagatacactgtacttatgttttgcagggcatccttcagttttatcctagaaagtctttctacgactagttttagaattagtcttaagctagcatattatcgttgttaaccggagaactactgatagggcaataaacattaactcttgccggtagttagcgcagttttatcgctctttatattcattcattgttttaataaagtctgttatgtgcgagtattagaataagactaggtgcgtgccctcaaagaatttacactgtagttggaaacatgtaatctaagagcaataaatgctaggctagaagcttgaaagggtatagaaaggtcctgagataattgggaggggagggacagatggcttgttaagaaaggctttatagagaaagtagtatgcaaaagatggagggcccgtgggctgggagtaggggaaagtaggcgtttcagaaa

SEQ ID NO: 65942 - DNA, 2235 bp, Homo sapiens
tgtaaggagtataaaatgcaatcttgtttattactatagtgctggaaaggaagcacttctgtttgtagcacattagccattgtgacttgaaaaatcgaccaggagtaaacatagttaaatgaataaagtacttaccttcctaaaagtaaaaggatcattcagattcttggtacctaagaattgattggtctacctacaaaacgataactggtctcaaatagatgagactagatttccgaggttactatatttcaacctcttcatttctcaacagataagaattccactatatttaaataaattttagcactgaactgtgtttaggttaaatgctgaaaatatttaaagacagttggaatattccaactgtattctttaaaagaccactgaagatacttcactacttagactctgttaacagtttagagatatttctagtttttaaaagtaaaaatctcatagattgagaatttatgctaatttaaatatgtgaaatacaaaatgtgaccttatacatttagatgggaaagcaagagaagcatgacaccaggagaaaaagcccatgaattaactcagaatcctcaacacacaactgccggatgcatatcactgaattataaaactaaaaacatggtgtttgatgtttaactctagagaatgcatactattacaagttgtccctctcaaagaaatccatactaaatagccagtctctccttacttttaaatgaaaaaactgtttatattatctccatatgaaagaaaatgtaaaatggctttagtttcacacatcaatttatctgagatgtttctgctggactgaacccaagacctctgtaaatattacatgtcatttgccaacaggaaaaactaagatcttgttatagtaaatcacatatactagtgttctcagaaagatgatgtcaacaagcacttttttttaaaaatcacttttttaaaaaacagtttaatcaccctttaactgttatattatgtaaaatagtaaaaaggtcagcaacttaattaaaataaagaccacatatctcctagacaacataccaaaaaaagaaagcctggttttagaaaactacatgattttaaaattaaagttccactaaaatatcacaccaaaggaatgtatttcctcatgttgtaatcacagaaagaacactaaccaaaggctactcatatctattgcacaactgaaaacagccatttagctaacatgcggtaggaatccataaaacccgggaaggtccacctcacagggtgctgggaatctggttaccccacatggcaccaccccacacccttgcccagctatgcaggaagtaaacctagagaaagaccttcagccagagtatttgatacctcaccctcaggactctgaactaaaattcactgctattttccttctatctgtaaaatatgcacgaggtgttacctcaatgctctataagcacagtaaccacacaccagaaaagcccagatccagtcctgggaggcagtagggaggagggcactacctgcagggcactgggtctgcagggctcagcccctggcagtggcctcgcttcctgtttaacattaatatacagagtcaacaaaagcaaaggaacggtgaattttctcaggaaaatttttttttattttgttatcagataatactaaaaaagaaaggtaatccttgggaaaactctatagctatttagaactgactacaaatgttatttgagcctgtattttcttctcaaggctgattaaaaacaaaactgaaatacctacatcactagatattattttaattcttctgttcttttaagaaaaacacatacaaaggaaaaatgaaaaacaatttaaaaaggaagaaatattaaagcaaaaaggagaaataaaactttaaaataaatttaaaatacattaaaattataaaaacaaaaattgaaaaagattaatataaaataaaaagtatatataactttttgatttcgaagaggcagtagagaaaaaaataaaacacatcaccttaaaataactattgcaaaagattgtgaatatacacatttcaggaagtgaaactatcaaagcctctttatgagaaactgtgactttataatttatactctttagtgatgataacaaagaagggcactacctcttctccaattaaggatcacaacacacggtttcgagtttgtgagagcatatacacaggttcccttaacaacctgagtc

SEQ ID NO: 65943 - DNA, 2278 bp, Homo sapiens
ttatattcacttttctcttttcaaatctatttcgatatataacctatcccttagagagacagcagcctctgctaaaacaaatgtaactggagaagatgcagctggcaggctctctcacatgaagattcctaccagaatttgcgtttcagattgtctataattggaagagtccttaccagcattctttaaaacttagatccctattctaacatactctgtatcatgggaatcagaatatttatacttcccactaatgtgttcaagaagaaaacgttactttctgaacacatttttcactgccatctaattaaatggaaaggggaaaaacccaggatcatccatttacaggaaagcccgtcttttactttacacagagagaaccaaacatcagaagcagcattaacttaaccgtcaccaaattcaatcttgggaataatacgacaaggattaaacgaaggggaaagcagttacatcattttaaaagagataaagttttgtttgaattaaaaggtagtctagttgacataaaaaaagcgaatcacaggtgtttatactacatattgcatctatgtgagctgaacaggcacgattagggcgataggcatcggaacaccgtgcccccggggaggggatgagggcactttctcagggcaaggaaaggctattttgatttgagggggcttgcaagaggggattcatttgtgacacccgtctgggagcacacatgaaagctgcgtttcactgtagggaaagtatacctcagtaaggaaaactataaagagaatgacacgctatcactggacgaacacaagcaaagcctctttcgttccgggaaggttctatgggggccgaacccacgctgggcgctgctgggccacgggggaaaatgaagacggagggtcccgagagcgctgccctcgccagaggccacgagccacccccaaccaccgcggctccgccaggagagcgagcttcgcctcgcagagggctgcggcggccggcccggcgcccagagcggcctgctcccacaggtcctgcgcgggcgccagctggacccggacgccgcggcccggctcgcccgcccccgccctcaccgctcccggggacgccagctgcccacccggccacaaaacacccggccagagaaagagctgtccgcgagcaagaaccaagcacagcggcgtgggagctacggcgaagctgcggcccgggggcgcgcgcccgagcgcccccacggctttcccaaggacccccagacccgggccgcgcaacgctggtggcgcatccacgcgctccccaagaagccgctgtggcaccgccctccagaactaactgcgcttgcgctaaccatgagctgctcagctcaagtatgctttttttttttttttttttaaaccaaaaggagcaagagagcggtcagcgcaggcgcgcccctgacgcggaccgcgccgccacttccgccccgagcgagaggctagaggcgagaggcgggggaggcgggagggaccctgcggacagggcacgagtccgggtctcggaggaggtcggcgactgccgcgtgggtccgcgactcaccaagtacagcggctgccagcgacgctgagtatccaactcttcgaactcccgctcgatggtggtgggcatggctgcgggagcgagctggcgcgagcagagcctgcgccggcggagaggctcaggccccgcacgatccggggagagcgctggcgctgcggcgcatgcgcgctgcgcgccgcgccccgcccccacgccaagccctgtcggccgtggggaaagtacctggagcgtcggacgtcagcgcgcagactcggcgcccgagcgcggcgcgaagtcggcggcggggcggggcggggcgctcggggggcggggctcggggtgcccaggtgggagggggcggggccaggggaccacccggcggccgtggtccctgcgcgcggcacgaggtgagccgccccttgggcttgcgtcttccgacaagagagaggcggtggtccgtgggtagcgcggggttactggaatgggactccctgaggaagtcccctgagaagtcgccggcacgctccgccttccttcttgcttcccatttctcgttttcttctcagccttcatagttttttaaagtgctgtatttgaatattattttaaacatcatctaggtcagattagcggcctgtgaccaacttggaaacaaattcctcattcttttctgccctggtgtcagctcctgtaagcctgcagattttatgccaaataaaccgct

SEQ ID NO: 65944 - DNA, 2604 bp, Homo sapiens
aagtgttctaaaaactaaagtctattttaaaaaatccactgtttcacctaattcaacacttcactcccactctgataatctctggcaaccaatgatctgtttactgtctgtatttaaatttaattaaaacaatttttaaactgttttgatatttttataataatcaatatattttgattggacttttatagtgagcactttctttggaaatgagtgtctttgaccttcaaaaaagttatagttgttatcagttatcataagaggtggggcccacctcttaaagtagcaataaaatcttatttatggttgaaaaaggtcaggtcattgcgccacttctctttgcaggtttctgtgcaatccatcaggggacagctgggactaatcatttaaaaaactttccagcctgctaattttaccatacctcacatttttgtcattcctggccaaaatccaaagggcaagtcccttctgcagcctcattttttttttttctgtactttcgctcccctgacgcaagcttccactgtctcccatcctaactttaccactacgccctctagaatgccttttcctgataagcaaaaccccccgagtcgttggctcctccactttccggttttggcagaatccttgatctgagccaggcctcttcccaggggctctggccctcttcacttccttttccccggaggactctggctcccgggtagcaagcagcccacttccccggccgcttccttcccccgggatgacacgtttctacaggcggactcttctaattcatactatttccctacccccgtggtggctcctagcacccccaggcctgttctacctgtaaaatcttgacacatttaaactactacttctgatcctttcctccccgtccagccttcgctcttaggctgccgagcctggactgcttgtcatcccctcaggcgtctccccggccctccctgctcttcagccgtcccgacggagcgcggctcctgaccaaacccacggttcgtcttctccacctgctccgcgcgcctcgcatgtgtctggggggaaacacatccaaacgtcgacttaaatgattcagggccgaggaccgtgagaggcagtcttcactttttcatctttcttcatttgcacagtataccaataagctcttactacttctcagcacaggtaactcgccttttgcagagcaccctccgccgccgaacggtcagagcctggaggaacccgcaccaggatcgtagggcatgacgggccgggggcgggacgaggattgacgagccgggaacagggcggggcttgagggggcgggagggtggggcgaggcatgacggctctggtgggagggtaggcggggcttgacgggcctgggggcggggcggggcttgagggaccggaaggtggggcgagtcatgacgggccggggcgtgggcagggcttgaggggccaggggactgtgtggggcctgacgggccggtgggtggggcggggcttgaaggaccggagggtgtgtgggcggggcttgataggcaggggcggtgcgggggcgtgggcagcacaagccgtgcgctcccgggctgcgaggtctggctaggctacgggccacgcgccgccgccgctgccgccgccactgtcctcttcggaggcgcgggcccgacggaaaccatgtttgtggctcgcagcatcgcggcggaccacaaggatctcatccacgatgtctctttcgacttccacgggcggcggatggcaacctgctccagcgatcagagcgttaaggtgcgcgcggcgcttgcgggcggggccgaccccggaaggaaggaaggggagtgggtgggcggcgcggggaacggggctgtgtcttggttcagtgacgccgctggaagctgtggggtggcgggcgagccctggctggactgagcggaagccctccccgcccgcgtattgtggggtcacggcggcctcgcgggccgccctcccgtgcgcctgcgcagctggtgccacgtgcgcgctcccgcccgcagggtacgccgggccctctcccaggccgcgctgccggggctgcgggcgggaacccaggggcatcccaccgtcagcctcggcgtcgtgggtcttgcccgcgctgttcacccgacgacctgcagtgggacctggtgggagactttgcctggctggcgctgcgtcgagttctgtgccccgccggtgttctctcaccagggcacatggttttctccgtgggttcagagcagaagctcactttgttacgccgaggaagaaaaatacaaaccatttacatccaatgatttccctgcttgctgcccaggaatcggagggtttgtttcttgaagttcccgtaaacgtctgtagacacttccgacaagcagaatttcttttctttttttttttttttttttgagaccgagtctcactctgtcacccaggctggagtgcaatggcacgatctcggctcactgcaacgtccgcctcccgctttcaggcgattatcctgccccagcctcccaagtagcagggattacaggtgcacgccaccacccccggctaatctttttttttttttgtattttttagtagagacagagtttc

SEQ ID NO: 65945 - DNA, 2084 bp, Homo sapiens
cctactctgtcacaaagaggcgactagatgtggcgaaatgtcatgaaacttggatcccgaggaattagctgattgaaggtgaaacctgacgcctttcagcgcctaccaacaggaaaggtctgcatctgcccacggaaggacgaaacctatcgggggggatttgttggcgggggatacttctttgcgcatagagtgactggcggtgccctggagacccaaactgaataaagtaagcattattttcaaattcgccaagaccttgaaggcggcgccaacgggagccgtcccccgggtcccacgcagcgcagagctccatttcctcctccggactcgcagggcgcgcggcttcctcgcttcaaatccaggaacgcgctgtccccaccaatcaccgggcttcttcccgccccatgtcttcccgctgtccaatcaaaagccagctcagtctcctccccttgcctggtgccgcgaacagacgtaaaccagaggcgggcgcggtacggccgttccgggctccagccggtgcgggggccacgcgcacgcgcacttgcagtgccctgggacacctcttcagtccgtggactttcccgctgcacactgccctccgaagtcggggacgcgggctcggtgaggggggacgctggtgcctcggcctgcgcctaggcgggaggcagacgcatgcacctttggcctacgtttcggctgccggaccgacgggacagtgacggttgggccgggtgggggcgcaggctgtggggcggcctcagggcgcgagcaaggggactgccgcgcttcccgcgcctctgcgcctggcgcagcctctgagctgagctccgcctggttgggattaattgcacgcctctgtgtcatcgggctttggccgggcgtgatgagacagactgttaggggatcacgtccttctttcctcccctcttgtctggggacttccacctcttgagggacaggccctctccgtgctaccctctggagtttcttgcagtgtgcttgtgaagtgaccggtgatgtttcctttatgtgccctgtgatgggcggttctgttcctcctttttgtttaaaattctgacccaggaagtaaccttgttaacttaacttaatgcccttgtcttccgtttactcacttgatttggtttctgctaggttgcgttcatttattcctaatagtttacctacattccttgcctatgatttcattatcaacagaacgtgaaatgagacgaatgttaatacactctacttttactttgctgttactttcagagtttgtttagtaaaacatgaggacctcttcaagtcagtcgtttggagaacagctgtttatatgaccatatttccatttgctcttactattttgaggtcattcgactggcgtttttactgctccaaaatcaactttttctccaaatttcagttttctaggcaaaaacggcaagccttgaacaataatataccaaatgcctacctagttttaaagtatatcttaaagtgccaagagtaaatgatgagttttggggaagtttgactcggctttgggttccacggcgtgtgcttttaaatgtgtttaattgtatacatagacctacgattaatgactatagtcagtaatcttttatgtacctaggaatgtaattagtgagtccagatgtgaaatttgaggtcactactttaaggaaatagcaagagaaattgcaaatatagccactcagttcaaataggatagaagaaaaatattgtcttcacttgagatgatggaggaggggtgggtaatgcaataatgtgagaaattaaaggaaatttcctttaggaatgtgttatgtccatgaatggtttacaagtgtaatcttttctggagaagagactaggtattaggttacatcttgaggaatcttcccgtgggttttgttacctttgcacccttagcaaagctctgttgaagcacttaacactatcgtagttgacagggattgtcagctccctgaggggagctgccttatttatctttgcattcttggtgccaagtagagggttcttcatggtttgtgtttgataatgaatgttgcatgaatgac

SEQ ID NO: 65946 - DNA, 2641 bp, Homo sapiens
aaaaagaatttaagaaaaaaagactttactttctcacaagattcgtgaaagaagtgacagctaatattttaaagctggagcaagataattgtggtgagagatctttgtgtgttctctggaaaatgctgcatgcgcacaatgaatattcaaatgccattttgcgctgtgaataccagatcgccgggcctgaggccgtctgcatgggccgtcggcggagtcggcccggcgggccgcgggaatgagcgggccacacggagggcctgggcgcgctgctggggacgccggctccgagcaagaggacagccgcccctcgggagtcgctgggaaaggagtcagcgccgggcaagcagcctgcagcctgtgccagggaaacctagtcagccgtgctcggctggggggctcgctccgcactttcggtgccagaaaatgcccagaggagcggggcggccccagagcctcctttcggggcgcgaggcccggcgcgtgtgtacggagtccagtccccccagggagtggggtgcccgcaccttcccctccgcgctcggagccacaggggaggcccgggcagaagcgaaccgtcgccaccctggcggggcctcgtgactgcgggtgcagaactgggggtccccgccggcgcgtgtttcaggggtcctgaggcgcgcgtctgcggggttcccaggcagcaccaagaggcgccggcctaggagaaatccggatcgagacaactgctgtggcggctgggccgaggctgcggtcgcggtgggaggcggcgctgctggcgagtccacgcggggcggacggaggcgaaaacagcccgctttcgcggcgcaggcaaaagcaggaatggcgacccctctgcggggggacctcaggaggaaacgtctggcttggggagtccgcgctcggcgcgagctgtgggggcggccgggcgctctgggggcagttcggtgctccgagctcagcctcgtcttgcttttcaggggttggaggcggaagggggcaacggagcgagcccacttccgatgcacagaagcgcaggtggggaggaggcccggctggggaggctggtccccgccgcagccccgctgcccctataccttggctccagcgccagagctccgccgctgcgcccctggctttttgcctctaccccctaccctctgccgtccctctcctcctaaagccagtccttcctgtttctcctgggggcttccccagggtgctcatatatgtcccggcacccccgctctggcgtaaagaaagggcaccgccgcagggcggcctgagtttaagggtctgtccaccagactcatggtactttaccgctctgtgcctcagtttcctcatctgaaaagtagagctcatattagccctggggccttgtaggtggtgaacatcaaatgaactcatacaagggaaggggtcgtgttaccggtagagggtcctaactgcaagttgtccaggttggcgttttgaacaaagaattggacaaaacgtgctgcaaagcaaggaaaaaaggaagcaactaaagcagggatttattgaaaacgaaagtagtctccacagtgtgggagcggcctgagcaggctcaagggctgcgttatacaatcttctcggtccaaatacccgctagaggtttcccattggccactcatgtgctcccttcatgtaaataaagtggtggcccataatcggtctgattggttgcggaaagcagccaaccagaggctgaagtgaagttacaaaggtcacactcctgcgcaaacatctgattggttgcaaaaagctaacgttaagaggctaaagtgaaagttacaaagttggacttctatgcaaaggaagactggtggcaatcagtctgattggttgtggacagccagtttcccttcggccccacagaaaaggtggggggtttgcaaagagtaacctctggtccttttgttacttaggcgtggaaagttaagagttttcctttcaatatagttctaggaagtccgcgtgaaacggccttaggtgatctgcctccataccctattctcctgcctcagacccgtgagtcctagaaaggatggccatcgctggccgccacatcatcggggtctcatgaatccctgctcttgtacctcgggaggcaaggctaggctgccctggattaggatctgctgtttggaagtgccgtgttctgttttggttgtgctcctttggttgtttggtgggagttggcggggcaggggcagaaagtggcgcccctggagagccgcgggcccaagcactggggtgcagcccggctgtgaatccatgcattgagccgccgtcacctgccctggtgtgggtgcctgtgtgtcttgctttgtggtcatcctggttgctccagcacacaggtgtctaatcttcaaggcagaaagaagacgtggtcaccccccaacccctagactctgtatgtgtatgcagttttcagagtgttgtctcaggcgctgattgagtgggcaaggagaggtgctcagcacgcaggaactgcagcaccagacaggaagtcaccaaagagggagtccaggtcaaaagggacttggagacacagcagaagcaaccgcaaagtctgaatcctgactcgaacaagccacctggcaaaagacattttgag

SEQ ID NO: 65947 - DNA, 2859 bp, Homo sapiens
tatttcccattttcagggatatgaggccatcatccaacagaagcacatacagtcagcctctgtcagtggaaaagagccacagtgaagcgtgaagcctgccctgctttttcacagacaaatgttaagaacccaataaagatcctctaagtctaagtatttgtaagatgggaagtgctctcaaaacctaaggctgaggtccatggagctgggagagagggggcaggtagacccaagcaactggaaaatgggaaaacgtcactgtactaacataaaaatccagcatgtggatacatagagaaaaataaatttatttatacatgaagtaattttatccttagaggctttagctgaggcgttcctcctgctgtagggagaaggggacttgtttcagatgaacagtgtcactctctaagggccacctgggcctcagcctcagccggtgtccatgggcactttgagccctggagaggtggcctctcagccacccacactcccacaggcagcagtcacaaacttgggacaaaaaaataaaaaacaactgtgtgcagcgccagagagagccctgaggaggctgaccctggacggagcccacgcctggaggaaggggcggcagaggccagccgcctgctttctgttgcttttccctagagggtggcctcagtccaagccaagcagagggagcaagaatctggacatctggacaaaaagccacagcttattgcctcgaagagccaaagaacagaatttgggcagctcaaaaatccaggaaaaggagaaagccagagaaggggagtcctaccttccgtggtcacctaaatctcctggcactaataatcagcacagcccttatactggttaccattttaatcctaggcttgacttatgtaggaggccccagccgggctgaaagcaaagttgagcaaaattggtcggtcagcctccctactgccatgcctcacgagttttaaaaatcacattgtgagcctgagtcaatccttcaagacagatcctgagtggctaactggtcctaaattcaaaatagatccatggagccatttgctggaaaacccacatgcttgtgtaactttgggactttcatagctctctgctcctgttcacgccacctgaatcaacagctgccaggaaatcccatgtcacctcctggaccttaacccacagacagtacctatgttgactaatcatgactaaacaagcattggccaatcaaaactaagcaagtgtgcatccctcatttgcataagcagaccagagtgggaacctgggtggaaaccgtctctacaagacaatgcttctctttgttttcttggagcacaccgatgttttgtaccaaaggctgtgtttctccagtttgcgaactgctcactagaatgaagtctttctttttttaaagaaaatccttttttgtaaactttttgacaatatcaacatggcctagcagcatatcatgatgtggtgatgttatttattctgaaattaactatgctgggagaaactggttatttgcagaaattgagtatatatacacatagtgaaatggttactatagtcaaacaaattaacatatccgtcaccttacgtagttacccattttttgtatggcaagaacacctaaaatctactctttcagcaaaaattcccaatatggtgtggtcttatttctccagctaatgctgctcattagctctctggactggcctcctccttatctgctttgtctcccttggtgtacatctcccatttcctccccggccctgggaaccaccctgttattctctaactctgtgcattcgactgtgaggaaacagaggccacaggagtctgagtgacctgctggggttgctgggtgaagatgctaggatttggactaaggccctgacagggctcctaggccccaggagatggcattttgtcctaagcacagatgttgaaagacagtttctacatctatattagatgtgtaaactatatttcatcaaaatacaagggctccgagaaaattagtcaatggtttgggctttagcaggcatgtttgggtggcacgcatctctatgctaaggtgggagcatgtctctgctcggtgttggtggtgtgacccacgaaggcacaatcctcactccggcgaacacggagcctattgtgtgtgtgacgcctgaacactgcgagtggatttaaaggtgtaattgtgaaactgaaagtgttactatagttcagcgatacatgaggcaggacttggaaaacaaatgaccagcctgagaaaccatttcaggattccacgaggagcatgaggaaggggccagcgactgctaggctgtgtgaggtgggcacaggcatgcttcacagattctcacctacgggcagtgcctgggacatgcgtttctctatgctgtgagctcagcagcagtctccacactagggaatggatcacttagcaaaatgtatagattttttttcgactaggccatatttatagtggctttaaaaaatcatgtacacgtcttatacctttaattaatgtaaaggcgtcacatacatatttaatacatgtgtttagtatttactgtgtggttatattttctcaacagcagacatccatatgttgctatttctagcagatctgcggggctcgcgtcttcattgctgcataggttgtctgtcatgcatgcagctttcaccttttgtgttgacggacaaactcaatctgtaccaccattaaagagcaggccattttgtttttgtggttgcatgttctcatgtagttctaaatttcttgtaaagaatatgatgtttaaaatgttattattattatattttgacagtctagctctgtcgcctaggctg

SEQ ID NO: 65948 - DNA, 1223 bp, Homo sapiens
acaattaactgcacacatgtaaggtatgcaatttgatgagttctgacatttgtatacaccagtgaaaccatcaccacaatcaagataacgaacacaaaccacaattactcatggccattactaccagatcactcttgcaggaatacagaggaaagactgattaaagccaagtcacagtgagtttctaattcatatccaccaggatggctgtaataataaaaaaaaaagccagataataaccagtgttggtgaggatgtggagaaattagaaccctcgtacactgctgatgggaatgtaaaatggtgcagctgatttggaaaacagtctagcagctcctccgaaagttaaaggtggagttaccatatgacccagcaatttctttcctggagaactgaaaacatatgtccacataaaaactcatactcgaatgttcacagcagcattatccatgatagccaaaaagtagaacaacccaaatgtccatcagctgatgaatggataaacaaaatgcagtgcatccatattgtggcatattcagccacaggcaggaatgaagggctgccacgtgctgccacacagacggaccttgagagccttgtgcttgagtcaataagccaaagtccgcatgttatatgaccccacttctgtgaaatgtctgcaatagacgaatccagagagagtaaattcgaggttgcctagggtgggggttggggagggtggtgagtaggggaggtaggtaaagggcacaggatttctttttggggtgagatgacatattctgaaactgagtgtggtgctggttgcacagctctgtgacacagtaaaaacaatcaaattacatgctttaaatgcgtgaattgtgtggcatgtgaattatagctcgttaaagctgttctttacaaaagaggtgctaatgaccgatcacaccaatgagtctccatggctgctctgcgaagccctctgtgccccaacccatttagtggccctagtgatagatgctgccatttctgtgtgagaaagcttagtgaggttcaggagcttgtccaacatcttcccatttagccagtaaggggcagatctggtgattaaaaaaacaaaccgaaaaaaccctagctttcttatggtgtaattgacatataataaactgcaccaatttttttttttttttgagatggagtctagctccgtcacccaggctggagtgcagtggcatgatctcagt

SEQ ID NO: 65949 - DNA, 3505 bp, Homo sapiens
ctttgtggttttggaaaaacttttcttcttcattgtccatggggcgtttagatggaaaaagtcatttctttttctacctaaagagggcaagagcacagtttctccaaccccaaagcatgtgagttttgcatttgtggacattaaatataaactaagtatatgcttgtcagattaggataacctgtgtgaagcacttatcagcttattgctcatttaaaaaagtttacccaggcagccaggttcaaagttcccctgctacaagcttctcagttagaccaggacctgggcattcccagctggagcgggctcattgccgggcacagggcagatgctggctggtttgcgggctgagctgaagaactgtcagcgctgctgtaggtaggtggcagtatggcatgctggttcagctcccagctttctatgcagctagttagggatgtaaaaccatctctttgtggtctgaggacaaattactaaatccttctagcctcaacttcgtcatgtgtaaaatggagaagtaatagctcccagttattgtgaggactcaatcagacaatccatgtaaagcgcttagcacagaagcgctccatgaatggtagttattattacatcacatatgagcactgatcaaaggctagcggcaattaccaccatagctgagagctgagggcttaagggaaactgaattcagccaacatttcactaactaaaaagtcactgacaaattagacaaaacgtaggtttcaaaagattcatttctctgacattacggaaatatgaactggacaactttttggggggtgtgtggggacagttgaaaatgttcactcctttaatcagctgcatctatcttaaacccagcctgaaacccctgcttagtgtagtattttgatatgtctgcaggggggttaattttggcagaggcgaactaattttggtgactgcaataaaattgggttaaaatgctcatatgctctggcagtaaccaatcccccatcaaacatggtaggggtggctggaggcaatgcgtgtacttctgaacaaagtctgcactcaggtggaggtcaagtccgaaatggtcttcacaggaggtgtaggtccttcaaggagaaagggtcacagcgcgaagaatccatctgaccttctaggcaggagccatttcctttaaagagggcaggatactaagggggcgaccaggtggggtccgggggcgcctcaagctcctcaaggctcgccgagcactgctccgtcctactaagtgtcctgccgcccgactgcacgtctctaggcggctgcccgaggtcccgcggcccgtggtgcacacgcagcccgcgaggtactctgtgctggaacgcgcccccagcctcccgaaaccgcccccggcctgcgggcagcgagccggctcctccgggcgcccctgcagcgtactctgcgctcggcttggagttccccgtgcggccggcggtgggcgcgcgccacgcgggcccgagccctgggcgggagtgcggccccgggtcccgcggcctcggcgcccgcgcgcctcccccactgcccacccccggcctccgggcccgccccccgcaggggtcggcgcagcctgtgagccggggacccctgagcccccgccacggcggccccggtacccgcggcctggccgcgcgccgggtccccaccgcggagtgggaaggaggaggagagactggaggagttggagacagacacagccgcggcgcgcagtcacggctggagacagacggcggcgacggcggcgggaggcgggacactcccccctccggcgactggaggcgggacacctccccggcggccgcagcgccgcgtcccctctctccccgcgctgaggctgcggaccgggcccggcgggattagcaggcgagtgcgttggccctgcccgctccgcgcgccgccgcggccggccggggatcccctgcaagccactgagccgctgccgccgctgcagccagacaggctgcgggtgcctgggaaagtggaagcagggcggggagcgcgggggaggcccgggggtgaggtcctcagctcttaaagaaccccggcgcgccgcgctccccgccggcccgccgcgcgccccctgccgcgccccgcacagcgcccctccccctggccagcagggccggtggccgcggagccgcactgcgggcagtccccgcctccgctccgggggggcggcccaggtgagtgcggacccgaggtggccgcagtggtcggggcttctggcccaagttcaccgctgcgctccggagggaggggtggcgggggactcgggaaccggacgctttgggaactggacgtccgcgagcctgcgccgtcggctggggccggagggagaagctgggcgccgagcgcgcgaggtctgtgaggcttggtccgggtgggcttgccggtgggcacggcggggatccggggctggcccgcgggcggggttacgccggtggagggacttcgccgacccccaccccgttttctgtttcctggtgccctggggcgcagggtgtcccgcggttgcaagactgaattctgcaccgcccggaggccaggatgggcgcgcggatggcagccccaactgtctccgcgcccctaggcctcggcgagccgtggcgggcagggactggaggtcagcgggaagcgggaagatcctgcaggacctgaccggggagtttgcgggaaggagggggcgggccaagccccgcagcccctcagtcccgcatcctgcaccgcgcgctccccggccccggcccctcgggcccgcttcacccggcgtccccccgggtccccccgcgcgcgttgacgtcggtcgcgggaccgcccggagctcccggcattggctgggaagtcgattgtctggggctgctgctgttgcacttaggctgggtctccgagccccggaggaagcaggcgtgtgttgaatttctctctgcccctcaccttggaataaacaggaagcgacaagcacccagcccggcccggcacttgcctttgtgaaggggtctgccctgcacagcctttaggaagcttcctcgggaccccttcccggtgcgccgccccgggtgggcctgggggcgcgccctgtgagtacaccggtggaagacagtgggttcggtttaggttaaatcgctatcgtggcggagagggcatttgcttgtttaaacttttttttttttttttttaattggaaaaggagaaggtttcccgatgaggcagaggttttcaggacgacagggacgcatggtgggtgggcggcactgggggaaggcgcatccgagagtacagcgttcttgggtcacctacctggagggacacctcgtcgccagtcagggcagctagaagctctttaaagcaagcaggactccttagctctgcccaggcacaggaatggttgctgtgtgcccatagccgcatgaactagcatgatttttgtttttcccccaaaattttttaattagctagaattagataattttgatttgct

SEQ ID NO: 65950 - DNA, 941 bp, Homo sapiens
agttgcattatatgttctctgtgatgttttctgacccacctggactttgaaaagatggtaaaatattgtaaaaataacacggctctgtttgtgcgtgctttccatttttcttctttaccttttgcctggtcactgacttcgttaaggggaggatgggctgctgtgcgtgctgtgtggcttgatgtttgtaaggatttttgcaggtcacatgctaaagagggtcccacacttcatagaattttgggcggctagaaggatctgttatttgtacgtgttctgttatctctagtctttggaaagaagggcaggcttgcaaactttttgtgtccttatttgcagagtcctatttgagttggcgttgtgcacgtgacctatgcctgacctgcttggattaggacgccagcctaggttagccccatggcagaggctgaggtgttattccctagctctgactgcaagaaaccaattccttccccacagcccactcacacagagcacactaagttttcccataccttggctgtgtagacaagggcttcaagaaccattcagacgtgcccttgaacacttcttcctgttgcaagagcgtgcaagcttgagtcgtttttatctctggtgaacccggtttcccgtggtaaacagttgttttaagcactagcccacaacccagagcttcagaactgccttcccccgccaccgtcccccgcacggggaactcaagttaggcttcttggcccttacgtgtggatgtcatttgaacaagaacgttttgcacctattgatgtactgcgtttaattgtacttagctgttttcttagatctttttctctgtgaaatcatagggactttgaggacagtgacggtttctgcctttgttccctacacctgcaaaacatgtacctgtgccttgtgaaaatccagccaacagccgtgtgcggggg

SEQ ID NO: 65951 - DNA, 1463 bp, Homo sapiens
ggaaaaagttctgtttgtccattttgttacagataaggaaagtggtttcacaaaggttaagcaacttgatcagtgttacccagcaaagagcagaatgattttcaacattcagtttaaaagtcggcggggggcagtggctcacacctgtaatatcagcaacttgggaggccaaggtggtacggtcgcttgaagccaaggagttcaagaccagcctggtcaacatagcaaaaccttgtctttacaaaaagtaaaaaaaaaaaaaaaagagttagccaagtgtggtggacctgaggcaagagtttgaggctgcagttagctacgattgtgccactgctctccagtctgggtgacagcacgaggccatctctaaaaaaaagaaaagctcatgctctttcactataccatggtttcttcagtgttggagatacagtcacagtggaaagcagttatggagtcaaagcaactttagtcttactgggtatttgttatagaggtagatgtatttgagtagcaagttatggttacagaaaatttttgtgccttcagttaagaactttatggtcacctacagcttcaagttaccccttttcccttctctttcccttctccttactgctgtgaccccgaagggagaaatgtatataggtagacacgctctctattctcatctgctgccttgctcacaacttctctgaatgcaactcgtgcttcatatcatccaccatgtttcctttctattctcccttgatttttctttttcagaattgcacccattgctatatgttctcccctgttttgtttaaggggtcctccagtagcactgttctctggaggtcagggatgagtgggtaaaatcaggtatcttttctatccaggttcccaagttgctagtggctgagcttcctgaaacagagagatccgaaaacagttcctgctgttgttgactcttgacagaggatcctcagctctgaccactgctgtgcccttcttcagtgtagcgttggtggatttgtttgtgaatgtttctgagagtgtaaaggttactatcacacatatgtttactctgtaaagataaggttctggtgaaaatagaattgaactgtgccccatcctctgtctttgcatttctgtgaagaacacagttcagtttctaaaaatcactggtggtggccctctgtatgaaaaaataaggcttacttcttgacacttaaggtcattggaggatcatacttaattgtttgaacatatgagtcctgtttacacattctggctcgtgtgtttttttgtttgtgtttagctgggtagatttgtgagagactcagggtgcagaagagagggagaagatgatgctgttttaaaatgatgctttccactggttgtttcctctaaagaagacaacggtgagtccaggggagctgttatttttttgcttagggttggaaggagggaaaagacaacttctt

SEQ ID NO: 65952 - DNA, 1580 bp, Homo sapiens
gtagagacggggtttcaccgtgttagccaggatggtctcgatctcctgacctagtgatccgcccatctcggcctcccaaagtgctgggattacaggcgtgagccaccacgcccagccagtttgctgtttttcaaactacataatcatgctcccttacagtggcctggagatgtcagtattcctttttgctcaatcagtttattgtaggtaaatgtgtgtgtgtgttgtgtgtgtgtgtggtttgtgtgtgtgtgtttctttttatctaccttctttgctatatacattttgccatatgaaaaccctggtaaccactgggcacaggtttctattggtagacaccacttatccacggaggaagtgaggacccggaggtgggaggcttccccagcaacatggctcacatctcgtttaaggtgctgacagtgctggaggctgggctgtttaaggtgctcagcagcactgcacccgcactgagccctggagctcccgctccccacccgccctctgaggccctcccaggctggctcctttctccctctgtagcttcctcctcaattaggctctcttccaactcccaactcaaccctggttgtgccagaagtgaactcctctgtaccccctccacctgggcagggctctacactgccaccccttctggtcacctgccttcagggcctggctgggcgccatccttatagggagcctctcatggttccagggacccaaagtcctttgatctgcctcgcccctgagacttgcaagttcataccatggggtctggcctgaggcaagcctcttccgggtcgttcttcctgcctgatggacccttaaagctgcatctcctgttgctgccctgaagactctggttgtgttttctgtgtctccggcctcgctgctgttggcttctgggtctttattccattgcaggccctgttgctgtagacagcccttgggttttatgtgttcaactttcgaccaacctgcactttggcacattgcatgttgtgacacataaaccatttttggtgtgctaagttcaaagttttgaacaacagctgatgaacaaatattttgagctatgatttgctggcactgcttgcaagtttggtttctgaagcatttatttattcagtctacattcattccaaaatatttgcaagtgcctatggagatccaagcattgctccagagaatagaagctaagccgccacacctggttcccacccttgggaagctttcagcccagcctcacctcctttaaaatctttgtgcattagggactgaaaaccaggaaatagagattttatataaatgaatacatagatgattgaatttagtggtggcttgattctaggacacagaatacttcatgtacttttatcaccaatgatgaaaacttgcggtgagtgcttcaattggaatgtatttgcttggctttacaaatgaccttagggctatatttatagaatcattaagggtctgaaggagttccttaaatttttagttatactttgctgcattttattgggaacattatttgctataatggcatctatgcagttggggatccacatagg

SEQ ID NO: 65953 - DNA, 1231 bp, Homo sapiens
actatgcccagcctgaattttccttttattataggatatcttacaccttgcaggggaacaggcagtgagtatataaattaataaaacattgttgtcacctctgtactaggaaatgtaaacttacattgtttatggtaatttatgctaatcttagaacccattaattcttggcttacacgtcactggcagctagatttgacctctttgctatttacaatgtaagtacatggaaaaggcacccgtacagagagcaggttctagactttaatgtcagaaatgatggagccagaatcactctccattttcaggtttgtgaatgatagaagtgtgaactaaatgagtcagtgttgctatatgaattttaacagaaataactaatgtagactactttgccaattcacaaaaaaggctgattttacagctgagatgtaatgctgtatataggtccttattttgtgactgagatcgtatctgtgaaaactaaggctttaaaggagtgtaggggaaattgaaaacaactttttgttgcctgttaactagtagaatgttgactctaccaagcagattaaatttagtctctgtgaggcttgatttgtcctgcttaagattgagcatttatcattgcatcctgaccgagtttaggtttacattattcaaatttgttaagctactggtccttaaaattttttttaacatagcctttttgtatataagtttggaattcacagaaaaccttaagatattccatttcccccctagttttagggctcctaaaattccctgttttttcaaaggttataaaatattaggacattccctttctctgaatcattcttttcctttctcctctcgcacatggtataacccaactggctgatgttagtttgtacacaactagaatgaccttcaggacaaaaaagggtttcctctcgatccgatggaaatctcgggttttatgttccactacaggtaatttgttctccagcttcgggtaagtcaggcattatccctggcctgcttcctcacctgggaggtgaggggtggatcagtgtgtctaggtccctctcagcattaagatttgatgactctgggataactccacaacacagaaaaacccatcagaagctttatgtagaaatgcagagaagctgaataccctaaatgtggagaagattgtgttattaccagaagtgtttacagcgattctaaagtctgttgttgactctggaag

SEQ ID NO: 65954 - DNA, 4422 bp, Homo sapiens
atgaatttgtcaccaaaatgtttctaatgtttaacaatccatgatttccctcaacttctagcttggcagaaatactcaacaagttccacaaagaatagacaacatatttttaaaaattttccattgtctttctctgacttgagttttacttcatggaggaccctctctggttctagtctgtcaaagtgtagtttaggggtcaaaactacattggttccaaagtttcccaaatagcccattgacagaacagagctctagcgactgggccctgtagtcagcaattatccaaatacctgcttattttaagagattgtattttagttttcttctttgtaaattagcaaataccaaataaacattccaataaaataccattaactaaagaggaggcttgctgtatgtgagctacctctttctcagtagacagtggttctccatctgcgctgcccattggagccaggccagagggtgccagaaaacccacgctgtctgactgcacctcaggccagtgagataggacctgtctgggactctgaccccagcagtgctgaaagacgtccaggtgatcccaatatgcagctaagaggagggcctttctcctagggttatcagtttgtttgaaatatcacaataatctcgtgattagaggacctgaatgcactgggcttttgggtggcacagtgtgctggggacagcctgtccggagttgggatggaggtggaagcctgcctctgtcaacaccagttttgttaagttggacagatatttactgtgctctgcagttctcattccagctttagcattaattcttagcacttaatcacattacagcaattttctagtattttctatatcacatcaagaagccaataaattaaaattctcaatctggtcattctgattccagtggccatgtgatggaaagaccttactctgatattgggctaatgactcactgctgagatttagattttataaatttgattttttttaatttttaattttttagagactggatcttgctctgtcacctgggcttgggagcagtagcatgatcatagctcactgcagcctggaacttctgggcacaaacgatcctcttgccttagcttcctgagtagctgggagtacaggagtgtgccactgcacttggctaatttttaaacttttttgtagagacagggtctcgctttgttgcccaggctgctctagaactcctggactcaaatgatcctcctgcctctgcctcccaagtgtggagagtgtaggtatgagtcactgtacccagctgaatttgaaatttaataggttgatgttgtttccgttatctaagaagtaagagccaagcacattagtagcacaagccttgttagtgtttcctgagtaaggttgagcctacttaagacaacaagtgatttggggaactttgttatgcatggggccatgcccattacaagtgagtctctcacattccttaaagtggatttggaaactgaggcagtgctatgagatgaggcaaaatggaataaaatgggaagaataatatctgctctaattatttcacagggttcttatgaggctcagatcaaattattcatttattcaacaaatgtgtgattcaccgagtgcctgtcacaggctgggcggccctctagattatgaaggagataaagaagggaaatgtttggccttggaaggagcagcaaattagtcactgctcatatttttaaaatagttcatgtcataagctctttgaagagggctagctcattcacttccgagtttccatgtctcagtacctagcacagaacatagaagcggctaatatattggttatatgaacgaatgaatgagccacagaattcatttccttgcaagcatgtcgtgtctccccccaacaagttaaaattagtgaagtgtggatgtggtttcatttcttgggtagtttaatgttccacaccaacttgaatatggtagtctaaccttggatcctttcaaaccacagcaatggtgaactttttagttaagagtttgattcaattcagattagtattcctttttcccaatcactgttttagcaacacagggagtacctgttttcggttaatgcgcttttcatgtttggtataaatccatagtccaatatttcttttggaaaggaagataaatttttcccttgacatcccttttttccattaagttaaaaaaatgttacttagtaaatgtgatttcaaacagctgggttttaatctttccaccttatggaaagagagcgtttggctccagcagcacccccaccacgtggcccagcctcactctgcacacagattttctaacctggatggcgccgctagcgaggcgcttgtgggtgtgcatttgggctgtgttcacatgttattctaaactaggtcagcagctcggctggtttctttttctatactcttttaggagaatgtgaacaaatggaggattataatacgctttttatacaggttcacaaaaatactttgaggactcttaagttgtgtttctttacaacaggtgaaggttattgtcttgcgggccacagttcgccgctgagaggcaggctgggctctcatggggtagccccacacatggttagcatcgctggaagaggccttggtgtgccgatgcccagccttttatttgaatgattgaaaatctgagttgaaaggaccttggacttgatccaggcctgccacccttattccagacagacagaaccaaggcctggaaaaaggaagaggctgtgacagtcagtggcggtgaggaacccgggactcctccagagactctgtcttcccgctgtgtactgagtgggccgtgctgtgtgaatcctgccagcttctgtggtttcctagggccaagcccacactcagaatgcaggatgacagtcactgtaagatgtaatggacctttctgtgctcaagtgtatataattgtgtaacttcctttattcttcattgcttaaatggatagtaatgtgttaagtgtgcaaatttattttaaagtcctacaaaactgaattccattttcaaatattgattcgtacagactttagggagcctgtgttcagtgtggcctataaggatttgggtatgggacctgccctatttttatagttcaccagcatggccctttagcagaaagcacacatgattttcccatgttttacattgtaaattcactgctacccatgcctggtattatgcctgatttttcttaggcatgagaggaatgaacatcagagaggtgaaatatgttgtccagattctcaccacaggacagtggcaagtgggagataaaatgtctgagtgttcttttgttaagccagcgctcctgagttctgatggcccctgccacggctggctgcacgggctcccccattctcggaagtgtggagaactgccaaggatgttttcaaaccgaataatagagccccacagctatgacttttgcagagcaggttgtggaaagaaagagagcacctgtgctactgtgtgggcagtgccgtagagtgaggcgtgcaaggtgggcctcggtgcccctgtggagtgcaggagggcaccatcctgtgtgtttcagacgaggaaggtccttacccagatggcccttctctgagtttagtgtcctgggctctccagatagtctgagctcccaaacaatcatggcatgcaaatgggggaaagaaaaaccaacgacagtcacagctcaagagcaccaagcttgcattgactgctccatgctttatattgtactttttcagagtgcaaattcacctgcaccagtggtaaatgcttgtatcttggttcgctggtctgtaaccaacagaacgactgtggggacaacagtgacgaagagaactgtctcctggtgaccgagcacccgcctccgggcatcttcaactgtaagtctctcctcccacctgggtggcactgtctgatgtggttctgaaacggttaggaggtggggtcactgggacatgggaaggaggttgttttctggttaaggaaagagatttgcattttcacaaaggaaatgttttcttcttttaggatagagggacagcatgttcaaaagtcagaaatttgttctgttctctaaagtggtcagcggagctgttttgaaataggcttttgctgtttgtctgagcaatgcctggattccaggaaatcatgtattgatttagtattcttcataccaacattactacttcagaagtaattttaaataagcaaagaaagatatgtggaaggtacataattaatcatgcaactgaaatatgaaagtagaaaaatttacatgggatccttgaaggttctgatcatgtgtttttctattagatactggatggaaacagcttgagtgaggttttgacatgtgtgaatccccaaggctgag

SEQ ID NO: 65955 - DNA, 2610 bp, Homo sapiens
tcaaagggttgttctgaggatttactgaaatagtgcaggacaggcaattagagtaatacctggcccacagtacatgctcagtaagcatcatctattggagggtccactgcttcctggggattggaattaggtaggaagggagctgctgtttgccgagtgctcactgtttacatgcatcatctcattcatctctcaaaagcaccctagaaaggtcataagaatgcagcgctcagggcggtggggtgatttactcagagtcacacagccaaggcgtgccgctgctggggtgttgaactcaggccatggttttgtttgtctttggaggtgctattttcccctcccatggtatttttccagtaagatagggatttactcatcagttcttaaaaggcttgaagggcttgggtggtggggatcaaaccaaccgtcttctgttcagaagggccacagaggatgattgttttcaattgatacatagttgacgatttttggtttcatgctggattttcaaacagattatgaaaaattaacctaagagcccctgtgtgtcagggatcattgattctgttgattccttgggatttcctctacaaactgataagctatcccttcttcgattgtgtcctgtccaggtagtactcgtatgacccagaagccagctctcctctctgactcactgtcttgtcaggaggatggagatgatgacagctgccctggggaggcgagaggcagcgtggcttcagcatgggggcggctctgtttctgccatcaccatccccgcttcacctgctgcgggcgccaagagcccgcctcagccacatgtgggcttttagcctctgatccccagtttccctctgactcttgtctgagcgcattggctccttcagcatctccagctgtgctgggaggggtggggcctgcctcgggggccttctggcattcagcagattggacttcccatgttgacgttgctgactgcagggggtgtgggtcaggggtcttccaggttgtggtgttaccttggagcgaggctggggtgaggggctctgggtttccacagacttaattctggctggcctccatcaaggccatgttcaatgaatcaggctgttgtgcagagcagcctgtgtgctttggacagggctccccgcccgcccccccttttttttgacttaaagaatctatggcaaagcaattactgactgtgacagtgacccaaggtggtatttaaaacaagatgtggagggcaatatgcctctctctgggttcgccacgggatcaagttgcaggggctgtcactggcaacacgcttctgcctgaacggttctgtgggatgagccccagggaggcgctggcagcctcacaccctcccctcccagtcccgccccttgtgttggctgcctttgtttctccaagacggttttctgatcaattaaaatcgtgtagggtcttaaatggtaattctgccttttcaaataaacaaaggcggagaacaaatgggagggtaagttttaataaaccttaggcatcatttcctcctgctgtgacactaaatttacttggataaaaacaacctcttagatttacattttgattctgttactgctttcatgtgtgcggggctgtcccacttcagatgaaatttatccacttctttaaatatttagtagtctagcgtggatgttaatgaaagtctggcggtgctattttgagaattgcaacaatgatagtaattttcagtgtcagattcctgcttcgcaaagggaaagagggatgggagaagggggagggaaaaatggtttcagttctaatagagtttgccatccgctgggccgtgccagacagatgggtcatgaatactgtctagacgctctctgcctgagcgaagccctggtctctaaggacacgcaatgagacgccggcttaagtaactggggaaagtcagggcaagctctcctgtaaccagatagaaatcaacgtgatcctgcttcctgggggaggccaaggggtggccgggagggtgtagggagagggggtgctaagagaaaaggcccgctgttactgatcaattttagtgcaaacttgacaattattaggcattagggagagcgtgaaaggacagttgtaggatgataacactattgatttaagccgtactgcccagaatgcagaatgatatatttcagacccaggcttcaaaggccggagaggagctggggtgaaaaggaggatgttgtcgtgtgtgcttaagacgggaatgcagcccgcggggtgacctgcgttaattgtgtatattaacacactcagcactgctcttgtggaaaccgttggtcttgactgttcatttagcctcttaatttgcaagggttttagaggcttaccaggcttgctttctctttttatgaatttctgcgaatttcttcatgctgggtctcttccgggcagctccacaactggcagagctgtaggaaagcgggtaaaaaaatccccagcgcctgcctggctgcgcttgggtgcctgcgtagtcgtgatgcttgtcttcctaattattttctgagtggcggggatggagtttatgtgatgtcagaagtgagtttctgctcatgaaga

SEQ ID NO: 65956 - DNA, 779 bp, Homo sapiens
agtatcttgtgatttcggaatttaaatgaggttgtgtttaacctgcataacatctggcttttaaaatctgactttattttccttttatttctgtgcatcggctcaggcacacttagtggttgcttaggtgttgaagtcaggttaccaaacagcacgccctctctttattctcaggctgcgtgtttcattgattctgaaggtcagatggctgtgttcaagttctgttagtatattggtgtcagaaatgaaaagatgatgtaaccctttataacttcttaaaggctcatatcatgtcaggaaattaacctgtaggagttatggacaaatgcccatcctgatgattttcagccatgaaaatgagtaaaggggagatgggcatacgaaaggctgcatgtgttgagcatttgattttggaggaggatgcatttgttgtttgatggagtctacgaccttgccctcattccaaagggcagcctttggccctgggcatgccctcattggctcacaacacctacaaaccatacaacatttggcatcagggttgtatctgttggtggaggacacaacgccaaaaggaaatgggatttcctggttaggcctgcggcttggcagatgattgttatgggaaagacactgagtctgtttaggcaatttcttcctctttactaataaagtgttcctattttgaaagcaatgctgagttgtggacatgtgtataaaccgtaatgctgtaagttaggcctctcttgtctagaatctcagcctcttcatactctctc

SEQ ID NO: 65957 - DNA, 3396 bp, Homo sapiens
ccagtatgctgcttgggtcaagcagccgcatctccactgtcctaatgacaaaagacaccagcactgtctcacttcctttcctcctcctctccagagtgttaccttcctgattgacagggactttcggttttctatttagaagcacatgtttggtgcagacatgttgtccaagacttgacattgggaaatgttgggaataatctgaaactccttacaatgtgatgttttggtgattaaaaaaaaatgtttaggaaaggttgctaggctttaaaaatatatatattttgctaacctcatggagtcactgtgcagaccctctcagcagctagccaggctggcctggccctgacggcccgggaatagcagctgtcttgtgacttcccacagcaggcacattgcgtcgtctctcaaagtccctcctctggagcgcctcctctgcccgtggggctgtgcgggacagtggccgcgtctctgtctcattgcaggacagcactgggtcttaggtgctttttcatgttgtccacacctaacgctgctgctccccggggcccagttttgaaactgccctttggcatcatgctttcccgcccctcctgggagcagcgcctgtgggagggcagcgttattcccagctcctcagagaggagaccacatccatggcagtgtgtgactgtccctttcggcggtcctttgtgaagcccgcgggaagttctgcattcagttcctgactcccagaaaaacgtcctgtcttttgaactgaaaggaggctgatgtcagagcctcgttgagtaacaatggagaaaatctacatcagaggaaagaagccctgagctgctttaaatgcttctgtaagatgatatgccacaacacgaatgtggattgttgacagtaaccacagagacgagatcatcgagggaaccagctgggagtttgtgaggccataaaacacatcatcaaaaatatggtgaagcaaattcagaattggtttttagaaaggagaaggaaccattggcaatctgacccataaattattctacattttcaaatattataactaggaaggtcgcttcaaggagccttcaagcccctcatgcccacccgccccaaacccattgtcactgctaggtcccagatttacagccacctggagaggaagttgcagggggtctctgtgcagctgaggatgatggaagggattgcagaaggctggtgctgtaactgttgttagcgggagattgaggccggggggtggagtaggggctactttcttccccctgcacctgctatcatgatttcagcaaaaccttgcctttctcctcttcaatcttaaataggtacagtggctgagtattaatattaatgagcataataacaataataaaactggcagtagcatcaaatgaatgtggtctcctgcagtagaaatatttacccgatgtgtcctgccagtgagagagattttggcattaaacctagacattacctcatcctcctgggcagacagccgattgccatgctaagcaagtctgcgccgagaagagctgagtacctgccgacggctgcatggcccagaccccagggaacacagtttccttgagcctgtctgtctgtctgtctgtctgggtctcacccttaattcctttctttctctttccctcctccggaggttggcattgtgtattttcaaattgtgttgctttttttttttgcagaatcttgtagggtgtgttgtgaaaagtctgccagccaggtgggtgggtattattaataatccatagaaacccaaggggtccggagtgagaggagaaacatgacgtgcctgtgtgtgcacaggacgcctgacactcgctcacacacgcatgtccctctctctgagagccagggaatggggtgggggttggtttggtttaatgcatgataaaaacaggggcattctgtaataacagagctttcatttcaagattcttaacaactaaaataatattttgaaacatttggaattgtactagaaatgtgtgtttgatatgttcaacctaagaaaacatcacacttaaaatgcttttactccactggcttcagacctctttgaaattggtgcctacacagctgagaagtccgggtaggtgccgtaggcaaattgaggggagaaagtgacatcttgtgtaacgctgcaaattcgcggaaggctttgaaccgtcaccagagtagcaaatactcattgtgaaagtttttgcaatgaggtacggaaaaccatttcagctgctctgattgtcagctctcctgtgttttctttagctcctgacttaaagttacgtgtcctgtcagttttgatactcttactacttagtgctttaggttttatcagctggtgccacatcttttaaaattctgtcccactagcctctgtgctggtcctgaccgattcaccagctcttgggactgtgtccagatgccttttgtgatgcctcttttctaaaatgcttttatttgggtttaagatgtactaattctttcacacacccatagctgaataccaaatattggtatgcatactaccaaacttttgtgtatgaagttcgtacaaggcactaagtcatttaaaacattttaattgtgtgctgagctcgtaagtgtacaatatgactgtctagtaaattcttaattatttgtcgactctttatcgaagaaaaaagtaagtaggggaaaagataaaggagcatccagccggtggcaaaggaacaagccgtgtagctctgcttctcacccactctcagctagcttgggccacggctgcctgaagtgacaccaaacaggaaccccactgggaggactgtacgggccacacccatggacgtgatctgtctatgaaacaggtcttctcagtgcttcggggtgaattttgacttctcctgagccatcctcagagcacagctggtggggaacttcacccgtctggtcactcctgaagcagtctggctggcagccacaggctgggatcccagttgttggaggtcagtgcacacagcggctatctgctgtagcagaaagaatttaggggaggaaaggcttgagaaggaagggcaagagagagcagactttgtggcatcagtcaggtatatgtgcttgtattaacatgaacctgagaggctgatggtattacatggaattccaagtttcgactgcatgaattctgtctcttgtggtttatctatggccaccatcaaccgatgttgtgtgataaaacgtttaaagtatgtacaactgaaagtggagatggatactaggggcatttaacgttttaagctttcctccagggttttttcctcagttacatggaggatggccctaggtactaactgttggaaatggcagcattgaaaagtgcagcactttctg

SEQ ID NO: 65958 - DNA, 700 bp, Homo sapiens
atatttttgggataactaggttccgatactgtcctgggtattactggtcaaattccagttggctgtaatatgttgggatttcacattttgcttgaaaataaatttggcagtggagatcacttgcactgaaaagtaaatttttttggcttattttatacgttaccctatcctgtcttctctcactgccttttggacttcggagattgtctctgaattatcaaatgatagtgcagtggatgaagtttggccacagatgctagttgctcagcagcagttcctttaaacgaataagggtctaaactgcccagagggccagcaccagaacagggtcttgcacattacataagctccataagtgtgcacagtctgatgatcatgtcatccagcctgccctacattgcagtttgctttgttctgggtggcacttgccccggggtcacagagctgccctgacaggtgacagagcctggccagccctcactgtaatacactctgcacccttcctgtctccaggcttacagacagcctagtaacggtttctgtaatctgagctgtctgctgcttcagaacacatttagagatcagtaagcaagtcacattttccgtgttaaccactgtgggctaaacacaagatgtttttgtgggtgggcaactttgtgtctccatggacattttttggccatacttatatagttaagaa

SEQ ID NO: 65959 - DNA, 3050 bp, Homo sapiens
atgacatctgaaattaatgggactaatgtaaggattgatattttcatatttgctcaattgcatcctgggttaagcacattcaacaggtaaagaattcactgtctaattataattcttctttcaaaaaagaaacccatagtgcataaaaaagaagtgtaaccaatgtcaacactggaagggagaaacaggtgctggcagacaaatgtcctgacatggggccacattgctatgccttgggctggctatggccacctgggtccttgaagaccactgtcagcccacaggcaaagtcctgtaggccctgacacccccagggttggggccgatggagccagggtcacccgcatgccaaagctccttctggcccaagaacagggaaatgaggaaagtccacagtcagaagttacgcagccagatgccagggaggttgagtaaaacagaatattttgtttggtttgttttcatgccaaatcttcccaatttatctgtgtttgtcttttttaaaaaatacaagttttaaaaaaactagcaaaagatatgggccaagaaattgagatccccgtaattctttgtttagtctgtaaggcagagtacatttgcatctgaaattaaatggccattgaataaacacagggactcaatatttgtaagggcactaatgtttgcagatgtctgcagttgttaagggcaagccaaggaaacaggaaatgctgggactcatattttttttctggaagaaatgggcattccaaatgcatcctatataacctttttttcttcttcttcttcaggtacatccataatagtttctgaaaggtattcaatcctggtggagagctggagatgtgtttatgctgggggttgttaaatatatttacagccttttcagagagttccgtgggggttcgtcagtggttatttattagtctgcttcaacatctgctggctggaaaataatctgtccaaggcaattcacaggaacattataaattgcttccgattataatgagcagtaggaaaggtaatttgagggaaattccacgcatgttagttacagcgtgtcagaagcaagatctggtgtgaaatgcccagagaatcagtgtctgctgataacagttataagatggaaggttctgggtgtctcgaccgtgtttttcttcctgtctcacttctgggcttgctgggcaacttgcctgcttgctggggttctttggagcctgtgggcaccttcatgtgggcactgagcagagccagccctgccccttcctgcaggcactgccagcggtccctgagtggaggtggaggtggaaaccttgagtgttgaggcccctgggggctgctgcattctagtttccaagacagagtctgcagagctgtggcaaccctcagaggcccacacacacctccaaagccagcccgaccccgcaaggcactctcaccggggtataaattggtgctgccattttggaagacattggaggaaaacgcaacaaaatgtaaaatgtgcagaccaatctcctcagcagtttagaccaatgacaacaataactattcaaggacactcattgcagcagtgaaatgcgtggtccactttaagttgcttattataatactgaaaacttggactgacattaaccagtgccaacaatagggacttggttaaagaaattacagaaggaaattcactctatactgttcagtggaaaacaatcagtgagaagcatttgctcatatatgcaaaagggtgtgcacacttgggtgtgtgtaccgagattactggaagaacagtgtgaagagtggtctcctcaggtggtgggagtcccagcttcctttgtgagacatgagcatgtggagactagaactggtctttctcatagaaagactgttggttctggtgttctgcactctgcacgtttctactaataattaaaatacttactgcctctgagatgcctccggacacccttctgaatcacagtgttcagaaatgctctctaaatcaggaaggtgtggatgacctttggaccttccctggtgtgaggagtttagcacactgagagtaatatatgaaaaagaccgccaggcgtggtggctcacacttgtgatcccagcactttgggagaccaagccaggaggatagcttaaagccaggaggatagcttaaggccagaagttcgagaccagcctggacaacatagtgagatgttgtctctacaaatatagcccaaaaaaattagtggggtgtggtggtacatgtctatggtcccagctactggggaggctggggtgggaggatcccttgagcccaggagttgaaggttgcagtgagctgtgatcatgccaccgcactccagccctggcaacagagtaagaccctgattctaaaaaaggaaaaaggtcactctctactcaagttctacttatataacagcaatgcagctctcttcataaagctggctgttgtgtagtttatgttggggaatcagttcatggtttaaaaagttctgtcaatgcagagaacaagccggtgtgttttatggagaggctgtttaatctccactgtgagacagtaaatatttggctgttgcatcatcgtgaagcttatgatcacagtctggcgccatctccctccttgcctggagtctgatctgtcccggcccagtgtcctccaggaccctggcccctcatgcctccgtgcttgcgcgtgtgccatttcctctctccagaggacctttcctgcctaggactcatgattgtcccctccctggtaagccatccccgaccttccaggcagaacctgctggcttctcctcagcactttgcatggatttctgtcacagtcctgggtgcactgtgtcgccctctctatgtgtcagcctcccgtcccctaccgtgggctcctccagggaggtgtggacattcatcctcttccaggcagccctcaggaatccagggagaagataaggaggcggggcgggcggaggtgggtgctccacacactcagaacactttcctctgcacttacttcattctggtttttcttttgggtc

SEQ ID NO: 65960 - DNA, 2297 bp, Homo sapiens
tttgtaacctcaaatgggctaatgcccacaatttagaagtgattagattggaaagcacaacgctgcaaatgctgccttccccaaagccaggtctattcattaatatacctgtgcctactgacaagaaggaaggctggtaaagcacattttcaaagctgttttaaatggatcaattttggtaaagagtaattcaagacggattgtaaatctgatcagttttacaaccttggaaggtggggacttgacgcacgacgttaatatgcacacgcttcaataatctatccacaggtagttttgaccctgatctcaggttgaaagtcctcaactatggagctttcgagtttcagtacagtaggcgctttcactccccagtagaaatctggggtgatggccaaaaaaagtgtgttgtctcccccaaaccacaccatgccaagttcagccaacgcagactaatgcatccttaggtatttgtcaagaagaggtataggcggtcccttttctcagaatctaacaggtaagaatggcctcttgtggcttcccaaacacggcggtaaggaccagtctgccagtccctaataagaaattgctaattttaaaaaccattccgaacgcgggcgcttccgggcccctcttcaactggcttcggaagaaggggggagaacacggtgaagggttacagcaaaggaggctgaaaaacagtcccaaagcaagatttgccaggacactggctcgacccggaagggcggggggacctctctcggccgccggggtctgtggggtcggcgagtgtggacgacccgtctggcagtcgtacactgccacagcccgaagagcggcgcacgcggagcagttgccgggttcgcgccgcgagtcagctcccggacacacgcccagggttgaaggtgccctctagacccctcccgctgccccacagaggcctgggcccatgctacctcttaggacgctggagccgccgccgccgcttcccgccgcgcaggctggaccacagctcctcggatgccacggcggtgtcactcagcagagcagcccgacaaagcgtgggtccgcgtgcaggaacccgccgggctcagccggacgctagccccctgccgcccccggccccgccagccgcgcccactagcaacgtgctcgcgacctccagtgcccgctcagtgaagcttctgcatgccgcgcgcggcacgtcgggactcgtagttccggcgcggaggacgtgcgtcgcggcactctcgcctgaccgtctccacgtgactctcgcacctccggaagtgacgtaagcagacacgcgtggcgcgggccgccgtttccgcaaacagaatcgcgtttggctgtgctggtgagtgtgacggctggaactccggcccttcctttctttgtgtttgtccctcggccgccgtggaggggtggaactggcactcccacccctgacatgggctcacttcgcattagccctgtgcttcactacccaacgcgtgggtctattgccttgtgtcctcagtcccaaggaaaatgggaactccttggggtgggcgggcgctgttcctcctccagactgggcgagcccgggtgggagaagcagctcgaagagctgctccagctcgcgccccagggccgtgctggggaggggcgtggggtccgcaggtttgtcttcagcggcgcttcggaaacctgaaccagaggttgagtaacaggccgcgctaatgacggagggggtgaacttggctggagaagtcccttctcgcctctgtgcgtcctctcgggccccgtggtagagggtcaagcgggcgggtcgggacttagagcttatcccgcttgggctttatcccggcggccctggcggcctgctcgctcgtaccctgaggagctgaaatgacgcagagacatagcttgcttcggaggtgtgactggaaagccgggtcgaaatgttcgtgtggttatttatcgcgtgtccatctccatgtcagtcgaccacctttcgaaggtttcttgaagattctgagggacagctctcttccctatggagtgttttcattattccactttgagtttggtttgggttttttttcccccaatttgttaaattgatacatagaagttgcacatatttgcaggtgcaggtgatactttgatacatgcatacaatgtgtaacgactaaatcagggcaattgggatatttgtcatctcaaacatttatctttatgttgggaacattccaatttttcttttagctattttgaactacacaataagttattgttaactgtgtccaccccactgt

SEQ ID NO: 65961 - DNA, 805 bp, Homo sapiens
cgtttccaacgaaatcctaaaatctatccaaatatccacttgcagattctacaaaaagagtgtttcaaaactgctctgtgaaaagaaagcttcaactctgttagctgagtacacacatcacagacaagtttctgagaatgcttctgtctattttttatgggaagatatttcctttttcaccataggcgtcaaagcgctcgaaatgtccacttccacatactacaaaaagagtgtttcaaaccttctctatgaaagggaatgttcaactctatgagttgaatgcaaacatcagaacgaaatttctgagaatgctgctgtccactttttatatgaatgcgcgctttcaacgaaatcctcaaagcaatccaaatatccacttgcagattccacaaaaagagtgtttcaaaactcctctatcaatagaaagtttcaactctgttagttgaggacacacatcacaaataagtttctaagaatgcttctgtgtagattttacatgaagatattcccgtttccaatgccatccttaaagccatgcaaatatccacttgcagattctacaaaaagagtgtttcaaaactgctctgtaaaaagaaaggttcaactctgttagttgagtacacacatcacaaacaagtttctgagaatgcttctgtctcgtttttatgggaagatatttcctttttcaccaaagtcgtcaaagcgctccaaatgtccacttccagatactacaaaaagaatgtttcaaacctgctccatgaaagggaatgttcaactctgtgacttgaatgccgatatcacaaag

SEQ ID NO: 65962 - DNA, 1514 bp, Homo sapiens
cagcagcggcattagattctcacaggggcacaaaccctattgtgaactgcacatgcgagggatccaggttgcacattccttatgagaatctttttttaatgcctgatgatctgaggtggaatagtttcataaaaccatcccgtctgccaccccccaacccccatcctgtccatagaaacactgtcttccacaaaactggtccctggtgccaaaaagtttggggactgctgctctaaagaaaaataataagtacataaataaatatgtaacttaatttcacattgtgatacatattctaaagaaaataagaccaagctttcccaagtctgtaaggggagactatatacacaggctaattcttcagtcacttcaaactctgcactgattcctcaaataaacaagagtcaaggaaaacaactcaaaattggttattttttaattgactattgatgccactcccaatacccccaattctttgagcagctattcttgcccaaaggctaacagtcttaggcaagtttttctctctgtacacatttgtttggctgctgcaatcacacaccatcagtgaacagctttctctgctaggctagtgaataaaccactcatacacttacataacattgcagcctcttttttttttttggtcaagcctgcatgaacatttttctttatgaagaaattttactgggatgagatactctgttttaaattttctattttttctcactgttgctgtcctatgagtcaggaagatcatagtgagtgcttagtctgggaatgtccaaagtacactgtattcctttagcacagctatactgtcattgcataatttaaaaaaatgctttgccacctaacttgataaaaataatccattctccattatgcttcaaaaaggacaacatttgggctgggcatgatggctcacacctgtaatcccagtgctttgggacacagaggcaggaggattgctcaaggccaggagtttgaaaccagcctggacaacataccaagacttgtctttacaaaaaatttaaaaattagccaggcccatggtggcatgcacttgtagtcccagctacttgggaggctgaggcagaaggactgcttgagcctaggagttcaaggctgcagtgagctatgaatgtgccactgcactcctgcctgtgtgacagtcttttaggggagggaaaaaaaaagacaacatttcaagtatactcttctcttcttgctttgacacatgcgtatgtactggtaatagaaaacaaataaaatgttgtgatatggtgatacatatagcactcaaaactgtcaagctgtaacagcatcactgtgatttctactgtgctgagcagcagtgtgaagcaaggagagcatcacatatggtcgctgttgtagctactcagcttaggtgttgtagaacaaaagcagctatacacaatacattttttaaagtgtagcaacgtcccaagaaaactttatttatggacactgaaatctgaatttcctattat

SEQ ID NO: 65963 - DNA, 2524 bp, Homo sapiens
tccttcaaactcaaatcacctatgaaattttggctcaaaaatcacttcctcaatagcaattctccgttatcattttcaaggctaaaaactaaacccctaggagctaaatcgcaaaaaggaaaaaaaatgcaaagtagtctttccaatttaactgtcaaacggatcagaaagattaacattaattactacgatcgccattcaacaaactgtatacattgcagtaactctgacgtgataactttttataggatgcctgcaatagcagtttgtaagtatctttcgggtactcatgaactgagtcagaattaaaagttcagagtagttagtacagagccagtcaaatggcaaataggaccacaccatgagatgttaatggtactccaagattcttcaggaaacagaaatctagcattttccaagacgattatgcacacctgagacttttgcagcgaaccagactaatgcaagaggaaggaaagacatgcaaaaccccagacaagcaaaagagaacagcgctactcaccagcaaacaatccgaattcacttccgatttgggatcccgcagcaggttgtccattttttcaaatcgagtctcaaaactgtccccagtcgacatgttgctgctgctgtgacaatgccctcttaccagcaccagcagcggaaagcaatttcaaccaacttcctccgcggtgggttcgcagccgcggggcggaggagccggaacctcagggtcaccaggtgcgcccggttcccccgtcttcccctcactgaggggacctccgctctccagaccccgggccgggggcaacagcgacccacagccgctcggacgcccaaagtcgcatcccacccggcagcccctcacgacagccgacagcgccgtcgccaccagcctcgtcgctccggcgaggtgcttcagtctagcgggccccggccgccgtcgccatggaggggtccccgtcccgagatgggcaggagcgggtagagaaagagaagcagggtggagactccctccgggcaacaagggagggagaagaggaaaggcgaaagcaaagggcgggtgaggagctgtgccagctgcggccgccgctcgggccacgggccgggcccgctccgctcagaggcgctgtagacggtctagccccgcgtccccggctctactcggcccggcccgacgcaccgatcagtctcggccacgagctggtccacgcaggacagcctcactctcccattttgtcccgtcgctgctggggctgctgctacggtgtccggtggggcagggcgaggtcgatgcccgatggagacttagcagaggaaaggctggagagcgggcgaagaggaagacgatagttgggtcccggcggctgctgatgggggagcttctgggaggggctgcggtcccagccggggaaagggcgagtcgcggcggcgaatgcctggggggtggggcgaggggggctgagagggactaatatgtccgccttcctgttcaaacaaacggagaccgccggggcagactgcgcatgcggggcgcggacgctcggaaggggaaccagccgggaccccgcgcgcgcgcgcgcactctgtcgcctccgcagggtggggtggggcggggcggtgaggtgggcggggccttgcgggcaggcggtggagaaggcggaccgctgggaggagccgagtgcgggtaagcagctgccggcaaggttctcgccttggccggctctgaggagccatgcagggctctggagcggccttggaggtccggacggaggcggagctctggctgcttctgatcgctgtcccggcagatgccccagctctgtttcctctgggttgcagccagtccagagacttctgacgaggagagagtgcttgttctccttgttgctgttagggtggggcaataggttcttttttaggcaagaagccttttcgtcggcaggtaccagcattgagcaccagtggcgtttggttttcagtggtactccatggacagccctccgcgagccccggcgttgaacccatttacgattcactgggaaagttccgaagcgctgcagcgctcagccctcccacgccaggcgtgtgtgtcaggggagccataaaatactgactccggaagatacagtcaatagaagtcaagctcaatttaatttttttaaaggaaaataatctcgtagaaaaaaatcaatatttttaagtcgttcgtgttagttctcataacacccctactgtagttctctcctggacgtgtaatgctgccgtttcaatgtcaaaacattcagtgaaacttaattgtgatttttatcagaactaatgtaggacatgagaataatgggcatttctcctagttccgttacttcgttgactgtggtgtgaggaaaggtgaaagacttgtcactcacccccgctgataaagttatgttcttcactggtttcagcaggaaatctaccttaatttattcctcatcaaactttatttttgctcagaagccaaattaaggatcactagaaatagaaaatg

SEQ ID NO: 65964 - DNA, 693 bp, Homo sapiens
gcctcagcctcctgagtagctgggattacaggtgccagccaccatacctggataatttttgtattttttagtagagacagggtttcaccatgttggccaggctggtttctaactcctgacctcaggtgatctgcccgctcagcctcccaaagtgctgggattacaggtgtgagtcatcttgcccagccacatgtttgctttaaatggaatgtctggggactgttaaacatgtgcctaggcatacttccacattcgaatgggttccaagagtcctgtggaaaaggaactgaactctcttcatgattggacacatttgatgagcaggtgtggggatgggtggagggagggacatgaccagagctggataaggaaagtgaaagcccttaggggaatcctcctgagcgcagaagtctggagagtgggccagactgcatcaatctgagtgttgggaacggtgattctgagtaaagagtgaggctattctggaactacctagagtaactgtggtagagatgaaagaactgaataaacagaccaagagacccatttggggtcctcttctctaaaaacctgagagtgagaagtgggttatcgacagcacctgtaatgtcaacaattctgagctcccattgcaaagttctcttcctcaattattgatgagaatcccttgggtgaactccaagtatcctatag

SEQ ID NO: 65965 - DNA, 2605 bp, Homo sapiens
gccgcggctgcctccccactcccacgcacacggggagctcccccgggctgtactgcactaaaggcactcaaaatacatcagcctttccttacctcgattcttccaccacatccagcatggagctgctgcttccagagatgtagtcgcctatctgtggcaacaattagttttaaaaatggagccgcatctctaataacaaaagcctccagctgtgaaaagtggagctaaatctctctaccgggccgcagcatctctcaagaaccttttccccgcagcacccgtcaaggcccagggccagctggacgcggctgccctggggtggagccgtccccgtggtcccgggaggctaccgacgagccggggcccggggccggagggcgtgctcctccgggaggtgcaaaagtcggcttgggcccggagctcccgggtttgtttggttttgtccgcgccctgcccccaccctacccccttcatgcaaaaggccaagggtttccgagccaccactgcccaggccgagttcacgcttggggctcttcagccgccgtccagtgaacagagaaagcaattgcgcagaggcgagagcaggctgaatgaacgcgggctccaggggaaataatttttcctcctggcttcgcgcgtcagcacactggggtgcagccctccctcacagaagaccccccccccgcacgaccccctgtacacccccgcggggctgcgcgttcgtctgtgcggcggggtttgggaatggaggcgtgaggaccgcgcatcgagggctccacaggctgggcggggggcgtcgttggaggggggtaggggagaaatgcgcgcccaccaccctcacagagggcgagggacccccaaaagccactcgcggacgccgaggcagcgggaaggcgcgaggcggggcggggggagggggcgcgggggtccccgctgcggaggccagggcgggcgggaggggcagcacctgaggaatccgcctccggctgcggcggccgccgcctcgctccgccccggggaactgagcgcgcggaccgcgcgcctgccagagagacgccagccgccggcggcgctagcacctcggagtcgggcggccggagcagcggagcgcagcgcggcgcagggaacggcactgggggtggggagaccagcccggccgagccgagggccaccccctggtcctctgccctcgcgccccgctagggccaggtgagcggccgcggggactccggggcgcgggcaggaggtgagaggtcgcgaaccgggcgcgggagctcgcctgtgaccggcaggagctgccctttggcgggctggacgccctggccgcgcggggaagcgccgcagcggacttttccggagggatgggaagctcagcgggggtgtgagcggagcgcgtgcgggtggcgagggagcgccagtgccaacctgggagccgtgcctgccttccctgccgcctcgcgtcgcccaccgaagggacccggccgtgctgtccgcgcccagaggccgaaggcctgtcaccgggctctactcgctgcctttgtggcgggagcgagacggcccgggggtgggacgagggagctgcggcgcgccgagtagcgcggggtcccccggcggaggcggcgagggggcacctggttcgtctccccgagcccaggggcagtgagggggtgccgggcaggcgggcgggcgacaggtagggcgccgcggaggtggcggggagaggatggatggagttcagcctgggaaagttgagaacgtccagaggtggctgggcgctcgctcggcgtctgtgggtttttttcctcaacaccaaatgtcacttcgtcacgagcgggcgcgcgtgtcttccggccagcatgtccatttttctgtgcatggctgaggaccactcttattccgaatgagacacaaagagttgtgttgacagctgaccctgacacaagcagacagcgagtgaggtgcgccctggccggggagggtgagggagactcgttaaaggaaatccattcccgccgtccctcttcccagctccattaagaggaaactccatgtggagattcagtgcgtggggtttctcagttacatgagtccaaggaacgtccccgaacgcgactcgtttgcccggaactgccgctgcctctaaccgaggctgcgggtcctggagaaactcctcagtcttgcccctttctccggtgaacgtgacggttccaaggtccttatcctccccacccactcctctggccccggctgagaggatagaaaccacattttaatttctgcttttcacaccgtaaggtgtttttttccgcctccccccgcctcgaggcgggaatccctgcttaaatcacatttttaaacctagccgtttaaatacagggaagagctttcccacaaaaggtttttgaactcagtcccccttaataaaacctctcattcatctatatatgttcttagactttaaatcctggaactctgctttgagtgttgtgactgtgttgtttcttctctttgctgaaattttctaggaggttttgtgaatgatactgaaaaattatttaaaagagaaaaaattaaattgttgaaatatttagtaatacagttacat

SEQ ID NO: 65966 - DNA, 902 bp, Homo sapiens
gttcattggaatagaatactcggatttagaggattggttaattaaactgtaaaataagccagagttaaaagctacaacaacaacaagaccaagacaagttctactttagtttccccctgctttaatccgaaactagttcaggggactagttcgaggtagaggggaaggtcttatcctttctccccctccccccctcctggtcacccttcacccccgccccacgccccccaacctctgactctccttcaaatctcactgaggaattatagtctctacagaggcttggttgcagatgcctggaaagtttacactgcagagagttgttttgtttggcatagctaatcaggagccaggctggaattgctcatagctgtcattcaggttttgtttcaaagtccaaggacctgctgggaaaaacaaaaagctaatgaaagctgactgtatttaggcctcaaatctgtagaaactgaaatgatgtcctgacagtgtattcttattcttccacattcttgctgttactaaggtaacagatttttagaggctttccatctcattgtcaagtatttgctacacttattgttgtttttcagattagagcaattcagattatctccttttgagatgaaggaaaaagagaaaataatggaaataaaatgtctgaatcaaataccctgaatactagtaagatcagttttttttaatgccttaaaattgttagattcataacacattaaaatttaggacaagttcactttcccaactttgtgatgctgtgtgtacgaaattcccattcttgtaaggtgaaatagtacatattcatataatcagtaaagaatgtatcttataggaaaaaggtatatagtgaactatactgtctttaagatcttccttcctgaatgaaa

SEQ ID NO: 65967 - DNA, 1063 bp, Homo sapiens
agccccctctcctgtgttactttcactaccaactcactctttcttgatttccagattctctgtattcaaattctggagtatatcctacattccaatttcttggcactcctctttacccacaatggttttttttttggggggggggggtctttatcttggatataactttttccctaggtcttcaaaggggtcatcaatcctgcatttaactttgtaactgaagaaaaaccataattaagccagttcttatagaacatgtgggtcctggctatgggtcagctgtcaattgctctgttggctgggcaggcaggtcagctggagaagaagccccagagtagggccaggcagtggcagtctgtcctaaccatgccaagggcagcaccaacgagctgcagccctggctcgtgagggctggcctcattatttggaaattgggaaggataaacaaatattttcacagggtgcgtccagaactgagtattcaaggtcactgtggtacagacagaatgcatggtgtcagtgtgtcctagtgtctggccttaagtggcctctcttggcagcatctgtaaagaacacagagcatgctgtaacctctgctgttgatactgggtgcgctcttaccaccacttagaaatctctagatccgtttccatttcgtgttgattgctttgaatgtagagcccagcttgcattttctgtggattggacctttgccctgcatgttttgctcctccacttgaaactgacctatactgctctgactcattagtcccacccatggaagtggcaagtactcacaggaagtctcaaatggcctttggttttcttccactgaggggggtaagaacacacagacatacctaagtctctctttgaaaaaactttactagaatgagtctgaaaaaaaaaattttaagggagtgtcagaagcaaacttgcttccttgacatacctaatttttttttggatgataacatatgccatcccaactccccacttcctcccgacctagatagcattaatggaggtaaaaagcactgagtgactgttagaatttttaaaa

SEQ ID NO: 65968 - DNA, 2191 bp, Homo sapiens
gtgagccaagatcgcaccactgcactccagcctgggcgacagagtgagactctgtctcaaaaaaaaaaaaaaaaaaagaaaagaaaagaaaagaaagaaagaagcacatagaagtatttatgtacaaaaatgatatgggtttgcttcaaaataattcacagcatgcatgtgtgtatgtggaggggacggaggtaagggtatagataaagcaagatgggctgtgttggtaaatgttgaaattggatggtgggtatgtagatgtttattatcctattctctctacttttctatatgtttgaaactttccatgatgcaaagttaagaaagtgtatataagaatttttttcccttcctcccacccatcatctccaaagacttcactgaaactgattccagaagatctcttggggtcctaggaaattgtttctaagtgacatttaattttaatgaagatcttcctctgacagttgcagttggttttgtataactggactgagtcctatccgtgaggtttcttggaatcctagagtgtgaggtctatcagatggttccagcatcccagaaagcagtgccccgcccagcctctgttctgagcactcctctccttgtgttctacagatgctgctaatggaaacagtagccatggagggaagggcagtgcatccagctccactccagcccacacagggaattactctttgtcaccacgacctagctatgcatcaggagatcaaggtacaatgcctgtcgtagagttttgtaataatgcacttaccagtggttacaagtgctccagattttgtaatgaattatctggcaacacactctagagttttttctcagttcgtcatacagtgttttgaaagtttgtaattggtgtgaacagtaatgagtaaatatcttgggattctatgtggatgacctaactgggaaataatgttgaaacaaatgtataaggaagtgtcttgaaaaaccatgggtttagctgattaaagtacaggattcaaagttctctgttgtgtgatcctgaacaaatctgaactttcctttctccttttacaaaatgggtataacaacaatatttgccctacaactccacaaggttgtgggtagaatcaaatgaaataacctacataaacttgggaactgtaaaacaacatacagatgttaagtggctgttattgtaatgttaggttactaatgtggcttttttttaaactttacctctaaaggagtgatttagactttctgagtataatcaaattaaaggttctgtattacttatattactctggcgttctttcctttcttccacatggctgagaacaagactatctcttttttttgtttttttgtttgtcttcagctaccatgttcatttctgggccaccaaagaaacgacaccggggatggtatcctgggtcacctctcccccaacctggcttagttgtacctgtccctacagttcgccctctttcaagaacgggtaagattttaacagaagatggattgtaagtgtgtttttaattagcagagatatcttctacttccattctttccctgaattcttgacaatgagttatatgaggatattgatagtagctaatgttttgtcccgatcacatttgccttccctacatgcacaagatcattacaactgatctgaattcaacctttggcttaatttcaacccatagcattgaaaagccattcgttatatgggacacaatgctaccaacccaccatcatagagcatatatggacttgttttgctagtagtggtgttagattttccctgctgttatctggttctttatgtgacccacgcttattatttctgacctggatggttcagtctgtggctagaaacctgaaaaaccaaaaccaactggctctctttcagaacacctaactgtagccatttggtatccacagttcaaacatttgtctaccttgctgaacaaaccacagacaattgtaaatatactggttttaagacataaatgagttatttaaatgtttgtttaaataaatagttttaaagactacatagacatcttatatacacaaataattatgccagtctgtcactatggttgcttgtaggtagtactggttaatgatgagttcatccttcttcacacttttctatacctttcaaaatgtatgtaatgaacagatatatgccttt

SEQ ID NO: 65969 - DNA, 1658 bp, Homo sapiens
tgggttcagatttcttccccaattcactgattgacaggaatgacataggacaggacagaaaaaagaacaggagaaaggatagttgggagacagacccatataagctgctgctgacagccacttggcccccacttgataggaatgtatcatttatatattaggattgtctcaggcaataaaagtagcatggcttggcagtcagctctgttgttaaaacaaatgcaaatataggcagtaaaatgttttgacttctcaatggtatttggtaataaagtgatgatccggatgatctaaaatgtgtttatattaactgttttgaattgttaacacatttagaatttaaacattctgagaggacttacagattccggagtacattcttggttccctgtttaaaaaccttgtttaaagatgtttttgaaataacagcctaactgtattaaaagacagatatattttgattagtagtctgtggtacaaagactatttgggcttctatttaaagttgcaggtttgggcttttccagtggattctctcaactactagggagaccatccatctaaatctccacttgctgtcagtatccatggtaactgggatatgttgacggctgtctttgcctcggctgcatttgattttagaaaacattaattagcacaggttaattaggccctgttgcagttaaactgccacatgtgttcctgataataaccagtgctttaaagaagcattggatgttgcctgctcacgtgtttagctgactaaacttctttcattgtgtgtgtggatgtgcatgcacgtataagaaagattgatcgcttgattatacttgcaataaaaagctactgacctgcttagagtatctgggaaatgtttttgtaatatgtcacctgctgagtggccagctggctatgtcatgagtcaggtgtcttcagatagtccaggcatcagcactggagctggccacaaccacctagacctgctaggtcacagcactggcaaagtggagtccagtgggaagaaaggtgaaggtcgtgtctccatgacccacgttatgtagtgactggggagggaatttccgaccatgttgcaactgacttgctaaagaggaaatatttactgtagtgccttccagaaaagctcaggggaactcagcatcatgatcattatggcatcccctctttccttgaactgggtcggggctggagaactggcctgtgctgatatttctaaagaaaactggaaatgctaccctttccagggatgagtcttggctccagctgcgacagtgtagtcggtctcctccacttctgggttgggataggggtgttgaattaggcatttgtgagataatcaatcaatttttaaataatacatttgcaaaactgcagcatccactcctgagcacatcctctcatccacgtttcagggaaaataggcaaatctattaaaactcaatagagagtgcaaatagcaggtgagaattcgtagtgagagtgtattacattaccgtctgtgtggtatgtgtcctcatagagattcacagtggccattagggaagtaaattaaccttgttcttatgacttctctttaaattttagatttagataatgaaaccttccacatttatcaaccgcagctaacagttgccagaaaa

SEQ ID NO: 65970 - DNA, 1247 bp, Homo sapiens
cttgcttgattgtacttttaaaaataactaaaagagtattgtaattggattgtttgtaacacaaaggataaatacttcaggggatggataccccatttaccctgatgtgattattacacattccatgcgtgtatcaaattttctcatatgctccataaatatatactcctactgtgtacccacaaaatttgaaattaaaagtttttaaaaaggcctcttgttccagaggccaaatgagctgactgacagtacatttttccctgtttctatctctttaacccctcttggtggctgtgactgacatgtgaagttttgtccacaccttctggagtcccaagtgtctggttgacagtgcagtcttctttttagcctctcagttttggaatgacaggttacaaaatgacttgttggaaatatcgacctgtaggtgatgagctggaaaaggtcaaatgccttctctcatggctctcccaaaaaccaaagtgagttctctctctcagctaccggcttctttctgcatttatttttcctgccccttctccagtatggggagtgggttgttgtcggtcacaccaagcagtagccagattttttgttatttcatatggatttttttcctttcgtaacatggaggaagggccttgtcttttaagtattttacttgtaccatttggcatttgtggcctccctgagtttgtgatctgatatcccaaattgtgcttgagcaaacacatcatggcacctgtttgaagtgacgaaatcatctgcagagccttttcctgaaataacctctcagtgacctgcactttcacctttcctaataaatgcaagctcctaaataaagccttacatttttgacagatgaataaattgtgcaggttttttcctttctcttctcaatgccctcagatttttctaaagtgttttaagattatcacctctcaaaaaggtaccagaatttgaccaattatgtaagcttagaatccagaaaaaaaaaaatcattgtaatagacatgtttggcacactcaaagcaaagcatatttttagaattattcacatctggctttggcatacatactgaaatttttgctgcaaaaacaatcacttctgtatatttaaacatacctttattttgttataaaaacatgattatggtatgccttatttttaaaaaataaagtagaaacctttaaacatttataatcctaccattcaagggtaaccactgttaaaatgttggcattaa

SEQ ID NO: 65971 - DNA, 846 bp, Homo sapiens
tcagttgaccctcgaacaacaaaagtttgaactgtgtgggtccacttatatgtagggcttttttcaataaacatattggaaaatttttttgggaattgtgacaatatgaaaaaactagcagatgaaccatgtagcctagaaacataaaaaaaaaaaaatcaagaaaaggttaggtatgtcatgaatgcatagaatatatgtagatactagtttaagtatgggattaatcaattatttatgttatcaataaggttaccagtcaacagtaggctattagcagttaagttttgggggaatcaaaagttgtacttgggctgggcagggtggctcacgcctataatcccagcacttttggaggctgaggcaggaggatcccttgagaccaggagttcaagacaagcctgggcaacacggtgagaccctgtctcttaaaaaaaaaaaaaaaaaaaaaagttataattggatttttggctgcatgagaagccagcacccataactactacactgttcgtgggtcagctgtggttaatcactgatccaacattaattcaacaagaatttactattgtgcaagaatcaatgtttcaaatacaagacaggttgggcatgtttacatgtcactgtaaatactgttgtctattctgttaggcagcagtaatatgaaagcttatttgggtatctaagattgtccattcggataaacagagtatctaaagttaagaatcagaaaataaacttacatattttaaatagattattagctaaactttcaaataacaggcgcaaagtattttccttcaaccaacttttcaggtgaagtattcttaagtttaaagaagtccaatt

SEQ ID NO: 65972 - DNA, 2541 bp, Homo sapiens
ggtttcaatgtatgtatttgggagttttgctcccaattaggatacagaaggtcaaaggccaggcacagtggctcacacctgtgatctcagcactttgggaggccgaggcgggtggattacctgaggtcaggagttcaaggccagcctggccaatgtgctgaaaccctgtctctactaaaaatacaaaaattagctgggtgtggtggcacatgcctgtaatcccagctacttgggaggctgaggcacgagaactgcttgaacccaggagacagaggtggcagtgagccaagatcacgccactgcactccagcctgggcaacaaagactccatctccaaaaaaaaaaaaaagaaggtcacaaaagatcactgtacctactgtagtaagaaaacacccaataaatgaaaatccatgtgtttttaaagacactgaaaaggcatagaaacaaaatgtctaaatgaactgattttcagaaatgaaccagcccttcctaagtgagcagagaccagtagccatttttaaccctaagatgttgattatgtctggaagcatgagtgaacaagcaagcctgcaacagagaacaagaagagtctcatcaacttaacgtaattgggagaactgggtcagttaataaccaacagtcatcaactttttagatattcagttattatttagttaactgatccaattttcccaattacgttgattaagtgaacttctactataacatctaaaccttacgactatatgaatatttctcataagatatgcctgggtcagacccaataaaaagtcaaatgggaagaattatgatacttttttctcttctgtcttcaaatattaaagaatcctaaaaatctctttattaggattcacattttaagcacttttcaataggtagcaacaatatcccagtatgtaagaaatactttatttgatgtaaatctcatctcaaaggtcatttggacttagcaaacacattgagttcatcggtattgcttatgactttaaaagactcatggtccaaattccactccacctctacagccaaaattaaacaaagccaacaagtctattactgaaaaatgttatcacaatgtacatctctgggagttctgctcccatttaggataaaggaggtcacaaaagatcactgtaactgttgtaataagaaaacacccaataaatgaaaaagcacgtgttggccgggcgtggtggctcacgcctgtaatcccagtactttcggaggccgagatgggcggatcacgaggtcaggaaatcaagaccatcctggctaacatggtgaaaccccgcctctactaaaaatacaaaaaattagccgggcatggtggcaggagcctgtagtcccagctacttgggaggctgaggcaggagaatggcatgaacccgggaggtagagcttgcagtgagccgagatcacgccactgcactccagcctgggctgcaagagcaaaactctgtctcaaaaaaaaaaaaaaaaagaaaacaaaaagcatgtttttttaaaagacactgaaaatgtatagaaacacaatgtccaggccgggcgcagtggctcatgcctgtaatcccagcactttgggaggccgaggcggacagatcacgaggtcaggagatcgataccatcctggctaacacagagaaaccctgtctctactaaaaatacaaaaaattagccaggcgtagtggcggcacctgtaggaacctgggaggcggagcttgtagtgagccgagattgtgccactgcactccagcctgggcaacagagcgagactccgtctcaaaaaaagaaaaaaaaaagaaactcaatgtctaaatgaactgatcttcagagatgaaccagcccttcctaagtgagcagacacaagtagccatttttaaccataagatgttgaccaagtctggaagcatgagtgaacaagcaagcctgccacagacagaggacaaggagaagagtctcttgctggaacaaagagaaaccaaccagaattacgtggcctgacatggcagtctgaaatctgaagaaactccaaatacagcaataattatctaccaattctctcccatgggacaactgcagttgggctggaaggtatagagagttctagtgtcgtgtggagcttagatccccaatctcagctggagagagacacctaataccagaacagaaaactacagtttcaaacccaactctgacctgacccaattcaatttctaattagatcaaagcaatcagcccctcaccacagttaagacaaaagaaaagagaaagcactcatgggtaagggaaaggatactatctacttcagtctctacttttcctttacacacaatctccagtgtacaataaaaatttacaaaaccagataggaagactcaatattgtcaaaaggtcagttcttcctgatttaatctacagattcaatgcaatcctaataaagatcccagcaagctattttgtagatattgacaaactagttataaagtttgtattgagagggaaaagacttagaatagccaa

SEQ ID NO: 65973 - DNA, 2340 bp, Homo sapiens
cacttgatcccaggagttcgagaccagcctgggcaacatggcgaaacgccgtctcaacaacaaatagaaaacttagcctaacatggtagcggacgcctgtagtctcagccactcagggaggcggaggtgggaggattgcttggggccggggagggaggtcaaggctgcagtgaacagtgattacaccactgcaatccagtctgggcgacagagcgagaccccgtctcaaaataaaataataacttaaaactttattcgtgttggtgtcctgtgtaaagcagaaactaagtacttgaccagaagacaaagtgaatatagcatagttcactgcaacctggatgttttcaactgaaatctatgttttatccacttttttaaaaaagccaatgctggtggggggactaaccacaccttatgccaccaagtagcgcttttgtttcctgcgaagcttatttattgagatatcgttttgtaatactatctagatactgtgtgctgcgattcctgtttaaaggaatctcattgcagctaagactacagaaaacatggttcatagtacttctcaaatcgcaaagcttgagctccttcctcctcctcttcctccctcccctggtccccgctgcgtccccatcgccccggaaaataaagcacacgccggattttcggacgcatcattgagaggcggagggagaggaggtagtcttcgaattgttggacttgctatcccattctgcctgtgcaaaataaacccccatagtaaaataatcttaacccgtgataaaaatcgaggacccaattctctttggttcgcctctctccatcgctataaacttcactgcggccctcaatgcactcatttctactccagagccgccctacctgtgccgagacccccatttgcagcatgagttactctatgaccttgggcccgctcccctcccaaactgaaggctgtaaaaccaagaccccacatcgcgccccgcaaactgcagaggcctccaggctcaggccgggtcagcgggttgcgccaggaggcggcgagggactggctccggtgaagcgccgggaagagaaaacgcagggggcggagacggggcccggagctacctgcgggaccagcactggcgctgccccggtgctagcaatggctgcgcgccacctcggggctcccggagccctcgcggcagtgctgggaactccggccctgccccgtcggcggtcacgaccccttatgaacttcgaccgcccagcaaacagcggcaggtggtgcgcggacacgcgagcacgttagctgcctacctcaagcgacggcgtcttggagcctagagcctcccacctccctcccaggggcgcgaagagctgggaccggagcagtaggaaggggcgtgcgaggcaacacgccaccgagggtggaacaggaagagggagaactgtccgctccctgaaggggctggcaaaagagaggtgaagacacaggcggcggggaccgtcagggacgctcgcgtaccttccttttgcctggcggagggtcagactagcgccagcggatcgcctcacatccgggtatcaggagacactcagctgcttctgctgcggccgccgcctcccccgcggcgcaaacaccaaacttccggcgacgacggcgacgcctcgctcgtcagatgggagttacctgtgaccgtcttgggtgcgcttgcgcaacgctcctcttcagccctaaccggctcagctgacgtgcccagaagacgaagatggccgccacgctcactgcgtgtcacgcagtttttcaccccggcccggacggctgggcgtcgaggaaaggcgagctagtgtccatcctcagcgcaggcgcggtgggaggcctagcgcgcgcgcctccgcgggtggtcgcctggcagggaagtggcggcgccccctagcggcggccgcttgtcgttcctggggtcatcgctttgagctgaaaaccacccaggcccccagcggttgtggtttaccttggaaatttgtcgcaactggttgccatgtaggttttggctgcttctgtctgcgatgtataatccaagtgcctttggtcttccatatgagccaatgtaaagaaggagggtggggccgggcgcggtggttcacgcctgtaatcccagcactttgggaagcagaggcgggtggatcatttgaggttaggagttcgagaccagcctggccaacatggccaacatggtgaaaccccgtctctactagaaatacaaaaattagccgggtggtagtggcgtgcgactgtaatcccagctactcgagaggctgaggcgggagaatcccttgagcctgggaggcggaggttgt

SEQ ID NO: 65974 - DNA, 1487 bp, Homo sapiens
ctagaaagattacatcatctgagggatttggctagcatgcatctaaatatacaggttgctatagtttgggtgtttgtcccctccaaatctcatgttgaaattttgtttttctttcttttttttttttgagacagtctcattctgttgcccaggctggagtgcagtggtgtgatgatctttgctcactgcaacctccgcctcctgggttgaagtgattcttatgcctcagcctccagagtagctgggattacaggtgtgtaccaccatgccaggctaatttctgtatttttagtagagacagggttttgccatcttgcccaggcttgtctcgaacttctgacctcaggtgatgcgcctgtctctaccacccaaagtgctgggattacaggtgtgagccaatgcaccgggccaggacattaatagattaaagaaaaccaatcaactatttggggggactgtattaggattccccagagaaacagaaccgattggagagatacagaaagaaatttattgtaaggaattggctatgattatggaggctgagactaagacaagtcagtagcatagttcagggtgagtcccagtgcctgataaccatgagcactgatggtgtgaattccagtgtaagggcagaaaaccaatgtctcagctcagacaggtggagagaacaaattcctttttgttttgttcaagctctcaatgggttggatgaggctcacccacatttggaagggcaatcttctttactcaatctgttgattcaaatgctcatctcatccagaaacactctcacagacacgcccagaaataatgtttaaccaaatatttggacaccctgtggcctagtcaagtttacacaataaaactaaccatcacagagcccaattcttcacatcttctctcctgatcatcacctcatttgcatatctactcaccattagtcactttcacttttttttttttttgagacagaatctcacactgttacctgggctggagtgcagtggtgcaatcttggctcactgcaacctctgcgttccaggttcaagcaattctcctgcctcagcctcctgagtagctaggattacaggcacccaccatcatgcccaactaattttttgaacttttagtagagatggggtttcactatgttggccagggtggtctcgaactcctgacctcatgatttgcctgcctcagcctcccaaagtgctaggattacaggcgtgagccactgtgcccggtcactttcacctttaacctagtttttcccacccactaaactgcaaccttgcctttctgcatgtatcttctatatttacactttgtgtaatatttttcttctatatttacacattgacaatgtctgtttatgtggatgttttgttggcatccaacttagaagaagcaaatgttctattaagaacatattgtagttcagtgagaagcatgtttattaggccaaggtctctttggagttataa

SEQ ID NO: 65975 - DNA, 2232 bp, Homo sapiens
ggcacgtgtagtcccagctactcaggaggctgaggcaggagaatggcacgaacccaggaggcagagcttgcagtgagccgagatcacaccactgcactccaccctgggcaacaaagcaagaatctatctcaaaaaaaaaaaaaaaaaaaagaaagaaaaagaaaagaaaatatcttctactatgctcattcatagtgacttcagaatttgtcatgagaacctgggtgatgaaatcatccttactcagcatttttattgcaggtgagtctattcacactgcacagctttaaaatttctgaattatttatgaatagtccccaatatatattcttattatataggctttaactatatgtgtatatgtaagaatgcatacatatagacacatacagagttagggcataagaaaaatgccctaaggaaaattgctaggatcacagaatctttgtgtcaaaaggaccatagatgtcacttggttccttatttacacataaggaaattaaggcctggcaaggttgagtaatttgccaaaggtcacaaagtagcagagcctgcgttatatgtttgtaataagaacctaattcttgtaaagcaccagggttccatgaggtatacagtgaataaatcattatctggtaccctcagatataggggctgatttttccctaaacgtttttctccaaatagattgcattaagatcaacactgataatattgccaatgaaggagtgtggatttctggcactgccttcattctagataaagcactatacaatctgacatattattttcttttataatagtatagccgtatagccccagctgtgctacactgcaatagacacttaaaatgttaaaatatgtaaagctaggcaggtgtagtggcatatgcctgtagtcccaggtactcgggaggctgaggtgggccaatcgcttgagcccagcagttgagagcaccctgggcaacacagcaagacccctgtctctaaattaaaaaacaacaacaacaaaaaaaacccacacccaaaattagccaggtgtggtggaggatcacctgagactgggaggtagaggctgcagtgagctgtgatcatgacactgcactccagccttggtgacagactgagactctgtctcaaaatgagtaaataaactatataaagctccttatgcctcaatacataatgatccaatggtaaagatcgacagtttccagaactctgagattcagcaaatctagaacctttccatcatagtcggcctcctgctagctcctcccctggcggctctgctagctttccatttcctacccagtctctcacttttcccccaaccccaaatgcaggtaggtattcattcccaaaagttttgtcttaggcttgtatctgcttattttctggtcaatacccagttcttgaagctcttatctactcccctatcttcatcaatcacctctccccagtgactgaacctaaacctccactgtcactttcatcctcagctccagattcaaatttccaagttccagcaggcagctgccctgtaatgttctaccagtacttcagactcaacatgcacgaagattaacccattttcctcttcatgaaaactcccaacgcttctcctaacttcccatttccctataaatggcacttatattttcctagttaaaattgtgggcgacatggcattctccctctcccttaactgcacagctgataaactgcccaatcctgtagcttcttcctcctcagtgaaaggaaactcctctcgagtacagggctggtaagttggattctctcaaaaggggccctgaagcaaggatgtgagtgccagcagttcatatggaaggcgacaccaggaagcacccgcgggagagtggcagagtgagtcaggaaaggcaggaagtcaataagaaaatgataccaggcagtttatggctgtgggcaactgggactcaagtccttgggatagtctgggagactgttgaacaaggcttacaatgatccccactgagtggcaaatgagctatttatccaccaattcccttttagccactggttgaagcctatcctggaggatgttaacgccccggtacttctggtctgccctaagtgcagttccagcaggctccgatggctagagaaggcccccagtcacagagatgcaggaagccctcaaaaaggcatacgtgggaatggtaagtgccaagggggtaaggatgtagcacca

SEQ ID NO: 65976 - DNA, 2487 bp, Homo sapiens
gtaatttaatggctgaaagaggttagttttaaaagatgcattgaagagaatgaaatatcattaattactattattcatatataatagaaaaacaataaagcatatattttatatttacctatggactacatctaatttatccttcttaatcaactaagggcttcttaaaagctgacaagctgatttctcctgacagttttcttgtaccagatttagaaaatctgtttcagaatttaaaattcttttcattaaaaaaacaatttttgacctagactcaaattttaaaattccctctgttaatcaggtagccagactctccctagctattcttggaggagattaatttgctactctgcagtggaagccataactcagaatccttctctttcagggctggggttaccgcacttccaatgctgaactaagctatcgagaattttagttttctgtccagcaaagtgaaatctgaaaaagacacacgaatgcctggtaaaaaaatcatttacgtttcatattaactgtaatgtttgatgatcatcaggatcttagaatatttcattgagtattcctctctcaagtacttaatgatttgcactcaaatattggataagatgcatttaaatgaagtctgtgattcctgtgtggatgtgggcctccccaagaggaacaatgcttttaaaataggactaattatgctccttaattgatctctacagtgtgatgtggttttcattccacccatcccctgtccagtacctaacaaattgcctaagttgtccctaggaaaattgattttatttttggaatatgagttaattaaataatgagtcagacagaagaaaaattacttgcacataaataaaaccagcagtttaatgaaccatcatttcacccagtcattgatagacatattaaatgaccattgtctaaatttgcctgggagtttgctaattttaaaaatcaactacccataaaacaaagggccccaggaaatatcctggccagctttgaggctggcctctgtgtcacattcctgccagcgctccagatggcagccgtgcatgctcatgatgtcaggttatacaagctacaccaataaatgagcagttttgttagtggcttagagcaggtcagccaggaattattttcagtccaggctcctaagaggcaaatctcgtgactcacctgggtcatggaggctatcacatgcaggactactcatcacctcccagggattttcagccctgtttgtacattagactcaccaagaagtgtttatttaaaataaattacagatacctggactccacccttgaccaaatgaatcagaatctctgggggatggggttcagggatcaatattttttgagatggagtttcgctcttgttgcccaggctggagtgcagtggcacgatctcaggtcaccgcaacctccgcctcccaggttcaagcgattctcctgcctcagcctccgagtagctgggattacagacatgcaccaccacacgcttggctaattttgtatttttagtagggacggggtttctccatgttggtcaggctggtctggaacttccgacctcaggtgatccacccgccttggcctcctaaagtgctgggattgcaggcgtgagccaccgcgcccagctgttttttgttttgttttgttttttgtttttttgagacagcatcttgctctgtcacccaggctggagtgcagtggcagtctcggctcactgcaacctccgcctcctgggttcaagcaattctccttcttcagcctcctgagtagctgggattagaggcacctgccaccatgcctggctaatttttgtagttttagtagagaaggggtttcaccatgttggccaagctggtctcaaactcctggcctcatgcaatccacccgcctcggcctctcaagtgctgggattataagtgtgagccatcacacctggccagggatcagtatttttcaatgcttcccaggggactctaatgggtggccagagttgagaacctctgcaacaagagaataagtagggtgagagctaagccaaggaggatgctgcagtggtaagaatggtaaaacctttcttgagtgacttgggagaagggaaatccagttctatatgggtctgaactcttggattccttgaagtgtatggggaagtactcccaaacatctcataccttacaggatcacctgacacatattaagcatgatacctagctattaaattattatttctaaaactcttccattattcaacaaaacattctttcttttattttgaacttttttttttttttttgagctaggttcttgctctgttgcccaggctgcagtgcagtggcatgatcatggctcgctgcagcctcaacctcctgggctcaagcgatcctcctgcctcaacctcctgagtagctgggactacaggcacgtgccaccatgcccatatccagctaatttttaaattttttgt

SEQ ID NO: 65977 - DNA, 416 bp, Homo sapiens
ccatcccatccatcctgaattttgaattagtgcaccttaacagaaaagtactttgttagttttcaggtagaggggaaaaaacaatggtttaacatcaacaataaaccattatgtctcctttgaccatacgctgggagttaggttctctctaatgtctaaatcatatctcgtatctcaccagtaaatcattgacagttccctggtgacctgacataattcatgactctccctaaaccttcaacctttacacaaatagtaactgggacaggatggcaagtgcaccctgcgcctcagggatgttcatactgaagatactgaaactctcatctatagcagacatggtaacatctatatactcccacaaggaaactacatgtttctctatcccaagaggtagatttgcttgtactcattct

SEQ ID NO: 65978 - DNA, 2461 bp, Homo sapiens
tttaacccttgtttgattgaggtcactcaactaatgcgacagggaagtctgagtaagtaaaatgctgatctaatctctgaccactgctctagctctttggactcaataatgcagtctccttgtatagtatacttcaagattttcttctgaaataatttaaattatttctcacatagtattcatgaacttacagaattttcccaaacaaacagtgcaagttccaggcaacaaaataaactccagaaggatagatgactaagggaaattaataacaggcaccatttaaatctggttcctgataaatcctggaccgtatctttaacacatcaagagctattatcatcaagatcccatttgcctgtcaataggaagtcattttacaccaataaatcgcccaaaacccaaattaagtggcatccttctcaccccacccccccccccagtatctgctacttatcaatgaatgaatgcagatcatcaaaagatctgggtctttctgacagatgtatgacaaactgcgagacagtaatccccaaacacttctctcatcctaaaaataaaccatttacatcaggttggcggttagggcggggaccaggaggcaaatacctgcagctggggtattttcctgcagctgggggtggagccggggacgtaccttccattttcattccctctttctgttctatatacttcctaaagcagattctattaaccaagaactgggaataagcaagcaagcaaacaaacaacctgtgattttgcagaaatgactgaaaacggaaattcacttacttcctgtactgcaccgggggcttcgaagtgatgaaaggtctaagcagggtctgtcctcgaccctcccagcaccagaccgtcgggtagtacgtttctgtaaccacgggacagtggtcttgaaggaagcggctgaaactctcacccccggtcactaactggggtttctgaagggaaaagcagtatcagagaagggcccagagcaaagtttctgccaaccgtaaaccagaaaccggcaaagacttgtcgctcgcgcgcgcgcttcctccgattacaactctttctggagggctgacgcaaaaaattcacagtcacagaggactgaaacgggggtttcgccaatgccccgaggggaaggcgagaatcgcgataagggagtttgtttgtttttaactccgcctcccgggttcaggggattctcctgcctcagcctcccgagtagctgggattgcaggcgtccgccaccacgcccggctaattttttgtaattgtaacggggtttcaccattttggtcaggctggtctcgaactcttgacctcaggtgatccacccgcctcgggctcccaaagtgctgagattacaggcgtgagccaccgtgccctgcccggagtcattttcaaaagcgccacggcgttcccgagtgcgccgccggcttcgcgatcggtgaccgggcagcgccgcagcgcagaagtcagccgggttcaggctgcgctccgaggaccacccggccgggacccccagggggcgggcgaacgggcggggcctgttggctttcccgcgcgcgctgggggctgccgctcgggagcagctcgccgcctatccccggggctgccgaccgcccctggccgcgcagcctcgcgccgcgcctgctaccctagctcctggcccagcagcccgcggccctgcgccacccccggctcaccttggcaatgctgctcaggtagtagaaggcataagcgacgctgaagcccaggataagggataagcccacccccgagccgaagaaccccacccggacttggtgttccaggtagagggagagctcccgggacaacatccgcaggtccatggccaggcgctgcatggcccccgagcgcggcgcgcgggtcctgcggcgggaggagagccggctggcgagcgggcgagagcgggcgagagcggacgcggcgccgctgcctactcccgaccacagtgtctcctgcctggcggagcgcggcttccgacaacgggcggggcggagcggcccagggaggcgtagcccgagactccaacgccgcccgctccgccccggcttcctggagccgcccccactgccagccactcaggaaccttccagaagcgcggttccaagaccggccaccgggagggcgggcggactgggttctcccagctaggtcgcagtgggcgatggggatccccaagggtgggccgagagctgacggatcggcagcgctggttaaggccccgcacctgcagccccagtgaccttgaacgattccgctctgcggcgggtgtccctaaactagcagtttagggtgtcaggtaagcgtgccttgcattcaaagatttggggagttaatgccaaagatatgttagcaggtaagaatcccacatcctctagacgtttgcgttggtcctcaagactatggaaagagaaaaaatattcta

SEQ ID NO: 65979 - DNA, 2239 bp, Homo sapiens
catgctgttcagcttaaaaacacactactaacctgctctgtctggtttgaaatgttttcaatttacacacaaatacagatcgccctgaatttgtgaatgtatttctaccttcgttaaaaaagaagactaaaagaatatggaatccctaattcacatttagttcgcctaggaaaactagcagttagtgaaaaactggccacatcacagccgcacagctccagcagcccgggtagcttccccaccctcactttctccagccccgcctccaggacggcctaaccgctttcctcatagctcattgggcgcgcggcaccaccgggcggcaactccagggatccgcccctgggcccgcccctccatcgcccggggctggggttgggcaaccgtccgccctttttctagaccgcgcgcatgcgcactctccttggaccctggagagacgcttagggatcagttttctcctcctttcttcccgcgatcgcgcggctctctggaagccttcccactctattattgccgaggatccccctcctagacactctgagaaggtgccgctccggccttgggtacggcggtacccggatgtggagtcgctctcgcccggctgggactctgtggcggggcggagcgcggcggctggtgcgggggcagagagaagggggcctgagggcccgggcgctcgccggacgccgggaggtaccaccgctgcccacgggggaggaggcggcgccggcgcttgggtgcccgcccccgagcgaggggccggggtggcagaaaggccggcagttaagcttgctccccgccgcccccctcgggctagcctcccccggccccctgcgctcctcgcgctgccggccgggggagagcgtggtttccttgcggccgtcgctgtagcctggccggggagcccggaggaagcgggagagtccccgcccacggccccctcccctctgcccgctctccgccgccgcctccgagcagccgcgggccgccctccactccgagcggggggcgcggcggcgacagctgggcagcggctttgggctccgcggggaccgcgccgccgcccccgtgagttattctcacgtcccccggggctcgctgccgcccccgccgacgcctagagtccggcccgggcccaactccctcacgggccccccggcggcagcggcggcggcggcggcggcagcggcggagcccaccgcccgggccccgatgagtaactcccggaataaccgggtgatggtggaaggggttggcgctcgggtagtgcgcggcccggactggaagtgggggaagcaggacggcggcgagggccatgtgggcaccgtccggagcttcgagagccccgaggaggtggtggtagtgtgggacaacggcacagctgccaactaccgctgctccggggcttacgacctccgcatcctggacagcgcgcccaccggtaagccgcggccacctggccagggcttgcgcgcgcggggggaaggggcgagctgcggtgggcgtcggtgtcgcggggagaggtctgcagtgggacacctggtgggcagcgcccggctggagcgagcggaaaggcaaagcgccaaaggaattctaggttccgaacgggtgaacaaacactttcagaaaagaccctctacccccaagggaaatgatggcagcaccatcaccgggatgctttcaagcctggaagacacaaagcaccgggaagagaacagacacaggtcccccaacccgactcctcctcttgggaaggggtctggagaggcctatctaataagccattgaaattaatcagccaccaagtgataactgtctgaagggaggcttgctttgccatatggtgctcagctgaccgtttataattgccaaggggccttggtacctcggatttgtggagatgccttttttttttttttttttaacctcctgtgacacagaattacttggagttcagtagccaaatgttacttgggactctggaatgatttttcatccaaattgttctattttatatctttatatcaatagagagaaaaacatcctgagctcttgaaccatttctttgtgttaaatactttttccaagtggcagatcggcgtgggggacacctgatgttattttttgttacactaacgtccgtctcagtaaggtgatgtcagaatcttactcattcacccagcagtgagtcagggtccttgattagtgaatcttgattagtgaattttaggggtct

SEQ ID NO: 65980 - DNA, 530 bp, Homo sapiens
tgggcacaatggctcacacctgtagtcttagcgctttgggaggtggaggcaggagagtcacttgaggacaggagttcaagaccagcttgggcaacacagcaaggccccatctctacaaaaaattaaaaatcagtctggcatggtgggacacacctgcaatcccagctactcagcaagctgaggcagtaggatcacttgagcccaggagtttaaggttgcagtgagctctgattacgccactgcactttaacctggtgacagagtgaaaccctgtctcttaagagaaaaaccaaaacaaaatgtgaactaatgtgtgtggccgtgttccgataaaactttatttatttattgagacatagtctcgctctgttgcccaggctggagtgcggtggtgcaatctgggctcactgcaacctccgtcccctggggttccagcaattctcgtgtctcagcctcccaaatagccgggattacaggcagctgccaccatgcccagctaatttttgtatttttagtagagacagggtttt

SEQ ID NO: 65981 - DNA, 955 bp, Homo sapiens
caaacaaacaaacaaactaactaacaaaaaagctctcaggaaaatggcctgaacacagatccctcctttggatggagatgccaaatttggatctccaggggacctctaatttctgagggtggaggaagagaggcacactattggggtccccggataattttgtggacatgaaggctgatgtccactggagacgtctagttggctcctcgcttactaaattcagcagctgatggcccctactcattgctggacagcataaacatcaggttctggtaaataaactcaggctatcacgcaactgcccaacatgcacttaagctgtgactgacagtttgctgggggcggacttagagtctagggccaaagcttttgggtgcagagcctccaaggttccaagataaacaaatctgtcggtgagagtgaccagagtgttaggtcagtccaagggtcacttataggtcatcctgctgggagcttggtctctgctttgtgtttatgctggggagaaaagcaggaggggccagagggttgggtctccgctgggaaaacatccctggcctactcatcagagcctctggaagtggattggtatcccctctgctcccaggaatccagtaaaaggtatgggtgcaggcttgtattttttacaggagttgatgaacaagttattttggaaatatagattgcaagatgtgtggggccagctcacctgggctgcagaatgaagcaagggtcttccaaggcctagagtgaggtaatagatcactgtggggagctggctgcagtaagcattggaaaagacaattgaagaaatggaaaactttccctgtccctctccctcttctggatgttacagattttcctggaaaatattttgccaggtttacattccttaccagctaggggcttttttagagagtgatcttaatcttgcttttttcttgtgcttggctct

SEQ ID NO: 65982 - DNA, 802 bp, Homo sapiens
aatgtgaaaagggcctatgctggccaggcctaagaagtgaggatgtctgtgacaggcctgaggtcaccactggctcttcttgagctgggtaggtcacttagcccatcgctgtaactttggctcgggcacttctcctgcctgggactgagaggagtcagctcctaaacctcctcgctgggagctaatgattaactggctctatctctgcccctcctgcgccttcctctctacccatactcagacacaggacagtctgggccaccaccaaccttggacaccaccaatctatggcaaggctatacgtttttaattacaaggagatacctttatctctggccagatgttttctccattaatttacaccttctcttatcttttgcatctattgtctccctgtgacgaacgtccatccagcatgtgcctgtgctgccactgcctctgcaggcccctgtccctcggctgacccctcgggggcctcatttatctccctgctggccctccttatgcctgaccctgtccaggctcgctttgatctgtcccttgctcctctctgccttcacctagagttctcctttctccttttcaggcaacgtccctgcccattccaggaattctcctgactccagggcatggtgtttctgggagctgggcctctttgtccctccaagaggacaggaaagcaagcaggggaagtggccgtttgcatagccagaggaatgggactagagaaaacagacagggcgggtctcctgggttcccaatcaaaggaaaagagggtcagagcagggaggcaggaggccag

SEQ ID NO: 65983 - DNA, 357 bp, Homo sapiens
gagccactgcacccggcctgggccgacattttctaacttggttctgacttggcctgaggtagccctccaacacttctgttaacctgcctgttttcagcctgctgctaagcataactgttgaaacccacagagatttctgtgtctccttttttctctaggtgtctcttcaggctggaatttctccccaaaatgctagcactgggctggtcctgggcattctgccatctacagcaaatagaaaaggaaaatgtgtccttactgtcgccaccaatgtttgctgtggcccttgggggaagggtgggccccagcggctgccggacacacctgctggatagagggaggagtccagcgctcagg

SEQ ID NO: 65984 - DNA, 1812 bp, Homo sapiens
tcccagttacaacattttctaagggcctgctgttgctcaaactctgctgagttttgtgggaggtcctagcatgtagaggagtggtataaaccttaaggaaatagttggcacagcacgtgacccccacaccccacacccgctcccgaagctccggacaactgtggacttttaatattgcttgttaaaggaatgaatcaatgaacaaacttgtgattttgttggggagacaaagcaaacatgcgttaaaaggactttattaactgacaagcaacaaatggagtgaaaattagtactgtgcttcagaggaataaggatgaactttgaaattgtatcttcaaaggcagcagtggctaagagcataaactctgaagccagacagcctgggtttaaatcacagctctcctggtattagctgtgtgaccttgtccatttaatctctcctccttagtttatttgtctataaaatggggataataacagtacctctctcataggattcttataaagattaaaggaatacagatgaagcacttaaccggcacagcatctaataattgctgtgcagttgctgacatttacaaccagatttgggtgggtttcagagtctgaactttagacaattttgctaccctagctttgacacagcttctggcaaattctaggagttcattaaatagacactttttctgccctttgcgagtttcagttttctcatctgtcaaacagtcataacaggactggggtagaatttaaataaaatttcttgcttcagtgcatagcacatgatgtgtgctaagtaaatgtgttttgaatgaatgacatgtgtgaatcactacctatggtgagtttggagtgagtgagccttcaaggaatgtaagtaggggagtgataggaggcgggtaggcgtgatttaggtgtttgctgagtgaccattatgagtcagattttgaaggaagcacagattacaggttggctgaaaaaagagaaaaagcattcttggtagatgaaatagcatggaaaatctccaagaaaagctgaaaggagaatgaaaatagagttaatgagacgggaagaccagtttttgcaacactttgaagatcaggagttttcctttgtacttacggcccccagtgaatattcctgggctgtgatttgcctcctgtcttagctaattggatcataacatgaatctgtcaccaacatttgccatttaggattgggagaatggacctctcaaatggttagggtaattccagtatcacttcctaaagtctacttagagttttcaacaatactttttggggtaagaaaaaccaccttaaaattgcggacaaacttctgtgattctgggaatatgtttttcttattggtcaaaattccatgagaaataccaaatccaggataggcaaatgagcctgttcccagctgcagtcgtgttgccaggggagtctgaaacactttttaaagagcccccaaagtctttcaacatgaacacaggcacactgccgggagcttgagacctaatgctctggggaatgccctcccgtagaaagggataatgtgaggaaactgaaaaagaattggaagaacccgtttcagatggaatcgaacaatgccccattggcccccagcccttatgctcctgccgcaggattcttcactttactcgcaagatgctgctggggaaatggaagtgattagaatatgtctcccaacccatttctgtagtctcttgcctgtgggtgccaccaccctttgagaactgaaaaatgcgtgtgcccccacctccaggcagagctccaggcctgcaca

SEQ ID NO: 65985 - DNA, 659 bp, Homo sapiens
tataaattaaactattttgcaattttcctccaaaacaaaaacagaaacaacccccccaaaatactttccaccctgaacaacttcagtaatgctatttttctttgcaccctgactgtccttggtccacattcccagctgctttttatgttccaaatgtctgtttacttccagaagaaacaaacaaaaggaaacactgaagggcacctctttcaacattgaccttcagtgaacatgttggctcatttaattcctcctctccttagaaccaactggatactcaaactctgtaaagggctgtggaggaggcaacaggagcgagaatcatctgggaacagccctgtgccacttttaacaagcagtcttacaactgtacaaagcaaagcaactttgttcttggtagttgttgagttcgcatctaacattcccgggctgcagcactcctgtttgtacaacgtgtaagacgcaacacagtgaatgagtcaagtctggactcaggagcctgaatgcctgagtttgaatctggcatcaccacttaccagctgtaaaactttgggcaagttacctaacttctcctgggtctcagtttcttcatttgtaaaatgggaataataatagaccctccctctttgggatattgtgaggactaaatgattagaagc

SEQ ID NO: 65986 - DNA, 1874 bp, Homo sapiens
ttgataaagtacagttagcattaggtacagtgcaggtgaaaaataatggttggtctagccattcagtgcctagttgtgttatatcctttgtgtatctcaaagcattttttgtgcaggggagaaaaagactcagagctttcaaatcaaagaacttggcatctcagacagtttcccaatgtctccccttggttatgaagacaacttcttgtctcctgagtccttctctgttaacaatcttcaagaaattgtctaaacgagttgcctgggatgtgggcgtgatggcttgggggggtatgtgagtttatgtcctcctaaatggactgcccttgacaagagatgcattgtgtgacaccagcagctaaacttgtaaaacgtgttcgaagctcaaaatgtatcatgttttacctgagaaaataagcgatggtatgacatgtgttggagaaggcaccctgctgcctctgcaaaatagtacagtggagagcgaattctgtccatgccttgccagctttcaggagggagatgcaggcagggggttctttgtttgctcagcacctcacgccaggccatgcccgtgacagcccaaaacgcaactgtgaatagaaagtctatcacaagggttctcaaatacgaaagtcgagttggaacaaagagcaggcaccagccagtcttcctctgttaaagattatccaacgcgtcacctgggtgccaacgttcccataaatcccagcagctataagcagctctgtctcacctagtgtaactgaatggcgttgaaaccctgccggggacctcgtggcattccatgaaacgacctcatcacaggggaatgaactttatcttgaaggctgtaagtgtgtttgcttgaaagatgatttaccacgctcaacaatgaccaaatttcctaaattaaacctgatcctcatgttataactctgaatttcacaatctcatcaagaggaatagatcagctagggaagtgtaaatctctctgggatggcctttcagtgaatcggaaggctgattcccagttgggcagaagcaaaggcaggagggtttcacactggggacaagcagaaagcagtgcctgtcagagtaacaggttgagggaagctccctcccaaactctgctccatcttcctccctctaggtcctaattttttgtctgtttttcttttaggaagtgaggctttcaagggttcatgatttgtgatagagaacattagcacccctttctcccccttctttttttctcactttgttgcccaggctggagtgtagtggcacgatcttggctcactgcaacctctgcctcccaggttcaagcaattctcctgcctcagcctcccaagtagctgagactacaggcacgcaccaccacacccagctaatttttgtatttttagtagagatggggtttcatcatgttggccaggctggtcttgaactcctgacctcatgaaccacctgcctcggcctcccaaagtgctgggattacagatgtgagccaccatgcccagcccctcttctcccttttctaggccagtaggagaagccactcactgtgggcagcaactgcacggacctcttagagtggccagagccctccccagctccgtcttccttactctctttgctcagtccccagtggcttccaaacatacagcctggttctgagaggagaacggcccacatcccttgctgaaatttctcccctttgctctaatttctccagggcacttacaatcctgttaaaggatagggactaatccatggaaaccatttgggaacacatagaagacaatagagttcaaaagaggtcaggaggcagggtgcgacatattctgaaagactgtacagaaggtaatctttgagac

SEQ ID NO: 65987 - DNA, 1313 bp, Homo sapiens
aaatggggcacatcaaaagtaaatgtaggtgacaaatgtttatatttggaaagtgtttctgctttgatcctggtttctatttttttgagagtttgacaaatgtgccctctgggccttggcgtcaaacatcttcagtcagcagagcactttacttgacgggaaactcatttgatcctgtacttgctgctccccacaatctgggagagtcgaagtcacagaatagaactccccttgtcttcctgtcgtgcagcccagagccattgtggctgggccagggatgggccatgcctgcttctctgaagtcttgctcttgggactgcaaagccagagactgatggaggccatccctggctcctttctctgaagtatacttggccatcacgagtggttccctgacatcctctgcctccctgcctcctccatgagctcacattgagctttttctgaacaacctctgacccagccacttttgaagatgccaaaggtgatttcccaaggggaacttcaggggtggttgcgtggcattgaatgctgaggaaagtctccatacagtcagctgatttttccagggtttcttgccaagtgttgcccaatccttgcaggcaggttataaagaggctccatgtgtgcggtggctcagcgtggcaagggtgtgccacagcctcgtgttgttttcaacactccagtcaggaggacgtgtggccggctgcactgctgattttcgctgggaggtctccttattcacaaagtggtttctttcagtccagactgatttcttcctacttttggacctgtgacctgaaaacaggaaagaaggctactgggatagtatccactatttctgccggggtcactgtccaaccaagtaaaacaggacccactctgagtatttccaacagagggactgctgccatgccaggaactggttatgtgggggaagggatggttgagaagccaaatgggacagtgagacaacagagaggttggctgccgtaggaagccactgccacgcaggctggagggacagaggaggaggttgtactacttgggtgtaggcactggggtcacctagcagaggctgggaccgccgtgggtccatctctcaggagcttgagccctggacaagatgcatcctctacagtggtgatggagcggggagaaaggttcctccttttcctccctatctcccaccattgggcattgctaaatctggacagaagccattgatacaagtcctgggaaacagcctgcaggggcggccactgactccccaaacagcaaggaacggtgaggaggttttttggtccccctgc

SEQ ID NO: 65988 - DNA, 1032 bp, Homo sapiens
gctcatctctaaagtaggttaacactctttttttgagatggggtcctgctatgttgcccaggctggtcttgaactccttgggcttaagcaatactcctgcctcagccttccaaagtgctgggttacaggtatcagcccccatgcccggccaacattctctatctcaccatattatgaagaccaaatgagctacccccggcccagcatgggtacagaataaacctgcgttcctgcttcccattccctcaaataaaattcatcttgtgctcttttgcaccatcaatgtatttgcttgtatctctactataacatctgccaaattccagcttgtcttgttgtcccttgtatatgtctctgctgcccgcatgaagctgtgagctgagagccaggaaaacacctgatttatgtttgtatccaccactgtcattgcctcatagtaagccttcagtgttttgatagaactccaggaatgttatcagctggctctcctggatctgattaccttgtgggctgggctggtgtttaatactcactggctaatttgtagagtcttggaagctgagccatagacgggctaagtgagtcagcaatgaggtgctgtcattccagaagtcaccctgcagctcagcctccaaactgccttcttttaccttgccagctttgcccaaatctaatgaagtatacttttgcataaccatgtgactataattttataaagcaagatttaagcattcacttaacaaacataatatgaatattgttggtattatggatactgatgctaatggataggtactacattctaggcagtatgctaggcccttctgcgtataatattaatctcatgaaaatgctgacgggtagtattttttcccattttacagaaaagtggtgcttaaactgtcctttcaatatccaatgctagattctagaggtattagcaaacaccaagctcttggttgttaagatcacaacatattggcagggacagatgggcaaacaaatcattaaatgcatcatgagacacatatg

SEQ ID NO: 65989 - DNA, 876 bp, Homo sapiens
cttttaaatacatgtctggggttaacattatgcatcaaactaacttctcttcaggtgtatatcttcagcagtttctatttccaccaaggattagaaggtttctaggctcgtgtttacctgatctttagtattgtatgtgtgtatacctgctttataaataagttgggaatttccccatctgtctgagatccacgactgttctgctggaggcattttcttcactctgctatggcttactgtgtatgaactgctgccacacttatgttatctagagttatctggaacatttgggcctccttgatttaggtgagtgaatgaaacaacaagcaacaacaacaacaacaacaacaacaaactatgagtatagctaaacaataaaaagatagtgggtgaagagctgagcccagtagtgaagagaccggattcctgcagtgtttcctgcctgtcatgaacaccctggaggtggccctgcgccagggtgacctgcctcacccctgggtcatccgtccagggcgctctgggcatgcagcctgaggctggggaagctgcttccagcagagaagcgctgagagggcacgtggctttgtgggacgtggtggctcattctctctgcagggttaagtagtacctggtttccctggggtctacagaagatcacaataattatctggacttttgtcattaagcttaggaggaaaaaatacaccaaaaaaggagaatgaaatcctgaggtttctttgcctggtgggtcatctgaaaccccactcaggaagtaacctagaaagggaaaagtctgtagctccaaatgatgggttctctgtgaaagacctacaacctgtacacatggtgtcatcccataataatcagccccagtca

SEQ ID NO: 65990 - DNA, 6559 bp, Homo sapiens
cgtggaccagcacactgccccttagcagacctacagggagtgggatggtaggtgggggcagtttggttttatctttattatttagtatcagaaaataatcaaaacggagtggtaatttcggccccctgagcttggcttagtttttccgcgaagtgcacgggggccgttttaggatacccagctcccacctggagctccagagctcccggggacccccttgtccgcccgtctcctagggcctggcactccctggccccgcagcccggggacctccaccttccccaggcggcagccacaggtcccgccgggcccgtccgaggtctgcggccgccgaagtcggggtctcagggcgtcagggagcaaccaggccgcggggagggaggccggcgccggcgcggaatttctttatcgggatttgagagccgcaagcttctccttcgcttctttaagcgatcacggaaagacacctttcgatcttttgtcagacatcttggcccttaatagctaaatttatttggtttaaagcggccacgggagaagcagggagggaaaatctttcgtcggtcattgggtggcctagataacaggcttggagagagagcggagaagaaagtaaaaaggttaatggatgaggggagggctggaggcgcccggcgtggggcttttacggcgaccctcccccggccgcccccttatcgcagcccgaacttacccgcggcgcagcgagtacattaagtcacgtaaacagcgcggagaggaatgccaccgcggtgacctttcgtgcgccgccgccgctagcccacctccgcgccgtgctggcggccgccggcggcgcacgggggtcggccgggggctgcgccgggcaaggggcctccgggccgggcctggcctgcgcaacgcgccgggcctcgattccgaccgcccggggaccccggcgctggctccgcgcggtccttccccgaagtggccgccggcgggagccggcgctgggggtgggggcgacctgcaagtttccgccgccaccacctgacgtttctaaagagtgtttttggtttcccgagatttaaacttaaagaaaatcaccgccaggactctggtcgacggcctaccgtgcagtgcggccgctgagtgggggacacgccgcccggaacccaccactggccccagacgctggcaggggtggggggctctgaggtgaccccgggtccttgggtaaaagcgtcccagagacgggaagaaatatggtataagcgagaaggcctcataaatctgggctgttaaaaatctaagttaaaaatatgttttaagtcagaaatgcattctttttccttatgaaacatcgccgaagcagccagttttgtgacaggatcgtaaaatgagcgtgagtttgcgggggtggaggtgcacggggacgcgggtccttgctgggtctcgccgctcctccggaagcggcgcaagactgggtccccaaacacccttcccgtttggcagccaagcccccgccccctgcccaattggctgcagtgttctgggtggattcgaatcgcgaatagtggtgtggcgcggccgaaataaatcaaccctggggacaggccgcgcccgggagccagccctctgtgagggtaagggggacgacttgcccaggaggggccgctcattgggtcgaaacagtccggagagaacagtttcgttcaagattagcaaatcccgaaagaggagacatgcgagggtgaaagaaaaaaaaaaaggaaaggaaggaaaagaaaaaatatatatccccacgaagaaaacaataacttttaagagctgtccgcgtactttggacactagtgggggccttctccccagctcttgggtttctccctagtttggggtgcacctcttccctccaaacttcctaatttgccggccttccagaccagctggggcgcgcccaggaagctccacgcgcgggtctggggctcatgggagtggctttgaaaacatgcttgtcttccccagagcggtccctagcgccaaagatgcattggggaaaaggcacattggagacgtcaggcagcctggttttctgtctgaatcaactgtacgagttaaacagttttatttcgaaattaaccaacataaacaacaacaacaacaacaacattcactacccattccctcgttaggttggaaaaccagtctgaaaaaataaatacaatctgtgaccatgaaaaggagcaatcacttatttttcccatatgttttgaacattatttttaaaaatagattgggaatctggagggtaaaatgccgggtcccttcccgagcccttagagcccgaacgttgtcgaatcggtcaatgtccaccccgctgctcacctctgtcccagcagcgccggggccagcgcgccctcccgccgcgtctgcggagctgcgggaaaagcaggtccccggggggtatcgagtgtccagggatatccacgcagacatccttgtacttgcaaatacaaagaaacacacaggacagagatcaggctcgcgccagggctcgatctcctcggggctcagggttggaggccgtacacagcctggacacaaactgagccaaagagtttatttttagcaaataagatatgagtttttagaaaattgcttcgaatagcaaatccgagaaacattatttcaaaacgttggaatcaaaggaaatcaaatgcccacaacccatttccgtcagtgcttacaaatgagcttctgcaaaacccagtccacttaaacatttggtcggaactcacgaaaagaaccaaaagcaaggcattccgagtcctggcgggggttgagcggccgggcggacgcctggctatctcttctgggagtcgcgcattcgatcgcattcaggttaaaatttaaagcccctggatcctgctccagtcgccagcctctccattccagagttttctaccttcagccttttccaaatgcggccacgctgaaactgggagccgccgcagtgattgggggaggcaaagtggaacgtaataaaagtgactaaattggatgagaacggtttctggaccttctcggtagcaatttaaaattcagaagtgtttagaagcaatttacaacgaagaatgaaaaacgaagaattctcgccaacttcctgaattccttgccccctcccccgcactgccaggccctgtcccgctcccccaggagccacaagttcacaactcacagttacgtgcagaggaaacaacgcttagctacgaggtctcaccatctctggaaaccatactttacaaggcacctctccaccccagttcaactctgcacaggctcctcttccttccctaactgggaaaacacgaaaatagaaacaaaacaaaaaaccagagcctaaacgctttctaggagaccgaccttcagaaaatcatttacttggatttacctgggcggggggtagggggtggggtcggggtaaagtataaaaattcattctcacaaaaacaacgcctcttgtcctaaagtctccctcggcagccttctggggtcacgtctgtcggaagaaatcctttctgtaagcgaaagggagcgagacatatatcacggctcctgcagcggacgagcctgcggccgcgcgagttgccgctgacagatcggcgctgataaccccgcgacgttcatttccagtcccttttgcccgctagggaccgtatcagtttgtacagagttgtgataactgtttggagggagcgaagagggggtgtgtatatgaacgtgggggtggggaagcagcatttagcgctgggtccagggaaggtgacaccccctcttcgcagtgacttatctgtgacttacctgaaactctccagggaaatatcagaaactctccagggacatcaaaagttggagagcgtcctcggacacgactgatgtggaagcccttttccattctgcgtaccccatagactacctttccgtacatgacgacccgagttaaagttcccaaaggtcagctggggaatgttgtcttgaggttcccgaaaccaccacgacctgagccgtagcatcccgagatagggtcggagaaagtttaaggtcggtctcacacaacttcagggcaaaaagcgcatttgctgtgaaggggctaggcgggggttggggggcgggggggcgcagagcacgttcccccttccttctgggggcgtgctgacccaaggtctggagcgcccctcccgccgcggcggcggcgcgggactgtgcactgccaactcctcccgtgccaaggctccctccccctccctcgtgtgggtgtgtgtgtgcgactgcgggagcgggagggtgcaccgccgctggatgggtgcgggtcgctagccaggtcaggcgttctgtggcctccgcccctcccccggggtccctgggctcggtgccccccgggtggactcgcccccactccggggacagggcttgcggctcagcccacgcccgcaggcagcgcggctctcattgtctgcctgggcggcgcgctcccctcccccctcgccgtcccctccccaccctcttttctctcctcccctcgatccctcctcctcctcttcacctccagcgcccagctgctcgctgagcgcagttccgacccacagcctggcacccttcggcgagcgctgtttgtttagggctcggtgagtccaatcaggagcccaggctgcagttttccggcagagcagtaagaggcgcctcctctctcctttttattcaccagcagcgcggcgcagaccccggactcgcgctcgcccgctggcgccctcggcttctctccgcgcctgggagcaccctccgccgcggccgttctccatgcgcagcgcccgcccgaggttcggctgcttcctcctcgcgcgatctccccgctttcctcccctccacccctactcgtcgcgggcccctggcctccggctctccggccctctccaggccgcggtcggctccgacggtgtttccctccttccctccgggcgggctgaggcggctcccaggctcccgggacaccgcggaccaacttctagtctctttttctctcctcgaagcgcttatctgcgcgcagccttatctccgagttatctcggcgcaaaggggcgggagccggtagttaggcaggcagagaaacttctttcttgctatctagccaggtctgtgtgtgggcattaattttagtgtggtaatctccgatgagccgaggcgatttggaagagcagcctggaggaggccagcccggctgcatttcacctccctcccccactcgctccgagtctccctgtcattcttcctgctctcccatttggggtcgcctcggctctggggcggtctcacgctcccccctccccagcccgttgcgttccccctccttttctctgctctccgctccaccccgctacgtccgattccggaacggtccggcgtttctgctgctggagatgaccgcggggtgggccgggtggcccggccggcgtgagcgcgcacgctggtggctgcaggcgcgggccgtgtctaaggtgtgcggcgccgcggggacgccggtggggctggcgattcccgccccacaagctctccgcattgcctctgctgggaaggacccagactgctgcccccgccctggcgtcccactttccctgggccgagttgcatttctctctggggctcgcgttcgggctggtcagcgcagtccgggaagctctgggagagccaatataggagaacgcggcggtttcgttttcggggacaggttgccttccttacgcgaagggttttcccgtggggaaccctcaccccgaggcatttcgggagaggggcatccgcagagaggcgggatgcggcggtgccgacacgcacagctacttaaattcttttgtgtgtcatcagcccgggggagacactttagggcggaaggaaagcctcagccagcttctgcagatcacccctgggatctggcgcgcgcacggagaaaggatgcggccgagggggtgggcggggaggacgcggggaccggagcggtgcctttgagggagggctggtatcccagcccttccagggccctgtggcggctgcgcaggctcccttcccctcccttattgatctccacgcccggggcagaaataggatctttgagaagtctcaaatgggatctttgagaagtcagatcccatttgaactagaaaaaggagtggaggcgaggtagcgtgcagcctacgctcttgttaacccgtcgatctcctaccatacccgtctcccccaccccacctcaggagctagacgtcagcttggagcggcgccggaccgtggatggccttgactgacggcggctggtgcttgccgaagcgcttcggggccgcgggtgcggacgccagcgactccagagcctttccagcgcgggagccctccacgccgccttcccccatctcttcctcgtcctcctcctgctcccggggcggagagcggggccccggcggcgccagcaactgcgggacgcctcagctcgacacggaggcggcggccggacccccggcccgctcgctgctgctcagtt

SEQ ID NO: 65991 - DNA, 827 bp, Homo sapiens
catcaattcatataactttagagatggaagagacttgactgaggtccagctgaggaaactgagtctcagaaaggttgggttgtggttcgtcagtatagagctcaggtttccaggctcggggatccatgaccttggtgctgtgggctaggctgagaggtccctgaaggaaatgcaagaaccaaacattgtgagcaaaagcttggactttggcagaggctataacttctttttactctgagtaatgcttcattaatcggtttaggaattaacaagatactgagacttgggccagtatgggttttcaaagattgcatgtgtctccaaacaccacctctgagttccttccagggagtagcccacatgaccattggtctccagtgaatcaccaggccacatttgctgaagtaaatggaagcattgcgagagcagaaaatcaggacagacacctatacttgctaacccaaacaaccgccctttctgagccactggagatcagttatcaccaaatggacagatacactcggcaaagtttttgcaggcttcacagcttgtaaataagagactgcattcttcatgctccctcttgttgaatctggcagagggaagacctctggctctaatcagctgggcaatgaccagtagctgggctggcaggaaagagtgatgactccatttgaataaactttgtgaacccactatagttaattcagaggacccatatactaagaacacagggcttcttatccatggaaaatcatcctgggaacaccggttgcttgttacttataatttataatggcataccaaatacaaattggcctgtgtgg

SEQ ID NO: 65992 - DNA, 1074 bp, Homo sapiens
ctccctgtggccactcctttaaaacagagccttgctcctcaaaatatggtctgatcacctgcagcgtgggcatcccctgggagcttgttggagcagctcaggctctgtcccagacctattcaagccaaatctggatttagcaagactctcgagggatttgtattcaagtaaaagtttgaggagcactagtttagatgattctgctttagaaaaaactttccctacgcgttaatacttatcaagtgttcccttgctttatggctgaagaaggaaagcatcacactaaggatggagagaaggctgtcctggttggggagggtggagtccttgctctactgagagggtgtgcatttctgaacccttgttgcctgtttctctccttgaaaactgaatatgtcataggatgtacaacaccaagggtgagccctaacacggactatggactttggattgtaaccaacgtagcactctggtgcaggatgtggggatgcggatagtgggtggggctgtgcgtgctgggggaacaaggggtctgtgagagctccgtactttctgcccaattttgctatgaacctaagactgccctaaaaaataaggtgtattcaaacctgaacacaccttaatgtattcaggctgtgggccttgccgaagatgggacagctagtaagataatgcctgttaaattcttttttaaaaaaatcatttggataaaagtgcttttgaaagacagggttttgtcaagtgctatgatctcatcatctggcagccccggcgggcaaggagtccaagggaaacccagggcgttgacaagtgggtgactcaggtgccggccctgctggcggtgagcaactgcggggttggaacccgtgggaggggcagggagatgtgctgagctcctttctggccagtgctgatgtcatcaaagccccagggctaaggctgtgctttccacctgccctcagaagcaccagtactcctggtttcttatttatttattttttctcttctctctggttttctgggttgtgttttcccctttgttcttaaatagttagttgggacctgtggtagctc

SEQ ID NO: 65993 - DNA, 980 bp, Homo sapiens
ctattcagatatacatattacatatgcaactattcattccatgtacttggtgaatatttcttgagcatctgctatgtgccaagccaggtgctggttatgcagaggcaagacacagtccctgaagagtgggaggaaacagacacataaatgacagtcacaagccagcctagaaaatggaatgataatgggcacctgaaagaacttatgtgccaaaagtagtgactgggttggggagggctcctggcatgagaaaggcatggaagtgagaaacagcagggtcattgggcaaccatggggaattcactttgccagaatggaatgtgtaaatctgggaatggtgggcaaatagcctagaaagaaaggctgatcatggagactttgacctccagcctggaggccatgggatactgttgattgaatatatattttcattggaggagaaaagaattataggttaactcagcaggacttgtgactgctgggagtgggaagtgaggggaaggggaagtccaggatgacttccgggtatcttgattaggcaactgagtggatgggggtgtcactaatttggggtatttttttagaataaaagaggaagagagcaggatttgaaagtggaagatgatacgctacttttgaaaaaaaattttagctagatacagaatttataatgtaggaatatgatacaaatgtgcttctattttattacatctggaattcagtaatcaaatacattatttgtgatgactaaatcctcagaaagcatgtctaaactggaagttgtacagtcaaagattctcagccaggaccaagcaacatctgagcccaaattacctttataatttaagacaggaaggaagagaattttaaaagattgaggagggagactggataaaggaaaaacacaaaaataataatgataacgctaatacaatgtttaaaaccccactgctttcagataccagtttctacctcttccc

SEQ ID NO: 65994 - DNA, 691 bp, Homo sapiens
aagtaagtgagagtgggagaaattaagcacaaatctggggatatgtccacaagattagtgaatctgtggacttcaaatcctcatgcttacttgcgtgggttaaacagcctaaaatgcttacttgtttttggagtttaatctctttgagatttagtcatcttattttggagggttttgatagtagtgagaaacggtgtttggtttctgctccaaatctagttaaataagaaattgaaagtgggaaggagaaggtgcatacagtttcctttgctgaaaatggatcagtagtaccatcctagcatacaaaggacttcttagagttatcatttgatgaggtgcccagggagagtgctgatgtcagccgggagagggccgtgggtgggtgtcccccggctgacttcctctctttcctctctctgccaaggctctgccgtccaaacctgtaatcccgcccaggcaattccagttctgggtgtttcttaagcaaatagagtaaaccatgccagcattaggggttgccacctcttagaggttgtattccagggcaagtactcatgacttctcatgactcaatctcatcagtttcttctatgctttcaatttcttcctcttccagcttcttaaacacttatatctgtatgtacatctatatgtgcaaatagcacctataatatgccgtcatgttttctaa

SEQ ID NO: 65995 - DNA, 4461 bp, Homo sapiens
agtggctgcatgcataaaccaagggcttctcaactttccaacatattaataataaaatgaaaagacagaaaatcacacttattgaccaattccaaaggaaattcattttactttaccaaattgttaccaaaatatttgcttatttcaactctggaaaaatacctttgggaggatgaaagggttgaacttttactttttatgcttcaaataacttctaaacacaagcctgtttggtgaaaagggaaaaaacctgtgaatgtctcactttgcaaaagaacaacaggaagctctggttggcaaggttttacatgcacttcagagagtttaaggtcaaggtgcagaagggctagtgaggaactggagctgaggctgagcttgtggcttaaggggtgggtgctagatttctgcctgcttaggaggggctgtgcctctcccttctcccttggccagctgctcacaggaacttctttttctggagccttgtagaagattcatcgtggtcccagcacttacacatctgagccagctcaggctggatggaaagttttgagggccacctattcctaaatattcaggaggagaaaagaaaatcccttgcaaatgacaggaaaaagccatcctttctcaatacttaaacatgacattatgattcctggaaaccacaacaaaaaaacagaacaacattcactctgtctcaaaaattcaaataggcacaaggcaatgacatatggtagtttttgtttctcacagaactgagatctgcagttctcaaggactttctggatggtgactacagccaggggcaatgaggtcagcgtggctggggctttccggtcactggtgggcagaggagcacagggagcatgtactggggttggatctataggctgggagccagcaggcctgcactcaaatgcagttctaccactttctacttgtggggtttgctgataaggcctctctgcctcagttcctcagctgcaaagtagggagaataatagtatttggctcccagggtggctgtgagcgttaaatgaatgaagacatagcaaggtgttcaataccttgcacgggtcagctatttagttaatgttatttattattgttgtgctctgatcctacttgtgcaatcaggggaatgccattaacctctttttgtccttgtttctcccttataaaatggaataaaaatacttcttttggggctgttgtaaagtttaaatggaatagtgtacaaattggcatttattgagttgggttcaataagtggtagccttcccaggaaggatcgtttgggagtcttctacaccttagattccccatgagatcttttcaaaggcaaatctgataacacatcttttcttcctggagaagccaaggtttgatccttgctcagagcagcttgaagcagcagtgagtgagtaaagctggcacccctccagctgagagaggaaacctgaacaaaaccatggaaggaagtatctagaaggctttatgcagtgctaggcacacttctaaggatgtgataacttagttcaacctcacacactcttacaagctggaactactatcatttccattttgcaggtgatgaaactggattcaaacccaagtcatctggccctggagtctgtgtcctgggcataacacactgccctggcataggaactttccgaggagataggaggctgagatcatggtggggaaatgagcagaaaggctggtgggagtgctgtgaacaccaggccaaccttcaatttaaaacaattccttcaaggaaacacagctccaactattccttgtcagcagagcagctgcacacagtcccttgtcctgtatgtcctgataatcgtccttttccacttcctctctcccctccccctggccgacttattgataccgacgtggacaaatgaggtcagaaaacttcagtgaccgcacacagtgtccttctctatgggtcactcgctcacaaggtcagcacaacaaaccctcctgctgcaaggattgtccctgggaagctgggggaggagcctgcgtgcttccgcgtctcccttgactcctgcctgtccgaggccagaatgggactgcgctgattagagagggagcaattctggagggcaggagtgaggtggaggaggtgaccctgagctaggcagaagatcacgtaggaggctgttcactgaaatgagcttttgcacttggaacattacataatcagagaacaccttgttaccttgttttggtaataattaagagttcaaatcaatcacctttccattcattatttttaaaacgacagatgtcagaaatctaaaccttgtttttactgttttgggggatgcggggaagcgagattagccagcctctgaatcacccacccacatgtggtacattccttggggtaattagaagattgtatgttcctctttccagagatacttgaagaatcatactgtaaatttgtgtaacattttataaattattttgcgtacatttttaggagatgagaaatcattttgtttcagattaaaaactctctcaaaataaaatctaaatatctcttcctggacatagcttttttcagactgcaactgcagaatggggcttttttctatctctctttatttaaagatcacataaattttaagaaaagaaagccactggttttaggagtctaagagcaaagatttagaaagaagaaagaatacgcctttggaagatctgcatactttggaaatgaagagagttttatttcttagagacaggaggaagatttatagatttatgtttcctccataagacaaatgaccgaagcgcacgttgttggtttttttcagcactaaatctaatcaataacctttgttacgaaagaaacaaataatcgctaaagtttagtaaaggtataaaattcactaggttctagtgttcgggttatttgaaacgtgtgtgtgtgtctctctctctagagctgtgcttcagctaattcctgttaaatagttatggagtatttttttctttttgctacgagccttgcaacatatgagacaaatcagacaagtttagaatcacagaatgttagggctggagaggacgtggcgctagccgcgtgcccagagtttacagttgagacgttgaggcccccagagctgctgagacttgcccagtgtcacctagctgctgaggcccggggacctcgttgtcgcatccgacctggggcgtgcgcagctctaattctccgctctgaatgctggccctggagttgcccctgctctctcacagctcaatacttggggaccaaactctctctctttctgctcccctcacccccaccaagcgccgtacccacctccctcgctatcaaacaaaagctccaggcattggaaacgtttccccgccgggagcgccagggtccggccgcgctgcggggtcggtctgcgcgcgcggcggggtggtgggcgcgtctggccgcccgggtcttcaggcgcgcagcgacgccggcccgggccgccggtctcagcgcccggctccggctgggcggccccggacgcgccgagccaggctcgcgggggtcaagtccaggttgcggcgcaggaaggcggcgggggaggggcgggccggccgcgccctcaccccctcttctccgcgcccagtgcggaatgatgggccggttccctcggtgtggtatgtctgtataaacatcgttagcctccgggccgacacgtggtgcatttttaatttcgccttacaaattgcggcctcctggcgctggagaagcggtgggggaccttgactccccgcctttcgggtgcattcctgggctcccggctgcctagacacgaaagggtgctgtgcttcctggcttcgcagcgcacctcatttgtaacattatctgtgctagggagtcagtctttcctacttacctggaactggcaaaacgtggctgcatggtagggttgactcttaatctcccggggcgggagcagagcgcagaatcctctttccactctatgttcgcaaccacaagccccgacaagcggcgctggctgctccgtcccgtctgcgggccgcggctgctccgtcccgtctgcgggccccaggaccatgcgcttccccgcgtcgccctcacctgcgtccccaccacctttccatagcgctcagtcctctcccacctccccgtctcgctcacttagcgcacagagcctcatccggaaccgccccaaacccaaaccctttaaaaatcgatttcggcatccctcaattctctgctttcttcttcctggcaggaggggaatcatgctccttacttgggaggttgtattttgaggcagatcatacaaatgacaaagatggaaatccctcagagcctatggcagttttgactttaaacatgaggcgagttaacaaggcaagcagcgataaattcagcccagggcacgacccagcactaaatcctccctt

SEQ ID NO: 65996 - DNA, 1104 bp, Homo sapiens
ttagcaatttcgagaaagctgattttatatccgtgtaacttctgtctttatttttagccttctttacaggacagtatctcttaggactaaagaagttggggcaaaaccaaagttctcctcacagggctacttaactttcatgccaagcaaacataaacaaatttgaattagtaattaagtttagagacaccaattacatttttactgaaattaaataaaggcaaattctccttaatatttccagaatgactattaacaaccacaagtgttaccttttgttgaacaacataatgtgccaagtacagaacttcatgtacatcttctttcttgtttttcagcagccctagatatgggcacaattgctcccatcttttaggtaaggaaattgggactctgataagttaaatactctccctgaggtcccagaagtaatcatgtcatatttggagtctgacatcacttctgcctgatcttatgcgtctgcaaggaacaatgaagatgatctaatttaacctcattttacatatgggtaaacagagacagctgtggtgacctgcccagggtcacagaaccagtgagctggtagcagagttgggactagagcccagtaggaactcctccgatgacaccgtgctgcctcccagtgagagctatgcaagccaaactctgcaacccactgccttttcaatgaacatccaggtcagttgggtacccacttgggaccaggatgaatcctgactcctactcatatcatacataaaaaatcaattccaagtgcatcatttatctaaatgtgaaaagcaaaataacaaagcttttaagaacagctacatgatcttggggtaggcaaagaagtgttgacaactgtaaaggttaaaatgggtaaattgaattatactaaaagtaataacttttctttattaagatgtaccattaaggaagtggaaaggaaaagtcccagagtgggagaagacgtctgtacacatgtgtggtgacatagagcttgtatccagcatggctctgtgtgtgtgtgtgtgtgtgtgtgttcattcctacaaattagtggcaaaaaaggcagttaatcccataaaaaaatagaaaaaa

SEQ ID NO: 65997 - DNA, 2478 bp, Homo sapiens
tctgaatgcaacatttttagaaacttaaaggtataaaagctgaaaagagattataacatctccattattgagcgcccactatttgccaggctagtgtactatgtgtattacagacattactcctaaatctcactacaatcctataaattgctgttccctccattttacatgggtaaactgaagataaaactaaggatagaagaggtgaagcaacttgctcaaggtcacgaatttggccagagcaaagagcctggacctgtgtccaggtgagggcccttcagagctcatgctactgctccagctgagtctggcagccttcgccctgtgctgatagtttgacaaacattaaagctggaaaacttccacaaagcaaactgcggaaattcccatgattccttgccaattagacaggatgaccaaggaggaaaacagccagactgcctttgctcagaagggaaaaggggaatgtgacagctaatgttttactcgggtggccaaagctggataaatatgttttctattttattttattttttctttttacaagaacagtcctattgcaataaggctggataaacatcattcttctaaaatacccatgggtgcacagcttacctcaggagagagctgaaggaaatggcggatgcttcctgagaggacccgatagccaagagagaatctggaatagcttccattgacaggcgccattcagagatgcttgacaaatagtcttgtgttactgtccaagttcttggcctaatgacagcggtggtaacagcaacgatacagtggatactcacatactgcccatatgtgccaagcagcgttcaaaacagttacatcaactcatttaattctccataatctgacttagagatagcatttaaagtgacaaaatgaagcaataattcatatgtagtgcagcactgttgtcagaaacaagaactcaatctccagatactggcataatttttttttttttttttttgggacagagtctcactctgttgcccaggctggagtgcagtggtgtgatctcgggttcactgcagcctccacctcctgggttcaggctattctcctgcctcagccaccgagtagctgggactacaggtgcctgccaccacactcagctaattttttgtatttttagtagagatagggtttcaccatgttggccagtctggtcttgaactcctggcctcaagtgatccacccgccttggcctcccaaagtgctgagattacaggcatgagctaccacgcctggccgcccttattcttttattagcacaatgactctgcccagagccctacacagccgacagtgatccacagttctgtggaggttgggggagctggtgggagaaatgatgacactgggtttcgaatatgtgactgcaatggtgtcatctctgcctgacaggggcttgtgctgagtcccagtctgtggaggctgacgagcagccatgatattaatatttactgccccccttgacatttgcaggctggatggcaattctgaatgatctttaactgggacacagaaaaattgctgatctcgaggcaggggtcagtcctgtgggtacatgtggttcttctacactgagtgggggaaactcaccaatctaatactgcatgtcttatctgtcgtatttatgattcaactccacacaagtgctgactattagcaatgtgctccttgccctgaagaaataattatgcaaaaagagagggaaggaacaaacaaaagtactctttccatctcacctgtcgtcttgcagaaaataaaaatgtattttctatcctttgggggtgattttctgagaaataaaactctatttccaaatggtagttgacccataattaatcccatttatttggggggaatgttacatgttatgtgtttttcccacttaacaaatgagaatcttactggcgtgacctcccttacacaacggaaagtcagctccagcagttcattgaccccaaaaccagacctattcagctaaagtttcgtgcaaggttgagcaacgatctagcttgcattggtactatacagacagccagtacaggtcactggggccagaacgccatcaggaccagaattccactggaacctcaaacctttggcatccctccaaatgctccagaagagtgatttgcactccagaagatcacttactttggggtctaggcatatcagaatatctgggaaagggggaaagtttgaaaatgcaagtcaatttcatgatgcgattttacatatgaaaaaggaaagaaaatgcctattgatttcacacataaagataagtaatcaaaatctctttgaggatagcaggacatttttgttttttcaaaagggggagttgctgatttgagaaatattgctataaagtttaaattttcaagtctagattgaacacagtgtgtaggaagcatagagattaggcttgcacgctttggagccagactgtct

SEQ ID NO: 65998 - DNA, 2104 bp, Homo sapiens
gaatattaagctccatgaaggtaggaacattgcctgctctgttcatagttttattcacagaacctagaatagcatccagtacagagcctcattaattattagttgattgaaatcatgaataaactagaaaacaaatgaccaatatactgcctactgtttttgcatgtgaaataaaatatgggtcaagaggattcattgagcataggtcaaagacactaaaaccctttcaaataatctggcatatccgtgagataaatctaaaccctcatgcaaataaataattaacccaaggccaatagcacattcaaaatcattaatgaaaattgattttccttttctgtggggctgcgtctccctgctgcaacacaatcccatttgcagactcagccaggattcattgtgtttcacttcatttctactcagggtcttctatttcctgaaccgtgctagcctctgtgaattttttttctttttaaatatttggcttggtcagcctatgcatgaaaagggtatgagtgactttatgtaggtaagctttgaaaggtagcaacccctctcagaacaaggagttaacacatgaggagaagccaggcttgtccagcagagaatgcagggagggtgaccgagccctggggctgaatgaagggctctgccaactgacttcatggtgcaggggagcaggaggaggagtctgctggcagccggttaaatgcctttccaggaacatggtgaaaactgattaaatatagatgcaatcatatgaaatgatagagggaacctaagggacgtctccagccattaaaacaccaaacaccaatgggagctccctagtggtcacggaggaagttcgttttctgacatgagctcccagagaatgaagtccctgaaaggaagaactatttgtattccactcagatttcatgtaaccttttcttttggaagcttcagtaagcaaaggcacatttgtcaaggcttcgggatgaatgtggaaagcttttgagcactgaacttggagatactcagaagggcttactggaaaggctgccctgggctgggagcagtcagacatccactccagctggccaggcagtgtgggcctcagctatgattacctccaatgagccaatttcctgactgtgtgtaacctcccaatcaatttatttgaacgtgagtttccctaggtaatgagctgcatcgtgtatcattggtcagagtatttacttttcctagcatgcatcagagtaagtgacttacaggtcaaataccataaggttacgtaagaagtttaactagcatttcttatttcattcaccaatactatcatgagacattttgtgtttccttgggtctatggtgccattaatggtagcactatggactgaatgcatagcattttggggacaaagaaaacaaccacaacaagacatgttccaatttcagaaaaggaatgtgtggaaaattttacaagatggagctgaggaaattcgggatgtcaaacaccaagtgagtgcttgtagacactgagaattccctggtaactttgtggtgcagagcccattcatctcaccagtccccacaatgcttcatggacgctggcatcagtgtttcgagttccagctttcccaggactcctccacatgagctggtttgaggaagcctgaaagacccctgggcttcaccctgcctctgggccctctgcttgctcaggctgggcagtagcggtggtccactaccccctccacccttcctggacagggtctccagagggcacatgaattccatccttctgccctgctggccaaacctttctgtttcccatctgttagggttcccatgtgggctgacatcagttcccacccccagtgaattctcaaaggtcccctctgtctgttcagtcctcaattcccaccgttctttatattcaatcttgtactgtcttcttactacacttaagttttgacttgagatatgcattcttcctctgttaccaccaaagaagaactgggttttcctgtgtttggttctgcattctaaaacaccactaataccacctcatcaacagctagcacctagtgagcacttcctgtatgccaggctgtgcaac

SEQ ID NO: 65999 - DNA, 1066 bp, Homo sapiens
tcacaccagacctgaaaatccattcgttggggaggataggaacgtctaagttgtttgatgtttggcccagacttttagaaaatcccacaagtaaattttactggtaggaacagtgggaatcaaactcatctctttgaaaggcttgatgatagcaaagtctcccgagacacaagtagtgatacgggagatggagcaaaataacttgctccatatcttccttccttaaaagaattggccaaggaacggcttggatgactcattgatctctgcctgtgacccgtgccagagccttgcctgccgggttctctgagtttctggtgaagcattcagactccatgcaggaagtgaggtcatgattgttttggcagtttgggtggcgtttatcctttggtagcggctgaagtttatcagtaggtttagcctttgcactttgagaaaccaactattatctcactcacaatttagaataataaaaagtccatggcagaaaaacgtgcagtaagtacagataaagaacaaacgagggagaacctggtgttcctgtccacatcagccccccagggcacacaatctatccatgctctgatagagtccgtgagaaggcgccaccggcgttctcgctttttctttctggtagcagctgcaagtcaagacatttcttggagagcggttgggagtagagaaaacacgttacatctttagttaataatttggattcagttatatcctgaagtgacctgcaagggggacacttaggtttaggaagacctcttaaaggtttgtctcctccctgggagctgtaatcagagcagttaaaagatgggctaagcctccgcagtttgttgtcagaagtggctaagaagaatctggtaactgctgtcagggacccctcctggaggcttcctgtaccccgtgggacgccgaccagatttccaatgtggttctaagtctgagatgctacaagcttatgcatttacaattacatagagaaacagggttctcctttaacactttgctcatgaggggcatcccaaagactaaaaagtacggaactgcaaaaacaaac

SEQ ID NO: 66000 - DNA, 3964 bp, Homo sapiens
gggtgaatatattttgggcagaggtaatagcccttgaggataccttgtgataagaaagagcctgagatcattgaagaccagaaataacaaaacaaacaaaccaatatacaaacaaaaagtgggtgtacaggtaataagagagaggtgtggcatgacaccaccgaatggatttatgacgaaaggagtcacttgctgaatctgaaagggaaacttcatcttctctgcctcctggcaccacacagataggccactgacctgggtccacatggcaatgtttttgtcctttttgtcatattgcctgaaatatagactcagaaatatttttttctatgaccaaaaaattgctaaaaattctgatagaaatggatgattcaggcccaacaccttctagaagtactccaatttcggtatgtgctgttttgagagcccacgtcttacacaagtgtctaacagccatgtgaggtgtgatttttcaggatatcaccttgatgcatggtaacatggccccataatgaataagagcattttactgtacctgaaactctggggtcaagtcatatggctacgaatgtggagcaaagcaatatggaaacaatatgttcaactttatgactagtaactcattggctcatggacagctttgtcccagcttctctgggggtagttttcctgctgcatggcacacatttgaggagcactggaagtcccacagtttttcccacactacagtattctgagtattgcaagtagagatggaacggagagtgggtttgtcaaaataagccagccccacattgaaaaagtcacgtgtgcttggtgctatccacaaacatgagtcacccagggaggtatgtagatgcttgtgacaagagaggagaggcctaaaaataacagttccactgaagggtggagctacaggctgctggtgtgtcatgtttggctgctgcttctgaaaattccttcagttaaagtagcaagtgggatgacagctgcagatacctggctttcaggagagaagtgtagcaggtatccattgaggggggatttcagggtcatgaactcctccttattacttatttcctgaagctgatgtgtgaaaatccatacaagaatcccacatctttagttaaagactttgatccccaataaatcagaacgacagcacattcggctgttctcagtgacacatttgaaggttgctggagatacaaggatgctcagagtgtcttcttttactttcttttaactttctcctgctgttccatatactacatgagggcaaggaccttgtttgtcctgttttcagttccatcctcggtgtcttgcacagagcaggagctaaataaatatttgcttaaggaaaaatggaaggaatgtgtctagcccagccctcttagtttgcaggcaagaatactgagcagggagaagaaacttgctcaggatcatgcaacctatcagcaggggtaggagggaagccagcctctgactctccacccagtgctctcacctttccaacaagctagcaatgactcagtgtggctagaagtgtcttgttgagggcaaagaccaaacacgaggtctctggctactaggctgaggtggacagtatggggcagcagttctgaggggggccaaaagatagtgaacttcactgggaggaggtgacaaagacaaggcttgccactggaggctgcccagcaaagtttcaagggcacagtggtgctcctttctgagcctgttgtgtttgcctaaatttgtttttaataaaacctaggagaaaagcacaagttcctggagcagcaggggctgatggcttgtggtctgctcaggaccacagacttcaccttatgcagacagctctatggtcattaatactgaaggcatgtgtgctttttttgtgttttgtgtttttcttttaataatcagacaatagtttacatctgtgcattggcgaggagtcatgaagaagagcatccaaacaaagatgagagaagccagactggcaagtgggctggctggaaaagagaagagaagccagacacagtactttgtctttagtctccatggataaaaatgcttaaagttcaccgtggggagaagggaggggagggaaaggtcttgaaggattcccagtggatacaaacaatggtcatttttgaagccagtttgcatttagtctcacactctcttgtcttaaaacacttctgaagcacaaggcttctgagagagtagggcagttgcaggagcagcaggagggggctggggtgggactggggtgtagggagaggcctgaaggaccctcctggccccacattcctcaaggcacctaacaaggaagcagaaccctacctggttagaggtccatgttccagaatcgatgggttctactgctgtgcccagtcaacaggatacctaagctttgactttgggtcactaaagattgtttctagacaaaagccctagctcacaagtctgggggcagcttgggactttgtttaggccaggtttaccagcttggtgtgagaatagcatcagatattggttacagtggtgggatacattccaagactcccagtggatgcctgaaacctcgagtagtactgaccctacatatacatgctttttccatgtgagaactgagatgactactacgtgactaagggtggggagtttctacagtgtggatatgctagacaaaggcatgattcacgacctgggcaggatgacgagagatttcatcatgctgctcagaatggcacgcaatttaaaatttatggattgtttatttctggaatttttcatttaatatttttggaccatggatgactgaagataactgaaaccttggaaagtgaaattgcagataagggagattactgtacaggtttacgttgactcagtcttcctactatggcttgaatgttcgtgtcccttccaaaattcacaaaataacattgaaacgttatccccaaggcaacagcattaagaggtggggcttttaggaggtgattaggccatgagggctctgcccttatacatgggattagtgccttataaaagggctggggaaaaccagctaggtcccttttgcccttccatctctttcacaagttgaaccaacaaggtgccatcttggaagcagaaagcagccctcactagacacagaatctgccagcacctcaatcttggacttcccagcctccagaactgtgaaaaacaaatttctgttgtttataaattagtctgtggtattttgttatagcagcatgaacagactaagacactaccccggtctgtgtatttgggcatagaattaacaattatttgattctctctccttgccacacagctgctgccaggggatgggggcagggtggtgtcggcgattcaacactgtctttccttctctcttcggtgcctctttccttgctatggtgttaaacacaggtactgtgatcactcacctgactttcggttcttatggcggtgctttcttggtggatggtggttcaatttggtgttcctttggcaaggtttgggtgggaaccagtagctttgatcaagctactgcatggaaaatcccacagggatcaacttacttcatgttatagccagagcaggttctagaatctagtgctcaagcagcttgtaggatttcaatttagagattagggaagctccatcagctgaagtagggtgaggctggttaaggaatagaaataaaatggaagtagttcagatcatttctcatttaaaaaatttttttattaaaacaaataacaatcttctgattgattgtcaaggacgtgacggagtctgagaggctatatattttgaattcgggttgtaaagcacagacatccaaaccaacagaactcccacacacacttcaggaatgcagagggtttttgtttgttttggtttgtttttttttttttttaagttttagtaagaacattttcta

SEQ ID NO: 66001 - DNA, 3045 bp, Homo sapiens
taaggatgccccagatgattcctaaggcctctctataattttttgtctggctcataaactggatctggatataattccaaagtaattcaagtaaatacattccagaatggggttttaagtaataacagcatcattgcaataaatttaagcatgattactttagaggacaatactcttttagatgtgtgattcaagtcaggttattttaatattaataatatgtatttaatgcctaccttgctacagtccagcaagtgtttttgttacattttgtagccacaccttagacctgtgggaagaacaggaaagaacagcaggaagagatggagacaatatgaggtagaaggtcaggataaaagcaaggtgacctggcaaggctggctctgtcttccccctggttggacaatgacttgcttgcattgtgtgccttactttactcaataaatatattcctgaaagtagcttcaaaacatttgcagattgaatcatgttttcggtgtaacacaggcatgttctattgaaaccactcccatggtaaaactttttgtaaaaagagacattattctctaattctaaatctacattggattttcttaaaggaaagttcaactgtaattattttcctggagaggaaaagtgatgtcaagccaccctgatgagagcctggtgtgggaacagcttgtctggcctcttgggatctctggggaaagtagacggagatgaggaatagacacgtattccagaactggacttcgaatgggcctttggccaaacttggcccaatttctcaacagagagaaagcactgacccaagctgaagactgattcacagccaacctgctttggacacgttgtcctctgccaggcaagccagcgccctatccctgaggcacttgctggccaggggaaggaaatgctgggagaggaagccttgctctttccccctttgctgcatagttccagcttttgtgcagctctcatgtttggggataggggaggaagggagaagactgggaagtgggaggagggggacaaggccacccatgaagatgcagggaaagccagcaaaggccaggagggagtcattgcagaagaagagaataatgtgaatgaacttggggacaaaggggaaataaggaaggggttcagggaaacctcacaaactagatggaaaagaaagaggaaggggaaattcccaggatagaaagtaaaccaggaagagacgaagaggagggcttctccaggtgtgacccacaccccaaattcaaacattcttgatttagaaaaatgtcctgtgattcattctccaatgggaagtccactgtgtagaaattttctttaacaatttcttcttgacatgctcctggaattataaggaatttgggcatgagagctccttttccaaaaagattcatgagaggacttcttcctcggtgctgactgcatttggaagagcagttgaattaggaatggcttgcaaaaatgttagtagggatggaagagagtgttggagacgaggagtgattaatattcaaaattcaggtttgtgttcaattttgaagtcactgttttagttttgatatcaatgtaaggagtgtaagacctgtgtaaatgggatatcaggttaaaaaatccagcctgctccatcctgaggagagcacaaatacatgggactcacagataattcaaatgttgacttcactactccagctgtcaaagcagttctgagcgagaacaagactgtttgtaggaactctagttcttttgcattacctgtcttcctggaggtagaatcatcaggaagaagaaaccaagaggagcagaatcagatgggtgaagtaacccgtgcattatgtaaacaatctttggcccataacctagggtgagccaacatattaatatttaactactaactcacaggatcaaccaatcagatttggccctggacatagccccaatcagccctggagataacattcccatggcaacactaatgcattcttcactgaatggttggcaacactaatgcacttactcatttaagattctttgtttaatgtatgtcttcccctccagactgtaagcctattgaagggtttccctagcatgttgtgggtgctcaataaataactattgtctgacggcaaataccacacccctgagccatatggaagacatctcccctcatggtgttgtggctaattcagaagtggcatagagtcatgaaaaagtgcttcacatcaggacagcagctcagctcctgacctggttctgcttttctctcactgtgtgactttggacaagtcatctcctctccctctacctctgactcctttgctatgaaatgacaggattggatttgatgatctctgaggccgatttcagctctaatactcagtggttcagcacacccataaagtgcacagcagaggtttgtttgtgaccaaaacagaatgttaggaactgaaaaaactgccaaagaccactttagaggaaaagtggaaacaaggttttgtgtgaaatatgcttggcttgcacaatgcaagtgattcttttgtgagagcggaaggccatagggtgtgattactttatctgccactaagcttcctgggcagcccaggccaagctaaagatacctatcactcttgttcaaggtccgtttcctactgagttgtcacactgttgaattattgttgagttgaagtccaaaaggggaaatattttgcaatctagagttggaccctggagctatacaactatgattactgatacagattttcccagaaaatctcagtgcaccgaggtcataccaaggagccctcatacttctgtatgctactgtcagcttactctgctggtggtgctgaagttccgtgaacattttccccaatgagcaagtaaaaacatttcattttgcctcttcctgaaccatttttttaaaagtttttatatggaataaatctttacattaaaaaagatacacaatagcatttacttttaaaaataaaatttaaaatatgatgtgtatatttaaggtatacaaca

SEQ ID NO: 66002 - DNA, 610 bp, Homo sapiens
cagtgatggtgcctgatttaggaaaagtttcagtgtgtcttccttagggtccctttgtccaagcttttcttcagaagcagggaaaacagaaaaatatttaggaacaaatggagatgccagagaggaagaagtggggattaaggaagaataagggtagaggcgggaaggccgtgaatgcctggatgaccttccccccaccagaggtgaaggggtggtgccgttgtaaggtacaaaggtcccctggagggaaccagtgctttcctccctaaattgttcatacccaataataaacacataccagatagcacacacatggaatgctgggggctgttggaagcagacccaggctgtcgggaatcccctgaaccaaggcatgaaaaacattctcttccttcgcacgtgtaacactctcccagtataactgtttctcttaaagccataggtgtctgtttttgagtttgctccttggagacagaaacaggattacaatatatggtgttttttcctcatttcctgctataggctgttttaagtttctgtgacagcttttctacatatttcttccttcaaatggtgaatctatgtatggccatgttaatgactgggacat

SEQ ID NO: 66003 - DNA, 1869 bp, Homo sapiens
gcgcctgtagtaccagctactcgggaggctgaggcaggagaatggtgtgaacccgggagatggagcttgcagtgagccaagatggcgccactgcactccagcctgggcgacagagcgagactgtgtctcaaaaaataaataaataattgaggcaaactcatcttcactttacacctcaaaaagtgtaagtcaaaatataaagaggaaatttttaactccagacctctcagatctcattgatttttctcttgttcaaaggcaagcaaaaaaagtattgagcaatacacacaacaatgatgacaactacaatgacgtgacaagggtgatcatagcagctaacatttactgaggacaaacacagtcctttttgccttttaaaggaaagtcctttaagtgcattctcccatttgatctatcaacaactctacaaatggtagctgtgtgtgctttaaaacaagctgaaaatttttttagaaaaaaaacacacattgggaatttctacatgtaagaaaggataaaatcagtcttgatttcatgagaggactcaccagttcagattattattgtcactctaaatgtagttttgctgacataaatactatctgggtaccctaggggctgctgacatccacatttggaattgttgcatcttccggaacagagattccttggtaggtgtcaattgatctagagagcttggagggggcctgcttacaagtccttctctacctagcacactgctctgcataccatgaagatataataagtatttatagagtgaatgctgcaccttcccctccagactctgagttcccttctccctttagggtcatcacagccagcagctccgatggactcatagattaaacccctcctatggccaatcaaagacccccaagaacacactgttgaagatgagagggcccaccacttgggcccttggtaatttactctcaaatgctcggggattttgagcaagaatcttagtcacgtgaacatatctgtaaaacagttgttgggaaggcagaaagaccaaatgttgaaattctaaagtttttacttaatgacacttctacataccctttccaggagggaccgatgtggcagcttccactgataataatggaaacgcacattttgagacgttgcaagtcatggacatgcccaggccatggtgctgcctgttggacggtgctttgcttgtttctgtctgaagaggctggttgcctttttctcattcagctcaatgcaaacacccatcaagaagggtcaagtgggcattgctttcagagtctccttcaggcttgaacaaaggctttggagacagacaggcatgcaggggtgcacacagagagctgccctctggcacttcactctctggacatgctcaggcctgtgggcagggccttgagtttctggcctgccgtcaactccattgagcagcggccttggctgggtcatacacagcatttttttctgtctgaaggatgacctggttagcaaaggacaaatactagcactcccaaaaaataattaagtctttggacccttttctgcaaacacaaatctgtgtgaggttttctggagcaaatgctgtaggctacattccaaaggccaagaagaaaaataccacgctggtcagtcacccatgctgtctccataaatagcaccatgcatttctgaagcaatgagcgatgttagacaatcctctttatggtaccagtgggacagtggctttaagggccatggatatgacaaagaaaacaagggatggacagagggcgaaatcagtcagatcacagtatgttggttaagtcacttaattacgctggagctccattattctccgttttaaagttaggctggctc

SEQ ID NO: 66004 - DNA, 2600 bp, Homo sapiens
gaaaccaggacttgcctcatcactgttgagacgcccccattatttgctgcaagcaccgtgagtcagggcagagtgatcttgttcactgcacaacctcagcacagtgcctgggacagaagagctgctcagaaaacacctgttgaacaaatgtgtcaaaggaatgttccttcctctcctataggaactcctgggtgtaggaaaagtgggtatctcatttcatagaaggagatcaaatcagagaagttataggggccaggtcatggaaggccttggaagtcattgtaaagactttcgtctcttaccctgagtgagatggggactattggagagttttgtgcagagaagtgacatgagatgacataagtttaaaggatccgtgttatgggtagactttagaagtacaagggaagaagcagggatacagctattgcaatcatcctggaaggaatcatggtggtctggccagggtagaagcagtggaggtaataagaggggacatattccagatatatttcaaaggaagcaccaacaaaatttcctgacagatgggatgtggtgtgtaagagaaaaagaggagtcaaagatgactctaagtgttttagccagaacatctggaagcaagagttgccatttcttgaggtggatcacaaacagatttgaagaaaggatgaggaacttggtttggccttcaatgttaggtgattgagaagataaagaagaaccagtaaaggaaaacaagaacagccagtgaggcaggaggaaagccaagtgagtgtgatgacccagaggtcaagtaaagaaagggctttagaggaaacagattgatcaagtagagcaactgttcagagaattcaactaagatgaggcctgagactgacctctggatttatcaatggaggacactggtgaccctgacaatcccagtgctcttgatcactcagtataatatttcaagcaagaaaagaaaagtaagttgcctagaattccatttctagaaattaggaaatacagtcattgtcaaaaggttgccatctgttaggtaagtcctctcaacagtcatggtgtgacattggccccatctcacctcctggctgaaccactgctcatgaattatagttccagtttgttagtgagttcagggaaagagtccatgatgtaaccttcatcgtgtaaccttgaaccagtgcccaaaatgacttagatttctcactatgaaaataaatataatggtcaccactaaactaaaatatcaaaacttgataaatgctggcccgagagaacaatgctggcattggatttgctgaaaaggaaagccacattccacaactacctttaagtctgtggaaatggaaattttttaaatacagaaaaagaaaaactaccgacccacatgcaaagggtggattaggtggtttccacatagttagtgaggttctgttaccttagcgaagttctggtaagaatgggcattcctcaccagcataatcacttgccactctttggaattcaggaagtgtttcacagcaaatggataaatgaaatgagtcagtgaacaggattcattagttgcctttccatagccttccctgactaatctaaccgcatactaatcattgcttcttgtttctctgaccctaccaactcaactctaagttccttgagaactatataataagatgtatttctttgtgttcctcaccacacttagtttagtattatagttattacttaatatatacttcttgactgagcaaaaaatttaaaaaagaaattgagctgttaagctaaggatataaatttaatttaaatcttcaagaaaaagagataagagaaacagtgcaaataagccttacaatgtgctcagattataatggtctgcaggattaaaccaactggagccaacattcctctgatgttttggtatccaatggtcttatcagtaggtttccaaccattaatcgtgagccattatttactgttgccagtcactgccttctggtgtccctagtgatacaaccttaaccttccaagggccctgtgtcacttttgtgtgatgttttcatcacacaaagggaagacagctgttttcttggtcgcactacttcgtggtgtcccaatgagatgatgggactatgtagctctctacacatgaactgactccatatgcattcccacgggggatcttagcttgctttctctctttctttttctttcaacaaaaaaggttaagtttttgtcattgcttacatcagtaacaaaaaacaaatagacaaactttgaaaggattgaggatggtcaaccctagtcaaagattgtctagctcatgttatttattcacattcatgatatgagtttattatatccatgctcttcagtaatggcattgataataggaaggttgatttggaaaagcaaaatgttaaacactaacctgagaaataatctgtgatcttttcttctctccaaattagtaaaacaaacactgtgagctttaaaataatagaggtgtgtacttggaaatagtggattgctcttttccgttttcccagctgccatgctatggctaacatgatactcgaggttgtagcagaacttccaaa

SEQ ID NO: 66005 - DNA, 1804 bp, Homo sapiens
gcacagtaagaaagatggagctttgaaaagcattatttaagcatccacagcccctgtttacaaaactataaaagagaaaaaaaatgtttactcatggtaatttctttcttttctatctgattttgtagcatgaatttaatgttaatgctactttaatatataaagaatctggcaaaaatcaaccaactagccagaaaacaaacaaataaataaatatttcataatcttccatttccttctgaagattttcaggtatattctatcacaagagcatttatgattattccatttttaaaatttacagtccccttgacaaaatttatcaacacctctatttgatctgatgatacacatcagttgccaggtacataacaaacagcaagctgtttcactgtcttcatcttgagctgtaattaaagagtatttactaagcattacttgaacccaacattatacctggtattatagcagctggcactgtggacccgggccccgagctacagaaccttacagctgatgacctgtgatcaacatactcatctttcctctaaccacatgacaaacctcctggacccagagccaaaggaatttatggttttccagggaaacatgatatttgctttgacagtttcacatagctttatcccaaaggcagacaaagagctgaagtttcatcttcactcgcctttcctgggatcaagccctttgatggaaggagatcactgggaatccatccctaggcctggaggtgtcagaggcagaaaccagacatacatatcctgctctttggtcctctgggaaaatacctagccatcactgccctcatccaccagtctcatgttgcccgcctgtctccagtgttagcataagtgctgactccccagcactgtgtgtgtctgggagggcaagaggagtggcaaacagccagctggtgacgcctgcccagagccctggcagacctcattaggctcggactggtctctgaaatgctctaccactgctcctgcctggcacccaaacccctaccattttaaagtgagcttttcacattccattcttcccccaagtcctgcaacgtagggcctgcttttctcacagctccaacatcaacacttcttttgagcaaaacttttgcatgcaatagatagtgctagtgccaatgcatcttagccagcttctacagtcaaagtgaaacaaagaaaggaaacattacaaaaatcggtgttgtggaatggaaccagacaaaatcagtaatagtcagtgtgcccctttgatgacctaaatgtttagcacctcaaaggatttctaaaggtgtcatgcacagagttttgagagggagctggcattttcagccaaaagctgagggatcctctgaaacagataccgtcaaatatgcagacaggttgccatgaggcaaaatgggaagacgtatctggctgtgcataccaaataccatctcagagtggggttgtgacttgtaggatagacatgaatatgatgcacccagcatggccatgcgtgggagctcctccgtcaggaaacgtggtgtgttagataaactggaagagattcagagaggctggaaattgggggcaggagggggatggttaaggcggtaaaggcggttttttaaaagacaggaaaaaagggttaagcaaggaaactccataaggacctcataggccctgtggaagagtcaaaagtcatttaagtgttaagcaggcttgttgcataattggattcacgctttagaaaagttactcttgctgaagcacgaagaatgaattgaaggggggcaaagcag

SEQ ID NO: 66006 - DNA, 2322 bp, Homo sapiens
aagttttatgaaatgtaactacagatcaagtatttccaatgaaaaatttgtgtctgaattgagatgtgttgtgagtgtaatttttcgaagattcactgtgaaaaaatatatgaaatatctcatttataatttttatattgattacatattgaaataatgttttgaatatatcagattaaaaatatattgttaaaattaatttcacctgttttaccttttcactttcttttatgtgactactggacatttttcaattccctaagggaattgagttccccggggctgacggggagcacggcctgggcagccctttcccgaggatgtcccagtggagacgggctcacaccgaggtgcgcgcacatgcgcgtctgcgcggtccgccgcgggtggaccgaatctcaccccgtgcccacgaccggcgggctttcctgtttgcctttttgaactctgttttctttgagtcttggagagagccaggggctgtgatgtcactgtataaacagagggaagggtgggggcgaaagttgcattggagcgaacccggcggtggaggagggctggtgggaggatgggggtggggagggagattttttttttaaaagtggtttggtctcgggggtgtaggggcagcgggggactctgcagagtcccgataaagaaacagaatgggactgccagtccctaacctaggggcggggagggggacgtggctggaagagacaggggttggtggggggaggttggaaaaatatgggacgcctagagctaattcctctgattaaaaatgcattagtttggaggtgtcagggacacgcagctgttttcaaggaaagcctggctccaagaggtcctccccggccgggccgcctggcggctccatcccgggtgggtgtcagcgagcgcgcagcccccgacgcttgtcctctccctgacagggccctggccaatgtcctgctgctgcgggtcgtggtaatttacatcctctctgtgtacattaacttatctgcagccgcgctggctgcgctccttcagtcagcctgtctcctgcgcagcctgggagccttccccgacccagcgacccaccgggcggccgggggcgactggggaaccctgggaatcacaacaaccgcccggttccgacccggcccggacgcccgcgggggcgggggactctgtggggccaggcgtggagggccggcgagcccggctcgggcagggcagaggcgggcggccgggggctggcggcgaacacttagtggctaattcatgactcatgactcatgcgcaggctcctcttcagtgacagccgggacagttcctggttatttgtagccccccggctttcatttcgctgtaattaagcagtcatttgagggtcatttcatccccgttataggtttctctgttttaatcatgctttgagttccagtgggggcagcagggagtggaaggggaggttgggaaggaggcgtggagggcaagagggtaatcgtctctgagaacgcgtgcacttttcataactcttcccgtgacaggccctggtgcaggctccgcagacgccgacgcccggcgctccgctccggggcgcgggccagatcctcttccctgacacccgcggtcttccctgagaagaggtctggccctttttgagtcagatgttggattttctgctttcccctctggcaccacactaatcattctctttaatcgctgtagctttttaatgaggccaagtaggtatttatggagccgtctactctccaaacgctgatgcttgataagtcatttataacttatcggtgggctttgcataggccaaacccagaagaaaggaagtgagaataaaatagaggctggattttacgaggaaccttcagcgtatcttcaggtcctagatggtaccaagcccttgtgggaaatgttcaatccatcagacataagaataagaaacggccacagcctgtccgaattttgtgaaaattctctggctgtcattcttgatttttttttttttaattccctccactttctcctttggctggttcatgtattctttagatatcatttgaagcttccattccaaggccaagtctaagatgttctttaaagaaatcttaagctattgcatttggagggcacacagattgaaactgaaaggactggaaagaaataaaggacagaaaccagattttctgtcattgcaaagagtaggtgccacaggctccaaatctcagtagatattaaagttaaagcaggagtctgcggtaacagtaggagggtggttgctttcaaaagagaagggaagagagaaaacctgtccaa

SEQ ID NO: 66007 - DNA, 1208 bp, Homo sapiens
tgatactacttgtaataattatcctagaaagacacaaaaaccttctaataaaaggttctatattcctctatctactttgctatcagaattttgctctaagatttataatgaatagcccccattttcaagttggaaaaaccaagtaccccctgaaagtacttactgaaactgtcccaaagatccataatagtaataggaaaaaatctcagcatgtccttctcccaactgttagagatactcacctcctatttaatgtgataggaggtgttccttctacttacaaaaaattcgtatatatatttaattttttcttaactaagtctgaaaaggagagacaacctaggccataagtatggaaaagatgtatagtttccctctctcctttttatgggcgactccaaagtgaaagtccaaccacttaggcggatgagcttcaagaaactcttctcaggactgtggaatgtgcactgtgtctacagtcatccatccctaagcatatgtggttgtcaccctctagtggatgatctatgataatagttggcagcctcctgtggggcacaagcacgatattatccaagactcacctatctttaagacgtaaatgacagataagactgcaccacaactcttcagtcttggacacatatttcctaggaaaatgggtgcgcacgtgctgtttattcagtctgccattccctgcttcttttgagtctgtgtttgtgtttcctactggtgtctggcattttcaagaacaatacacatttccttgaggcagacttctcctaccattgagatagtcctaggcaattgattcccagatattgtttgtatccagactggtcttgaaagctttctctatctgcaggtctactgggtgtacccaactatttagctggtaaccaggcacttgccagtagaatgccagttctgtgttgaacaatttgatctacctaggaaagttgtggacgataaatattgtttccatgtttgccgctgtgtaaggagcctaaacatagattcttagagactctgatagaatttttagaggtggaaatgatagggtttgcattaccttaaattttcaagactcaacaccaagcattagattggaaaatagaactttttacaaaagccctctaaaatgaagtctggctttgaattcattagtattactagattcaaaatataatcacatgattttcttctct

SEQ ID NO: 66008 - DNA, 1727 bp, Homo sapiens
aacacaacacatttttttttttttgtaaatttgatgactgcagtaccacgtttagacacaggcaagagaacccccgccccaggccacatgcctcagggaaccaccacaccaccctccatttgaagtgctttccttccattttccttaggctcctgtggctgacagtgttgtctgggtgccctgagccaggatggggacctgcatgtgctttgttcccgttctcccttttgaggtattcttcgaccctctaccactatataagaatccaatcacatgccctgaggagcacctggtccactgctgaccttaaattggtcttaagctgcacctgtgtgggcctgtgtcggctcactcatccatgatcggacggtggtgctgctcctgtgcagcagtggaggcagtggcaggcatgttctactctgctccaggcagtggtaccagggtggtcatctcaccccttcccttccctgccacatgtcaggtagtcgccatggggtggtctcaactacctcctccaagggcttccaggactactgctcctcactggaaatgggcacttccgattgattcatgttcttttttttttttttttgcctctgatcaatgtggtgatgtcatgttctcccaggttggtcttaagccatgccagataatagacagacattctttacatgaatgaggattttatttttgctctacccatggaaccctcctccctgctgacagggtatggaaggcaaggctgtaatcaacactgaaagtgattcctagactaatcattttcaatgttgattactacagcttatggagttcaagagaagacatgattggaagatattttgttccgtatttaagctataaaattctgaatggtaaatttaacatgtttagacaacaaaatttcctccatattctgcataagacctgaatttgtggtaatcttcaatgaaacatagaaataacctttgagagagacgttggaagtccacagtcatgagcagcatgatggatgactcagcatcatgaatgattcagcatcatgaatgatgatgcaaccaacattgaataaacggtagtggagaactgaagaggcaagaagatctattgtgtctcaatgaagtttctgaagaccctggtattatgaatattaagagtcactatcagccagactcagtggctcatgcctgtaatcccagggattacagggaggccgaggcgggcggatcacaaggtcaagagatcgagaccatcctggctaacacggtgaaaccccatctctactaaaaatacaaaaaattagccaggcgtggttgcaggcgcctgtagtcccagctactcaggaggctgaggcaggagaatggtgtgaacccgggaggcggagcttacagtgagccgagatcgctccactgtagtccagcctgggcaacagagagactgtccaaaaaaaaaagagtcactatcttttctttgtggtagaaaatctgaaatcagccaagaatagcacagttgaaaatagtgatcgcaaagagatcacaataatgatcacagatggatggtttctgaccctgaacaggaagagacagtgtctggacctatgaagaatcttcacaggcactgattggataataaacaaacagggaagtagacccactcaacccattattctaactcttcatcaaaaattcttaagtctcatttgggcccatacattttgtaatacattttaa

SEQ ID NO: 66009 - DNA, 1768 bp, Homo sapiens
ctgtgcccaggacggggctgagctgacatctgccaggtttctgctttggggtgagggtggggaaacccgccagcatctctcttcagtgtgctctcagtccctctgctctacccactgcctgccttccttggaagatagcttagctgctgaagtacatttaagaaaaaaatatatatatcccctcccccaccaaccccccactcgccctctgtccctgcgtgccacttgcgatcgataaagagaagtatgagtcggtgtttcttttgtaaacaatttcatatgcaatataatacagaaagcatgactgaccttcaattaaaaatgcagtaagctatattgctttattcttgcatatgctgcagtgagcaaatgacagaatgaagcaatgtggaagtggtggcggctaagtccctagccctcatttgcactaaagatcaaaataggttttgtttttctatttggaaccaaaaataaattttttcccccaaaatcctcaaagaaaaaagagcaacaagcaaaacctgcccccaagaaatcaaaaacaaaacaaaaccaaaaccaaaaactgaacacctttcaggtcattagaatcaacaattacacaatgatttttagactagtctagcaagatgtgtgtaacattcactggctgtgattgaccaagcatcctttttaaactcctgaactttgaccaaccaagagatacacacacacacacacacacacacacacacacacactcacgcagagccaaaagattcgcagtgaaacttaaccctatttgtttgtacaatcaagatcaaaacaaatctaggaagtatggcaacagagaagagtgtaaatgttaaaaatcctaacaactatacaaaatagaaattatgtaaatttaaaataatttgcagaggaaagagaagagaatgtaaaaatataagtctgctcactctctcatcatttgcagttgggaggttaaaataactaaattaaagctaatgaaataaaaaggcataaaatatttaaaggtaagtactaaggaagataaaacagtaaactaggagttggcaggggaagatcatttttcatagtagagaattacaagtaaagttgaaatatgtattttcagatactctgaagaaacagaagtctaagggtattatgcaacattttgattgcagatatacgcactagaacaaaatacaaacattccaatttatcagaaaaaaatctacaagagtcaagaaaatcatagatgatagactaagaaaaaggctaaaaattagaaagcattacataaaataatatgccattatatctgtcatactagtaaatataaatgggtaaaactaatatatgattttttatgatgcacaaagcaaaaatcaaaacagataccaaaaaggcaaatgcatcaaacatagacaaaagatattctaagtaatgttaacaaagagaaagtgggatgtggcagagacagtttgtcctttccaaatatttattgacttccctgtcttttccagccttccctgtggaataagcagacttatgactaattctagccaatagactatgcagagaattgactagcatttcctcactgagacaggtaagaaccagtgtgcctctccacttgactctttccctgtcatgttctcccagtggcatagccaccaggtggaacaaggcaaccgagatcacactgggtttggcatgagcaggaaataaatattttgtccattcactgaaaatcggactttaatttttatttcaatag

SEQ ID NO: 66010 - DNA, 1822 bp, Homo sapiens
tgtgttttttgatttgttccaagatcctagaagagtgcctggcactcaatcatcctttgtcaaataaattaataaatttcagccatagtcagcaattagtgaattattcacaaagaggtgagtcctgctaccagagttcagagtgccctggtaggattgcctcaagcccttctccctgagacatccttgggcttcaggaggtgaaaaggtgtagagtaggtaaggagaagaagaggtcagcatggtagacccatcagataagaccatgtattgatttttgcagaacttcttttggttgtttcctattccactgtatttataaaatgtggaaatcccttgtcacatcactgttcagtcctgacacagcccacagaaaattacaagggacataggctatctactggctgagcagagctcaacaggcaccagtgatttcttcagggcttcccagcaccaaagatacagcaagtaatctttctctgagattaacctggcctccagccaccataaacactcaatctcccttacagggaggaaagattaaatatctgattaaaatttttggctgctaatttattgaacttggatggaggaactgtttgcaagtcacatgactttccctgtgtgtctgccgtcgttgtcccacgcaacagagcgaggtcaccgtgcagctgaaaaacaaggagcagccgagtccacgggggcgggtggccgaggggtacagttttgggccatcttggacaactggggggtcagttcttccccagttggttcaggaaagttcacatagtctgtggctgtttctgtttcagcctctcactctctgttcttgatgctttgtagatttggttcatttcatcccacccctgcctattgttctgagccacccagtgcaatgatgtcatgggcagcttaaaagtatacaggaagtcttcaaagctgaatgacttcaatatactttattccatgcgctcttgctgctggctgtctatggaaactgtgcccggcagaactcagggaggcagccatagggttggagactctcctctcctcctcccccattccatgctccccaccccacccccgtgcctactgctcccatccctcacctccatcccagggtttggacagaggccagaccaaaggagggagggaagctaagagaaaggaaagccaggggaatcgaaggtcaaagggagtttcatcagaaaaataggggtgcaggactcccaggacaaccaaaggtcacttttactggcctttgagtgataaagtcagtctgtctggcagagctgccagtcatggtactgcccctggagaggaaaaagtgacaaaaaccacaagtgacttgcctcaacttgcaaactgcagcaagagtgtggcatgtgatggctgcccagggatacatttggagtaaagttaaacatgaggtggcttgtaacaggataataatagcagatgtgaggatggggctttactgttcacacagcacctttgtatatacatactgtcctctgtgtccctcacaaatcccaatgatggaggtagggaaaagcatgaagaagggaacgtttttacttacccaaaatcactcagctgtccagggtagacttggggctcaagtccagatcccatgttttcccagcactccactctgtgctcacatcacagtcctggcttcctctccttatccctactcttgttagaaattacctctgagttcatccttgtccaactatcattttttcatattgccgcaccttgtggaactagaagaattcttctttgctcccacaaaaataacacagagtttgtgcctggc

SEQ ID NO: 66011 - DNA, 2359 bp, Homo sapiens
aagtgcttactgcctcaggaacccacatgctcacctctgcagcacattccttctcctctttccacttctgaaatgcttccttcatctttggaatttataatgtaaaagaattttgctagacataggaaggacacgaaaaggtctctgccctcaagaatgtttttgaagaggtaagatgtatgaacaagatccaaaaaatcaatacacttgaaatatggtgaatgacatgagtagtacaattttttaaaatcctgactacagtgtttgggcaaaatttcatgcagaatgtggattttaactgaacttgtacttacggaaaggacttaggtggtgggaggaaagggataagggaaactaggatgagcagagacctagtgggtggaaagttcaaagagctgtttggggaaacaatgagtcagtgtggctcactgaagaatttgtgtgatgaaatgggagaactgcagttaaaaaatagttctgtcttatatatcatagtaatattgggtaaatgaatttgatttcatcttgtagagaatagagagccattttaaaatttagattggcaattgatacaaacaaatgactgggtacatggctcactcacacctgcaatcccagcactttgggagaccaaggcaggaggattgcttgagcctggaagctcaagaccagcctgggcaacatagtaagacctcatttctgcaaaatacacaaaaattagatgggtgtggtggcaggtactagtggtcccagatactcaagaggctgagatgggaggatcacttgagcccaggaggcagaggttgcagtgagccatgatggtgccagtgcattccagcctgggcaacagagccagaccctatctccaaaaaaaaaaaaaaagaaagaaagaaagagaaagagagagatgaaagaaaaagagagagaggggaaggagggaaggagggaaggaaggaaggaaggaaggaaggaaggaaggaaggaaggaaggaaggaaggaaagtattgtaggaatactgatcaggaggctcaagttggataaattgaaaagaacagaagctaaaagcaagaaaccaagcacatgttctaaggtctttactggcgtaagaataggaggaattaaaaagacaacaggataacctgtggagagggttggttggggggcatctcattgaccctttgggatcaatcccaaagaagattgactttagtgaataaggacacaagtacttctcttaccacatcaaagaaatgatgcatttgctatcaggctaaaaagagcagtagcagtatagagagcctttatcctatgtttagatgctttccttactttttttttttttttttggagaaaccactttcttgtattttggggtggtgtttctgcttttcaacatgtatgtggggaattgttgcaattttcactttgtcgattacattggccaagagatattgtactgcatttcaacctgatgccttccacatttgtatagatcacaaaccccatagttcaggaatgagccaaaaacatgccacatctgcatgatgctaaaggtcattcccttgaaatgcatcataccaaatggaatcttatttcttgccaaaaacgttgtgggtgtctgtcacaacatttatcttccttccatcaacagcagcagcagcaacatcataatatttcatgttcaaccttggatgacatcagagaaactctttagctcgtgtctatgggttttcaccatacaaccagaacctcaaggctcctgttctcacattccccatctcctcatcatcacagatcaaggttcactttctttgtaaactttccctttaaccccactcactaacaaaatcactgacttaactctcactacaacaaaattatatatttacaaatgtctatttctcttgcattggttggcttttgtcttttccattagattatagactatgaactgtgagtactgccaaaaatgtctcagactaacccgctaccattctttgatgatacgtgattatatatgaatttatcttttttcttcataactttattctctttctcccaaacccacccatgcatcattttcatgggctaatgtaatcagaaccactcctggcatttaggctagaaaacactgacaatgatgaggaaagcaagtatcctttaaacatttatcttttccgttgttatgctatagtcccctgaagctgcctgcaaaagccacaatattcttacggcagatggtgtcactcatgaaaattctggtgtctatgccaagaaaacttattataagaaagaaacggctgggcgcggtggctcatgcctgtaatcccaacactttggaaggccgaggcgggcgga

SEQ ID NO: 66012 - DNA, 491 bp, Homo sapiens
gttccatgatcagccttctacaagctagagaaccaggaaagacagtggtataattcagcccgtctgaataaccaaaaaccaggggagcccatgatgatgtaagtccagtctgagttcaaagacctgagacccaggattgttgatgtctgagggcaaaagaaaacagatgtcccaaatcaaacaggaagcaaattttcccttcctccagccttttgtcctattcaggtcctcaatgaattggacgatgacagtctactaatccaaatgctaatctcttccagaaataccctcacggaaatgcccagaaataatatatcaccagtaatctgggtatcccttagcccagtcaagcagacacataaaattaatcacaatatcaacatgaaaggaaatagacagatgagaagaaaaagagggaactgaaagcatgctaaatttctgattttgattcagagaagaaggcaggagaacaggctgatattaatacaaaa

SEQ ID NO: 66013 - DNA, 1561 bp, Homo sapiens
aatagaaagaggaagaaagagaagagaaaaagaaagggagaggaagatgaaaaatgaggaagatggaatggaagatgaaactataaagtgaggtgtaaggaacaagtccaaataatcattcctcacaagaaatatgggtgtgttaaattcttaattagactgcaggatttctggattttctatttaagattttccatataagaacctcatatttctgaggttcttataaagatgcatcctagtgaagacatgccatgtttttatctccaactaaagaatatcacaacggacttatagctcacatagaaagggaagaatgagtttcccagggaaatgtcaaagaagcagaagtaagcagatttagaaaaccagggatgtagcaagcttacgaatcaacattgattttgctagggcttagattttgcgcaaaacatcagttttaagccttcagagctctctgtgaaattctttcctctgaaaagctctgtcaggggcaaagctgacccagtgtggaaatgccatgagtcagagaccagacagatctattggggtgagtcagaaaatcacggaaggtcccaccatgggcaaaacaaggaagaatgaggcagaaagtaagggcagtgcagctggtaattccagagcccagactcaaagccattataccatgccagggaatctggaagaaggttacaagcaggggttttggcagaagttttgtagtcaagtggtcaaagacaagggaatgcagccaagaagaacagacaaagttacagcaaataaactgaatatggatggggtcaagtagaaggaggggagtgtagtcctatggaaaaccattgagggccaactacaaggaatggagtaaaagacaggatatagtcccagcagcctgacagtacccaagttctttaaagacaagaatagcaaacaggaaatcaaaccaggaattcaggcataaaaagtgagaaaagaaatcatctagaccgacacagcttactgattacattaacatgaccttcctaatccactgttttcatcaaaaatgaccttactattcaaagaaactcttgcctgggaaggtaaacattcaaatgagtacaggatagttctctgggtggccttggaccaacccagttctccctcatttctctcttgtagttcttaggaatagctatagaatgtgctagggatgtaatatcctgagataggaagggactggctggaactgttcatgctctgttccagttccccctagaaacaggatgcccttcaatgctttagcccagggagtcagattctcccaggacataaaacccaaaatagctgcttttctaggtcccacagctgcagtgcaagtggaatacatgcagtcaaggctccatccatccccaggcagcttttctgagccttggggaccagctcaggatgaattctaggcttctgttgtcccttgctgcctatctgtgaataaaaagtccatttcatggaatttgctgtgtggggatgttctatctcatcagactcaaacaagttagtagttggtgaacttgcttcacaatta

SEQ ID NO: 66014 - DNA, 2794 bp, Homo sapiens
ggggacaggcagagccattgctacattaaggaagtgctttgtaaactgtaaaacaaataacaaattaaaaagaggctttgtattctttcttttctaggtatgatttttattgcttaatagcagcatcaagaaaactgaacttcaaattcaaattgaaaagtgaacctcaaatcaagcagtatttctcatcagtaatgatggggagggatttgaaagtcctgcttaccatgtaaatttgaactatctgggaatgggaccgctctctggcatgcatcacgccagcatttttaccaaaaatggagatttccttccacctccacttcttcccagtcaggtcacatgaaacagggaaactatgggatcaggcaaacctaaatttcattcgtgattccactttaaaacaggaaacttattatctactctgtaggaaaacataaaataatttttgcaaagtacacagtagcaaaggattggcttctttccatcctgaagatctgcagcttaaaacaacttcagtgtgacattgttccctgataccacactcataaagttttattcacacataacagaccttccttcaaatcccacctcctccactaaatagcacattattcaacctcagtttcctcttctataaaatgggcacaataatagaacctagctcacagagtagaggggaacagatgataaagtgcatttaaatgcttagcctggtgtctgacacataataaaatttttgctaacagaattacaataatacaaataacaataacatttcagttctattcgaatttgcacattaaccaacacttagatgggtcagcagcaaaggtttggggtagtttgccattttttccttcttaaatttccttggctgtgcttctttccctcccttcccagggcaggtctgtttcaattcagccgctggctggaacatctggcaggttgcccactcttgacgttttctgtttgtggagccaacagggtggggaggtagggggtttgatcatcttcaccactgagacattggaatctgttgagttaaacattgctctactgttaccatcccctccctttcctcctccctccctgtgaatgaatctggaaagaatgaacctgaagtctatcttgaacagctataaaacctttatggtacgtgggctgctcctcgagtagtggagcattagcctccctgttcgttcctagagtaaacagaacacgtcagcatattccctaacacggggtcaatgtctgagggagcggtgcactccgtgcctggcacctgctagtgtgagaggtctgctggcagccacacaccacaatcaactttgatgactgcatgcactgcagagctcactactcccgagcccttttattcactaatatttatctcaagatagcaatatctccaaatcttcccttttgctcagccctctaaccttacagaatctattataaagtatgtgcatatagctgatgggatatattacatagtacctatgtgtccaatattacatttgcaccgaattttctaagttaactctatgagagaaaccaaagttgaacttgcacccttccttggaggagcatgctggctcttgagtcaggccttagcattgccctgctgtcccgtttgatgtcatccataaagtgctgcctcactactggctgcagtcagtctccacaccattggcctatgatttattacaggtgccatctttgaaggatccatggccccatgccatcacttgactgcttacttaaaatgtttaagtgtgtgatactaggtctataaccttttctgatcccacagaagggacaagggagaacataattcattttattggaggtcaccattattcttccttctctgtctttaccctgtgccggccaaatagtcatactttatccactgtaagtactttttccccagtcagttctccaaaggtttctctttccatattgtcctccaaactttctcatgtctatttcacactcttgtactttatttgcgttctattatagaatcaattagatcctatcctgggcagaactgttcattgtttacaagcattaggtcaccaaagaccaatgacacctaaaaaccagtgagccacaatgactgatacatctactcttgcttcataacataaccttgagaggtcagttcagagtgtgagccccattttactaacaaagatgatgaaattgagagactcagtctcttatttgtggtggcctaattagtccagaagcaatgtcataatcagtgctaaagtgaacataggagagagaacatcagaaaaaatctcattagccggggatggtggcacatgcctgtagtcccagctacttgaaaggctgagggaggaggatcctttgagccgtggaggcagaggttgcagggagctgaaggttgcagtgagctgaggtagtgccactgcactctagcctgggcgacagagcaagaccgtgtctcaaaaaataaaaataaaatctgaaatccatagtaataagaggaagtggaaacatgcccttggctggctaaggtaacaactacaccaaacattttatatcaacaaacaaacaaaaaattcaatccccagttacgattcagagtttgatttatggcagatttggttgtaattcctctctgagatgacaggtaactgagctcggtcctactttagtcatcaaatattttccatgaataagccaagccagaatctatgggtagattttcttccaggcataaagtcattgtaaatccataaggtcatattctttaatttta

SEQ ID NO: 66015 - DNA, 825 bp, Homo sapiens
ttcctatgcacctctccccgcagcctcccacacaccttcctcctgtagattctctctccttgtgccaaccgagaactatggaggcctcttttctcctataacaatatcaccactgaaataggttatgccttctaaactgctttaaaagtttcactaataagttttaaaactgattttgcctattacacaagagattgcttaattattaatacaattcactcgtgattaactaagaatacacagactattcatcctgtcatacaggccaggttgtagatgagagtttttgtgagtgtgagagaatttggacttatgcatgtatgcgtttaatttaaaaatctacttagctacgaatcaggacatacggacgtgattttagactttggaaacttgagggggaagaaacaatctctgctatctcgacattaagaggtgtgtatctctgtccctaataagcaaggaggggctgctatactgccaccttgtggtaaatatgcacaaagccagtaaataaacacaaccaaccttctccttagtgtgttattacataatgcccaaaagaggaaaatacttttattaaaacattattcaggaaaatgaactattttagcatgtggataattaaatatatattacaacatgtcctatgtgacagaatgaatattctgtatattctccctagtatttaatcatgtgtgaatcacatgtattaacaatttttatattttatgaaagtttatcgataaatacatacatatatggagagagagagaaaaaaaatctcttacctgaaatgcttgggatcagaagtgtttcagattttga

SEQ ID NO: 66016 - DNA, 2943 bp, Homo sapiens
agctgtagcctccaactgaaaggaagctcagcaagaatgaccttgttagactcattctgcagagcaccgtggatgtcagtgagcatctcttggagatttatggccctgaacctagtctcctgttacttggtgattctgctgaattttccattgagcaataagggcaggataacagcagagctgctcaaggttagcagccttctgaagtccacccagctccacaaaacttcttcctaatgatatacagaagagatttattgggatgtttttgcaggccaggaaattgctacatgattttgtcattgacaaaggagcaaacatcactgcccactttctgttggactttctccactttgctagttcttcaactggaaatgatgaaaataggctgattcctggtttagttaccaggtgggagggctacccaaacaatattccaatttcattgttttcatttcagggattattgatggcaactttagggcataccttatatttgaacttccacttggtttcctgttcttgtgggattcatttgaattgctgctaagttgggcattcaaacatttctcttatgttggttctaaactagtgagggaaaaccacgatgtcagaagtaattttatttccactgtcttttcagatgtgtcagggctcttgatcaaaactgattttccaaaggagcagaaaaccaaacactgcatattctcactatacgtgggaccagtaggaccagtaatatagggcagttaagaccagtaaacaaggaggaaaggtcatcaaagatgattttcttttgaaatgggagattaggagaatagtggggtaactactgatagcagattgagacattagaaagacgtgccattttcagtgtttcttggttttttttcttttttataaagccatttatcttaagtgccttttgaaaatattaatcctatatttcagttgcattcaatgcagtgttttggcacccattaaagccatgggtatagggagaagtgcaagcgctcccaagtttgtgagagagttctgggtctttggagggagggattcagcctgggaattcctagattcctgcaagcacctctgagtcactaattctttaaatcacatgttccgtcagctaaaataaattaataaataaataacaataagttactctaagaattagaagggatgtagcctcagaaagccctttggaagctctaaagtgtaaaagatatccctcattccttctcattccaaaggaagtcaaatagaaagtaaaactagaatatcttatatcttacatagaaaggtgaaacgacattctctctaacagctctcagttggtaatggaaccaaatgatcaataccaggccacaggctcctcgtccctcaccaggaaaggagtcctgtctggccggagattgcctccctgtgtcctcaggcccacctcggtttctgcacaggctccccgctcccacctccccacccccgctgccattccctgcggggtgagctgtctgcaaagctccactcccttccctttcccaagtcacagttacaggaattattgcaagactagttctctcatattatatttcattcagcagcagaagagccactcaagggttttggcttctggaacaagaatgaaaagatctacaaaatactaagttccttgaatagaatcttttaaggcgatttggtgaaaagtgtcagattggcagccacaaagtctgagtttctgtttatttatctagcaggtaatgattcacaaagccatacaaatatctcaccagcctacaagtccatttcagacagatgactaggataatgtaaattccatgtaaaaaggtagctccttgctcattctcatgtgtaatcttcacgagtgaagtgccttctaagcattttcacacgaattctgtcacttagaatttcttgcaaatatctaaaactagagtgttgatgatggtatataaacacaccacttcacctgctttagctaaaggtgtctttttttaattgataggccatttttagcaattttagatttattttaaacattgagttatttgtgtcttttttagagccatttttcttcttaaaagctacgctatgttttgctgagatgaaaatacatataacttgttttccaaaatgggaagaattgttcgagagggtgagcatggaccctgcaaccagatcctaagcccacccttatcagctctgcggtgtttggtacgtgaattccttattacctctgagtctcggctttcccatctctaaaataggaataacaataataaacaacataatacaaaggattataagaattaaatgaaatggcaaaggtaagtacctaacacagtacagaatacaaagtagatgcttaagaatgatatgttatattccaaattcacattgtatgttagaggactaaaaattactgtatcaaagtataaatctaatctgggattctgatctttttgtatgagtttgttctgcctgaggtcttgtgctttaaactaaagaaaaggttcttgtgatctgcacagaagcagggaattggagacatctggttccatgcagtcttgttaactgagctttttgatctgctctgaagaggtagaattagagggaaaagtcaaaagaaaattgagaaacagcctctggatgagggcagggctccccctggtagggaggaatggtgaacaaaacagcagagccctggagggagccaggctgagcatagcaggtgcccaaagaagaccaccaccaaggcccacagggccttcccaggtgccactgatgcagtctggtaaaatgcaagcatccctggtaactgccagaaatgcataggggaactgtgcattactgcccagcatgatgaagtgtaaaaaattatgggcagtggggttggatgtggtggctcacacctgtaaccccagc

SEQ ID NO: 66017 - DNA, 813 bp, Homo sapiens
agccagaaacatggtgaaaattctcaggtgatgggtcagatcaagaatgaagactttttgggcccttttgccacaacaaaatctgtttctcagtgtggcacctggacagccaacaaagtcccaggagaggaaccattttctcacatatccttttatgcacagtgacccacgtgctgattagtaacctgcaagcacttccttgatcactcacaatacttttggttataaccactgcctctaccctatacctcatttgattattgcatagtaccactgatggatgctgttgcaatccccctttcccctttgacagtttatttcagtggctcccacacacagctaaggctctgagtcactgtctgtctgtttttccattgcataagctcagaggagggctttgcaagtgtttgatgctggggcttttaccctcaccttggttgtatccctttggaacattgctagaagatatccctcctgagcactgaacctgtgccagccttttgtctcttttctgatctttgctctctgagtcctgggacttcctccaatagtctcttttgttatgtttgggttatattacttcatgtataattatatttgcatagttcttttccggtagtagcaagagcaaggggaggtctcctttatccaaaaacctgtgtctccttagagacctacaggaggctcgggatactctacaatgagcacatttcatatcttactttagtcaaactgcaagatatattagatttatcgaaccatagagacagaggtatctaggaggtttcttagttattttcccctgtaagaaaa

SEQ ID NO: 66018 - DNA, 978 bp, Homo sapiens
tggttggatcatcaatcaggacttgtagtagctgaaatataaggttgaactggatggtctcagttacaatgcagtttgctattactagtctgtattaatccattctcacactgctataaagaactacctgcgactgggtaatttatgaagaaaagaaatttaatcgactcacggttctgcaggcttaacaggaagcatgaatgggaggcctcaggaaacttacaatcatggtggaaggcaaaggggaagcaaatatcttcttcacgtggcagcaggagagagtgatagagcaaagggaagtgctacacacttttaaacaaccagatctcatgataatccactatcacgagaacagcaagtggggaacccccccaccatgatccaaccacctcccaccaggtccctaccccaacaccaaggattacaattcaacatgagatttgggtggagacacagagccaaaccatatcatggtccttgttgcattttcattaaagacaatgagattatactgaaaacaactgaatccttctcttagcaaggcagaaaccgaaagtataactaaaagctaaaatgttaccctgctctgtgtaaacagagtagagcatgtcagattaatgaatgacctacttgcgaaaacgtgtagacaaggattttatctgtgtttgatagtggaaaggttatatccacttcctggcagagatctcagaatatctaatttatgtgacaaaaatgaaaagttctcaagaaatataccaaggcatgattagcctatttattcccccaggggtttaacactagcttttagttgtctgctcaatatacatagtatttttgtttatttattttgtaggattgtgttaacttaagctttgaaaggtgtgcacattttttatttcctgccttatctgggaaaaaacctgacgagatgtcagaaatagatcaggtttaaattagttttatttatttttattttta

SEQ ID NO: 66019 - DNA, 853 bp, Homo sapiens
tctgtaaagctagatattgttttataacacttgcgttatgttcattgattgtttgcataaaggttatttggtatataatattctcttactatgcttttctgtaagttgtgcatggctatagtcattttaaaagctggactgaataattttgccaaataaatttcacatattaatgatttacattaagccatctacttccttcataatgtaactattatgttttataggctgttgctatatggtaacaattttatatggtaaatctaattgtggataaataataattgcccttttaaggccaaaaaaagcattggccggctggtgatcctaagtacattcattagaggaacaattcacagtaaaaattgaggagtgtgaaaaacaaagaccgtggaatctggtaactgattaactattggagctcaaaagcacttgctgagctgaatagaaaggaatgaagacaggttttgtcatgcctattaggtctgaaaaactttttaggttaaagaatacctggatcttcctttcatttatattaaaaatcttccttttatctctctctttacgtaatccaattaatttattttagtagtttgtatcatgtaaaatgaaagttaccaatccctttagatttatgttggcataccatcctacccctttatttactgatattagattgaattgaagcacatgtcttctagggcatttaatttaacataacagctgacatatgattttatctgggaatttaaaatttttttaacatattatactgaatgctttcctgtcatcttagtaggactttgctttgagctgagcaagactgatgcatccttttcattgtccctagggt

SEQ ID NO: 66020 - DNA, 1749 bp, Homo sapiens
ttttaagttatatttattcatcccttaagatgtgggacaggtggaaaaattacctttccactttgtatttatgatttctaagtactaaacttttaaagcctgttaatattatcccttcccaggtcttagaataattacacaaaagtactggactggtttaaaagatatttgattctagtctattttgttcatttgtagaatttctagtggtctaaaaacgattcttttacaaatcaggagaaataggaatacctactatcggtttgaatctcaaacgaacagccacaagaaaaatggactttttaaaaaaaattatctaacagcatgttgtcccaataaataatgctgaaggagattccttctcgtttcaaatttgccagaaacttcccgtttaacctcagcaaaatacagatcgttttgatctatggcgttaccgcacaaccctgtcaggtcacatcactaaactgcagataacagcgacaaggccgaaaactatgttagacggatccgcgtccataccccccatcagttaattttaactcttcattcggtacaggtcactctacacatgcttccctgcaaaatgcttaagctagacacagtgtacagataactttcacagaaccgcaagggcttgatgctcccccaacagaacggcttgagctttccccagcgcaattcagaaatgctgtggcggtcgccagactcttcgggtagctcccggcagctccgaggtagcgctcccctccccaaccatcgccctccgggatgggccgcaccgaagagcccgctcctcagctagggcacgaagtgcgccgccgcgatgggcagctggaggaaggggcgtgacgcaagtggaactcccgcgtgacgtcgcgcgggctcccgggcggggcgggtccggccgcctccgagcccggccggcagcccccggccttaaagcgcgggctgtccggaggggtcggctttcccaccgaggatttggcactctggtgagggaaaagggcgaaagagaaaagcgagcagccgtcctttcacagcctcagaaagtgctcgcttcccttcgggggctttcgcgaatcccgaggcaatctcggaggcggtgagtaaaagcaatctctttaccccacccggagctctgggtcggagcgactgcttctggtctggagctgcgtgcttggcgaagggctcccggggtaggggtggctcccggctctggggttgtgtctgatgaaataggccgggcccgggctacactcggtggtggtggaccggcgggaggacgagcgctacctcagtactacttctgggtctcccgcgcgggctgaggaagcgcctttcgccgccaagcccgccccgcgcatgcgccgactgcggctcgcgcgcgcgcttcggaggttttttggccagacccgcacgcggaaccggcgcgggcacctggggagaaatggatggagaagggacctggctggaaagcctttgccccgctgctctgctccgcccataagaggacccctgaaatgtcccgtgcagtttgttcaagtcccctgtgtgatgaaatgtgcctctcgccttacccgtgtgagaatacctgtggtgtggcagcgagtattttggtgagcacctgcagtgtagtggtttatactaaggaatacacacaaattacaggcctttgagcccagaatgcaacttgggaggtaagacgtgacgttctgagagattgaaaaatgtacattgtcgtcgtgcctc

SEQ ID NO: 66021 - DNA, 2391 bp, Homo sapiens
tctataaaaaatgattcctggtaatctataagataaagttttaatttcttaacctgctattgaaaactttctaccgtttattatacccagtctttgttccactgattctctctgtagaataatctcctgtccagctcagttgccctttttttgatgaatgccttcctgatcttctcaagggcccaaagtaacctctttctccttggaaatttccttagtactttatttgtacttctcgattgcccttgtcacttttaaacctataaaacatgtttatgtagtatcttgtctcctttgttagactgcacattgctttaggtcactgtctatatcttaatttttttggatcctccacgaaagtagtttaataacctcacatgttgtagatagtccagaaaatttactcagtgtaagaaaatatgtttagatttataaaccactaaattattaacaaattttagagtacaattaaccttctttggtgaaagttgattgtatttactgtgacctgatttctgggatccacttcttttgctaaaacacatgcttaaccagtgacatcatactaagcattgatgagagttttatgctggttccagtagaagttacagcccaaaactggatttctgctttacaaattaaataaatacagataggaaaatttggtggagattcaaacaaacagatactcttcaatggatatatttaagttactgataaccataattattcatgaaacctagagtatgactaagaagaaaatttgatttgataaatgtgcttgttataaaaattacactgatattcagcgtttttggtgtttttttgttttgttttgttttgtttttgagactctccgccacccaggctagagtgcagtggcactattttggctcactacaacctcagcgtcctaggttcaaatgattctcctgcctccacctcgaatagctgggattacaggcatgcgccaccatgtccggctgatttttgtgtttttagtggagacggggtttcaccatggtggccaggctggtctcgaactcctcacctcaaatgatccacccacctccgcctctgagtgctgggattacagctgtgagccactgcgcctggcctattttatttttatgatcaaattaatttcaagatagagactcttgctaaaatggtatttgaaattagtaggactgagtaaccagatggaatgctttcttgtcctcagtatgtataattatactccctagtacatgaagtaccctcttttgcctgcaagcattacataaaattatcagttaatcagttacatggaactggcacggtgtgagatgtagtactccctacctagtaacgaattagttttgcgcacactagtgttaaccctgaataaacattatgatttaggattagaagtactaatttcttcatacatgctgacatattttatttgaaagcctaacatagatgttaatataaatatattatttgccttctttttcacattgtttttaagtgaatgaaaggaatactctacaggaagaaaataaaaagctttctgaacaactccagcagaaaattgagtaagtattttcctccaaccttgttattttattttatttagctatacaaaccatgaagataactgtaagagttgcagatttcattttaaaaattatgaagtgttctgtagttaaaaaatacaaagaaaatcactacatttttgtgttttgagagtatagtgtgaatgcatctcttagattagtgcttgaagaaagtgtcaacattgtaattaaaacattttaatttttataatgatttattataaataatacattattaaaatacttatatttcaaacagatgtttgagttttgttagctcccttccagccctgtcccagaagcttcataagggcaaactgaataagtgtttcctcttatatagtactcaggcctgtagaacttcttccttcctctgtttttctcccttttctccccatttctcttaaagaataaaaccagtaacttttatcttgtgtgccacttcctcttgtgttttatgtttattatttctaattctcactgtgactttgcaaagtagttttattatccccactttacaaatggggaaaccaaaggtcacagtcaaataacttgcctgtcgtcttacagctggtaggtaataggactgtcactcagacccatattttttctgaaaagcctcttttctttccattatccaacactgtctcaaaagaagaatatttttctagatatgatctgactaatgcagagcagagcagagatatgactaacttttagttcccatttatataaagcttatatactatttttgaaaacttaggattcaggataatcctaatggcgttat

SEQ ID NO: 66022 - DNA, 1321 bp, Homo sapiens
agctattgtttgaacacgtctagtagaagtttactgtttcccaagcctatttaaatttagtgagacaaaattattagaaaattctaagtttatagaaattacactgcttataagttatatttcttgattatgactgccttccaggaccatcttaagcaagtctcttctcctgtgctacttgacgactcttttgatacatgaagacagctatcatggccctcctgagtcttgttttctctagagtaaatatcctctgttcattaactgtggcattaaatatcctctgttcattcatgtggcattacttcaactcttcaaactgtgaatttttaaaaatgttttagttcgtcaatatctgaattaagaaatcaatattctaggtatagcctgatcagtggagcagtactgccacctcccctacaatggctataatgttacttcgttaagtttaaattatgttttaactggaaatgtaagttcttcagagtagaaaaggaaaaaagctgaatatttaaaacttttttacagactcatgaagggaaaccccagatccataattataggtctttagggaagaaaccaactaaaacagttttgacaggagtttaagagggagcagaggtccataaatcaaacagctcaagccatcagaaggaaaagtgaaaggaggacaagtgtgcataattaatttaaccaaaagctgtgacgtgaactctttctctcagaaaatcagtgagactagtgttttaaaggatgaacttggttaacatatggagttttgttttttccttttatgacaaaggaagacaaagccagcactcatttacttagtttgggcacctctagttagagctagttttgtttgtttttttgttttttccttttgtgatcccagcttcttccacattgactctgccaggaaatcaattgcttctcgtgactcattcatgtttcaggtggaatttttatgactaataggcaagcaggctgtgacgtgattagttaaagctaggtcagatagatttcacactccattaatttataagcctttctcatatgactttaacttactgtttttccagaataagaaaattacaggaagagattaaaaaattagatatcagatctattgcacagaatggtgacttaataatgattgtatatttcagaactgccaagtagattttaaatgtttttactacaaaaaaaagataagtgtgtgaagtgatagatgttaattagcttgatttaatcattctacactgtaaacatgtatcaaaacattttgttgaacccagtaagtagatacaattattatttg

SEQ ID NO: 66023 - DNA, 1697 bp, Homo sapiens
tcgcatattgtgtacaaaaagacttgacctggagccggcagcaagaaatgtgtaattagaaacacttcccgaggaaattaggtgacaagtgaaggcttgaggatttccgagggagcctggagctgcagatattcattatgggtacttaagaggcacagctgcctctgctgaaaaccatgtcaaatgccgtccgctggatgccagcgtggaggccagcccagagccagagatggtggctatggcaacacgctactccatttttaaacttttcattacctaaaaggaaattgcttaggctgtttttctttttttcctttttctccctaccaatttcagagtttgtaccagcagtgaatagcctccaggtctaacatttcctgggtaatgagtgactagctgggtgaagtgcttttggccttacctccagccttggcaactccagccagttattaattgctgcaccgggaaacactttccaatcaagctattatttaatcaaaataaaagaaaacgaactattattgctgtcaacagcaatgagcaactctccgcaggagtctaaatgggaactgtggaggttttcactggaagaagtgttcctctgggggtcagataagcagggcaacgtgaagttgcgtggagtacccttgggaactggttcttgtgggaggagagaatgttgaaccagcaggaagacgcagagagattacacacaccctgtcctagatctcagtcattcatggtcagttaacctgtaaccttgctgttaagccagtgccccaaatgcttctgtgggagtgtctgcaggggaaaagacagtccatagaagcatttgggctgcttctataagcaataaatagtaaaacctgtaaccaccataataaccacacttcctgagtacccccaatgtgccaggcaggcactgtgcccccaggtttatactcagatctcaagagttccccacattgccactgtggggagagtatagtcacgatccctctttcacagggacactgagtccgagagagatgaacttggccaagacccaccacaccctggtgtgaatagcagagccggggcttgacttctagtctctgcatcgagcagttgctttttttttttctttaagtgacaatataaacataacataaaagtgaccatcttaaccatttttaagtggatagttctgtggcagtaagtacattgacattgtatgcaactatcaccaccaaccatctctagaactttttcatatccccagctgaaactctgtacccattaaacactaactcctcattccctccttccccaagcccctggcaaccactattctgtctctaacagcgtgatgattccatggacctcacatgagtgaatcatacactatttgtcctttggtgactggcttgtttcactgagcgtaacgtcctcagggttcatccacgttgtagtatgagtcagaattgccttcctacttaaggctgaattacattccatcgtttgtatacaccacattttgtttatccattcatctatggatggacatttgggttgtgcccatgttttggctgttgtgaatcatgctgctatgtttacttcttcttttttttttttttttttgagatggagttttgcccttgttatccaggctggagtgcagtggcatgatcttggctcattgcaagctctgccttctg

SEQ ID NO: 66024 - DNA, 3663 bp, Homo sapiens
gcactccagcctgggtgacaggctaaaagaatatatatacatatctctctataaaatatatgaaaatacaaaacagaaatcaaaatttaagttttacgttatttccacagaagatattgttagtgataccccctttttttttgctcctctttgcttatcttatgttctgaaattaacatttatcatttttgaatgatggaaaatatattttacaggagcaccgttggagtctttcacttaacactgcctcccaaccaggccagtggtcatgtaaattaagtcaattgtcataaaagggcttggaagtttcaaggtagttagccaaaataattaaaatcctggtgaaatttcacagagctggccattgagctttgactccactgacatgaggctgctgtaaacagacaccaggctccatgttttcaaaaggcctaaaaacagcacaaaataaaatataacaacgattgttcatgtaaagggccacgtgccatctctgtcctgagcaaatgtaacctgaaaccctctctgtctggcactccgggttggcggcacctctctggacggtgtatttgctctccattactcaatttactttcctgaacttgaaatggagtggaatttcaatgtagagttacccattagctccagggctaaatttaaacctttaattaaattaatccgttgatctgaaacacattgcttctccctcaaaagtgcagcaggtttcttaggtgtcacagagcttaattcagtgtggcaattgttccttactgcatttgttaagttgcccataccgcctggggaaacccgcacacgttttcagatccctccaggtgaactcctccaccctgtccccgcccccgcccccacccccaaccaaaacaagcattcgttgtgggtggggactgcgactcctcccagattcagagctactgctctgggagggccgtcaggaacccgtatttatagaagacatggtaggtgccaaacgtgcttatgagataaacgacagggtaactgtccacattggtcccagtttatgagggagaagagatcataatctacaaaaatttgcaaggtgaccaggggaaaagagtgtaaggtcattttagcccacctgggtcttcacagaaaatggagcacatttcagagccaaagtaaaaaatttgcgttgtcctttgctaagagagagatgaaaagtgacaataccatggattggggatgcgtgagttcgttggccacatgtaagatgttcgtgcttctgggctcttatgcatcccaaggcgtgcatttatcccgggggctgcatccttggcctgggaatgaatagacccaactgcaatggttgttagcgatagctttacggtgggacagtctccataggggctgtggacttacccgtgttattatgaaaaggatctatttacttctcggggaccaacggccttgcggggtccaagtaactcgctcgcagtccaaaactctgcaacgctccacataaccgtcctgtagacccacaactctcccaggagcacagccccaggacctaacccaccgggttctgctcgctcacccaattcccagtgcgagcgcgcgggggaaacgtgctcgcctcccgcacctggcttccgcggccccgggagtcgccaactctcccagcaggcagctccgacaacccggacagccgggccgatcccccgccccaccacccgctcggctctcgcgtcctcctcttcctcctcccgtggccccttgcctcccgccgtctgcctctgcggccgccgcctgcggctttgttttcctcccaggtcgcattccccacacgtgattccgtgttattgcaaagagggctttggagcgcgagcgcggggcgcgcgcacctataaatacggacacccggccccggagcccgcgagccagcggccaggcgaccggcgggcggccagccagcgagccgaactagccgagctaggtagcgaggcgtgcgcgtgggccggggcggcggcgcccccatccccagcaccgaggggcgagcatggcccgcccgcgggggggctggaccgccgcgcacgccgcccgatccccgcgccctacccagcccgggtcgccgccgctcgcgcccgccgcttagcgctcgggcgccgctcgcttctccgggcatcgcggaaatcccgccgcagacggacacaatggcggcggcggcggcggccgccaccacggccgcctgcagcagcggcagcgccggcaccgacgccgcgggcgccagcggattgcagcagccgccgccgcagccccagcctcagcccgcggccgccgcgccggcccagccgccgcccgaacccccccggaagccgcgcatggacccgcggcgccgccaggctgccctctccttcctcaccaacatctcgctggacggccggctgccgccgcaggacgcggagtggggcggtggcgaggagggcggcgcggccaagccgggcgccggcggcgcctgcggcgcgaggactcggttcagcttgctcgccgctgccgagcggggcggctgcatcgcgctcgccgcgccgggcacgccggctgcggggttagccgctgggtccggcccctgcctcccacagccctcgtcgctgccgcccttgattcctggcggccatgcgaccgtgtccggccccggggtggcgcgggggttcgcgagtcccctgggcgccggccgggcgtcgggggagcagtggcagccgccccggccggcgcctctcgccgcctgtgcccaactgcagctgctcgacgggtccggggccgccgggcaggaggagttggaggaggacgatgcctttatcagcgtgcaggtgccggcggccgcctttttgggctccgggacccccgggagtgggagcggcagtcggggacgcctcaactcgttcactcagggaatcctgcccatcgccttctccaggccgacttcgcagaactactgctccctggagcagccaggccagggcggcagcaccagcgccttcgagcagctgcagaggtcccggtgagtatccgggatgcgacgcgcacccaaccctgcgtcccgcccggcgctcccagcctccccgcggtctctgggctacgggacacgggttgctcccattttcccgcgccctgccggatcctgtgctccgggcccgaatcccaaaccacgagggcacccaaaagagggggcgtccccagggagtgcggggttacacgtgtttgcacgagcccagcattcgcagaggagcaccgcgcttgtgcagtgggtcgggaattgggagttgcaggagcccagtagaaagcggcgtccgagcctccccacacgagatcacaaacttcctgaaacccggtccagacccggaggcgcactcttccccgcgtggggcgagactcggccgggcgcagagtggagcagtgcaggccggcagctgagcggcgcgtgtgagcctgaacttgtagcagacacgcgtgaccctccggagaagttcttgcctgcgctccaagtcttcttgcggcccggggaaacttggctttttccatttgctttcctgagcaatggaaagtccttcttacattgcctccaactaggcctaggggggtggggaacaaagaggaaatagggcttgagggatttttttcctattccaa

SEQ ID NO: 66025 - DNA, 2571 bp, Homo sapiens
gtcacttaatctcttaaaagcagattctgtatttctaaccagttccctggaatgcagagtggccaccctttgaggagggaggctttacccactatgatgatttgttcctgttgtcaggccaaggaacccagggctcaggagatgttaagtggcctgcccaaggccagttggcaattaatagcagagctcaggctcactattgctcagctgacttagagcttctgcctgcccctcccgctgcattgcccctctttggaggaaatccaggcttgtgctgtaattgtaatctatgtcttgactgaaaagaaaaatgtgagcccaccacagatcaagaatcagggtaagaaaggggagatggatgctgtttcctagctttttcaccacccgctttgtgacatcaggcaagtcgccagtctgtgtgtgtgtgccccagctgtgagccacctgacccctcaggatttcagaagtctgtaaagaactttgatctcagcagtaagcaaacacaagttattgctgagccatttttccagcaaccatgggttttggaggtcggagttgtagccccaggccaggcgggggcctgtggatggtgggcgcagtctgaggcttccctgctgcccttgttgcagtcacaaagcctgcaatgtgggcgagctcaggagaaatacataggaagcctgctcactgctggcaagtgcctggggaggccagtgagctcaagggtgagcttttgctctctgaatgggtggggaagccatcacatggctctgcgccacgtgctcagtagctttcccaggaagcgccgatgcctggactttttttctctcttcagaaagatagcggtgaggtggcagagagccaagggcaggttttctggagggtagaataggaggcagtgcagttgagcctgtgctgtgacctgatgtggcataagagaggtcaaagcaggactttgagactcctgggttctgggtcttagtttccttatggaactcagcggttgggacagatgagcctgccaccccttctgggtccaccattccacgtgtctcggtcctgtggcctgctgcagggtctgggggcatgtttagcctggggacgtgtggataatccaacctcagaatcaggtacaaagtagcattaagtttgttccatgtggctctgatgggcagaacatgtaactaatgaaggaataaatggatgaatgaatagggctgccccagagtaagggagaactttaaaaactaccttcagctgtgttccttcaggcacgggcaatatcgcagctggactgacaatgttaggaggccatccaagcaggaagccactgcctggggaggcagtcagtcccccagatgaaactaccctcacaccaaggacatgatctgtagtaacctctattgctaaagggccttcaggtttacaaagtactgttgtacatgttgatatcagaccccagacaccacagaggggcaggagtccaaggtcacagagtgaccagggggtgacttaggttgcagtgttatctgtcagttatgtagaaaaggaaatcttggtattgagacttaatgccttgtatcacttattcattcaacaaacattgaacacaatgagtatcaatcatgagtcaccgctgtcctactcatgggagatggaggcataaaacatggtccctgtctgtgctgggtgacataagtaaacgggcaagttggtagagtggtgagtgagtggttagaggtgagcttgttgtttgaactccccccacctggggaggggtgcagggacgtttcacacccttccctgtggcagctggcacagggccttggacacggtatttttatttaacaaatatgtggcaggcattattctaagcactttgatgggactgagttcatacctagaaacaccctgagacagtactaccttcacctccatttggaagcacagagaagttaagtaacttgtctggggtcctgtgctctgacccacctccctctgctgtgctacaatttacaggtcaggctcatgcatgcttgttaaataggcttcagctgaactgagcagaagttgacctaaatggcctcaagggttcccgatcacttgtgatttccttgtttcagtttccacttttctgtcatctagggaagacctctgtgcatttgggcccagaggacaggccaggttttaaatagggattcctgtgactctggcaattaactcccgccctctgcctgcctgtgcttcctctcttcttggccacagctgaatccctgacacctttattgcctctctgactcacctggtacattacacatcttgtgttatatagagcatggtacaattagcaacaggaacctggcctcctaaagtttaaagctctgctgggtcctcgtctgtgaaatgggaatgatactaccacctccgccctgggcgggtttcccgctgtatcttctcagcatcaccctttccccaactgcccctctggctgtttataaataatactttcttggaaaaaccacacccactcgtgcaagtcttgcctttggctgcctttgtgctacaaggacagaa

SEQ ID NO: 66026 - DNA, 909 bp, Homo sapiens
aacccagccaggccctcatggacgagagtgcactcaggtgtactgcacccccttccatcctcactgcagccctgagctgggtggggcagcatgtgggagtgagccaggaagatggggcacaggggcttcccggggactgcagggcaggcggcagcagggagggcatcgggaggaggtgagctcctgtggacttccatcagctcctcctcgaacccgcatctgcaccgtgcgtgccttggccaggccaggacttgggagcgcctggctcttccttctgagcctggcagggtgctgctgtaggagatggcctccccctggatctggctccttccccacctgaagcttcactcccagggcagagcccatgtctgtaggctccgcctgcatgaagaacagagggcagagtgagcacagacagcctggggtcagaggggaagtgtccggcaactgtgaactttgtcactgacatcatcccaaagagaaagggctgaatagtcccatctccacttttggagtctttttcaaagcgtgggtaacctccaggtgcctcctaggatgtgtggtatgtggctgtgtggcaaacgcggcctgggaacaagtgttactctgtgaggagcagttcagtgggagaaggccatttccctgcaggagtcatacagaaagctacgctgaaagtcaaatgagggagctggccttggtccacatactcagcgagcatgcaggagaggtgttcgcaggcgcactgagtggctggctttggtgttagagtgagtgacatcgcgatctgactgaggtgctccctcactcctgccacaggaaaatccatgaataacgttgagaagcccctggagtttcgagaggctactagaagccatggtccttggaacaacgtggccactgtgagccgaa

SEQ ID NO: 66027 - DNA, 2068 bp, Homo sapiens
ataaaagtcagtgagtgccgtgacgttgagctaagtgccctaaagccagcctttcttcattccagctatacttggcattctcctggctgtctctgctggggagggtccggagccgctaattatcattttgcattttgcatgtgatcttcaggtagtgacctgggagactttatggactatgacccaaatctcttggatgacccccagtggccttgtggcaaacacaaacgcgttctgatcttcccttcctacatggtgagtagcgtggaatggaggctccgtttgctgcaccgtcagttgccccacctgggttggtggccggctgggggcttgttcaaagactgctctgcctgggggaccttcatgaggagctccccggtgtgggtgcccacggaaggaccagtattgcctcctgtccagaatcctgctggccacctggcctgcaaacaccactttcaaggctgggctgccagtgtccacaaagtcaccagctcaggttgggggaccctctcctctgaagggggatgtccgagcttatacctccacaaacccccgtggagaggaccaggcccatccctggtagcgctgagttcaagtccagctccgtttggagttccttggtggctgcaggccttcgtgtgcatgctgagcaaacatttggccccaggctggggatgacagaattctctcctgggaaagtgaaagtaggacactgtgggtgttacatgcaaaacctttctctgctgtttttatttcatggactcttcctgtttttccctgtgtgtaattttggtttctgctctcggctgaccactgtttcccaccaccaagggctgccatctcctctgcagacaccagaggggcctggcggggccctgggcgctttctctgggccgacttgccctgactcttgcggcaagcagagccccgcctgctgtgggaggagggggagctgcactttcagaacagtcgattggccaggcctgccatgcacagcatcaggtgggagacatccacccagaatgcccccaccacctccctgcgttttgcatgtcctggcccatgagccgggcctggcggggccggcacagccgagcgcttcctcctctggttccctccctcctgtgctcccagcctgagctgttctctggagccccagccttaggagtgaaccagggggtcttttttctcccctcggcttttgtgtctgcagtagccagagtggaaaccaatcccccgtactcaaaggaaacccagatcttcattcagaactgagggttctccgctgtttgtcagagaaacaccaggcagaacttggggccttgccagttactttcagcacttatcctcttgttctttggcacatagttcagtggtcattttcgtatgccacacggcgtcagaatgcatttagtcattggagaatttattcaagtcaaaggcatttagtttgaaattgccgcttctcctcactctccctcactcatgccccaacttctaacacagaaagcaaaatcagagtcatgtataattacttttcttccactctatgatctgtttatttaaaaaaccagggcatattcatctttggcagaggcaagcacgtaataagtgttcaataaatgaccagaatgattgccctgatgtcaaggagggagcaactggtgtaagaataaggatgctttatgtggttcactgccttacttattaaaattcactttatttattaagcaacatggccaggaaactggctcagggagtccaagtgaggctttcctagttgatagacaggaaatgggggatccaggctagagctcctggctcgaggctgttttcacgttgcccagctgtctctgaattccacattcctcagcagtcagccccacaactgccgacctcggggttggacatgaagatcattctttgggccaacagtgtagcagatttctaggtaaccaagagaataggaaggtacactatttcgatgttggcgggagctgtcctaacagacacgtgcctggtgataatgccgacctctccttttataggcctagtgttgggctggtgc

SEQ ID NO: 66028 - DNA, 1472 bp, Homo sapiens
ttagtggtccattactttttaaagatgcattttcattttaaactgtctcctggcctgtggatttgtggaatggacagttttgtgggttttaatttatttgtgaggagtcggggctgagaaggcattttatcaggaggtctccttttgcacgtccatgacatgagcttttcggaggcaaaggaagtggaggagggtgagagatgcaggtcactgccagaggcacctctgtgacacggaacattccagacacgtcgcagccttgggcttcggcgaggaggaagtctgagcctgtgaagcgagaaggccaggcagtagactggctctgaggttttgccctttgacctcctccacagagggcagcttcagccccttgtaagccctgccccctctcaggactgccctgaggcctctccagtcctccccacactcagagatctgtggggaagctccgcccagccacactccttgggataatactagccggttctgcctgattccttttcccccggagccagcctagggggcccgggactcctctagtgagccttgactgttaggtaagagacaggaagcagacaagccaagaggttgctgcagctgcccccaggaggaaacgggcagcagggagtgtggcccagcccccactgtacccctccaggggcccgagcccttgccagcccaatgacaccttgaagtcaccacttttcctttcttgcccgctaataaaacctatttaaacaggaaattcataccaaatgcaaatgggttttgttttccttggcattttgttgttccgatcacagatttccctgccagggtgtctgtggttatcagctgcaggctcagcttggggcggccgcttcacacaagccactctgtaccacgtgccctaccttagtgacgggagtaaggagcttccttcccctccatgtcattccttcctgttcccttcattccccaacagcaaataaaactgttgaatgctctggctgctgagttctttatctctcactcagacgtttccggcttagtgctgaacagctggccccttgccctccccagccctggctgcctcccgtgactcctgagagcctgaagcctttctgccctgctgcaagcttaagtgggtggggtggggggaggctggagaatgaagtgcatttgagccaggtggttttgttacctgttcagcaacaaaagacatctttcaaatcaagggggatttttggggttggggatgggggcgcgccctgacgtcacctccccggggctgttggcacagttgggtaagcacagtgctgagggccagcaagagcagggagtaaactgagtgtaaatctggaatcacatcaccaacaccaatgtcaataaaaagcagcttccagtcatgcagctgcaaagcaaagctgagattcaaagctggaaaagaagaaaaatggcaggtgaaggggaaaggtcctcttgccacctgc

SEQ ID NO: 66029 - DNA, 1414 bp, Homo sapiens
tattcatgagtctttcaggaaagagatgggcaattcccccagcactgaaggttcctccccttttagaccatatagggtaacttcctgacgttgccattgcatttgtaaactgtcacagtgctggtgagagtgtgttttagcatgctaatgtattataattagagtataacgagcagtgaggacaaccaaaggtcactttcattgccaccttggttttggtgggttttggtcagcttctttacagcatcctgtctaatcaataaagtccttgtgacctgtatcttgtgctgccctcctgactcatcctgtgactaagaatgcctggcctcctgggaatgtacccagtaggtgaaagagaatagactttcaccatctattctctctgaagcctgctacctatgaggcttcatctacataacaagaatctggacccccacaattccccttatcttaatgcaagcatttctttctactgacttcaagtcttgggacaaagcttaactctttcaacgggttgccaatcagaaaatctttgaatctacctatgacctgtaagtccctgctccgagttgtcctacctttctggtcaaaccaatgaatacctcccatgtactggtttttatctttgcctgtaacatctgtctccctataatgtatataaaaccaaactgtaacccaactgccttgggatcgctttctcaggaccccttgaggctgctcccaaggcctagtcactcatattgactcagaataaacctctttaaaacattttacagagtttggtttttccattaaccacactggcaaatgttatttcccgtccctacactcaatcatacccctggctggtgccacctaccttccctctcattcctggaacatgattggtcttctccacctctgacttggtcctgtctactcagcctttccaaaccccagcctcctgttggggaggcagaatgctgtgagagttaagaggcaggggatgcgtgggcaggtggcccctctagccagccaaggaccttcaggaaggtgctgacctcctgtgtctgtctcctcaacaaaatgatactgatactgtcagacctctgagcctaagctaagccatcatatcccctgtgacctgcacacatccagacttcacccttagtggcaagtcctgcttttctgggggaggggcaggagccctgacctcttatctctgtgccccgatcccttatttccgcaccccgacctcttatctgtgccccaaccccttatttccatgccccgacccctgtcctgcttttctggagggtaagaacccctgaaccccttccctccatgtctctacccttctctttaaacttgcctccttcactataggcaaccttccaccttccattcctccttcttctcccttagcctgtgttct

SEQ ID NO: 66030 - DNA, 1445 bp, Homo sapiens
cgctgtcccaaaacttagtggcttaaaatgattttaccatatctcatgcttttgtggcaggaattcattcagggactgctgggcagggtgattcttctgccccatgtggcactgactgaggtcacctgatggcactcggctggcagatgggctggtctggaggacctggatagcctccttcgtgagttgagtggtttggcaagccagctgcaaggctgggctcagtggggcctgtctcctggagcacccatgcctggcctctcctgcacaacagctcagggctcctgaggctgtcagaagaccaaggcagacactgcaaggctgctttgacctggccttgggagtcacatagcaccatttccatcacaccttattggctacaggtaagtcgcagagccagcccagacccaagagaaaggaacagaactgtatagcagaatgaataccactgggatggaggtggggcatctttggagacaagccaccactgcttctctccgggctgggctcagggacacagcctgaagccagggacattgggtggggccaggagaagcccaaaagtctcacccctttgactggcttcccccagaacaaggatcaaaggaccattaagtaacttcaaatgagtcccagccacttgaacttccagccaattccatatcctatttcaatactttgtccaaggcaacttctcaatagagatgtcatgttccaagtatgactaactgcttatggtattacctgcttgtgctttcaccccaatctgtgactgtactcccttttttgggcatgcagacccagtgaaaagaatggtgtcctctcctgacattgtctctcagggtctggaagcttttccttcaatcttcgagctcctcacctatctgaacatgccattgcctgcaaccaagcttgagaaccaacaaacagtggctgcgggttctggaaacacgcagagtgatagttcaggtgagagcagtgccatttccccagtgctcctggttgctccaaccccattcacgaagagtctcagacagaacctgagggaggaggctggggaaagaaactgggacactctgggaaggcagctgcagtgcaggccacagaccctgcccggtggcaaagggaaggagcatggccttcaggaagagtcacaaatcacctcagagatgtgaggaatccacacctcagcacttcttggagaactgacaacccctgtgaaacacggggacctcatttctccttctcaacagaactctctagcatgaaggttgaaagcatgggctttgaataacctagattcgagtcccagctgggtgggcctggaaaagttactgagtctttctgatctccttggtaaaatgaagagaatgtcccctgcactaccattgggaagaatcaatgacagggagcctggagagtacccagcacaatgcttggcatga

SEQ ID NO: 66031 - DNA, 1896 bp, Homo sapiens
tcacttttcctcaaaatgtatttcatctaggtctcccaattcattaatatttagctgtttgaagaaatattttacattgtttgtgcctgtttgattaccttccttttttgtaatgtttctcttcattccccccacccccttcattagtcttgactgaagttaactatgttgttagtcattctttccttttgcaacttcttagacatggcctgggacggtgccaatggagatgtatttcttggacttgctgagaaaggctccatcccactgatggatgttggctgtgctggcagctccgcataatggaacacttcgcttgatttataaaggacccaacttgtcatttctatgtcctcaccattgtctttattgtccttgcctgtttttacccgctgttcaaggccttctttgattggcttctctccttgttctctgactgcctaactcaggtgactttcagtccagctggtaaaaagggacaactgccctgtcccccaccatacccacagcctgggatttgtgcctctgctcctccgtgagcctctttagcttaggaggaatcctgtctgccgtgagatagatagctggtctgctcattcctctgaaatgcaccttttgccaaaaaaaacacatcttaaaaattttaaaccagcccttacttgaaaagaaggttggtttagcagccactccggtgccttcgccgtctgccacttcctggaaatgtttgtatagtctcctgccttctcctgagtcacctttccaaaattcaaaattctcaagttttatcacctaaggaacaagtgtgctgctgcctgagaccctttatcttatttctgtagagaatgtagactgaagttgtttgcaccgtgggacaactgtggggttggacgggcccatttttaatctattcggtacaggcaagactcctctgaaaggatgatgtgttctctccccagcacgtggtttctacgtgcgtgatgccccactactgtcctattaatcagtgatctgtttacaagcctatctcccctctctgcattgtgaactcttaaggtcaaagacttggaagccatcccaggaccaaggtcagtgccgcagagcctggctcagtcacattcgacaaagggtggaaagaacctgagccaaccgggcgcggtggctcatgcctgtaatcccagcactttgggaggccaagacgggcggatcacgaggtcaggagatcaagaccatcctggctaacatggtgaaaccccgtctctactaaaaatacaaaaaattagccaggcgtgatggcgggcgcctgcagtcccagctactagggaggctgaggcaggagaatcgctggaacccgggagagggagcatgcagtgagccgagatcacgccactgcactccagcctatgtgacagagcgagactacatctcaaaaaaaaaaaaaaaaaaaaaaaaaaaaaaagaacctgagcctctgatcctccctggagggcacatgaacatgcaacaggcttggtactggcttcctttttgctcacttggaaagtcagcacaggggaagaggctcctcatgtgcttgaaagcttaaaatttgctctgagacatgtaggaacatgtagtgtcagcacacaaaacaaaatcttttatcattaagcccaaaacaagcatttaaaagcaaaggggtaaaatagggaaaagaaaaaaaaaaaggagccccctgtgactctggagcacttggaggcttacaaaggaatgcactggtgtgagtgtgtgacaagaagcaaaactttaattcctgacttccagctcctgggtgacaaggtcatccaggatgatcagtaattctactaaaaacacacaggtgtgaaatctacccagttttcacttcctgcctagcccttg

SEQ ID NO: 66032 - DNA, 3265 bp, Homo sapiens
ggtgaggatacacttctgtgtgttcagatgtagccctccaactggcctatatccctgagtccttcccaagaccaagcactaatgatcacctggttgtctagacatctcctagccatcagtttccaaaatctatttcccagagtcctcaggtttggtggaggttattttggaggttgccttaaggagcaagaaggaggccaaggggaaagctgagcgggtgggattctgaacccaaatcttcccttgaactggatccatttcatcagttttatatattggagttctatgtgagatttgcttgtggaggaggaaaaaagtgggagaatcctagctctagagcaagcgcgaaaatcactgtcttggcggagggacttccatgggccaggggtcctggcagggcccaagctggccctgagcatctaagggtgctaagtgacagcctgctggtgacataatgactgcttccttgcctgcatccaccaccactctctcctgccactcactcaggtcactagcagtgaccctgaacttcacagagaggaagacacagcggacagcacagaaagcatacaaatgagtgagcttacgattacctggcacagcagctaccatggaatctgtagaagtacaggaatgggaagtccaggacgctgaagagatcacctgaggggaacagcaatggtgaaacagtgacccatgaggcctcacatgaccctctgccccattgccccaggaaatgcaaggaaggcgtctttagcagtcctgtgctttcagtcccctggcattgaattcactccagcattcccagggattctgttactgacattgtcttatcatggtaataacagtatgataataataatgcccatttagtgagagcatgccttgtgcagggcccaatactaaaatctttatgtatttatctctttcaatcttagtaacaactctgtgaggttctattgtgcccatttaaactaaggctcagagaagttaagaaacatggctaagattgcacaactcttaaacaatggagccagaatgttaactccagtcaatccaaaccttaggctgtctcctctctaccaggcagccaaccctgcacaagggagcatgcaggataaaagaatctttttcaagactcttttcttcttttctgccttatatctaaaaaaaggtcatgaatgtactgccctgacattttttttttcatttttatgtttaatgactgcaagaacagcacgggggccagaccaactgtgcaaattcattttagtttgaggtccaaagggtacatttgtttcttgtgaagtaagttcattcttttagttccacttggtgcaagaggaaataatcacacatattggctgcttccctctctggaatttgaacttggtcacaaacaagaagtcaggagattaaaaaagcagaaagccttccaaaaatgtccggagaaaaggaattaagcatttccacagcagatagcttgtcttccaaatctggaatttctgaaccccttggagagcctggtcttccagacccctgggccttggcctgtctctcagttctgggggcctgggggagagggctgattttcctaagtattgctagtatattaagtgtacagtggaacacacaggcagcatttccttcaccactacgctattaatcaagggtttcagatcaaaagacatgatgggctcctatgctttcttggagacccaaacgatctcaaatgattcaactatctattggtaaggaaagttctgagttcaatttctttggagggctttttaaaattatgactgttattttctttgtgttgtttctgcgagtgagtgtgtgtttaactacaaggaagggatttcttgggatctggttttcatgaagcccaacaagatttcttgttctctttcagccacgattcctctgaatagctctactgtcaaaccgtgttggtagagggaatttgtaaatgacaacatcagttgtcatttagtgtgcgaagagcgtggatatattctgaagtccctttccccatagaagtgataggcaagggtgccctggggaccccagacctagagagtggccagagccctccattcaggcaaagtggagggagagtctgtccacgtccatggagaattcgttccgtctctttggcagctgtgtgctcttggccctttcccagtttccttctcagtgtgagaggaactgcagcgcagccaatgtgataatgaggaacggcggagagggagacgaatgaaacttaggaccttgagtcctctcaggcttcacccctctcagcacccagtctttcatcagaaatgctccagcagggtgaacgggactcatggcgcgtggcagcttttacagcccagcccaggctttggagggggtctaaagagcagaagtgtggtcagaggaagactaggagggaggaaaagaaagaaagaaaaaaaaacacagtcctcgggaaatcataacccccacccaaatcctgaaaactgaccccataatgagagagagaaaataagaatagctagcccttacctttgagccatttctaaaaccatcacacattggtttctcacacaccacttagctgacttcacacctgtccctcctcctcctagaattagcgagtccttgagagtggggatgctattttcctcacccctgcacccactgtgtgtcagcaccataaccaatatacccagcacacagcaagcactaccaaaccaagagtattggaaagacctgatcatctcttgccttccctagagctaatgttctagtttccagctggctctgtggtcctcaatttcaagctgacctcaaatattccccttcgatgccttccacctggcttctcttttgctaaagtagtactcctaagcagagagggtgcacggcaacccaggaacagcaaatgttagtgactgtgctataaatacccccggaagaggttgcagcgtgtggctggctggccccagccacatgcaaactcgatccaggagtctgctgcaaaacaacactcctgcaccatctagtgctgaactacacggcttaagcacaaatcaagtggctaaagagtttgtaaacaaggctgggcgcggtggctgacgcctgtaatcccagcactttgggaggctgaggtgggtgaatcacgaggtcaggagttcaagaccagcctggctaagatggtgaaaccccatctctactaaaaatacaaaaattagctgggcgtggtggcgggtgcctgtaa

SEQ ID NO: 66033 - DNA, 1941 bp, Homo sapiens
aaagttttgggcatcaatgactgaaatctagcacaggttggttctggtgttttctcttttggaataaaatatttcagaaagaaaagaaaaacacaagaaattttagactaagacacaaattagggatatatgaatgtttataataaattcttctgccacctcttagagtatgaatcttgaacagtttatcattcaagttaaaaataggttaaatcttatattatggctttttggggggagggcagtaaacttacctacagatctttgcaggagatgttttctgcataaaagtaaagaaacatacaattagacttttaaaactttttaaattcctcttaaaaggaaacattttgatcaagaggcaaataaattatgagtagatttatcaagagcttaacagcttgctgcactttagtatttattgaggctttttctgcttgggccaaatgaaggatgactcagaattccagagttgagtcacttcagcaaagtactttcaccattagaatgatgtttactcgtgaaagataaaatgacgctggggctgtgtcttcaaaaatcttacatgctaagaagaggagagagaaagaaatagatgtaacctgtattttaaaaagcaattaagctcttgttctatctatccatttatctatctatctagtatcactctgttgccctggctggagtgcaatgacatggtcactgcagcctcaaactcctgggctcaagcaatcctcccacctcagcctcctgagtagctaggactacaggcatgagccaccatgtatggctactctttctttctttctttttttttttttcatttttgtagcagcaggatctcactatgttgctcagtggtattgaattcctggcctcaagcgattctcctgcctcagcctcctaaagcactgggattacaggcgtgagccactgcacccaacctcaacttctattttagttctgtctctttaaatattccattcactaatccagctgactcagagcagtcctataaactatctggtgtgatatgaaaattaaaaaacagaaaaaaggagaagggacattttactccatcccgagagacaagggaaaaaaaggcagactggaggaatataaacttggcatttaaattacctgtaatgaagacattctgatttggactcacccttataattccttttgatgagtcagtttaatgaaatcagacttttgtactgagaactcatttgtacatgttagcagagagtaacatgttagcagagggtgacacagatttttcttctatatttgatagaggaaatgaacaggtacaattaaacttttgattaattctaaacatttcagaaggattattctgctagctgggaacaaactacaatttttgatgctagttcaggcagtgtgaagtatgaacatattgtttagacgtgaagcgctgacaagagaaacatgtggcttactacaaaggctaccttaagttttcatgtgtgcctaaataataaagtttcccctgttttaatgaacagattctatttttgcaactttagactctaatcttgatctttgtccaaccctgcctctgcagagcacaggacgcgaggccaaccgtgctgtactgccatctgctgggaagttagccctcaagagctgaaaggaggagggcaaaggtgatctggctcacacctgcgtaactgcccccggtatgataaatgtgttactcaaaaattcttttttttttttttttgagccagagtcttgctctgttgcccaggatggagtgcggtggcgtgatcttggctcactgcaacctctgcctcctgggttcaagcgattctcctgtctcagcctcccaagtagctgggattacaggtgtgtgccaccatgcccagctaatttttgtatttttagtagagatggggtttcaccatgttggcc

SEQ ID NO: 66034 - DNA, 1532 bp, Homo sapiens
agcagttactcaaaatagagctaaatgtaaccaaaacctcaacagcctagtgtaagagcagaaattgagaggagggactaaagggatgctcttccacttctgtgaatagcatgttcacccagtaacttccagggctaatgtttcaggccaaaagaaaaggccccttccatggaggggagtaaaagagcacacagatcctgggatacagagagtaaaaacaggcaatatgttcattacttagctccatctcccagggctctggatatgactgagttcatggcagtcattttccttttcaggatactcagtccaaaataacctagcaacaagtcctactgaggtctcagggttctaaatgggttattataactcctcaaaagtcatgctgccaaagggctaggggtggtggctcatgcctgtaatcccagcacttggggaggccgaggagggcagatcacttgaggtcaggtgttcaagaccagcctggacaacatggcgaaaccccgtctctactaaaaatatcaaaaattagccaggtgtggtggcgcacacctgtaatctcagctactcgggaggctgaggcaggagaatcgcttagaaccgggaggcggagattgcagtgaactgagatcacgccaccgcactccagcctgggcgacagggtgaggcggtctcaaaaacaaaacaaaaaaaagaagtcatgctgccaaaattaacaataaatagctgacattcctctgggttagctaactgaactgtgagggctactcacactgccaggtgctgttctaagggctctgcatgtactgaatcctttaatcatggggtaattaacagtcattggttctatgttagagaggagagcacttgaggcactgaggaatgagggaagctgcccatcacctgcctgccagtcctgcggtgtcacccctgctggcacccttagccaccacttgatgctccctctgcctgcctgacaaggagagccctttctccttatcaaactggaaagtcccttcccatcctgcctgactcagctcaaatctatccaccagggaagctttccttgctcctcccatgccgaattactggagctcacccgctggcccacccataccctgtgccagcccgagtgtacaggccagcccctccatccaactctgcgttaaggctaagaaatgcgtctcctacgtctctgcagctttaggcctagcaacatgtttgacatttcataggtacttgataaatcctgaacaaatgaataaacaaacaggagtattctaatattaaactataataaataattctgcaaggtagttagattaattcctcgagccacgtattgccttacagtcaaactgtgtgtgtgtgtgtgtatgtgtgcatgagtgtgtgtgtgtgtgcatgaatacacaaaggccttgttgtggatggtgaaaatgaactctacagctccagatagtttattttcataatctgagaatgaagtcacaaggaggtcaacttttactctccaaaaatgattctagtaa

SEQ ID NO: 66035 - DNA, 1021 bp, Homo sapiens
ttcacggacctcataatctaatgggagacactgacatacaaatagataagctgcaaacactcagataattgaccaagcagccaattatctgagggatattctgttacactagtcgtgctgtaatagatgtcagcacccccaaccaaaagatgaacagagaaaggaagatcccatcctccattgcaatggatcaggggtgacatcagtcaattgctattcttctaggaagtggcttttcccacttgacattaagctcacatgaatcaagggaggcaggatacaggcccatggcctgttgtgcaccagaaggaagcacagagcacatactgcaggcagggcattgaggaggaaggaggaggtgcactgggtgaaacggcagctggcctcactgcgggaggcccaggactttggaatgtaaggtcagcgaggccccagacatgtgtactccatgccctcttaaaacaaagaaaactgctgagttatatattccaagaggcatcagggtgtttgaatggccatggatgtgaggaaaagaaaacatgcctagggaacaccttgtattttaaccctcctacccaaaaatacaaagaaataactttaactagaaaagagatacacaggactagtaggaccaaacagacttgtgggaagtgttagaggacagcggagtgagcctctggctccagacgtgggaccacctcccaggcacaggaccccggtgcttgtgttctccgaagtcatctccctcaggggcaacagggccaaagcaacacacactcatggcacttcagacacacaggagaggcagtggactgcagagccaccatgctgtcagtgtgacggctgtctttctccaccacacaccaacctaagaccatagccgctgctaagaatacatttgaatcactggaaaaatggctgacaaaacaggtgtgggcaaggcaagtgtgaagggatagggcaaaaaggaaaaagaattaaaaatcaaagactcttgatttatattgtttcaaagtaccaa

SEQ ID NO: 66036 - DNA, 1994 bp, Homo sapiens
aggcttgagccaccatgcctggcctcttctcctcttattctagacttttcctgaacagcctcactcatagccactgcttctcccactgcctctacattgatgattcccaaatccccgttctcacttggatactgccacaatatctcccacaatatctcccacaagctctcaatgattattattattgtttttattcatagatttgggggtatatatgctggtttgttacatggatatagtgagtaatggtgaggtttgggcttccagtgtccatcaactgaatagtataccttgtgcccaatagataccgtttcaaccctcagccccctcccatcctccctaccaagctcccagtgataacatgcctaaatcattaccccgaacctctccctcaaatcatcctccctatccccaatcagccaaaccagaaacttaggtggcattccacctcacctctttggccttcacctccctcgtctaagcacaatatcctattgattttatttatccccataacagcattcaaatctgaagtcttccccaccaaccctcctgcctctgtctcaattcaggctctcatcatctcatgcctggctcacagcattagtcccttaactggtccccctctctccaaggttgccccccatccattctttactttgcagtcaaagcgtttgtcctaaaatgcaaatttaattgagctactcgcttgttttaaaaacagatgattcttcctgctgccacaggcagcaaccctcagcctcttttctgtcaacaacacattcggggtcatgaagctcacctgagacacacagcccccagcatgcacagtgcaggggcagcacaggtcacaaacacccctcccccccccaatgcagaaagcacatcagaatgccaaatgagtgagagggacagctgcttgctctaattgctttttcattttacttgagtcattcataaatgtcaaaaccctgtttttcatgataaatgacttgagacaccacacctcagaagtgactatgaccacaacccacccatgtgttgcgacactacagttgagaactctggcctaaaggacaagtcacttgggtgtgacacataaagtccttcgggacttgcacccgcccctctccacggtcagctcctgtctgtctgctatgtgcagccacattccagccacagcagatggcccacagccttgggaacatgccaggccatgtcatacttctaggagtctggttgtgccatcctcttgccccataatgttcttcccatctctttgtctgtagtgaacacctgctcagcctataacacccagtttgcacatatcctgtgtgaagtttcactgacccagccaagcagaacacaccaaatgtgggtcctgccttcaaacagtttggtccagtacagtgattctcaaccaggcaatcttcccctccagggggcatttggcagtgtctagagaaatgtttggttgttacaaccgggggagaggagcggaaggtatgccactggaatctagccagtagaagccagggatgctgctgaacatcctacaatgtgcagggcagtccccgctgcaaagaattatccaactcaatatgtcagtggctggaatgtcattccaaggttgagaaaccccggtctagtgaaagtaaggtaattaatcaataattacaagaaactgtgtgaagccctaaaaggaagtgtaccaggtactataagccactctactgagggcaactaacctagtctagtgagtgggtaagacttcctagagaaaataaatttgagcaaaaacccaaagtgtgttcaaagcagaagacccagaagggacaaaggcccagaagtgagaacaacaatggcttgattcaaagcttcttggagaagttcatttggtctggaccccagcaccggagcactggagagggggcagcaagggctgaccctagagagaaggggctgatcctgaaggaccacgtcaatcataagga

SEQ ID NO: 66037 - DNA, 2683 bp, Homo sapiens
cagccctctcctattttttcctagccagaattgagaagtccatttctattaatagttacacccatttttcttaaactatttatcgtccaattataatcctttgaacactaggaaggaacacaatttccacacacattcacatatataggcaacatttgccaagcacacatctgcaccctatcatatggctatagtttgccttattgcagtaggggtatttggaggattcagaacatgttttcacctggaatggaaaggaggcaaagattgtgtgctaatggaaatcattaagatcagtaacccagggctctcaagtatggacagttagagatactgactcggaactgagatttagggaaaacagttattcagtacctatttctagaatgtttgaatatacaacatatagacagtgtatagtttatagtcaaaatataatgtacagccagtccagttcccaaaccgattgtctgggttcaccccttattagctttgccacttgttatctgtgtgacctcaactaaattactttacctctctgtgcctcagtttcaatatcagtaaaatagagataatgacagaatttagctctcacggtaattttgaggactaaaaagttaatgaaagatttgaacagtgcattgatatactaagtgaaatgcaatgtttagttatcttttatctggtcattttattagaatctctacaaaatacagaaacaaaagttttattatgcagtcttatttttgttcactgttacgtaacacattttacacattttccgcattccacgccccgcccttcaacaacaaccaccacaaactccgaccgtcctttccaggccctttccctctataaacctgccgttttctgtctcccaagtcatcccagtttagaactgctccaggaaataatgaatgaacagagagagcctagtttgtttatttatttacaatccactagtctaatctagtttagatccagcggcaatttttggggtgccaaggaggaaagaaggagatggcagtgcggggacagggcagagcctgggccaaaggaagccacacccagttcttgccctgccctgcccgacacaggcaacgtgaccccaagcgacagccagctgatgcttgcttctccgagcccggcggtcagcagccggaagtagcccgcccgggggcggggaaaggtgccttaaggaggagctaggggcgtgcggccaattgcaagcgactgtcctagcgaagagggcggaagaggagagatccagttccggacgcggccgccgccgtcgccgccatctgtcacctccactccggcatcagcagccagtcgcccgtgtcccgcctgtctcctcggcggagcctgctgcccgtcctgccacctctctgctctgttcttgtctctgccttcattcccgaatggatctggtaggagtggcatcgcctgagcccgggacggcagcggcctggggacccagcaaggtaagtggcagacgagactggagtactagccttggtcacacgggctggatctctcggaaagctcggagagggcggcttcgtgggcgattcgggaagttctggggcgggaccccgcggacctcggcaagggggcactggccgcgggggtgccgggatggggatggagggagcggaaagaggggcggagggcggctggatctcccaaaggccaccttgagtggttagggctctctatttcttcagcgtactttctgtatcaccgtagcatgtatttgagcaggactggcttacacaccctgatgatactggaggggaaacaagcacgatcttgtttttcactggccaagtgagtcagccgaatacacagctagccagacagaaagttggtttaggaagctgtttacttaatttgataagtgtggttatcccagtttggaaatgtcttgtttttgaagcagtaaaagataaaacccaggcgcaccctcctccctcgacgctgaaattcaagtgcgcaccacggactgtaaagtgcttatgaatttcattatctgcctaagctttgacgtttaaactttttcatagagtggcaaactaaagacctttatttcacatttgctttctggtttccaggcaggtccttttcatgatactttgattatatggatgaaaacacttttctgccactttatggagggtctgcttgagagcagagtgcttccattgggattttttgttccacaaattaaggtcgtaaaggagtctagcttttttagcttcatagttgttctttacatgctaacacagaatatttgttcccatttaaaaggtcttattagatcttcaggctaggccttaacaggaaaaggggtcaataattagctattaagtaaccaaaagttaattttgtaaaagttctcgtacagctgttggaagaatctgagatactgcgttggcaaatgtggttaagtctgcatgttattttgtgtatttttccttgagaccttgtttacaaggtcaagattagcagacataaaaggatgaaatcagtagacagactagtattatgaatatataccctgtatgttaaagtccttcagttaagcattggcagaggctggtaaaaatgtcaaatgagacagactctattcagaatacatcctaatctcagaacaaatttcacttacaaactaattcagtaa

SEQ ID NO: 66038 - DNA, 1530 bp, Homo sapiens
actgcaggcatttgccactgtgcccagctagttttttaatttttttgtagagatgatatcttgctgtgttgcctagggtggggaatttggattttatattgcagtcagtagggcagtttgcttcacacatttcggggtgagatgatagggaagctgtatagcaaaatgctaagagtgcagcctggcattgccttggttcagagcttggtacttccatctatgatgttttcttgggttaaaagaaaagcctttgtgtacctcagttttaaaatccataaaatggggatggattgcaactactcaattgttgtgtgatttaagtaatctatgtaagttatgtatatttaaccaagtgacttaaatatagtgaatattcagatattgtctgttatgtaactgttagtcattgccaaatgtgagtgagaattctgagttagacagtcacctgccttttggaacctggactttgaaactgatcagatgaaacatttctaggctaaacagcattgtatcttctacctagaggatacagaaggaagtcaggagagtcatgaggccaaaaaattagctatgttctccagatgatagaaagcttcaagagtctagaccttaaaatccttaccaggagagttctccactcaattacagataagctctgagtgaatgaaagacacaccagactttcaggaagcctcttcttctctcccaagtctggccttacagaaggctggaagagttctgtgatagtgtattgtaggtatgtgctaggtaccaggtgtatttcctcaatctcagggtgagactagataaaacttgattctcattcactcaggcataaatatagttatcatttgtcgcctttaggtgctccacccaaacagcctgagctaagtaaattcctgaatgtcagtactgtggaacctgaacaaaggtcacttgcccagttgtctctgagtgtcatgcagcaggcctttagaccaactagagggcctatactggctgaacttgatcaaataattttgtggctaaaacagataacattttatgctatattctaaattagacactcagtagtagttaaggaatgagttttggactttatcctaaaagcaatgggaaacaataaaaaagattttgagtaaggagatggaacccatcacatctgcattttagaacaattactgtgttacagtgtgaagaatggaaactaccaagattgagagcagaaagattcgttaggatgctctgaaagtaacccagcgaatgggataccttggagtagaattatggaagagggatggaaagagttgggcaagttcaggagatgcttaggcatcttactaaatagtaaaggtcttaatcaataggctataaaatataatcatttgctgctgctaagtaaagcatcttgctccctcagaaattatgaatttgaaataaacctacagtttgatttcaagaaggctgaggcaggagtatgtcactgaggaaggtcaactgggtctgacagaatattactgtgtgtattgg

SEQ ID NO: 66039 - DNA, 859 bp, Homo sapiens
gtggctcatgactgtaatcccagcactgtgggaggctgaggagggcagatcacctgaggtcaggagttcgagaccagcctgtgcaatatggtgaaaccccttctctaccaaaaatacaaaaaaaaaaaaaaaaaaatagctgggcatggtggcatacgcctatagtccagctactcgggaggatcacctgagcccaggagacaaaggttgcagtgagccgagatcacgccactgcactccagccttggcaacagagacagggtgacatgtccatgactcttcagtgcaaacccaaatcagggagaaagggggtggtacctgggggtgtgggacagtggggggtccctgaaatcccccctcttccaaaatacctaatgattatttcaccccctaattaaagaaacacccataaaattagaaacccaaactccctctgtgtgactcattctcacaaacatgcctgcacttctctcttcagtgcatactatcactttgcaataaaagctttttgcctttcccttcattctgacttgtccctgaattctttctcgaaaaggtgtcaagaacctggaaaccaactggggcgggggtcttaccagcatctgcagaccctcctgaaacttctggaaaccatagggggaaaaaagcagaaatcacccacagtacaagacaatcaccatatacattactcctgacacttgttatatacatatgtacatgcaaatgcaaatgtagaaagaaacatgcattcaggcccggcacggtggctcacgcctgtaataccagcactttgggaggccgaggcgtgtggatcacctgaggtcaaaagttcaagcccagcctggccaacatggcaaaa

SEQ ID NO: 66040 - DNA, 2606 bp, Homo sapiens
cttatcaagtaaaaaggcttgctgacccacaatctatattaggtttccctgttactagcaaggagtgaaggatgtgctatcccaaaatatgtccaaaaattggtatattattttgagctaaaaacaccggagaaattgtagtttcagaaagggctagatgacctgtcgtttcctacagggaataagcagtaaagattcctctgggagtggcaccctctctgtacccgggtcagaaaatagcccttatcaccagagactgggagttggggctgcaatggacctgaataaatgaacttcccaagtaacacttaccttccactaattttacaccctccccaatatttctcctagtgactctcttagaaatgtatcgccccagccagatgccttttgtgctttcttctcaaatgcatcattctttgtctaaaaagtataaaagcatcttgctgtggccacttcttcagacctcactctcttttgaaggtccccatgaaaaactaataaagtgtgtatgcttttcttttgtttatctgcctcttgtcaattcggtttctggctccagcggaagagcccgcagaagcgctgaggggactggagacggtctctggcgcccctacacctgctcagtgagccttcagccccttctccctgacgaagctcccagaggctggaactctggcgcgggaggcacttgggaaatcctcccgaaagcaaggaggagcctttcctagaccgggagcggtcccacgcgggggtacaggttggggcaggggcgaccgagccgggcacaggaactcgcagcagggtagggttggcggctacgccgccctcggtccgcggggaaccacgcgggcttccgggtcacgccgccgcgttccgaccgccctcggggagaggggaggagcctccagcgccgggcggggcgtggttaaggccggtgggccccaccgcagccagacgctgcccgtttaagcgcagagggccgcgggtcacgtggtgggcggggtgggggcgtggcaccaggaagcggcgtccgcgccgggcccagagccgcagccgcagccgccgctacagtccgggccgggctccaccgcgcatcctgctccactctggcgaccgcccccggggcccccgccgcgggcgcggcgcccgccatgggcgaggaggactactatctggagctgtgcgagcggccggtgcagttcgagaaggcgaaccctgtcaactgcgtcttcttcgatgaggccaacaagcaggtccggcgcgcccgcgcttcctcccccgcgcggccctgccggggtcgtgggcgcgccaaggccggtcccgcgcgaccaggcccgagcgtcccctcctgtcctgtcccgtcccgtcccagcgcgggaggcggcgcgcgctccttccttgttgggtgggctcagccgcggccaggtgtcctcgcaggtgacctcggggctggacccccgagccagctgcgcggatgcagtggccccgtggccagtgtctcaattgttggcgcgcccgtcttatctaggcttcttttgttgtgtttgtcattagttacactcgtagtcaagggtttagacgtcgagattttcattttccttgaaattttgtaaagggggaaaagactgtacttcaggcgtatcagcggcgccgatgcgcgaaccggtgttagaacttggagcctcgggaacccgacccggtgtcacggtggcatccttttcgctctctgctcttggtttttaaaattcacctgagcagccaaacatctgtaccttgatatgtgccgtgttactttagttgaacccagggtggtgtataacagaaataatcgcttgcgggttggcttctgagtttagatcctttcagagttcaggctgttaaccttgctgcttttccctctcaggtttttgctgttcgatctggtggagctactggcgtggtagttaaaggcccagatgataggaatcccatctcatttaggtaatggtatagacactttcagatcattttgtcatgtaaacagaatgatgtttttctaattcaaatggttttttataattttgtcatttggtctgccctaagaggcctgaagtctgtgtgcgcacatggaattcctgtctgtagggagggtcttcgtggcacttactagcacctcttgtcagagtggaatatctggagcagttgatttgggagccaaatacttcaaaagtggggcagccacttcctagcactggaaattaacaagtcagcgtgatgatgtgcccatttctggtttgttcacagaggagggcgttcatttctttagcccaggtctttccagagtggcaggtggaggagattcattgtttctcatgtaataatacaagaaaatcatggcttccactatacttaaggtgactgcatagtcccagttcgcactgttgaacaggtttaatgatcaacagcagggcctttcactttcagaagtgtctcgatttggatgataagctatctggccactgtaacactggtgcttacagaaggtgaaagtataatgtaggccctcaattcagtagtgacttaaaaaattttactgttggtctgtgttaatgagaaactgtcct

SEQ ID NO: 66041 - DNA, 1450 bp, Homo sapiens
catgagcattaatgtcttgggggctctgtacagtgttctgtaatatcggaatatttagggtacattgaaaatgtgcctggattataaagtactgcatttgtatggagtcttatgaacacatctgctagaagaagggagctcctcccaggcccagtgtagactggagtcgaggtggaggccaagcagaaggcagatctgccatggtctgggaggtggccgagttaacacatggggtcctggaggtgtcagtttcttttggccgtttcctggatgaggagaaatttgttgtaaattgctcttaggtgtatccatgtgctccacatgcccaggcatgtggaggcacagataaggattttggagggaaacagcctacccaggctataattgctttgttaaggggcaggttccctaatccactcttggagccttgtttctcatctggctaatagggccagtgatgcctgcctctcagtcgtggcaaagagtaaatgagttaggaggctctgtaaagcaccaagcatagggctggttaagtagtagctgtaataagtacaagtgagaatgttcatttcacttagtgggtttcttctgctttttattctcagagcgcactgtaaggatcttctgacagtttgctgttattgatttatttattaattgagactgaatctcgctctgtcactcacgctggagtgtgatggtgcaatcttgactcactgcaacctctgcctcctgggttcattcaagcaattcttgtgcctcagccttctgagtagctggaattacaggcatgtgccaccacgcctggctaatttttgtatttttagtagagatggggttttaccattttgtccaggctggtctcgaactcctgacctcaggtgatccgcccaccttagcctcccaaagtgctgggattagtttgccgttttttaaatgaagatcctgtttcttaaactctgcttcaggtattaccagagaaacggagtctgaaactcttgaagagccacaatctcaatgtgaattggtacatgtactgccccgagagcgccgtgatcttgctgtctaccacggtcctggagaatgtcctgcagccttttcactttagggtaagaggaagcctcccctgaaaaaaacacctttccccagttgtcccctgttcctgtagcatcctaatgtgtcaggcacgttagggacaggttcctctagccgtaacgtcaccgctctgaccactagagggcactctgtatacccgtcagctcctggagccattcattctatgctgggcagacaggctgtgagaggacatgggggacggtggaaaggatccaaagacgaagtctgtgtttatccttgttggttttacacagggaatgatgaaacattgaaggggtttaataagcttttcctaaaacattttccccctaaacaggctggcactatgtcgaag

SEQ ID NO: 66042 - DNA, 1786 bp, Homo sapiens
tcttggctcaccgcaacctctgcctcctgggttcaagggattctcctgcctcagcctcctgagtagctgggattacaggcatgcgcacaggaaaaagttgtatctaagtagagaaagtgttttccgctcatatcctgggtccacatcgaagaattcagtccttgtggatgaactgtaaacagcacccttcctctaagatgccgaagatcatagtttgtggtttttttctttcaggcggtggaagcagggcagagccgaagcagcccgctcctcaagaggccggtgcggacccaggcggtgctggaccagtcagatgtgtacacccatgtcctgtcagcctttgtggaaaagaaggtgggctgcagctttccgcctcttctggactgagaatgctcaaaacaaggaagttgctgaaaacgaggagacttcatgtgattagagtcacttgaagtgattagaatcactggagtttccttgggtgaggccctagagctggtagtttggcttctaatgctgaggcctaaagcataattgttgacgggtggttctggagcgatgtgtgcaaaaccagtgaaagatgaacactgggccattttaagatggaaacaaggtgggggttggatagagagttatatgcagcctcttttgcacctcgttggtatttgtaagaccacatttttttctccctaggagatgcctcataaatttgtgatagccgtgctgatggaatacattcgttctcttaaccagtttcagattgcagtacaggtaccttcaaatcatctgggcccaagttaaaacagaaggaatttaaaaaaaaaacacagtcactgtcttagaagatgactcatatgctaagacaggtctgcctccctgactcagaatgctgagtgactcctgacattattagttggaatgggaagtgtaaggtcaagttggggtctttacctgcatgacgaaaccacttcttgtaatgacagacttttactgtgttggttagaatagccagtccttggggagcctctagtctgttgtagctgaatgatttggaagtgttctttcactttttacttttgtcctcagcattacctacatgaacttgttatcaaaacccttgtccagcacaacctcttttatatgctgcatcagttcctgcagtaccacgtcctcagcgactccaaacctttggtatgcattgccagatttttacttccattgtggttaaaaatggaaaattttaaccgttatctttccaactgaagtgggtctaaaaatgtctttcaggcttgtctgctgttatccctagagagtttctatcctcctgctcatcagctatctctggacatgctgaaggtaactctgatgtgtgaggttttagactatggaaactaactctgttcctgttgtttgcactgacctggacttctctcccttactgctagcgactttcaacagcaaatgatgaaatagtagaagttctcctttccaaacaccaagtgttagctgccttaaggtttatccggggcattggtggccatgacaacatttctgcacgaaaatttttagatgctgcaaagcagactgaagacaacatgcttttctatacaatattccgcttttttgaacagcgaaaccagcgtttgcgagggagccccaatttcacaccaggtgagaatgcaatgaaaagacttggggtaaccatagcctcaaagagtagcagagggcactggcagctggtgggcgaggaccctgggttagcatttttgtaaacaacacaatttgataa

SEQ ID NO: 66043 - DNA, 570 bp, Homo sapiens
aaatgcattcagtctactaaatcaaaaccacaatgagataccacttcacacccatgaagatagctagaatcacaaagtcagataataaaaagtgctgacgaggatgcgaacgaattggaagtttcatggactgctggtggtgacgtaaagcgctatagccactttggaaaacagtctggcagttcttcaaactattcaaggtggacttaccctatgactcagcaattctactactaggtatgtacccaaaagaaatgaaaactcacatccacaagaacttgtactcaagtgttcatagcagcattattcataatagccaaaatggaaacagcccaagtgtttgtcagttgataaatgcacacaatgtggtatatccatacaatggaatgaaaaggaatggagtactgatacatgccacaacatgaatgaaccttgagaatattatgttcaatgatagccagacaaaaaagtccacatattattctatgcacataaaagtccagaataggaaaatctccagagacagtattttagtggttgcctagggctgtggataggaggatgaaaaga

SEQ ID NO: 66044 - DNA, 3219 bp, Homo sapiens
cagaggttgcagtgagccgagattgcgccactacactccagactgggcaacagagactctgtctccaaaaaaaagggaagcctatttaaggtcctgatctaaaactctaggaggggccaggagtggtgctcacaataatcccagtgctttgggaggccaaggtggaaggactgcttgaggccaggagttccaggctgcagtgagctatgatggcgacactgcccccacgcctgggcaacagagcaagaacctgtctctaaaataaataaattttaaaaataaattttaaaaaactctagggaaacagaatagccacattttctctacggcacataattgctattatttatttctctctcttttttgttttgacacagggtcttgctctgttgcccaggctggagtacaccggcgtgatcacagctcacagcagcctcaacctcaacaatgaaaagaaaaacaaaatgtttttaagacggtgtttcaccatgttgccccggctggtcttgaactgctgagctcaagagatcctcccgcggagcccttctcctggctcttagtccattattggatcaacatcacctatccccttctgagaactaaatagaagtcgaaggagagttttttctagtccacggaaccccctctcccctgattcaccacttcctattgacgccacacctatgtgaggggcgttaatgtgcacaaggacacaattccccggaggcactctcatcctgatttggtttaacgagtcacagcgtgacactgccccactccagttttaaaagaggaaactacagacacacaaatactgaggtgctctttcccaaagctattaaaccaagcaaaagcccccagaaggagtcagcaggacaccgagttccaggccccatcctgtcgctggctaatagtgacaaggggaaattcaataccgccctgtgagtctcagtgtcctgaggtgtaaaaaggagttgatgaaaagtaacctgccctctttagaagaccaagctgacttatgtcaagtactcaaggcagtttcaccgggtgcttgaggaagtttgtgtctctttacctctgcttccacctccatcctcaggtgatgagaagaggaaataaagtggttagagctcctaaattttggagttcgtgcgcatgtagcagaattttttaaaaagcaagtagtgtccctatcccactctacccactttcctcccttcttctggtgccacatcctacacagagaaattaggtgaccacagatggaacaagctcagaacaggtcacccaagcccccactgccaccctcttccagaccacaggaaagagagcgtggccggagacagaaacaggacaagtgaggaacctccgagctctccatcgccagaccaacttccccaggacccgggcctgagccgtcgctgggcccgtcgccttccccggctctcggccccgccacgtccccacagggcgtcccggtggccggcgaccgctcacctgcgctggacacagtagcagcaggaggaggccaagggccaggccgcgagcggtcatgctgtggccgcgcaaggctgctgacgccggcggcgttcggctggttgggctccccggaggcggctctacttccccgggctgtttcagcaccccgcgcaggaggagcggaggagcaggagcaggcgctgaccgcggcagcaggctgcgcgcgccggtcaggaaggaagaaggcgtcgtcggctccgccctttctgggaggtgccgctgccgggactccctggcccgggctggggcgccgccgcgaccccgcttcaaggtccccgtgttgcccttctcctcagcccctgcaatccccgggggccaggcgcgggacttatggagtctggctcggcccgggagagtatctgtggagttgtgccaacggtttctggccgtgatgctttcccttttcgtctctgggttggagggggcgggcgaggtttcagcgaagggtagtgctgttctgggggacttccgggtaaggtcccgcccggccgcggagtctctgtttatttcggctccgacaattacgctgagcgacttctcctcccaacccagtcacctgaaaggaatctggaccccggcactttctagcagagcccggggcggtgacgcgcggtggcctgaccgtgtgacgatccgcgagtgcggcggggcggggcggggcggagcgcggggtgggcggtggcggtgcggccaggcccgggaaaaaaagtgcgggagcctcgccacctgctggcccagctgcgcagcgcagcccgtgggcgcgaggaaaccccgaggtggggaccagggtctgttttaagttctacgtgaaggcagataaagaagacgcgttgtcatttttgagccatgcgtttgatatatgtatttatctttaactctagttgtatgtgtttctggtaacgttttccctcaaatttcaagtattcagaccactcaaaagcatctgtcatttccattttgaagttaagaaaatggaggtgaagatctctttcccaacagtgaaagcaaatttacgatgaaaagactaaaccttcatctggagcaatgaccgaacccctccccaaggagtcccatgatgcagatgaccttcccatccctatcctataaagtgctgtttcactttctgtcttgccttctcacctcctcagccctgagatgtccacctggctggcctggcagtgaaactatggggatttcttcaggaccttcagcctaggtcctccacgacgacctcgtggtcctcagtcagctctgtgctctcgcttcccactccccaggctccagctcctggtgcccccactgaggatcaagtcctgtgtatgccttcatgcagggatcctcaaacggccatccccagaccagcagcaggagcatctccttggaacttgttagaaatgtaaattctcagccagggcaatgtagcaagactccctctatacaaaaaaaaaattttttttaagttagctgggcatagtggcacacacctgtagtctcagctactaaggaggctgaggcaggaggattgcttgagcccaggaggctacagttgtctatgatcatgctgctgcactccagcctgggtgatagagcaagaccctgtctcaaagacagagagaggtagaagaaaatgttacagtaagatttccaagtttataaattactttgaaggttctaagtttc

SEQ ID NO: 66045 - DNA, 2631 bp, Homo sapiens
tgcaggtgtgttctttcaagaatccaactaaccaggctaactgcacccaaattcgacacagtccccaagtgaggacttactttctaacctctctcttacagattagtaaaatttatctttaggtcttaccttcaaaataccaagagtgggtgagaatttaagcaactcttttatgacatcattataccctttgttggctgctttcaataatgctgttgtgccatccttaacagaaagaggaaaataaaagttgattattaacatatatctgtgttgcttgaaagcagtcagttgggaactggaaagtaccgttgtcagaaactaatgacgtgtaaattaagcacagatcagcaatgtctcttaatctaggagcattttagagaatattaagcagtaaattctgcatgaaagagtatcagataaacagtgacttagattatgttagaactctgccatttgggaattcatacttctacagttcctgagaacactgggcaggggacaaggggaatttcaagagcatatttttaggccatggttggaccaaagaggcattctcggctgttcataacttagcagaaatggttaactgtctttaataatttagatcattgttgagctgtatttactgtttctaaaaaaatttatacagccttgccctagtctgctctaggcatccgcccgtgtgtgggtagtggggcttaggggcagaggtgatagattaaaatctgctaaaaggccaggtgcagtggctcacgcctgtaattctagcactttggaaggccaaggcaggagggtcacttgaaaccccgtctctaccaaaaatacaatagccgggtgtggtagcccgtgcctgtagtcccagctactcgggaggctgaggcacgagaatcacttgaacccagaggcggaagttacagtgagctgagaccgtgccactgcactccagcctgggtgacagagtgagactctgtctcagaaaaaaataaaataaaatctgctaaaaagaatgaaaagccaaattcaaaaattaatatttagcttctgtcgttattttttggctcaagaacacagtttccaaattcctttttctcccattttcacatatcagtcgctgtgtttggaggatttagtccataattctcccgtagccaagaaaccacttcggcctgccattagggtttatctgtaatcagaaagaaggaagaatgaattggggggcggggggtgggggtcttttctggcttcagagattgtgggaagaagaagagtgagagagagggcagtgaaatggtggcgaacgcgtctggtgatttcccttttttggagcttagacttggagaggggaaggtgggttacgtaagcaagggttatacaaaggccacagtaaaacacaaaaagcaaacagcataggtggtcaggttctcttcaagccttccttatggggaaaagggcctgctgtgcagcacacaaaggcagtattaggtggcaccagcagaggccagtggatgacggcgggccaacaggggacggggtgcaaggggtctgcagctccagggaggaggggcaagaggcagggcctgcaggaggcgcagcaccagccaggggatccccctaggacacgccccaggacagccgggaggcccccaggacaggcgggaggcccccaggacaggcgggaggccccgtctctaccgccctcaggcctaaggctaagattccaccctctctagtgcgtcccaaggtcatctcgggtggaggaggagagagaccgagcagcaccgaatcagaccttgactttgttttcctgctcaaggaaggaggttgggaggaaacccatgtgggctgcagactcagtcaagacccgttttctccacacaggcgcgccgggaggcttcgctctttggccgcgcgactcgggcactcacgttccgcgcagcgtcgcggtcggctccgcgcagcagcatcacccgcaccacctcgctgtggcccatctgggacgcgatccacaggggcgctgtcccgtcctgcgggaagaggaggcggcggccgccgtgactggggcgcccggccccacccgctcacagaacgtctttaacaccaggggtctgaaagcgaaaactccgggaaggcactccctgaccgcagatcacactctgcagctgatccacaccgcccaggaggcagtgagaaaagagggggtgtgtgtagcccacggacgcagacggcacgtggctgagcctgggctacttgaataattgccagtattcaaattttggcttataaaatcatccattttgtggctggatcttttaccaaaaagggtggtacagacttcatggaaagatgcgtgggaaccttgctttgaaggcttgggggagcagctgacctgtatacatacaccacagcagaaccaaattccacaaacccagagagaagccggcctattcccccaagactgtccatttctttgctttcccagtgggtcacaccttaatgttcacaaaatacacccttcattcccatagaacgcaggcagttttctttgaggtggggtctgcgggtcagagaactcaagtcatttctcctactcttctagtctggtgtccagaaccctccaaagccacctca

SEQ ID NO: 66046 - DNA, 2987 bp, Homo sapiens
gctctccacccaaaaaatctgggtctgctccctagctgcctcttacagtcttcctggggcttatgcttatgagtctgggccctatatctggagccttcttctaactctcaggcactgatcactaaatgctgcaggcttccagacctgctctgcaccagccatggggatcttctggcagtcgatacactttttctgagtgtgtaccatgtgcaaacgaaacaagacagagtccctgcccttgccaagcagcaaggacttcctatggctgtctgttcccatttccaaacccccaggattctacgctaatcttttggctccttctcccactgccattgatggattcacccctctaagcttccgacctgggagaacgtttaatttctgggtccagctactctgtgtacaagtcaaggcttctgttaggagatggcactttattagatgacttttcctccagccttcaaagaaatactgtttagcacatgaaaaagactagatagagatgagttaactgactaacctcagctctgggttaacaggatcagacctttgcattctattaaagtattgttttaataaggtgggtgagtggagttgggaaaatatatgtcgaggcatttggttaatagaaaaatagaaatagccactcagctagtgattaaaaaggtctgactcatagcaactcaacttggtgaggacacgtggaaagaaatgaaaatgaattgttagagtgaaatctatatttcaatgatctctgtgactcttgaccttttggcttaggacaatatggaaggaaaatattttttgaagtttcaaatcaagaacatagtcttcctactgtctggctatgactagatttgggattatgattcctcatcccaaagtactaaaaaggtcttcatttagttctcagtgatagagttacaaagaaaagtcatcccactaccgttcagattccctgaagctcatatcaaatgtcagctgagtaatttcaatgtaactttgtcaacatcctgttacaggataccgtaataaaatggtagggcttcatagaatgtcagtgcaacaattacaaatcagatttagccaaaagtattaggaaattaaaccaggcaggtattcctgtcctcattttgtaaattcaaggattttccaataatgactcaatgtgtcagctgagatttcagaataaaacattggtttccaaatgctctacctatagaatataggtaggccatgtgcaggccatgtgcaggcatggcactgttttcttggaacataataaatatgcagagtttacactttcagagaagacggaacttgagctagtctgacctggatagataacaacctctaattataagctcacagtaggtaataaaaattattatgatttgagggcacaatggggtgagtgtactctgtaaaaaggaaaaattccattgccttttttccccaaagcaattcttattttataagacacccttttcctgaataacaattcttttagggctgaactcaaaataattcaaaacaatttcattagatgcagtctttagaagttgtagcacttgctccttgaccagagggtggatccctgcactcaaagactaggtcatccactttgaccaggttatcctaactcttgaggaagaaaaaacagctatggcgtgttgtggctactgctgcaatgttggtttactctttaacttcttggcttcaacatcacggcatgactcattttaggtttaagtgggcatggctcatgcaacatttgaaatataatctcttatatcgacttggttttttacaagcagtactttaggcatataaagaataaaattcaaagtgccagaaattattttggaaggatgtactaatagagagacttgataatcttgataacctcacattctaaattcacagtggtatcttcaataatggcccccaaatcaaacttaggcaatctaaaaataaccaattccttttactaattttagtaaaatgaatcatctgattcagaatcaatcaacaataacaaaataagaaggaccaatacgaaaatattaaactccagtcctcgaaagtcaactctagcaggacgaaagtaaaagtttttttgaaactgcttcctttcccaggagtattcctggggccacctaagaataactttacaattctaaaaatataaccttacattgatacattacattgattacaatgtctggcacatggtaagtactcaagaaatattgattgaatgttgaataaaacaattatttaaaatgtgggcatttgaagagatcatcaggctcatgctgctcagcctcctaattttcaatgatgaaagtcaggcccagagaggttgattcacttgttcaaaaccacacagctcaaattattggcagagatggattgagaacttgggattcctgacctcaaaaccactttgctttcctgacttcaaaccactctgcccaaaggctctttatttttctcaggctccttatgtgcttgggcttctaaagaccagagaaacctgtgtccaagagctcagaccaaccttaaagttctcatagctattcattatgtgaacacagagaggcattcctgtatcaggtcatagtacagtggagatgtgcctgggtatgaaatcagcttgactttttcctaggaaactacctttatagtaatgtttccttaattcgaaatgttttgttaaaaataaattaatctggtgccaggcatggtggctcacacttgtaaccccagcactttgggagcccaaggtgtgtggatcacttgaggccaggagttcgagaccagcctgggcaacatggctctctaccaaaatgtatctctactaaaaatacaaaaattagctgggcatggtggcatgcacctgtaatcctagctatttgggaggctgaggcacaagaacccaggaggcgaaggttacaatgggtcgagatcatgccaccacactc

SEQ ID NO: 66047 - DNA, 933 bp, Homo sapiens
ggtttcatcatgttggccaggctggcctcaaactcctggcctcaagtgatcctcctgcctcggcctcccagggtgctgggattataggcatgagccaccactcccagactacatttctgttcttttactttcagttaattgaattgctagctgttagcttgctgttggtaaatgaagtctcaacagcataacaattgtgagagatgaaggtgcagaacctcctaatgattccaacggcatgggctcctctttggcttggtggaagaagtggtgggcaggtagtaaggcagcattatcagcaggggccaggctacttggcccacatctgtttacctatgtcccaggccagcctgcactcattagatcagtgcagccataatttgtttgcacaggaggtggcagagtgtgtacttgtgtacttgacctcagacatcaaatacttaagttttgaaagtactgaactgtgatgtcagcttggtttcataggctttcaggccagctcagagcatagaacaggagataccctaatcaaagattaacttttcatcacagaagcagaagggtttaaaggatgccttgagcttactggttatctcaggtatgtgctgccagcggacacccagccctccctgccccatgcgccatgtgctcgggcaaatgtcaacagtggacattacctgccttggctggttgacttttgctcctgaagccagcagtaatcgaataacatccaagtaaccaccttgggcagctaggaagagggcagtggctccatcctgagagagaacaaattaaaagcattaaaaacattatctttcacacttattttaaaagaaattagggcgggtgcagtggctcatgcctgtaatcacagcactttgggaggcctaggtaggtgaatccaggagatagagaccagcctggccaatatgg

SEQ ID NO: 66048 - DNA, 1107 bp, Homo sapiens
aaaaaaaaagagccacgaagagcacctcccacaggtctcccccagggttgagaccatacacaccatgtccttggttcagagtcaggcacatttgaactgtttaatacattttaactgctatttttattaaaccctttcaatcgaggcaaatcaacctctttcatcctaaaatgtggggattagatggaatgactttaatcaactcttttgagacaagacacctttggaccctgaagcctccctgggtgctggccacccctccggggaggaggcatccgtgggtgcagctggtactcctgcatgaggacccagagggtcagggtcggggactccttctgctgcaggacagcgctgaccccaggcttcttacccgcccccgacctgttacccggcgacagtccccgccgccccgtcgccgggcacagactcagccgatccacagccatgagtgcgaagcctctcaggcagggcaggcaggcaaaccgcaaacccacagggcgcacccagccccgccgcttcctcccgggcctcgcccgcagctggaggagagaggaaggaggaggcggcgggcagcgggcagcgcccaccccatcccaccccatcccaccccacccgaccccgcgggcccggccgcccgagcccggccccagccctgaccccggagtcccggtcgctcaccttgaaggacatcctgcacatgtccgcggccgcccgagcgggagccggcgcgctttgggcccggggcgccttgtcctccccggcccttcactctcccggggctctcggcgttccgcagaggggcggcctccgacgccgcgcgctcccgccgcccggcccggcagcagccgccgcacacagggccgggccgaaggggcggcgcgggggcgcgcgcgcgcgcacactacacatggggtgtcgcgtggacgcgctccaggacctgccacacacgcgcgtgcacaaacaccccaaactccgcacgcactgtgcactttccacacacgtccacacttccacactcactcgtccacacacacactccaaactccacacacattgtgcatacgctccacattccacacacacagaggttccacacacatactttcc

SEQ ID NO: 66049 - DNA, 666 bp, Homo sapiens
taggggaggtggacgttgcagggagctgagattgcaccaccgcactccagcctggagagtggagtgagaccctatctcaaaaacaacaacaataaaaacaaaaacatgacagccccattttgccttaaaaatgtgtgtccttatatttgctgctttaatgtctcaaaccacttgctcataacattccttcatttaaacttcagaacagccttcctcctcccacccaccaaagtgtcctcattctcattactcatctttatatctctggcatccaggactgtggagcgtagttgtttcctggatgtttggtttagacatttaatcttcagagagatgactttactagcaaatattaactttagatatgaagcttttatttgatcatctttatagctgttctcggtgggcaaatacacttaatgtaccttgacatcgcaaagttatttttaaactgcaatgacaacatgaagtcaatgatatcacttaccctctgactagggaatgcaataaaacacattaaagagaaatattgtcattgtacagtgcaataaatttgtatatcatgctgttaagtgttgccgtttatagcaaaatatgaagccctgtaaggacaaagccttgatttgaatccagggatggttgtagctgctgccgaggtttctgata

SEQ ID NO: 66050 - DNA, 1395 bp, Homo sapiens
tgacgactcaacacttggctgggaaatcgaaatgtctttgatgtgagttctgtaggtagtggcagtttcctctgctctcaaccaaattcgtttacaagcctcctttactcttaggtcacaggtggcttttctggctttgacctgagcggtgagtatccagagaggagaacgatctaattaatttctgtcctggcgcctggagggttcgaagatcccaggctcccgttcccgccgcctgggtgggagcccgggaacgcctctcccattccccgcccgcgaagtttgcagcgcgcctcgcgcgggagagacgccgtctgctggcgcgcggctgagcgctgtcagttcctgatccggctggtgcccgctccagccgcggcaggttccagagctgagaggccacccccacgccgcgggcttccagcgcgtggagcaaggggagcggccccggcgccgcccatatccccggctgcgctagtcctggcgctgcaggtccgggaggcgcaggcggagagcggcggtgcccccgagcccctctgcggacggctcaggcgggaggaccccgcgcggctggatggcggcggccgcgcggcctcggggtcgggcactggggccagtactgccgccgacgccgctgctcctgctggtactgcgggtgctgccagcctgcggggcgaccgctcgggatcccggggccgcggccgggctcagccttcacccgacttacttcaacctggccgaggcggcgaggatttgggccaccgccacctgcggggagaggggacccggcgaggggaggccccagcccgagctctactgcaagttggtcgggggccccaccgccccaggcagcggccacaccatccaggtgagggcctcggagagagccggggtgggcgcgccttttccttcccgcgccggccagacacccggagaagggatcgggccctttcctcacgcgcgctagtggctccgggcgactgggaagggcagcccccatccccgcgcgcgagggcccacgacccaggagcgatctcgtggaagcaccgcaccggcaccaccggcccgaggcgaggagggggagcacgcgaggtgacatgaggctgtggtcaggttcgggctggtggaggggaaagtgtgaggctgcgctctaagagatgcaggcgcctcggcccttcccgcctccgtcacccacggagcgtcccgccaggcttgagtcctcgagggttcaggggcgcctcctgccccacctcccgggccttattcggagaagtcggtggcaattaccttctgtggtgtattttaagagagaatttttaggttataacagcggtatcactctaatgttactgaaaagattcacttcactgcactgcctgaagtgccaccatccagtca

SEQ ID NO: 66051 - DNA, 837 bp, Homo sapiens
ggatccttcctctacatatttcagagggagggcagtcttgctgacaccttgattttggtcttgtagcctccagcatggtgagagagaaatttcagttgttctaagccacccattttgtgctactttgtatggcagccttagaaacttaatgcagtaactttagcttcaactcagttaaccagcagttgtattgaccattcagtgtatgcgtgttatccctgtttgggagagcagcagagaggggaccctgcatgaggctctgtgtgtagttctagggtcctggtttgtgagactttgcaacctgataactcaaaatgtggcccctaaaaagaatgagaagagctctaggctgaacaaatatttagagatcacgcacattatgagtcatccttaaggccaggaatggtggctcatacttataatcctagcactttgggaggctgaggcgggtgaatcacttgaggtcaggagtttaaaaccagcctggccaaataaaaaataaattagctgggcatggtggcgtgtgcctgtaatcccatctacttgggaggctgaagcaggagaattgcttgaacccagaggtggaggctgcagtgagccgagatcacaccactgcactccagcctgggtgacacagcaagactccatctcaaaaaaaaaaaaaaaaaaaaaaaaaaaaaaaaaaaaaaaagaaatatgtgcacttctttatggcagtaagctgtgttgtgtgtgtcttacccctgatccttgcttaatgcatgtggggtggcccgagtttgggggtggtgcatacctgtgagccttggatccaccttttgaacagagcccagtggt

SEQ ID NO: 66052 - DNA, 3532 bp, Homo sapiens
ttttttttttttttttttagtagagacagggtttcaccatgttggccaggctggtctcgaactcctgaccttgtgatccacccatctcggcctcccaaagtgctgggattacaggcatgagtcaccgtgcctggtccacagacttgatcttaaaggacagtttccccttaaaacgtggtaaatgtaggacagttctgtgattcactagaggcatcatactttccggggttgttcaagttcatttaattatacattatgcagtagtttcaggctatagaatgagaacacgatgtctttcaggaagcttttgtatcatctggccagatataatgagttcatttttacatttaaagcatgtagatgtccagtttttaaaaggagaatctttggaatctaggaagctttgttctgcctggattcctggtagggcatgggctttggagatctctcccgtgagatcggaaggtgtagtggtgggatctacatatacactctggacttcctccagaatccaaactccagagttctattctatgggctccctatgttcaccttccagctccctccccagggtgaggtatagagaaaaacatgaggaggtgggtgcggagggagttcctatggtccatgacttcagcccccgcagagcaagcctgactcattgtgttccagggaacaacaacaaaattatctgaagaattttgaggcttgtatgcaatgtgtaatgtttccaagagtattattttgttatttaaacctgttagtagtaaaaataaacaaagacaatccctcacccccaacatcaagccctgaaaaggactgagtgttggcttcagaggatggaggtgtgaggagagaaggtgacgttgcccctgctctgcagggctgcgggggagtgaggcctggagacagcagatgtggctgcaggagcagagctgctgagatggtcctttgggcctcgtagaggcaaaggctgtgatgtccacagctccctggtccccctctgagtggcagctgggatggatagttcccacacctgttcccttgtcccatctcaagggcctgcatctgactttgcttcctgcctgaaggctctttctagatttacagaggcttctaaaagctgtgtctagagcagcctgcaagcccagcacttaatgccccaaggggcaatcctcatcccaagagggatgatagttggtgggaaaataccgcatttccctgcctctcaatgggccagttctaaagtgccttctacataattcctcagagtgtccctggtaggatggagccgtggttgggttgctctggtggcagcctactcattaacacattgatttttggcttttctccctcccttatgttcctctcttcccagtttgtgcttcttgaggtcaactcttaaataaactacctctactcaagtctttgcctcagggctttagagagggcccaaactaagacagaagaaagagagtccagatggacatagtggttcatacctgcagccccaaccactcaggaggcagaggcacgaggatcacttgagcacaggagttaaatccagcctgggcaactcagtgagaccccatctctaaataaataaataaacaaataaggaaaggaagcctagattgagaccctgaaaccccctgcaggtgttaacacaggcaaatactatgaaaatgttatttaaaatgcaaaaaatagaaaattcagaaattgtttctaaagctccaaggttaaatgtaataggggaaactgcattataaattttaaggaaaaatattaataggtcacaggagaaatgccccattactctacctttctaatttttcatgaattcatcacagacagtgaactccccaggagccagatgcaaatacaggatccaatcatctgagagtgaattcagtatgtagttgcattctagaatctttttttttttttttttcctgattcccttcaacttttatgagactttggtgggtgaatccaaaacattctttgtagctgactcagatgtggagggaagcctgggctagtttctgatacttttggggcttgaggactttggagattaacttggctctacagatggttggctgatgaggtcactaaggagggtgactcagctggttccccgggtggacacagcccaatccagaaggtggatggctcttggttttgacccagtctttctggattcctgaggaattgtgtagactataagcttcaggaggccagggactatgtcttgttttgttcactgtgttctgttcactacatgatgttttgcttccaacatcttgcacagtgtttagcatacaatagttgtttaataaatatttgctgagttaatgtagaatgaaccaaggatgactcagcatcagcctgaactttcccagggtatagtagtaatggaaacatattgctgtgagaccaaatctctgggtgagggtggaagagttttagctctgtaattaattacggttcgttccatttatgacacttgagtctctctgcaacattttaagagtattttatagctataacaaaattagaaaatacagaagattatatttagaacaattttgctattaataaatggtgtttttttgtttttgtttttgttttttttgagatggagtctcactctgtcaccaggctggagtgcagtggcgcaatctcggctgactgcaacctctgcctcccaggttcaagtgattctcctgcctcagcctcccgagtagctgggactacaggcacggaccaccacacccagctaatttttttgtatttttagtgtgatggggtttcaccatgttgatcaggatgatcttgatttcttgacctcgtgatccacccacctcagcctcccaaagtgctgggtttacaggcatgagccaataaatgtgttattaatgaacatcatcatgaggcacagcccttgaagtcaaacaattcattagtgggtagaaaaacaggtgccaataaaatcctctgggctactagggatagaatattatcctttatggtcctttagtaacttcaaagtgttaatttggggtgctttgaagtaatttatacattaggaagaatctggaaatcaggtgttttcttttaatacatgaaaaactcattctgggtgcagtgtctcatgtctataatctcagcactttgggaggccaaggtgggaggattgcttgaggccaggagttcaagatcagcctgggcaacactgtgaaagcccctctctataaaaaaataaaataattagccaggcatggtggcacacacttgtagtcctagcaactcaggaggctaaggtgggaggactgcttgagcccaggagttggaggctgtagtgagctatgatagcaccagtgaactccagcctgggtgacagagtaagaccctgcctctattaaaaaaaaaagtctctctctctttctctgtatatatgtatatatacacacattcaattggttctgtttctctggagaacgctgattaatactgtggctaaata

SEQ ID NO: 66053 - DNA, 932 bp, Homo sapiens
catcttcctgccgagtaaggagccagcctttgtcactgtccctggaaatggttttgcagacccattttcaatcacaccaggaatatgggttgcttgtattaaggcagaaggagtccttctggtaagacttagttctgaatggagagctcctgcgggattcttcctacctcagaagtggttccatccaagactacaatccacagcgaccataaaatatcacaatcattggtggttttagacacaggaacaattcagccccaacctaaggaaactgtggtgacattcaccctcaaatgacataggaatcaacttgaagtatcttttgtatcctttcagctagcttctcttggacaaaaaaaataaaagataaaaaaggtctcctaaagactcttaattatcagaacaaatgcgaagccttcatgagtatgtggcttcacccttccaaagcttgtatgggattttccagcatgagtcagaagtatagactttagcactcattgcctcacatcataagaactagcaacttcacctggttattgtctacactgtctggagattgtgtagaaccaaggaagaataacctagaagacaagcagatatggatttcagtaaagttcttgggggtggaaagagaagcaagaggctacaggagccactgcttctccatgacactctttctgctttcttctgtgttaaacctaaagcaggtttattcccaccaaacagattgcctacaacagagaactctttgttcaggaaaggctttgtctgcaaacacctaatagaatagccagagaagccatggggagttggaaggatgaaacctgttctctgagacagccctctttgctatgtgctttaaggcctgctttgcttcatggcaaggtcttttcaaaatagagtccttgggaaaagcttgatttcatgctctc

SEQ ID NO: 66054 - DNA, 723 bp, Homo sapiens
ccatatgagtggcacacagtggcagcgaggtgggctccttggagggtctttcttggatctggctggctcctcaatccccatccacactgtctgccatgagcatttggtgtggttggtcttgactccaagaaatgggcctttcagatccaaatatttctctctgaccctttggaggcttctggaaagcctggcagttggtggagtgctgctggagcccaggcggcctttgaccctcacatggtatttctttatcccctggccagcgtgcagctgtggtcggcgcctttgtgaagagatgacggggcagtgccgctgccctccccgcacggtcaggccccagtgtgaggtgtgtgagacacactcattcagcttccaccccatggccggctgcgaaggctgcaactgttccaggaggggcaccatcgaggctgccatgccggagtgtgaccgggacagcgggcagtgcaggtgagctgggggagtagcctgtctgcttctgtcacagggaggtcgcgtgccatctgcccacacactggtcatcgtcactttccacttcccacctgtccaggggtgccctgtgttgacctcggcatgagcttcccagacaggatgggttgcagtgggtggagtgattggtcccttaggctcagaactgggcagagcctgtgtggacagattaccagtcatcttgggccggcagcagccttgcccattgactccagc

SEQ ID NO: 66055 - DNA, 1234 bp, Homo sapiens
aagttaaagaacttgctaagatggtgtgtctcatatggtcagagctggattagaactgcagccttgcatgcacaggtctcagctactgcgctgtgctgccgtgtccagcccctctgtcctgatgatctgacaccacctacctcctcaggccatggggcagcattccctgcctggacatctgccccagcagcaccatgcttgtgttgttccctgtacacactgagtgatctcccgctctgttccttctgtctggaatgcgcatcccaacttctaccctatgactctgccctttaaagctcaggtcaggagtcatttcccccagggaaacttgtcacctgctactcctctgaacctcagttagattctgtgtaggttgtcatcatttccacttatgggccatctgcgggagccctccaggctcgggggccatgtcccttcttgcgccctcaacacctagtgctaagcctgacccatctacgacggtcatccatgaccatccacaatggccattggtcaatgacctacattctgtaagtgccttttatctgcctctctccattctgccttggactataagcaggcattgtatctatttaactggctttgcacaccaattagtccactatagtgtaagtgagcactttaaaattgtgtgtacaaagatgatgatttttgcttcctttactttgtgtacagatgcaagcccagaatcacagggcggcagtgtgaccgatgtgcttccgggttttaccgctttcctgagtgtgttccctgcaattgcaacagagatgggactgagccaggagtgtgtgacccagggaccggggcttgcctctgcaaggtaagagagatcgtgcaatgccagacaacagctgccggtcagcaggaaagtgcttcatgttgagtcaacatagaaaagtatgtgggaaatgggactgacccgtaagagatgttgatagtgtatgtagcattttatagtcacgatctcattttacagaaatagttaggaggtgagaccccttttatcttttggagaggtctcagaccgccttagaatctgatgacggatatagaccctttccagaaaaatcagcacaaacttttatctacagtttcatgaggttcataggttcacctaaaacccattcctggaccatggactccaggtgatcatctctgctccaaggggttccgccaggttgtaggagaccttccaattcccaggagatgtttt

SEQ ID NO: 66056 - DNA, 1038 bp, Homo sapiens
acttctgacactctctacctggaggtggcatcagactgcacaggctaagggctcagttcttccagactgctcccacttcagatgccagttgcaagtcccaggcctccagtacttctccagtgctttgctacaagttgggggttcccacagcccactcctcatgtttataatctgctataatggctcccagaattcaggacacactttccttcctattgctgtttattataaagaatatgataaaggatacagagcaacagccaggtgaataggtgcatagggtaaagtccagagggttccaggcatgggagttagggcgcaccatcctcctggcatgcagacgtgtttacccacccaggagctctcccaaactaccatttagggttttttgtttgtttgtttgttttttggtggctctttcatgtaggcatgattgattaaatcattagctattgataattaactcaatctctagtccctctcccttcctcagaggttgggggtagggctgaaagtcccaaccctctcatcctaccttggtcttcctggctacaagcccccatcctgaagctacccagaggactcagccaccacttatctcattagcacacaaagagacactattaccacatcagagtccaagggtcttagaagctctggcctcaggaactgtggactaagaccaattactatggcaaaagatgctcctatcacccctatcattcaggaaattacaagggttttaggagctctgtgccagaaactggtagtaatagccaaatccgcatctctcatgatgtcttgttatgtcacaatatcacacccctcacttctcatttttacttctcttctttctgttttgctttccttctcacctattttatcatatcttttctttggtcacttttcttttctttttttttttttttttttgagacagggtctctgttgcctaggctggagtgtagtggtgtgatcacagctcattgcaaccttcgcttccagggctcaagcaatcttcctgcctcagcctcctga

SEQ ID NO: 66057 - DNA, 1319 bp, Homo sapiens
tattttggccacgaggctcctagacaaggatgaaacagaaggaaaaggcctgtgacaatgtgttcaagggcagtgagaaggcaggagtggcagaagtgcagtgtgaagagggccagaggtgaggttggtggagcaaccaggacccagatcctgcagaaccctgcaggctgtggtcaagcatctggatcttatcctcagtgcgatggaaattttggggcagttctgagccactgagtgatctgagctctcattcagcctccagagtgaccaatagactacataggtaggaatccaccactgtgttttcaaggtaaccccctctctccttaagtgtggcactttgtcatatccttactcatcacaaagggttcactgtgggcccaagcaaagaatgatgtaacaaactaagtgaagcaagagttgttctgaaaatcaagaagatactgagaacatctcactagtacatagactcagaaacaagtgtggatcacaaaggcaggcctatatcagcccttaacagacacatgggccaagtcctaacatcaccagaagtcatgtgccaagtgtggcttctctggagagacctatttggaatgctcaccctgctttgctgtctatgtctttgatgctcgtgaagcccgccccatcctgcagctttatttgtcaagggatcaatcacatgagcttgcccagacttgtttgaagagaagctggcaaaagtagaaagcagcgagatttccactggggtgcttggaaaaagtttttcattttcatttgcaaagcgtagtagcatcaaggtcagcttccagcttccataagttgaagtaacacgtaggtctttgaatttatcagtaaaactctatttgtatctatttctccttcctgcaatattaatagtgctgaccaatgtctaactgtcttttgagaggcttcctaaacaggcattctcttaccagcaaatggagtgatattccctcagatgtcatcagtgtcatgtccagtggcagacaacagggctttttcatggtctctttggtgtgtgtgtgtgtgtgtgtgtgtgtgtgtgtgtgtgtgtgtgtgtgtgtgtttaaagctgcttctaaaatatcatcacttattgcttctcagccttttggctaaaatcaagtgtaaaatatcaccactttagagctaaaagaaaagggatcaaaattccacaacttggtttgaaaaaaaagtgagaatcagcaatgattgtgcccacagaaatgccgaggcaggcgagtggtctctgtgcatctttagggggctccagggcctggcctccccaccaacttttc

SEQ ID NO: 66058 - DNA, 1186 bp, Homo sapiens
tgaatatcgccatccctgtacctccacagtcacagcaggttatgggctgctggcccccatgcctcccagtgtcagggtgacagcattcgggaattgaaggattaaagccagccacccattcaagagaaggagagaagcagggaaacactaagcacttaaaatgctctgctccaagatgctgcgcaggacagccaagagagagggctgtgaactgagggttggggtttatgtaattatgtgtctctaagggaaggacagaggaagagaagagaaggagggaggaggaatgaaaggaaggaggtagaagtgaatagaaggagggaaaaagaaagggaggaaggctttgttccagaatctggaattggttctgaacaaaacgttgaaatgtgtgaagttagactccgaggcctctccatctctctgtattgtgttaggaaacctttctcccccaggggcacagatcctcccaggggcgataaccatggcaacctcatttgagtgggatgggtcccacttctcaccttgctccttgtcagagtcggcctgtccagcatgccactctctgtcctgatggctgcctgctcacagaggggcagcgatggacaaatgaagacatcatggcaaccagctaacatgttccatctctgagagaaaacagcttctctcttcgggcaaagctacagaaaatgtgccttcccgtaataatgattccccctggactgcccagccaagggcctgcgtcagcgctggccaatgtccggcgtctgtctggctctccccctccccctcctctcggcggtgactcgctctcatttcacacaggctctgcttaaaggtcacctccttagaaacagcctccttggctacaccacctaaaaccacaccccattcatctgtatccctttaccttgctttctttccctttcttacactgacacactacctaactttctatcaaatcctcctgcgctatagaagtctgtttggatctcctctaagtatacaaagaatgtaaacaccacataacaaaccacatactctcttcgtgcaagggagcaaacgccttttccatcctctcttggaagaaggatcacacacagattatgcagccagggtgattctccatggtggtgtccttctcttcataaagtagaaatcctcctggcagcctaaatccccaacccat

SEQ ID NO: 66059 - DNA, 2474 bp, Homo sapiens
agggattttgctaaattagagaaaaataaatttgtggaaaaaacataaagatgatttatgaattgcttgtctctagaatattaggcatccagatatcaccagcccatcatcagaacagtgagacttctgtgataatggttaaattcagtcacttttgatgttttgctgacatttggtcatatgaacgccaaagctttgcaagaataattggcagtgtgagaatagaacacactttggcagctgaatttataacttttaaatatttgggcacatggcatataggcctccatttctcctcctgccccactgcgcaaatgttggtggcgggctggagtgggtggtaccgggatccgaggggctctgccttgcagtcccgcagcgcggggctccggggagctgcggggcaggtgccagagaccccgcccccgccgcccacctcctcgggaattggctgccctggtcctagggggcggccccagggtcgggatgaagtctggggtcgcgggcgcgggctgcgtggggtttcagttactcgtggagtttcagttactcgtggacaaagcgccgcgcgctagcatagcggcccgggcggagttccccttccctttccctttccttccacatccgcacgctcgttctccctccgcgccttgccctcctcccgactcctgggtccggccccttcgggggagggtggggcgctcgggtctccgggtctcgcgtgcgtgtgtccgagcagtcctgggcggtgggcgaaggcgcggcttggggacccgggaggggccggggcgcgggggctgcaggaagtggaggcggccgccgctcggggaccggcttggcggggtgagagacacccggaaacggattccgcttcggggcccgcgcgagttgggtgcttcggagggcgcgagaggagcgggcgggtgctgctgagtaatccccgcggcggcggccggacgcccacctcccacgccgcgccgcagccgggccgcggctcctccctccgcggtccttccctcctcttccctcccgtcttctcccctcccctcccctcccctcccggctccgcttggctccgggcaggtagagccgggctccgggcgcgcgcggggccgcagcagctgctcccgatctcgcctcggcccagcgcagggcctcgcacgcccatggccggctcggagcagcagcggccgcggcggcgggacgacggagactcggacgcggcagcggcggcggcggcgcccctgcaggacgcggagctggccctggccggcatcaacatgctgctcaacaacggcttcagggagtcggaccagcttttcaaacaatacaggtgacccacgcgtccccgattccccaaccctgcagcgcgcacctcgtgtccggctcacgcgcctcgacctgcggcccccgggagccccctccccctcctgtcggtcaccgattccggtcctcaggtctcctccctggcaagatcagccagagggaatgcgcctctgccacatctcctcgtccaccccctacccccggctccgttgtcctttccctcccgggacccgccgcgcgcccgccccgcgcgcccgcagtccccctctcactttctcccagcctcgccctcccacagacgtgcccggtgccggtaggctcctctctgcagggcagctggctttgggaccggatgagatttgaggcagcagcgagcctgggacccgggcttgtcgtgactctggctcgcgtgctgccccggcagcctttgtgacacggagccctccggctgcctgctcctcgcgcctcgcatggctctgcaacattgtgcaattccagacgcttttattgtttgaaaacagatacgcacaattgctttgccgtgcaggaatttaaaaatttcagctcaactctgcccactcatctctctgccttgtcttctgcaaactcagtcctcaaaatgagttcctgatgtctttcaagcaggcgttatttattaagaatttttccaacgtaaataaaggaaggaagaaaatggagggatttttaaaaagtatgagaatggtaggaaaacacgtgtgttcagttaattttttatttgtcttttaaaaaataaagcgaaagaactgaaacctggtagttttcctgtgggagtggaaggaaccttcatttctttggggacctggagtgtttgttctcgggttgaggaagcaagtttgtgatttgccgtctgattgttgacgagccttaaggacgttgattagcagctttccccaacacgtttaaggaccacatgcttcacgctatggagaccctgtagtttggttggaatgagaggaccaatgtacaactgtgaccgggagacagagtctgtaagaatgagaatgcctaaagtctcagacctcagagaatggtggtttctacccagcagagcttccaccttcttaatggcgaagcaagtatctcacaactgtgaacttttcactaaa

SEQ ID NO: 66060 - DNA, 2125 bp, Homo sapiens
agttcgagaccagcctgacctacatagtgaaatcctgtctctactgaaaatacacagttagctgggtgtggtggcgggtgccttgtaatcccagctattcaggaggttgaggcaggagaattgcttgaacccgggatgcgaaagttgcagtgagctgagatcatgccattgcactctagcctgggcaacaagagcaaaactccatctcaggaaaaaaaaaaaaaaatgcaattctgtttttgtcatcttgttgttgaacttgtctgtattttaaattactttcatgactgagtatattttgccatactcaggagatgcattcttcatgtacgtgtgtgctagaaacgcatcagtcagagcaatagtccgtaggaagtaagggtcaagggcctggttattattgtttttagggtacctcttagagagcggctcattaatgatctacctgtagataattactacctcaggctgtaggaatggactgtccagcctcctgcttattcttcccttccgtggggaggaaacccagagtcgactggccccaaaagtcttcccatcccctgcctgttacaggctaacagcttcactgatcttggtgaatttcatggcttctcagcaccagccagcgtattacgaagtctttttgctgataagatgcaaggccatatcacaagcagttaacaaaaataaacagaaactgcagtggctgtaaatgcaaacatcgctgtacacacaggggccatgctgtctggggacaggtacccctccaggcctgaggtgcccctgacctgcagggacatctggggtgagctggtggtggctacagactcccatactccccaaaagggtgggcacatgataaaaacgagtctgaacagaagactggacctattccaaacatttgtgaatcaaacactcataaactaaaggctggggtggtcagtggttttagaggcatgccgtcctttagattaaaaggtccctaaaggtcatggtttgagtcatgtctgaaaagcaaataaagtctttccgtgaatttccccacagctatcttctggtaaaggaaataagcacgtgtgcttttgttggtgaaagcagttttacaggttcaggtgatgaaggtcttctatctagtcattttttgaccctgtgaggacagttcgtcagatgaaatgggaagtatgaattttgtaggacgtggttggttggttcactaaacaggcatgtactggggacctgttaaactccagattctgtcctaggtggtcaggacagcagcatgtaacagagatggggtccccactcttggggacttccatttattcaaacaaacaaataatgacacaaatatcaaatagtaataaatgctctgcagagaattaaaatatagagagtgattggagacatattcatgtatctttaaaaagaatactagagaagagaagatcaaagatggcaagtagcctttttcagatttcatcaaatatggtgttagggggccctcatttgtccacaaaaaatatggtgacaagggatgatgacgtgagtcagagtaaacaccatttactcactttgcgtcactgtttattagaagggctgttcggactttctagttgccaaactggaccgtgtatgctctctgaagagcgggcgtattcttggtcatctttgtgtccccagcacatagcactgggccggctgtgtacttggtgttcagcaaacatgtcttgaatgagtgagtggaacaaaactaaattcattagaatttttcctaaagccctaagtatagaaaaggtcactttttattcattttaaactgaggaatattatccagtcatgacttagatgggtgattttaaaattaaatatcttgctttaaaaaaaaaattattgctttttttaaagaaaatttacagttttctcttagataactttggtggagccaaggaacaaactggaaaactataaattatttattagacgatgatcccgaattttattgtttttgtttggtgtgatttcttactcaccctcctagttatttggcttggaaggagttgatgttttaatccttccaggagcaggctcagtgtcagctacgtactatgggaaaacattgagaatt

SEQ ID NO: 66061 - DNA, 462 bp, Homo sapiens
ccctttttatagtgaccatatagtatttgcataataaaaaatcagtaaaacgattttcatttaagaaggtaattacaactagcttttccttttagtgcaatttatagaaatctggattttgtactattttggattttgaagcagaacatttatattcttttattctttaaattggtattgatttggtttcatttttgccttacaacaaaatcagatgattacaaggggggaatggctgactcttagcgaggcattcctaaggttctgggattgatgagtaagtgtgtgaagtctgactcagtgaagagaccctttgatctactctagaaactatactgattttctgtgttgaacatttgtaacaagttttgcattttaaaaatgatctaactggtaactgtagaagattattttaaaaatgaataataactgtctttctttggccatgtttttgtagttgtc

SEQ ID NO: 66062 - DNA, 4448 bp, Homo sapiens
gtgagacccctgtctacaaaatattaattaaaaaaaaacttagccagacacagcagtgcatgcccataatcccagctacttaggaggttgagatgggagtatctcttgagcctgggagattgaggcagcagtgagctacgaatgcgccattgcactccagcatgggagacagagcaagaccctatctttaaaaatatatatatatatatattttttttggtgaaaaatatgggaaaatttatttcaactgtgttaatggctgttcatcataattcctcactcaatgatcaggatagaactagaatgaattctgtagttctacttgctctcggcataatgccattgagctccataacctggtctcagtgctttcaagccctctggaggctgtggggagaacccttccttgcctcttccagcctctggtggctgctggccttccttgacttgtggcagcatcactccaggctctgcctccatggttgacagtgtcctcttctctcctatgtgtgtcactttgaaggatacatgtgattgtatttagggccaacctggctaatccaggataatctgtctcatctcaggatccttgacttaatcacatctgcatacacactccccgaagaaagcacactttttagaggcagttgggcagaattttgactattagtcaattgttaccttgttgaccttgaccaagctccttaacttctttgaactttactttcttcatccgcaaatggaattaatacatacctacctcagagagtttgaaagggttaagagaaatgatttgattgaaatactacctggatttctttttcctttccttagattcaaagctttatttggactcatctttttatctccagagcctgtccctggcacatagcggttgcccagtaaatgtttcctgattaattttctgtcctctgaaggacagcgtgctattgcactgtcatgtaccatgggggacacgggggggaacagctcggtggtgatggcccatctagaaacattctgtatgtgagaactatgtcattaatttagcaaagtgagagagatgtttgcaaagctgaacccctaatgctgtgatttctgtataaatatgctaaatggagtgcatatctgattcaagaaaagaactgttgatcccaaaagggaaaaattagacatagggtgtgacgtgtctagatacctccacctgcgctcatgcacacattcctgcgccataaaggattgattttttttttttaaccttggtgttttgtgtttgagctgtgtgctaacagtcagtgtcaatgtctgccttctgagctgtgggcgattcccattgttgtgaggtttcctccaactggacgttaagttactgagaacaggaatcagggatgcgattggtgcgtgtcttctgtggctacctggtcagcattcataaacggtgataatggattgaatgctgcagtttcaaccttcctgacaacagaggagagtgttactttggggcatgaacagttattgatccagctgggccttggttaatgagtcatttggcttacagtgttcccgagtcacaggctgtcctgaagatcacctgctgactcattggtgcccttgtttccccgaggcctcctgcagtgacgtgctgaggagaggagcccaggtctgcgggtgggggacccgtcctctgagaagcctgcagcttctcctccaggacccttccagcccacctggctggctgtggggataatgggcacttgggagcattggagggggaggaagcatagagaaagcagcaggagacgcacctggaagcccaggggagggaagtccacctccctgcaagtgtagggcagtgagaggagccctggcaccagcagagcaagaaagaaatgcatgcaccgttcagaataagctgtcaggtcgtctggctgtttaagatttatttattaatggtatgtgacatttagcatttctcaatgcctaagattaaactgatgctttgaatcctgatcatgcttttgagctgctcctcttgggtacttgtggcatcgtgttggcagaccctgagtgacatcttcagcggcgggaaaacgaaatgtatttcactgggagtaagtagagcggacatttgagagtttgctgggtcccagacagtgttatgtgaatgaaagtgttggaaatgtaatctggatcctcagggaatttctgaagtgtcgggagaggagatttgatgagcagaagcaattggagaacagcattctagggtatagaagcaaactatcaactgtatggtgaagagctcactgagaactgggctaatggagcggcttcgtgcattcactcagtagcgattgagagacttctgggccagggctgggcgcacacggggatgaaatatggtcccttccctttccacacctgtgtggtaacaaggggctagattagcaaacaattaaaatccaacacgtcctactgtacaagtgtgagagaacgctggaggagaaggcggcgcgagctgagcccttaccacctgagtgaaggagaaggtgggtgtgagctgagcccttaacacctgagcaaaggagagaacgctggaggagaaggcggcgcgagctgagcccttaccacctgagcaaggagaggttctctgtgcttaggttaatttcacagctgtttgggggcaaattggagtattttcctagcaatctttaaaccactgtcttctatattgcttaacctgtttaaaataactatgaaggaaaaagatgcttttgaattatgatgattgtaatgttatcgacagatcttagctggtaattctgttttccttttctccttagtgtcaaatcaacagtgccttgacatctttccacactgctttggaacttgcagtagaccagagagaaattcaacatgtctgtctgtatgaaattggtaaatgtgaaatgtctgtccagcctcttgttaagaagtagtattaatgcagtattttagctttcatgccattcagtgtgtgtctacaaaatgcttggtgccttctgtagtaagaaggacttcagttattcccgtagcacatgcaatgatacttctctctgattctcattacgtttttataacattttttctttacagcattttgattttttaggataataggtgatgttaaatgaattgattaaatgaccagaaataccttattggactgcattagaattcaaagctctttgttcctccttcccactaatgtttacttgagaagaaaaataggagacaggagatagttggactgaagtcccagtgtttttcaccaactagctctgagaccttggacaagttgcccaaaccttcctagccacatagttgccattggagttaaggtgcctccccttgtagcagctgtgaggtttagatgacatgacgtgtgaaacctcatgcagggggcctggcacggaaggccctccatacatgttagctgccaccttctgcttctcccttactggagagacagtcaccaacaaacctggaaggatttatctgcccgagattttccccattctcctccagaattgttgctatgggtctttgctgactgcactaaaactctgatcctattacattagtaattgcaaaatctttctgtgtaacagtttctccattgtgctgggaagagtaaacacaactttgaacttgaaacaaaaaaaaattttaaataagggactcagacttttcagagtttcagcgtagctaatgctacaaggtcacaccatgtagcacataaaaaggaatgacagaggcaaagagaaaggagaaatgatgagatagtgatgagactccaaagggaaattgagacttaaaaagctttctgcagagggacagggaagtggagacagaatgctcagggaagcagttgacacctgtcagtttggggggtcaggccctgtgctgcctgccacttgctttgcctgctgtggacacaattgtcttcctgaatccttttaaggaaaactgaaaaccaaaagattgcgaactgcccaataaacaatattacgttttaaatgcctgttgtggtttaaaaagaggaaatgatgtataatccagtggaaaatgtgtttttgtgtcttctacactctgctggagctctgcttagtagccacaatatagaatgaaatgtgcttcaaagaacttgaatgaaaaactctagctttggtggccttttgttggtgcatcatttcaagtcctatgacaggataggatgttagagcagaaggaagcttagaaatcacccaacccaggccttaggaaggttaactcaggagttggtagtaactcgggcttccgattcaggctcggaagcttgagttggtactttttcctgagttattcctgacttattcctgagttattcctgacttatttctgagttattccttatttattcctgaattatt

SEQ ID NO: 66063 - DNA, 964 bp, Homo sapiens
tgcatacaattattcactgtgtgtctacaacgtggcagaaattattattcctaaaggtgaccgaagagagctatagtttatggggccaggagcaatgtgtggaatggcgaggcagtgacaagacagcactgccataaatctcttactttctttccaaacgagctctaattttaagctcaacgaccaaagacggagaggcagtcgctttgagctactcctggctatttgttgggaaatcacctaaatccgttcagatttagccagaaaaggggaaataagtctccctcgccggccaaatcatggcctttgtcgctttcggctccccattggctgcggccgctgtggccccgcctccttgagtggtgcggagctttgtgatgcggagcttcgtgatgcacgccccgatgcctgcggggctataaaaacgctcgcaagcgccaagtctcctcaggagccgccggcaagggggcaacgaggaagctcttaagagcgcggccggaaagcaggtggggagaatctggagaaaaggcgcaccctgcggcctcggagaccattatgtctcagggagtctctcgcagtgggagaggtcgtcggggcaggcggagggtcctcagagtcgggggtggggggcctgtggggcggccccggcccacaccggggagtgcggcgaccagacggccagctgccgaatctgaggcctcggtgggtccgtcgcccgcctctcttggacaagtccaggcgatgtgagcacgcccagcctcctacatttcactcccgtctctcccaaacagacctagcgcaaaacgagcactgacacagcgggggcccacatcccggaggttctttagggagaggtcggggagtgcggttacctatggctccgaagtccccgctggcatcctgaaaggcatcgtatttctcgcttaaggcgttacccttgtggtagtgggcgcatggacgttta

SEQ ID NO: 66064 - DNA, 704 bp, Homo sapiens
agcccctgtctcaaaaaaatgaaaagaaatgaaatgaaaaaagaaagaaaatgaaaagaaaaatgccaaagtgggtatctctgcagcggacaggatttcaagccacagaatgaagtgtgcatgaggtgactgtacttcccagcacagggaaagttctggagtgctcccagggtacacattcaattgcaaaatgttaaaaggtaatgtccaggcagattcttttgtgccacatgacttacatgttcggtggtccaaggtcacactaggaagagttatgagaactttacccagaatcctagcctgactgacatcagggtggtggtgttgactactaccttcaagggaatccaaggatttctatgaaaggaaatgctgccatctccctacctccccccacatcagatccacctgcacagataactaagcagagacatattccaaatatttaatataccacacttacaaattccaaatacgaaaacttgctctgtgcacagaagtgtaagtgaaattctgttctccactgtggggttgtctgttctttctgagagtttctaggtaagtctatggggcaatataaatgtgctgtgtcaacagaaacacggcattttcagtttctgtttgtttttttttttacatcaaaaatgcacactaaagccattagagcagctcaaattcttgtcagaaaaaagtcacctacgact

SEQ ID NO: 66065 - DNA, 719 bp, Homo sapiens
aggacccctactccccaccacaagagtccaaaatctctactttctagaaccactggcatagacagcagaaggactttcctttttcccagtgcagatttaagaaactttggaacaaggcagttaaaaaaaaaaaaaaattcggccaggcgcagtgtctcatgcctgtaatcctagcacttcaggaggccgaggtgggtagatcacttgaggtcaggagttcgaggccagcctggccaatatggtgaaactttgtctctactaaaatacacaaattagctgggtgtggtggcatgtgcttgtaatcccagctactcgggagattgcaccattgcactccagcctgggcaacagagcgaaactccatctcaaaaaaaaaaaaatcaatgcattcaacaaatattaactacatttcaactactctaaggttttgaggatattaggaagctggataaataaaatgtcgaggaatatttacaattgagataattctgtttcaaaatgttatttcatttctggaatctgcttcagaaactttttttttttttgagagatagtctcgctctcttgccaggctggagtacagtggtgtgatcttggctcactgcaacctctgcctcccaggttcaagcgattcccctgcctcagcctcctgagtagctaggactaaaggcgcacaccaccacacctggctaatttttttttttttaattttagtagaa

SEQ ID NO: 66066 - DNA, 1383 bp, Homo sapiens
aatggcccagatctttaaagttctttttgtttgtttgttttgaaacagactcttgctctggcacccagtctggagtgcagtggcgtgatctcagttcactgcaacctccgcctcctggattcaagcaactctcctgcctcagcctccctagtagctgggattacaggcgcccaccaccacgcccagcatttttgtattttagtagagatggggtttcaccatgttggccaggctggtcttgaactccggacctcaagtgatccacccactttggcctcaaagtgctaggattacaggtgtaagccactgcacctgctttaagatctttaaagttctgtccatgttagaactcagaattattttaaacacattcagattgaacacagtctcctttctcatcaaaatagcatggaagccaatgaatggctattgccggcttatggtgactttaactttactctagaattaagatcctgaccgctatgctcctttttgtaattgagtgagagaactttccaagagttgatttgttaatttttcctactattaaaaggctgaaagaagaggccataaagttcacaatataaacatgccaacaattcttgtaagttatcctgataagcacttttttatcctgacctttggaaaccagcctgagaacaaatagtacacaaagcagcaagatggggaagaactgtggataatgtccaagtcacccttcctcctgttactgaaggtaacagaaaacagccaggaaacgcacacatgcttaatttaatacctttattgtttacggtttcccacgtaccaggcatgttctgaaaatgtccaaagcaacccaaggtacagcttaaaatatcagtgccaaatttttatttagccttgaggtacaactgcataaactcagaaatagcacagtaaatatgaagaacacaaagaaagtaaacacaacctaacatatttaaagtgaatcataaactgaaaaccgggatgagtccagagggggctgccaagagactgctgcaataatttactaaggaagtgacaaaagcttgaaacagattcttggcagcaagcaacaagagtcggagacattctagacagatcctctctgaatgatgtccaaggtcaaaattagccaaatggtagggtattgcttgtgacagagtttcttaaaagtaccggctcatccccaagcaactaaatctactactgttttctacaatttgtaacatctgcacatgtaatggaacatgaggagttatacaaaccgtagtgtgtgggctactggaaatcttacgtggatctattttgggctaccaaatccagagcttcccaatttgtcttgtttctcaacattatttttaggaaggtcacattatg

SEQ ID NO: 66067 - DNA, 1272 bp, Homo sapiens
atgtcagccggagcacagccatgcgaaaaatcactaacttggaaggttatttaggacaataatgtctttcactgtcttactcctcccactccagcccttcttgacctaataccaatattcaactgagaaacacatcagtccacgggctttttccccaggggctcttcctgcaggaaccccacggcagggagacccgcactgggaagagagcagggtctcccggctggtgcgcccctccccacgcgcccgcggctgcaccccactctgcacacacacgtccaactattcttggatctactcacatccctggatcaagtctggccgccctccccgctccgtcccccggcgtcctccgtggccccaggctgccccgcaaagccaccgagctgcaaatacacccacctacctgggccagatccgaggaccccggctggcgcgctccaccctgcgctcctcgcaagctccagcgcgaatgcgctcggcctgctcctcctcctcccctccagtcgagccgaggcgagccgatccgggaggcgcgacccagggcggcccgcaaggtctccctaagtcacctttgcgcagcctgcccctggctccggccgggcagcagcgccagccttccccagcgaggtcgggcagaggcgttgcccgccagcggcccaggactcccgcgccgcgcccgcccgggccgcagaggtctgcgctgcccctccgccgccgctggctcggccgcagacccgccctccggggctcgcggggagagcgcgggcgggcggcggcaaggcctgcggcgggcggctccctgcgcgcggcgggcagcgtccgggccgctcctccccttccccagcgccgctggcgggcggaggcgcaggtagggaccgccggggaagcctgcacggccctccgaggagaggtcggggactgctccttgggctctacgtgagtgccgcgccgaggcgcctgcgaggtcctagagctgctgtgcgctcggccctctcctggagacaccggccctggcaactttttttttttcttttttctttttttttttttttaaccaacccgccccttgggaaactctggaaagcaaaggaatcttctctccagtcctgcctgtcacttactccggctcacgctgaagcgttcgcgtttacggttccaaaaccaagactgaaaggcagtcttcacatatttattgtttataccctagttgggacactgagcaacaaggaaaacaacggtattaatcctactaccgtgaaacctacttag

SEQ ID NO: 66068 - DNA, 1294 bp, Homo sapiens
gaataacccttttcaatgcctcctgccaatcattagggcagcgggataagtgaattgttaaagtctattgtgcagctgcgctctcattcagtttcagaatctcccttggatattcgttcatgcttgtagaaccgaccacgcggtacattgggaaacggtcacatgaacaatgcgtgacttccattgtgcatcaatcctcctcttgttaggaggaaattaaaaagtcacatggacacacgaaagtaccgagaaggcacgcagctgaagatctggtaggggatgcatgcggcaccagcatggtcgtggcacccgagtgggaagtgcaacaaacgccaacatcttgttacttttaacgcctaacttcctgcagcgctggagcagccagcggccgccgggaagccgagctcggctgcagccctgcgtcgccgcgccacgacccgaccatcctctgagacgcccgggacgggagcgcccacccccaaccaggcgcggacagacctcccgagcgcagcccggcgggaacccgtcagcgcgggaaccggcctcgaactccaggcgtggacagccgcgagaaactgacctacgcggtcacccgggctcccagagctcccgaggcggtggccacgaccccaggcttcccgtccgcccgccccacgtcgaggaagtggtcgtcaccaactctggctggcactccccgaggacgctcgagcccgcgtaacgtctgtctccgggacccggcgccgggaccacggcggagcgcgaggtggcgccgcccctccccgcagcccgcccctggaacgcgcatcctcctggcgagctggcatccctcccgacacgtgaccgcagcggggacacgcccgttccccgcccactccccgcccctgcctggcctgcccacgcccccggcccgctcctgtcccgcctgggccaccggcgctggttccaggttttgccagctactagggacgcgtaaagccttcgcgctcctcccaccacaccccgagggaagaagtggcaggccttacccggagactacaaggaaccgcccgtgtgagccagtggaagactcgcgtccccaggcaaaatataagtcctgggttaatagtctgaagtctgtcattaagcaataggttatccagctgcccagatttttttcttttttgctttggctgcaactcgacccgtgggaacttaattggcaatgtaaattagacaatttacaaaaaaacacctccttttactttcacctgtgaaaggaagcgcttaaaatgccatacaggtgtaaccattatag

SEQ ID NO: 66069 - DNA, 2233 bp, Homo sapiens
taattcataaccaatgtattagaatgtcattgaacttgtgggcgagggagtaatgacaaactgattcatttttttgggaaaatgaatcaatgctccttatgttgactggcataactagtgactggcacaaaagttgcccccaaaatattcgagactaaagaaaacgatcgcaatacaacagtgaatgggagaataaggttccccctcacgctttcaaaattaccgcctgccttctctgttctccagttttggtaaatcaaacctatctttgccaaaatccgacaaaacttaaaacatgttaaaaacagacaaacaaacacacaaaaactctccctaggaatgtaaagacgagtctgggactgtggactgaggtttgagtcccttcccgggacgcggtggtaaatgactccctaaagtctcctggccattccgatggcgccaaggccgcaatgggcaagcaaaagccccccgccccggcgcattcctaggagacagagccgtgagggcctctggctgcaactcgcgagggtcggctttccctgggtctccgccctacgggagacagtgaaggcgggagcaaggccccaaccgagaaccccaccccaaacccgggggccaggagccctttacacccttcggcccgccacccggaagcagatgccggcggcgcggcgtggcagggttgtggttccgggtcgggccgcgccgcagccagctctcggctcgcagccgcagcgccccgcccccgcgctccggacctggcaggcggcggctgcagggcaggtccaggggccacatggctgagggggacgcagggagcgaccagaggcaggtgaggccccggcggggtgctgtctctccaggctcggctccggctcgcctcgccatgccagtcctcctcagccgaggggccctccgcctggggccgccccgggttccgccagcactggccacgccatttgctccaccgcgttccattttcccggcgcttcccgtcggccgagcgctcttaggccggcggctcctcggcggccgcggtctcggcctgtctcggacggtgtcctcgtcaaccattaacacgcgactaagcagctctgggccgaaggcaaaaaccggggtttcgatccccaccctgccgccgccgagtcatcttggacaaatcacttaagaattcgggtttccccctttgcaaaatggcaatagcccagaccctgcaggtcccgagagcccaccgaatctcactccttctggtccttggcatcgagctttccctgtgccttgttcacgtgggcgatcataagtcttttcctacagggctgtgagtacaaaatgaaatgctacgaagtcgaatggatactttgcttcccatcttttccctttaggtcctccagttatttttcttttttaaccccaagcccaaagaataatttatgaaacgttttaagggtttgattaccaagcaaccacccacccatctagtccttgtgtaccccctccccacctccccccaacacaaaatttaatacgaaggaaccagtgagacacccagcaggagtacacagataatgtggggcagagctattgggggtgggagtcaggggtggagattacctgttaaaaaagagaaggtggaacagagaagataggtttatcttttcacgtgtgaatggtcactacaaagtatgggagtgcatatatattatattttgactcaatagtggccaaaagcacagtaatgcagtagcaaggctggctccagtcattgcagtagcgcctagcaaccacccagagagcagaacatggtgacctgctcttaagaaactcttggcctggtgaggctcatctaggaatttttgatctactctggtaatgttgaatttgaataccttataaagtagtaagaataggattttaagatgtgtacatttgttgacttttaaaaaatcaatttctttcagaatgaggaaattgaagcaatggcagccatttatggcgaggagtggtgtgtcattgatgactgtgccaaaatattttgtattagaattagcgacgatatagatgaccccaaatggacactttgcttgcaggtactttttcccccttccttgcagccatctttcagttacagtatgaactatattgttgacttctgtattctaatgattgtgttgttttctaaattatctttgttcttggcttttctcaatgattaaacacatgggcagttacatct

SEQ ID NO: 66070 - DNA, 697 bp, Homo sapiens
ccaaaaaggctagctgctactatgaagttggataaattgactcaggaaagggcagaatgaacttgatattgtgactgtacatttcagagaggccccaaagagcaaatattcagatcacagcattcactcccggaataagcatattcgaaaaccctttctttgtcaagcacgatacgtggagggagactcattctgtttcagaaagctgagagttaagtggccaagataaccccaaaagacaatcctaatagatgtggtggacacaacagcagaaatatggccacaggtgtcacatttccaggtatagctactaaatttccatggacacaaatgtagtgtaaagacacatctaattaattttttaaaatttgctggattctgttattgcaaaacccgggaatttggactatggtatagtggtggttgcgtaaacatggcgtcatacttagtttcttgagccgttgccagatgtgcagctattatgtaacaacacccctgaaaggtgctttgaacaaatggaactttcatgttccttaaccatataaatgtctatgttcagagcaatacaatgaagattgccagaaagacaattgccccaagcacattcatatttccagctgactatactttttccatctgaatgtacttcctgttgttcttgtggggcttttatataaatcacttcaattttaaacca

SEQ ID NO: 66071 - DNA, 2126 bp, Homo sapiens
tttctattttgatctttgctacacagcataaaacaaaacaaaaatatttaaagtaaactgctaaatacagcagcaacttctgaaagtctaggtcagtaaaatttagaatgctgccttgcttgcaggcaacaaggggtagaggacaataaagaacctttgtgttccgactggcagtaacacagcagcgactgcagcagctctatcctttaaaaaggaggcagctccctgtgtatttatcacgacttacattaactggtcacgacagtctccaccattagactgtaagctccaggaaggcaaggaccatgactcaccacagtagcctcagcgcctaaaataggcgctcaataaatatttgctgcagaataaatgaataggcggcgatgcagaagggaagaagaggctctggggacaaccccagagtccatggggaccttccttgcccgctcctcaaactctatactaaggttccctccagcgttccccaagtcctcctgcgagctcccaaactcggctgagtttgcagggcggcgaccagcgcaccgacttcccctctgcctgccgcgacccgcggtggggtccgcacgaagcagccgcggcacgcggggcggggcgacgccaaagtaactccggagcaacgcgcggggccgccggtccgacacacgcccttccctgagcggccgccgccgggcgcacgcgccccgcagcccgaacgccgccccatccctagagaaatcaggcggcggctgtttgggcttttgtgtctgtagaaaaacgcgtaaatgcgtgaaagactccgagaaaaaccggttcaccctcttccgccacccactcaggcacagccagcagtccgtgttcccaaacactgctgattcccagcaggcccgcctccgcctcggcccggtcgactccgggcccggcccttccccccgcgtctgtctctcccagaggcggtaagggcctggcatccgcaaccccgcgcggtttcaccttctgaatcgcagcgggagtgatctcccccttgcctcgctgcctcggggccgcgaaagccacagacatgttgccgccgtcaccactatcggcaagtcccgagcgctccgggtgaacggcaaactgggggagagacgccggcctctcgggctgaaccacctcgggaatgcggggaggggggatgctccggggccaagcggacgggcggcggggcaggcctgaaggaggcactctggccagggatgtctcgcttctgcgcactctgggggacccctagccctggccgaactttcttgaccgtccctgcatcccccgagctctccttatgggcaccccctggccctttgcgctaatggtagagtcgcgccctagtcctccctccgcttcagcgattcaggaaatggtcccgccgccgcgggagaaggagaggctggggcagcccctgtcacaggaaatgcgagcggcccaagccggcccgcccccttcgcgccgtggcaacttgcctccctctccggccctctgaagcgtctccccgactgtgttgcagagcgtgccctagacctagttcagtttttccaacttcatccttacttacgcctcctggcaagagtggccgccccgagttgtcccggcagcccggagaggggagggaggtcaagactcgggagttcgtgcaaatccgtggagcatctgccgagatagggcagaggtggaaggacaaggtgaacgcggattcgctggtttaaatggctcggctacgccccaaatgcgcacctccgagtccacagtctcgcacgcacgcacaaagtcgtgcctaacaattggaaagtaaccctgacccgaaaccgggacaccaaggttgtgtccagtgctcaggggcaatcggccagcttggctggagcggacagagaagagctcgcctcttgggacaaacccttagcaggaaagtgggtcgatttcgtctgacttggctttttggaattaagttgtgaaacagggcatcctcactctctgttttttaagagagtacttacttagtgccttgtaaattaggcccaagctgccaggcttcaagtcagtgtaagggaaaaaggcaaagttttcaaattatggaaggaacacggacaaatgtgggt

SEQ ID NO: 66072 - DNA, 468 bp, Homo sapiens
caaagctcaggaataaaaatgctatatattttgtattcagattcaagaaagattgactttctaagttagctgctatttgggggaagagaatgctatcaccttcataaagttgtgaattatgaaagacatttctgttgggttactgaatgtcccttggggtttttttcatttataacattgcctcaggctctctgctgcatcctgttggaatgaccttcttttcaactctgtgctggcagctgtaatatggctctttcccctgaatccttcaggcttgtcacatgacaaacatgaactgtgacccctttgttccttactcagatgattaggtctctttattttttttttctgtttgacaattttgccttattgtctttcctttcccccctctctttgcttccatgttaatttcctcctgaggcaaggtttttggggtagcaatttaattttttttattgaaatatagca

SEQ ID NO: 66073 - DNA, 1739 bp, Homo sapiens
cgtgcggcagtacgggggctcattgaggtagcggttgagggagctgcggatgctgatgagcgacgacttgctgtagagctggccgcttttggagcgggcctcggcatagaaggagcgcagcacgcggcacagcgcccccttgtccatggtctcgaagtccgggctctgcgccttctcgctcaggtactcccggaagatgcgcacggcgtagcgggtggccagccgggtgttctcgctcagccgggcccgctcggggcgctgcagcacgtcggggtccagctcggagccgtccccgggcggcccaccgcgggcccggggcgccagcagtcgcggcggcgcctcgggctccagcgcggcgctctggtccatattgatcatatggaccggctcgggctccagctcctccccggccgagtcctcgggctccaggggctcgtcccagtccagccccatctcctcctcttcctcctcctcctcgtcctcctccagccccccacctccgtcctcctcctcctcctcgtcccccgttatctgcacctcctggatctcgtcctcctcctcctcttcctcctcctcctcgcccgcgctgcagtagtgcggacggctgtggcggcggccgcggccccccgcgccgcgctcgccctcgccccgctccccattgttctcggcggcggcggcggcagcgctggcgctgccgcccgcgctggtgttacagtccccgctgccaggcattctcgccatattgccgtctctctgccagtcctcgggcagggcgcatgcgctatattggaccgcagcgctgagagcttttgtgtttaatgaccttcagctaccgggaggcaaagccgggctcttaaaggagccgcgctccaattgtcattcccgagcgcagctccggaggggcagcggcgcgcaggggatggaggggaggggggagggggggacaagttagaccggagagatagggtaaaggacggaggctgaccagaccttcttcctcccccacccggctcccacttctaagaaaactttgaaggaaaaaaaaaaggaaagggagggagagctgtcggtgggggcgaaacactcccaacttaccctctggcggagaattgcgcgggcccgggcgggagagagggagggccggcgagagggcgggacggtctcgtttctctaagtaatgcccgaggagcagtgccccttccactgccccctcattgccccccggagccggggggtcggggcggcggctgcgccgggcgggccgcgggtgctgccgcgggaaacccgtgtctggggccgcccggagcggagcggagcaggcaggttaatgagcagggtggaggaggcacggcgaggccccgcaccctctcggcgcccgcggccagggcgcagcgggcgaggcttgggagcgggatggggctggcggcggcggcggctcccccacctacttgctggcggcgaggcgcgggggcctggggccagccgcgcggctcccaactccctttccgactcttgcaaaggagcgaaacacgccccacgtcagccacatccctttcgacttttccaacagccacatttaagctgtcattaaagacctggggcgctccccgtaggtctggggcaagtccgcgccggtccagccagccccgggaaggagcgaggcagagaagactgggaggggccggtgggaggggagacgagggaagaggcgcttgggaccccaggggccacagggaccc

SEQ ID NO: 66074 - DNA, 666 bp, Homo sapiens
ctgcagggcataaactaacccgccagcaaagcatcgccgagtcgtggcaactcggatacgcgtgcagacttgaaaatgcagagcgccgcgccaaagcctgcgttcctgggaaaccacatgcagcgtctcccaagaacgtggtgtgcgtgcgggcagggttcgggaaacaaaactagttcacgcctgagactgcgaccccctggacggggcggtttctaactttcctctctctgtctctccaggggtggagggaggggcatgatccagacaccagaacaaagacagccaggtcagaaatggtgtggtctgtttctgcaagtcacggtctttgtgacctggggaaatggcttagtctctagcctgccagctagaaagggaaagcctttatttgctcaagtgctttgggatcttcaaaggaaggctctgaactattattcaaatatttgtacattatttaggttgtgcttttcatacttcattatgctcccccaaacttctcagggaatttggatcactcagaaactttagcgtgctatcgtcccttactcatcctgccctccctaaagcctcattgaaagcactgatcttttgattattggagcttctgaaacagagccaaggatgaggctttaagtgtcagctacgacgatattcggtgttattttg

SEQ ID NO: 66075 - DNA, 770 bp, Homo sapiens
ggggaaaactgaagccatttcttcagctgggcaccctctcttggtgcttaggtctcccacacattggaaggagccccgtttatcctttgagtcacaaaggaagtataggatgatgaaactttgagctacccccatttttgcctcatctctatctacttagcagtgtggagaagttggccaatggtaacatagcccttgtggattctctcagaagcaggtaagttccatttttagtaaggctttccatgtttctgagagttcaggctccacctgcccaaagccaagtgggtgacttagagaggtgattcattgagtcaacaaacaactattgagcacccaccctgtgccaagccccattccaggctcttggtttaggcagtgaataaggcaaagttcctgcttgcttctggccggggagacaaacaagaatcacgcgaatgcataatatgatgtcaggtgtcctgagtgcagtgacaacaaggacagtagggtcaggggatactgagtaataggtggactgtgcagtgggcgcggtttgcatctagtaagggaacttaggatacccagggtgatataggagctcagtgtggttccctggtgaacctagcacctttatcattcagtcagatctaaattctgataaggacagggcacactctgttcaccaacatagctaggcaagcagcagctgagagcacactctcagcctgcgttggtgtggagcccaaggatgtgatttattattactattgttatcacctctgtcagcc

SEQ ID NO: 66076 - DNA, 2103 bp, Homo sapiens
attctccacgtacaaagccaacggccccatttgcgactttgctaacttagttggcttccgcccagccgaaccccgaagcacagtcactgaaaacgttttgataccagaaaatcatttccacgacagtgcaagtgttcgaaagcacaaaggcagactgtctacccgcgacagttcgcaagttgcggtggcggggcggctgtgcggagcgcgcgtgcaggtaagggattcctgcacccaggtctgctttcctcttcctggatgttttggggctcgacctcacttttaacgcgaattcaccattacgcgccccccaccccgttctttttccaggaggcgcggactgttttccagccaggtccctcttgggggcgggagaggaagcacacttcacattcaataaagaagggtggcgggagtgggtaggggggcggcggcagttgggggggcggaggaggaaagaggtcagaaaggagccaaactgaatccctcccgcccacctctgcgccccgagcgctggttcagacggcggaggccagaggcggccgggaaactgtccctttaagggaacctaggccgccaggaggggagggaaggatgcgggctcctgacttggcgctgaccgcagcgccgggaagaggcgagcgcagcaaagccacagccattacctgcagcgctcgcatccttcccccgtcccagcgccgcccccaccccctccccgcctcccaaggagacttctaatccggagcatgtgctgtgccctttatccggggaggaggtggggaggaagaggaataagagctttttaaaaataaatgaaacgtttgcatccaaaagggggaggagggctggagatgggagggagtgggagggggctttaaaggcgcctgggtgggcggaggcggcgaatctggaccagcccggccggcgacgaagagcgccgggcaccggccgcggcccacaaaggggagcggcgtggtccggcccgggcaaaagggggaaggaaaaaccgccccgggccccagtccgctcggccgccacaatggcgtctttcacggggcgtccgggggcgccgccgaggctgcctgcgagaagggggcggcggggcccctacccccggcaggagcgcagccccgggcgccgccgccccctgcgcgccccgcagagatgtgcgcttggctctgggcgcccccgcggcgctgggcgctctcggcggggccggtttgcgggcgcggagctttgcgccggggaagaaagggacgcgcggggctcgggggaggagggaggggctcggggagggcgggggagagccgcggcggagcggccgcggggaggctggcgcgcggagcggcgggcgggcggctctggcacgggctcccagagccacggcggctcctctccgagatccggaacccggcccagagatccggaaacccggcccccggccgcggcccctgctggccgcacccgctcctcctgcccgctctgctccgccctgctctcgccagctcccactggaggaagaaagccgagaaccgggagcggcagccccggaggaggcggcggcccctgccccgccgcgggtccaagcggattcctagtcgcccgccgcggcgggcggcgtgtgtgcgagtgtgccgcgctctcgccccatgcctggcacatgcgtaaaagcgagttgcgcccaaagtcccagccataccctccttagcaaataataacaaacccaaaccgtcagatcttacctgaaacattgaagcacaaagtctctctccaagtccccttttccttttcctctccccccttttccgatttctctcccagcgatctgctcggctcgccacaccagagagaaatgcaatagcttggctaaggtagacagaacaaaatacagagaagagttgctccagggctttgaaacccctcaaggcaaggatcaggatacaattagctcatgcctctacctctagtctaaatcaatctccaaaataaaacttaaatcaaattaaccgatcacagggcaaacaattgatctccttcaaaaataaagctctacatatacgtatagagaaatatacacataggaaatttttttccagatttttt

SEQ ID NO: 66077 - DNA, 882 bp, Homo sapiens
ctgtatctgattggttgaaatcacttaacccaactgtcccgtaaagaaataaagcacctggcacaatgttcattgcacaccaatttccctttcctcctatttggggctttgggtgcagagtgatctctggaagttggaactgggatcaatttccaggaaaatttaggccatgaatttctttctcttttaaaatctgggctgcttttcatatatatatttgctactaaggcagcattattcttgaatttttcagtattttcatttagagggccatcattgaaggcatgaggacatttcagttagtacagacttggaatttatttgtttgatttattaaaaatataccctagcctgagggtctcaaggtgtacatataaaatacttcaattaaattcaaaccagcagctaaaatttcctgttaagaaattgaaatatcttaaaaagaaagaaagaaagaaagaaagaaagaaagaaagaaagaaagaaagaaggaaaaagaaagaaacccaaacacacacacacaaaaacccaaaccaaaaccccacccaatatggaatgcagcaaaagtacaaggacaggcctggtgccattgcttcaaggtcaactggctgacgggctgttgacccaggaacgggagacagttgccaaacaggactggccttgtgttagctgaatgtttgctccatgaacttgtaatttaaagggcactggctaccccactctccaaaataacaacaaacaaaagaccttcattttattttgacacggtacttgaaacctttccaaatagagtcctttgaggttgaaaaaaaaaaaaaaacttagaaaattatacaacctggatcaattaaggagggaggtcattagtgattaatattttaa

SEQ ID NO: 66078 - DNA, 3099 bp, Homo sapiens
agcctgggattttggcacgtgttttccggtgtctctgctggcccctcaggtcgaggaaagtgagaatgtacaagtggagagacctactggtgctgccagaagccaccctccacagatgctaaacttctttgaagtctcattttcattttaaaaagtaatgtagattttgcattctactccataacacatccgtgtttgttttaatacaaaaattatgtttcagatgacttagacaaattacttaattcctttcccttcattccacccatcttcaatttgagaaaaatggtcaccccgggagataaaccatgtttatctgatgaatgtgtataccacctggcactctggttgacacccactaaaaagccaaagactagggagacacagtgggatgggggtgagatgggtgtatgacagagaacaaggaagcaggcactgggcagcgaaagctctcaggtggctgatgaagctgccaaagaggacaggaagggctcaggcactgtttaccttggagagggctgggtgagcctatgagctggtgtcgtggggtcagtgtgacttcagcataactggtagagcactgtgtatcttctccgttttcttatggggggaggggaagtagggttagaaaataaaggaagggagaaaacaaaggaataaagaccatgtaggagggcccttgggagactttgaagcatagggtattttggttgtagagtcttcggagactgtcagggctgaatttcttagagcttaagtcttgctgcctagggcaatggaaaatggctgtagagtcccagaaatgtgtgggtagttgaaaacaatgaggaaaagacagcctttggcagtgatatggagaatctactggagaagaaagttgtaatgatccagatacaggagtaaccagggagaagctctacagctgcagatccagggaacatcagagggacagggcaactcctaagtccttttactgcaggacttgtctctcccagcacaagctctaagcatttctcttcactcattaacatcgcctggcttacgatgtctacttccaaaaggaatgtgcttctctttattcaggagacatttacatgctgtaattcacttaagatttttggctctaactgctttgttcctgcaaatcaaggaatagcattaacacatcagcttatcatcagatagcttgggatgaccccttcagaaagaaaaagaaaattttaaatcattgtttccagaaagggcaattagaacaccatatattttttcctctgaaaatctggcacaaggaatttgatgttacctaatattctcgatggcttttcagaaggtaacattttacccacgtaaggcatccatgcaaactgcctaggtcacaattgaaaagaaatcaatgtagtccagaaagaaaccacaatatgaggaagaatgagcattaaactgaaatttggaacccatcatgtgacgtctgctggcagatgtggctcacgctgttcgatgtgattctgacactctccgtggtagggctggttagaacttaaagtattttatgggtcatgagacattttggctctgtctgcaaagctgccctaaggaattgtgtttttatgccttaactgttctttccaaagctcacttttcactaagagtgggcaaccagagaggtctttgtccaaatacattacataatccctccaggaaatgccgtgacagtgtatagttgatgaaatggaagccctggtacagtgacctttctcccagatatcctaggacatactttatgcttcactaggcaaacatcccttcttccaaactggattcagttctaaagatttctttccttgctgggggccaggagacacaatagggtgcaaaagtgtgaagatttttttcttttaataaaattatctaatatttctacaaactggaagtgcacacgcattgcatggttaaatagagttgtgccaaaaaataataacctagtccttgccccgaggaggtaacggtatgaatgatgcaattcaaggagaaaggaaaaggcagcttatattgtcagtatcttcccatcatgttgctgtattttgattgttgttttttgttggtatactataagaaggataggtagggctgttctctgaaaattacttttattttattttattttccctggatgttcactgtgttatacttgttaacctacttcttttttgtgagaggcatataaaatgcacgatctgattcatgcaacatttatttaagcatgttaactttgtgtgtatttacttatgaagcctcagggctgatgagcaacacgggggcggggcggggcacggtgcggggggggcgggggggcaacttcttgcttctggggactgttactttaagagtaattatcctgccagtaatgatgacaatgactgtaacatgaatgcttactttgaaatggcaatggaatctgtgtgtccttgaaatttttaattcctgtaagagtcatccaaaatagataaaattaagagcctggttgtagttgtttatctgtggctaattagtgaactatattctctcctaagcagaaaaaaagacaagctgtctctaggatactaaaaggtcagaaagttctaagccaattttcctcatacttgggcaatgcacctgctcttttagaggataaaaatgattgcagctctacaatattgacaaattattttgttacaatatgactcaaatttatatagatgattcatgtgcaatgaaaaataagggatattttaacaaataattgagtgcaggattgcttatatgctcattagataaaaactgcttgactatgctcttgaaatcttttgtatgtttttattactttttgttggcttgatctaccaactatgcagagaggtacatgtattagttttttggggctcctgtaaaaattcccacaaatttggtggtttaaaacaacagaaatttattctctaacagttctgtacgacaagagtctggaatcaaggtgatggcagggctacgctccctctgaacaagattctctaggggagatttttttcttccctcttccaatttctggtggttccaggcgttcct

SEQ ID NO: 66079 - DNA, 724 bp, Homo sapiens
ctctgcctcagcctcctgagtagctgagattacatgtgcctgccactacgcttggctaatttttgtgttttagtggagacagggttttgccatgttggccaggctggtcttgaactcttgacctcaggtgatctgcccgctttggcctcccaaagtgcgtgagccactgcgcctggcccaagatatgactttatgtatgagttacacttccaactttctacattgtataactctctattcattataaaacttaaacctttagccttcactgccttcaattagcctccttcccctttcctgccccatgcttattcatcagcatgcatgattgccaaaatcaagattcagtttcatttttatttctagtatcaacaggcctctctctccctctttttcttctttcagagctcaactattacattttcatgcagcatttctaggtgtctgcaggtaaaggatttctggggtgtgtgtgtgtgtgtgtgtgtgtgtgtgtgtgtgtgtgtgttttcttttttaagagatggggtcttgttttgttgcccaggctcaacagattctcctgcctcagactattgagtatcttggaccacaggaatgtgccactgtgccaggctggatttgagtttaaatctactattttctaggcttattgaaatatcaagatcttagaaaaaaaaaaaacccatgtgaatgaatctttgtgtgtgtgtttatatgcatg

SEQ ID NO: 66080 - DNA, 1257 bp, Homo sapiens
acagagagagagatttattttaaagaaattggctcacagaattatggaggcttggtgggtccaaaatctgctaaatcaggtggagtaggctggcaagctggagattcaggatttgcagtttgagtccaaaagtggtctgctggcagaatttcttcttgctcagggtagagcgaggtttgttctattcagtacttcaactgatcaggtgaggcccacccacattgtggcgaacagtctgctttgctcaaagtccactagcttattttttattttttgagacagagtctcgctctgtcacccaagctggagtgcagtggcaccatctcggctcactgcaacctctgcctcctgggttcaagcgattctccttcctcagcctcccgagtagctgggattataggcacacaccaccacacctggctaatttttgtatttttagtagaggtggggtttcgccatgttggtcaggctggtcttgaactcctgagctcaagcgatctgccggcctcttccttccaaagtgctggtattatagacgtgagccaccgcacctggccaaaagtccaccagtttaaatgttaacctcaaacaaacagcgttttcacacaaacacccagaattctatttgaccaaatattttggcaagctggctgagccaagttgatacttaaaagtagccatcacaccaacactgtagcttttgtctgttacttggttaatgatgtgttttcatatctgcctcatttcctaggctgtgaccacctccagggtagacactatctgaagtgcctagtgtggttcctggaatttagtcactgctggatacatgtttacttgatgaaatagtaaaaagggaagcagggtaggaaacaaatgctgttttgtcacctgaccctgggaaggcataggttttctgaattcttaaaaaaatttatttgcaatatttgtaattacacagcctatacctgtttcaaatcagatacttatgataaaaagaacctgtactgaggggcctgcatgtgccaggtactatgccaagtggcatccatgtttctcattggccacagaaggtaccctcacagatcaacaaatacttaccttcttttcctgtagaaaggatgcagcatgatttcttgtggtcctgtttagttctgaaaccatctaacaacatttcagggatgaatttagggtgttttctgtggggggtggaaagcaggactagaattttttcatctcaaatgcaggtaacttttagct

SEQ ID NO: 66081 - DNA, 2109 bp, Homo sapiens
gggagcccaccagcccttgtgcaagtttcccatctctctctccttagctgacagaagcactatagagatttaaccccaggcctcttttcagtttaattcccatggacatctcccattatggcaaaggcagctgataggaaatcagagatgaagcaatattaagtgttacccaggggacctctcatttggagttgagaatgaatcacctttagcctctctcctccatctccgacacctgccaagtattgcctgggctgtcagtagctgtgtctggcgcctgtgcagggtgggagctttgtaagcatttctgctccttctccttagttccaaagcttgtttatgtttcattacctttttcttccaaggtgaacatgagctgttaggcagtgctcatgaagcaattgtttggcttatataccaaaattttctcacattcttgcaggactgattttcttcatgccaagcacaaaaaatgctgttcaatacactttctccttttctccttgtgtagtaaaggaaggattcttggatatttatccaaagttttgtcacactgaaaagagaagactgcattgaggtgatgctccaaaaggagcagctttgatgcaaaagaagcaaaacccttttgtttcttgggcttatacgaaggtacttcctttagatcagagtcgggatgcatacacactacaaaaactggaatgaaaaaggcaaaccatttttactcaacagaattctctgtacaggtcaaggaaatgccaaacttaacagatgtcttagactgtgccctgcaggtcaataaattagagttttgttgaaccaggaagaggaaggaattccaggacttcaggtccccaaatggaaatgccccttaggacaagtctaaactaggcaaatagcactggagctcctccaagtcagttggctcagtctcgtgtaactcatttctggcccccctgaagctgtttgttcaactgtgccttctacaacgctacagtgtcaaagagagttaatcattagcaagtgtgaataatgtcagtgtaacgcagcatgattgcagttcagtctgttttgacaaaattctaagcatttgtcagagtttaccaaaaaacaaaaaacaacatgaccacagaatgttaaaatagcatgaagtttggggagcagttaattcactttctagcattttacatcaccattctcatcgttttcccagaggagagtgttgggtgaggccctccaggtgatgcagtattactgactggcctggtatggtctgattcagttcaagtcagcttaatgcagctcacctccagagatccaggctttggagaatgatctaaaggtttaggtgtagggtccttaacctccccattttccttctcctttgtcagagccacctactgccatagaattaatatggacccatctgtgatgcagagcctgttaggcctcctgcttgtcccctgggctggggatcataatgagtccaagccctcccttttgactggaactgcaggggccctggtcctggaactctgaggttgagaatgggatgtaaagctatattccagcaagcactgaaggatgagtttttcttgggctcatctgagttctggatgaaatgagagtgatcatcctaaaatagaatcaagaattccagcaggcacccaaaatggctgtccagttttagagtcatggcttgaggaggcactcagctaagtcctgccaacagtagctgagtcccaggccctggaatgcctctgaaaacccttcacatgttataactatgataattaggatgctcttccaagaaggtgcacagacagacttcatttttcctgggatcagagcctctcagatatgcccttcttcagttcacacaccgctattcatttgccttgctgcttaacccagaaagtcaggacacgctggataagtcaccaaatcacacaccctaagatctccaattatccttctctactctcttcctgttgccataggcttagtttggtcctagtaatttctctcttagattccttttagttaggctttatgaccctcaaattcagtcaagatgttgccagagtcccctctttaaaatgcagaattgct

SEQ ID NO: 66082 - DNA, 564 bp, Homo sapiens
ccaggcttgcttcctaactagaatacacacaactgtgctactcaaattctatttacaacccagctatggcctgtgtgtctatgctcagaacaacctaggcgtgatagttctcttgttatttcttatgaattatttatcttcccccctctgaactttcttcaaatggcacattgcaaaggactagttctttactaaagaatattatataaaggcaagaatgttcaaagcttctctgcatcactacacaaacaattcaagaaagatgctgccaaatgccaaagtgatgggatcacagggtagcagagataagaggtaaattgtcatagcaaccagaggacctccattggaatgactgcactccaacttaaaaggaagttttaagagcttaaatacacacaaagaaatggctaatttcataaaaatgtcatttaaaaacaagagaatctctttaaacttttctgagtgaatataatttggaaaaaatataatgtaggaaaatgccaaatctggacattagtgagtcttcaccataatatttaataagaacaataatttttgttctta

SEQ ID NO: 66083 - DNA, 633 bp, Homo sapiens
aagtgaactcattgaggggagaggagcttctggtgactagcaagggcgatgggaacaggcagggcctcagctgggacagcgacactccctccctctcctttgcgccaggaacgagcaggctgccagcgggaggagtccgggagctgagcctgcccaagggacacgcgcaccgcccagatctgggagcgcggcacggggacgtgtaaacctccgtccccagggagcctggagcacctctcagagggcggagcagcggccattcccggcccgtggcaggctcccgggcggcggccaggtgcacacgcagaagcggccccgcgagctcgcccgcctgcccgccggcccggtgcatcctggccgctggaggtggggagagatgggagtgggggatgcttttaggggaggaaggacagcctctcctcgtgcccgaccctctctcaccccttgaccctgaccgtacaatgcagataaacctgccaaagggagcctggaggctggggtgtgccagcaatgccccggtacctttcctgccttcatggtgcagagctcgggaagtcaggaaaagcgggtgtggttagggaaactgtgggcccctgagcagaaggctctatggaaaacggcttttctctacgg

SEQ ID NO: 66084 - DNA, 1167 bp, Homo sapiens
agcaatgtgattcttatttctttttattgctaataattccattttaaagatgaagaattgttgtgtggaataaatgaaagaactctatagtgccttcgtagtttcaacactttaccctttgaaagcatattacactggagatctcacagaataagtataaaacctcatattacccttttcatactgcacaacattttgagtagagaaagtgctgccccaagtgccttgtggctcgtgagatgttagggaggccaaaagaaattgctagaaccagaactcatgagtgcctcaaggcctcagcctcagttgagatcattaggtttaactacagctgaatatgggaatatagttcctcagacactcctaagtattatgtcatcccagaaacctttaattttggtgaaagaagaacaagtgcttccatagttgataagattaaagttctaatggttagttgtctgtcaaaattacatagtagtagaacacatgaactattccccgagttagggttctgaagatttagctctaaccattgtaatttgttcactccaacaaggaagctgaactttgatcttcttggttgcatcacatcctcactacataatacatggagtcaacagtccatattgtatcttttaaaagagaaagtgaaaacagatccatttaaccattttcccagtaaaattgtttgctctctgaagctaaagatggcaaggtggtcactttcagtgagcacctcaatcttgaaatcttgatcgaggtgtgtgtactgtgtacaattcctagtgtgttgtccatctagtagagttagatttcaaaatcaacagcagaagtagaactgaataactgaacatttataaaattagaagataaagagtggactaagcaactaagaaagtattttaggacactttaaaacacctagaaataaattagtttaaacattcagtttgttacctatggcaaaacactaaaattcttgaaatgttgggagtggacaggcaggtgtttgagatatcattctttctatttctgtatggttgaaatattaaataaataagaaattaaatacatatcgtaaatgctggttgatattattatgctcagtgttcctgcccagctgcttccgcagggtaatgctctctgaagatttatccatgattcagg

SEQ ID NO: 66085 - DNA, 1014 bp, Homo sapiens
gggccaatttgaaaaccaactggtctgtagaagtctacataaaactgtagaaactgcatagcttctgtgtggtcaatggtataaaagaatgaggagtttattttataatttatggctggattcatgctgctgattaaacaccagcctccgcagacattgaggatagcctctatatggctgtgaatcctctctgccctcctgcaggtttagataaactccacttgctcctgtctgtttctatttgcttagttgatatgttgctaggacgcttaggcaaagagagccattatgagcacagcgagtactgtgagctccagacagtgtgtactgagatacaaaaactggcccttcagaaacatatcgatacagatagatctgggcttctgaggtcggccatctgccttggcagggctgactctccatctgcactccccagccctggggtctgccatccggcatagcgtggagaaagcttgagaaggactgaatgctcaaagatttgcaggcggctgacctctctgtaaagaaatagtaaaatcagtatgagaaacaacagttttaggttgtcttggaaattcccaagtacaaaatttcttcccactgagatctacccgacaagcacgtaattaatgtgacaaacaacagcccctttcagattcccaacattggtctggctgaattaaatcttagagtaaaccttttgatattcaggatctcattctgaggcagtcatttcttggcagagaagatttttggaagacctttagaggttgaagtcagactggcaatagtaaatacctaattattgccaggttttaaatagctttgcaaaataggaatgctagtcttaattgcgtaagctgcagctactgactaaaggagggatgtgagcatttgtactttcctctgagcattgaacgtgtttctagtaagttaggtgtgagtagtcacttttaaataatataatattctaagtgtctttggtgtgtttattatattgagaaaaactggaat

SEQ ID NO: 66086 - DNA, 2076 bp, Homo sapiens
actttttataacttgaagcctgtcttggtgaaaatggagacctcagacataatgttatttacagtctttctcctcttctgtcagcttaataagagtattacagtgaccactctttcttcttctagtgcatgccttgtagatgagtgagaggtaagaggaagtgccaataaatcagccaaagtcagtacctctgggtcagtggttcataaccttgactgaatattaaaatcacctggggagattttaaaaatccccgtatcggggccgcactcccagcctggcaaattagcatctctggggaggaggccaggaaccaaaatcaacatgtcagggtgtggaccaaggcacgtgttccttaaaacgtctggtctttctcaagcagctggtgagaaccactgatctaactgcttttctcacttcaccatgtgcagcaaccacctgagagttttattaaaatgcagattcccatgcagcagacctgtgtgggtgctgagggtctgcaattctaacaagtctcacgtgacgctgttgcttctgctgctttccacattttgggtacagagactctggatcaggggttctcaaaatataatccctggatctgcagcatcagggtccacagaaatcttgttggaaatgcaaattcttgggcctcatcccagatctagtaaatcagtaactctgggggtggaacccaacagtctgttttaaccaaaccttaaggggatgctgatgtacattgaagtttgagaacaactattggattggataatatttttgagtttacttgagtgttaggcttttgaggggcaagaaagggagataccatagtttatccagagcaatggagaaggcttacttgtggaaatgagatcaggcttcacaggaacccaggaaaggttgcacaaccaggaaacacgtgatgacctactgtggcacagcgaggcatcccaggaatgtggtgtggtctggaagcacggagtgtcattctgcacctggagtgactgcccaggctgcccactgcctggccagtgcactgtgtctttctctagtgccttctcttagcatgactctacaatgctcaccatctctgcacactgcagggtggcttagttggagtcctagaatgaggcggcttgaatcagacttctggtttcttatttgcttagcctcagttttcttgtcttgaaaaatgggaatactaatggtacctatctcagacttgttgtgggattaaatgagatagtgggtgtgatgtgtttagagcattgcctgggacccaataactgctaaactataacgcttccattcttgtctacaaaaagcttttttaatacagtttttaaagaagtttctgagttttaagtaaacatgtaaaattgttataaataaatagctaaaaaagtattggtcctagatagaaatgcttagaagttatttggacagattgttgtaatgtaggctacattgaggaaatggtttcagtttggaatggctcaaactaaacttgactctggaaaatctcaggaaaatatataatgtaaactattagatgcaatctgtattgatttttactgctttgtatgttttaaaatatgtgcatataactcttcattacttgatagaaaatgttgttacatatgagtatttctaacacaagttatgagctctctgtccatacagagttcataaaataggaaaggatacagacaattaataagtcaacaaataattaaggagtcaattgctgattgtgataatttttctgaagaaaatgaataagaaggagagattgatttatacatataatgaatatataatttattatttattaattatattgactcataattgattatattgatttatatgcataattatataatctgtatatattgatttatttatatatgtgtgtgtgtgtgtgtgtgtgtgtgtgtgtgtgtgtgtgtgtgtgtgtgtatagagagagagagagagaaagaggcactgattgactgtgggggtgatcaaagaaggtgacatatgagccaagccctgacaggtgagaggacagaagggatcccaggctcctga

SEQ ID NO: 66087 - DNA, 3281 bp, Homo sapiens
aaaaaaaaaaaaaaaagaaaatgggccacaactggagacaatcaaaaaatcattcttctgcttttactttattatccttaacagtcataagccatagtctatttctaccaatggaaaccatcagaacttcacaagatctgtatgtatacatttctatgatattctaagttttttactttaataatactatatcattataaatataatcatttttaacagtaagtgagtgcctccaatgggcagcaattgcaaattgaaagacaaaagtacaagatgagcacagcagggatcagtaaactattgcctgtggaccaaatctggcccaccagctgtttttgtaaataaagttttattggaacacagcctgttccatttgtttacatgtaatctatggctgcttcttgatatattagcagaattgagtagttgtggtagagatggtatggcctgcaaagagtaaaacatttatgatctagtcctttatagaaaagatttgccaacccctcctttataataaaggtattaaatgatatttataccaattttgagtatcaatataaattaagacagaattaaaggagaggctgctgtacattcagggccttttaggcttatgcctgatgctccatggacagataagaagtaggataaatgctatacttttggagacaaattctctacaagcagttcttgctggactgtgggagcactgctattcccccactgagataacaaaaatttccattgttaagccaccaaacaaatgcctaccagagttgtataattttccttccttttaggagctgggaattttatcttatgactcattttttgttgttgaaaatattgtgattctcaatatattaataagcatcacaactaatttaatttaaaaatagctattattgttacaattaaaatagaagaaaaagcacatgtgttacctgtatgttgttcttcaatccagacttgcaaatacatgaagaggagtagcccagctactccaaatatcagcacagagaggaagacttgtttggggttcatgaccatttcagatggctgcatttctccttatttcagaatctgaagaccacatgatttgttttcccgtaaaacttcagtcttttcttgttctctaagagcccaattccataaagtaacctagaattttaaaaagaaatctacattgtacatttctgctaatattaattctcaaatacggcataaatattcactatctcaacaaggctgaagacttaatgtgcacactaatgctctgaagacagaaaagactgtagtaggtgttcctagaatggcaattttctattgcatacttttatcttatctaaggaatgtattatcctacagttaataagtaacatcctaacatttagttaggcaaagtctggccagacttaagtcctcctgtattgtaaagtgtaaagtaaggtttgggataccttaaaataattgcaagtaggaagaataacagaatgggttgttaaaggacgggttttgaaaaacatgcttgtagaatgtaaggaaaaatcacctcctgtcttaagaatatataaagttcaaaaattgaaggtgtaatatcatttttctctcatataaagtaacagatttctccaatttaaagagcacatttaaaatccttcagaggcataaaaagataaataataaaaggtcagggttcaaggacccctcccacaataacatgaaattactgaaatctacctcagattacagaaatctacctcagtaataaagagctattttatttttttaaaaatactgaacagattttcttttagaacaatctcgtttaatataaccttaaccttttattttttttaaaaaaattgcatccttttttgagaatctgatgaaaatgtgagccctctctttagaaaagatttacaaaatcttacataaaatgccaaagtgttcatgtaccttcactgaaacccacattaagaatccctgttccccagtgagaacacgtggatgcagggaggggaacatcacacaccagggcctcttgggggatggggggcaaggggagggagagcattaggacaaatacctaatgtatgcggagcttaaatcctagatgacgggttgataggtgcagcaaaccaccatggcacatgtatacctatgtaacaaacctgcacgttctgcacgtgtatcccagaacttaaagtaaaataaaataaaaataaaaatagaaaaaacaaacaaacaaaaagaatccctgttcccaatgaactgccacacaagtatgcagtaagccgtgtggtgagctcacctagttagcagcccggctaatggggccaaggtcacggctttgtatctaacgctggccagaaaccctggctcagttccttggccacagaacacaacccctctgggtgagccgaataaatgtttcttaaatgtgaagatatcatgcacattgctgcatcaaaaagttatctcttctattccattgcctcaaaatatttgaggagagtctttgatggaaaatattgattttgcctaagaggtgttttatggggtgccagttaaaagttaaaaactgctgtgggaaattgcttgtctggttaaaggataatatttaggtattcttggcaaaaccaattttcagggctggcgaggtggctcatgcctgtaatcctaacactttggaaggctgaggctggaggactgcttgacctcaagagttcaagaccaacctgagcagcatggtgaaaccctgtctctacaaaaaataaaatagattttaaaattagcccagcgtggtgccatgggcctctagtcccagatactggaaagcctgaggtaggaggatcacttgagcccagaatggtggaggctgcagtgagccatgatcaggccactgcgcttcagcctaggcaacagagcgagactctgtctcaaataaatagataaataaataaataaaaaacaaaaacaaaaaaactgtagctgatatccatgataccacatttaactttgtggtgatagaattcctcatctcttaaaggagctcaaaaaatgacctcagaaatcagaacaagagatgactcaatgggagccctcctgtcaaccctgcgtttctacagtccttaaggctggctggcatttcccttgagcctgaaaggttgtggctgcagtgagctgtgactgtgccaatgtactccaccctgggcaacacagcaagatcgtgtctcaaaaaaaaatacaaaataaaaaaccagttctcaaacaaatga

SEQ ID NO: 66088 - DNA, 972 bp, Homo sapiens
cgcacgtccccgcccaccagagcccgctcccggcgcgggtacccagcagcgcgccatcatctctgcccctccagtgccccccagccccaaccccagccccagcgcggttacctcgcgggccgctgccgggcgcttgcaggtgctgctgttccaggagcgcagcttcggaggaaacttccccgcgctccggggcaaactcccgcgcactcctggcagccgtgaggtggctgagagcggagcgccgcgccgggagcggggacagctcggagtcgggcgctcaccctggccctgaccctcccgcgtccggcccggctggggctgcggcgccgcctccgcgcccgctcccgcccgcgcccccgcccccgcccgcccgggcagctccgcctccctctttttctctccctcgcccccgctgcccgccctgccttctccagctctgcctttgtggctctctggtcccctctttcctctgactttctggcctcgcctccgctggcgactcgccctcccagccccgcgtgccagggctcaggtgccaccccatgcccagtcgaggaagtgattaccctagcagttctttcccaattcgccctctcctctcccctgcgctggggtcttctcctagcttttctagaaacccagttctgaggaacacgtccataggttagaaggctgtcgcaaacgttaactccaaagtcaaaatgtgttttgctttacagacaggaggtgatgttcgtttgtttattttaatacatcaattataatagatcaataaagtgcttgttgtaagtacggctaagttcagcagcaggtttgtgtaaaccagggctccctcaaaatgagcatagtacccatttataatgttcaagacctaggagatttctcaggccacgcatttcaaaatcgaacaagctgaagttggcggttttaaagggctttgcaaagaccaacactagaataacatttttaaat

SEQ ID NO: 66089 - DNA, 483 bp, Homo sapiens
tcctgcctcagcctcctgagtagctgggactacaggtgcccgctaccatgcctggctaatttttttgtatttttagtagagacggggtttcactgtgttagccaggatgttcttgatctcctgacctcgtgatccgcccgcctcagcgtcccaaagtgctgggattacaggcgtcagccaccgcgcccggccgataataaatattttgtactttgtggactacatgacctctgttacagtttcacaactcttctgtggcagcgcagccacagacaacgtgtaaatgaatgagtgtggctgtgttccaataaaactttagttgcaaaaacagccagcagctggatttgacccataggccataatttgctgacttccagtctgcagtaatctgattagttgttcaataatgtaaatgccatcatataaaagtattaagttcatgagggaaaaattaactatgcttaatttttcgtagttcattat

SEQ ID NO: 66090 - DNA, 690 bp, Homo sapiens
atttgcagggcatttgtcgcgtcattgcgtcgaaatataaaatgactattttaaaatagcaataatattcttaatcacaccttacctaatttctacccctcttcccaattcttctcctcctactcactgggcagtaatggagtggagccaaaagtaggaaaagaagcgctcattttttaattttaaaagcttgaaatataatggctaattgttgaggccatgtaaaactagctgtttcattgtaaccacatctaaatggctgcatgaaattgtttacagggaacttccttggcctcctgactcacaggtttcagtagaaacacgaagctgtcagccaggtcatctgggttttccaggagaaatgattcagagctatggtttccagcgggggaggtgcagtaccattgactgtttttgcaaatacttaatgttgaaaaagttaatgattgcatctgccttaaacctagagcaaccttggagaagaaaggtttcacccacaatttctcttgcttgatttgatcagaatctcaaatgagaccaacaactgatttgttgacttggttgatagttcctaagggttacttttggccaaatagctctgtgcacttctgatttagaagctaaactagatttgatcctcttttaaactgtcacaccaaggcatgcagtttgacttgtgtgttcatgctt

SEQ ID NO: 66091 - DNA, 834 bp, Homo sapiens
aattaaaagtttaaatttacccaaataactttcatactcactttttctctctctacttagttttaattctgtacaaacatggaccctgctcaccagtaatttcaaagactttttaaatgtcaggagttgagctgagatttcatgactctccagtctctctacaggtcattagtccaaaatacttttcaggccaacccatagcccccagtgactccaaatgccagttaaacagatgcccacccttggtaatatctgcttaaaacccaaagagtaaatcttgtaagtagctctacagatttgactattgaaagactaatgggtccatgtaaaataatcttcttccaacttctgggcttacgaaagccctaaaaacaaattaactttaatgtttttccaaggtttgttaaccttgcttgctcaacagctgctctgctttcataatgaaagagaaacgaagctgtaatggccctaaggttgccaaaatttgggggtgaacaagcattctgtgctcttcagaacattctctctccatgaagtatgattgtcagattccaaaagtctcaggacatttacatctcagcagtgatgtatgccatagatatacagcaaatagggctgcagtgaaatttaatgttcacttttgatgctccagttcttattagaaaaggtcactgactgtcctactcagatgattaatgcagactgttgcctctttatgggatatttctccaatatgtgctgcctaagtgactgtttgttcctcatttcagactctaccagtgtttaatactcaacatgaatttagattggtggaaaaaatgccacttttcagct

SEQ ID NO: 66092 - DNA, 788 bp, Homo sapiens
atctcagataaggcttgtaaattataactactgctcaacttcatccaaacctctttcttgcttatgacaaccaggtagatgagaattcacttattggctctgtcatgtattagctgtagaatttggggcaaatccatatattttttgaatttcagtttcctcctttgtaaaatgcggatgatcctcttttgcttagttgtcaggattccctggcatggtgttcacacgccttccaaatcagagcctggtgagttgtaggtgccactatagttaattactttgaaatgccacttaattctttcaaggcttacatttttttcctctgtttaaataatgtgataagaacttaagtaaaacatatcctacaaaagtgttattgttcagctcctgttatgtgacaaaatgtcccagacttggatcgcattccctttgagcactcacaaaagtggatgacataatttaaagacaacacagctgagctgattaatcatttagtgccctccactgaatcacacgtttctgtggcttccctaaggtgtttgcatatttctctaatgccgttggtgtgactacaaggctatgtttgttcttaacagaaaatttcattcagttattacattttgagagagacaaatataatacagtgaaaattttgaaatgaatgccatccatatatatatgttttaaattttttacaatcctcttttcttttaggcacagcatgaacccaaagtgaattttagtttctgtaaagcatttctttcatccttttagaaaaatcacataca

SEQ ID NO: 66093 - DNA, 849 bp, Homo sapiens
catctgcagacacttttggaaatgtataacaaggagattcaggaatatgctaggcaagtttctacagcccctttcattcctaaaggaagaaacttttatgtggtacaggagccttcagaaataaagacccaaagaaaagggaaaccccctctaagatcagaactgcaagattaccctccagcaggtgggagtcaaaacaggctaaccgataagcaaaaaagagaactggcaggcttcagaggaacgcaaccaaatctcagacttgtgtttatccaatcgataaatgccacagctcttgaacagctgttgtttaaattcatttctctgtggcagaacaaaaggagcgtaatgaaagcaatgctattagagaactcattagagtcagtaaggagaaagcagactttaagataatcattcttaagagagacaacattcagagcatcttttggttcacaatactatcagtaggcagtacggtggttaggcaaagccaattgctttttctgtagaaagattacagaaaggagaacgatcaatagatccatggcagaaaatcaccctggtttgtgcaaccctttcgttggatcttttgttgctaattcgcttttggtaatatgaatctcctctagtgcctttcagtgttagcattctaggagcagttagccaagcagaaaggccacagatcaagtctattgtctgctggcaaaggctccattgaaccctaatggacataggaatctagcaaaacaaagaatccttagtgtcttgttcaaatgaatcctacatcagagaaggccaagggagccctttgattatctgaaaaggtagtgattagagggtagaaggtga

SEQ ID NO: 66094 - DNA, 623 bp, Homo sapiens
tcacaaagggacaaacgataatgagaaaactatatcagaaaggtcaactgttgtctggttaagaaagaataaggtactaaacggagtcattttaatataaggaaatataactttacacaaaagttaaattctgttcctccactgacattttactgatacagcttcctttgttactataagcttctactgtcaatcaggccaaatggggagggagaaaaaatgccttgtggctgagaccattacctcaatcatgaagaatcgtgcaaggaatgcatgcatcgtctgtttcctcaggttcacggctaagaaaatgtaactgtgctgccctctaatggttgtcaccccacaggctcaaggttgccagcattgagctgatgagccaccattgtcagggacatcaccagataggaaatgcagaagacagattctgaaccaaatgtgcatcatcttttccaaaggaatcaccattgtttcatcaggactagaattggactttttcaacatttgtatttgacttgagaaattatggagctctcagaaaccaatgccatatgctttttcatgaatagattatggagcaggaaggatcctgctttagattgtaatacaaatatattgtcctt

SEQ ID NO: 66095 - DNA, 399 bp, Homo sapiens
tgggttttgcatgatcttatctcaggtaaagaaaaagccatcttctattcacatggatagctataatttacttcttaaaacccatactgggagcataaactagctcaccttttcccaaaaccacagtgattcatgcacagtagtcccaattctaacatttcctcatactatgagtcacttcctatttatattgacattaatttccctttttaaagcttaatttattgtaaaagtcccataaatggaaagctagcatcagttatcataaatatgacagtaaaaaataaacatgatgaaattcttggattctggcagtctctacttgatgaagtagcacgtgaaaggctgtgtccgcttgctgtcctagaggcttctcagcatttaccaattaaaatctta

SEQ ID NO: 66096 - DNA, 763 bp, Homo sapiens
atttgcaaaaagtcacttactgcacatcctatgaatgagaagaggttgacctaagagagtctgacactagagaaaacactttagaagaaattgtataaaggtcagtcatttaaagtcaattggtttttctatcacctctgcccctaacctatgaccaatatgaattggtttaatatatctgttattacgattttcagagttttaaaaacaggtgctaattctcatttgctcaaatattaaaatacacaaaatcttttggcattattcaggctctatggaatgtggtgtattacacaattccctttgtatatttaatcagttgggtcaatatcttagataaaactaagtcaactgaaaaagttctccttgatgaaatattagtcctgacttgatcctgtggttttggagcaatccatgtatggtacctggctcatgattatatgcttcttccatgtgaatcatattttattatttgcaagtcacacaaattaaaaagctttcaaatttcaatggataacatgtgaattccatttatcatccactggtcaaggtttattgcctgttgtctggttcacctatgacttagatgcagctaggaatatcttcttgaatttgacaagattcacctctgctctaggaacaaacactaaaacttactcaagttgtttattttacacaaacttaaaagttaataggaaaaaagtggaaaactgttaagttacagaatcttaggtataccagtaatatatacttaatttataag

SEQ ID NO: 66097 - DNA, 1192 bp, Homo sapiens
tccttcagttctctagtgtaaacaaatcttcttccaaatagccctattagtaaatgaaatatttactacatcgataaatttgccaaaaaatttactggcccaacatgttttcaatgtagagaagttcatttcacaaggtatttatttcatatccattgtcaaggttcccatacaatgagggcctttaaaaagcttaaacgggttcaagttctaatgacattttttgagtttctatttttaaaaaatcaatataaagataggatctcttagttgattgttttttccttgcaaattgtaaatcaaaccttgaagatatagaaaataaagatactattttaaattctgcttttaaaactgtcccttacaatgagtctttacatttttacatctcttaaggtggggggatagtgttactaaaagggtgaccttgagccctcttagcttactaaaggcagatgatagaatctactctgctgagattattgtaaagatgatgatgtatgagaagcatttggactggtacctggtaaacagatatgttaaacacatttattgaactgacaaagtaatcaagctactagtgggggtgttacaggctctggagtgagaatatctgtgttcaaaatcagtttgatattctactagccatgtgaccttgggaggcatttacttaatatgcccgaggtccactagccttatctgcaaaaaagtgttaaccagacaaccttgctcctggggttgctgcaagattcgatgagataatgcatacaaagggctcagcacagtgtttagccattcactatcttgttatttacattgtattaatatcattagcacgtcagaggtggtgggaagcaggaagatttgcccaaaaaattctgagagactacaaattctctgcaagaatttttaaaattaatttttggtttttattcatataataatttttgaagttaacaaaaatacttaatgacaacttgtatttacatgaacaaagaggtacaaagtagtcatgtaaaggtgaacttaatatgtggatgacactcacttctcaagcaaagatcaaatgaggccattccttgctgtatgaaggcctcagctagtttgaataaggaaagcagtgaggaactcagctgtcatgacacatgcatacatgagaatgctgaagccaccagcataactgtgcaatgtt

SEQ ID NO: 66098 - DNA, 1138 bp, Homo sapiens
ctttaccttcttttgtatcagacaaaagatggtaatttacgtctaattaacggaactgagtcataatgagttcttttctcttagacagcatttgaatgtccaaaataaccagagagattgggctttttaagtcttgctccagtttaaggttttataacacaatgctctcattcaggcctcctactttgcatacagtcagagggctggaggttatccacattgtgaaattctttggctagttatgcccagagtgactgaatggcaggcaggctgaatttaatattttctgctaagcagctctgttgagacagccaagcttacgactgcatccttttcatgtctcttacttatactttgaaatgctatcttttgcctgttgatgaatttgatagcattctttatgagatcaatttccttgagaaagatacaaaaggcaggatgaaagacaagtttgatgcaaaacacacaaagggctgtgcatctgtgtgaagagaagcatgataaagcataaagcggttctccccacaccatgatgagggacaaagatgtaaacacaataagcccgcctaaagaaagcaaaagcacatgttctaacgggagcagtaaccaggttaaaatacttgaagcatcttcttcctctcttatgccagagcattttaaaatgccctctatacatgacggcatgccaacacaaacaaactgcagaggctgaactccactggcatcgtgccgtcctgaaatgacaccagttagataaactgggtttttactcctgggacagtcttcaaccaagctttttattacattgggttaagaagaaaaaaaaataacccttgtctccacacttcaaaatccaaatgtgtattcctttgataggatattgttatattaaaaatactgtggcaatatcacttgtcatcatgttctactgacacacatattcaccaatgctccaaatttcagaggctcagccactcaaaagaaaaacaaaacaaaacaaaaaaagaatgaatgaaaataaaaaacaaaacaaaacaaaacaaaacaaaacaaaaaataaggctgaccaaactttcatgatgggagccctgggaccaagaaattatagctgtattataaaggacaggcaaaccacact

SEQ ID NO: 66099 - DNA, 1509 bp, Homo sapiens
ctcaatgaaagctaaaatataacttcagggcaaaagacaaattttcttttattgtactgaagaatgttgtatccatcatagcctacaaatacccagaagccagtataatatttctaatacaacatgtatcttactggtttggggaagaaaaaataatccttttattccttttcactctgcctacaagtagaacattgagataatagagattaagccttaaatttctatatccaatagtggttgaatcacaagaggactgaaaaagcatttgtctctacaagataatacctaatatgctagtcctccgggcagtttacattgattttgcatttaattgcataggctgattttctcatattttccaggacaaagttgtcaaaatgaaaggatctagatgtactctgctatgaagccaaaagaagaaagtaaacttaagagcactggtttctgtaataactatatgattgcaaaaagttttgttttgtttttttcctactagaaattgacactggggatcacaaaccaacttgagagcaaaggtgataaaactgtactttctcctcaatccctcatttcccccctctgttcttaaattactttcagaaatgggaagaaaatgaaaacaccccctgacacttaaatacctttcacctactctgtaacgaattggatttaattccctttagttcagttagctagtggactttgtccttcagtctgtctggtaaatatttcacaattctctctgtatgtttttgtaaagtagtgggaaaaaaaaaccttattcatttctcttaccatcaaagaagacaaagacaatattttgatgggaataaagcagttaattctaaatgattaactcaaattattttttagagtatacgtttcctgaagcttcacagaaaatgatactttaaagacaacttactgatttactatttgaagaagctaccactggaaaattaattaaaataccaatggctttgggacgttctcataggagttatttgaaaatgacattaatacaaattttgtttccaaagaaaatggtaaacttatcttttcatttgattaactgagctattttaatcactgtttaaggaacatccccccaccccaccaccgccattagtttgctagggctgccattacagactgcctggcttaaacaatagaaatgtgtattctcacaattctagaaactacaagtctgagattaaggtgttaacagagttggcttcttcgcaggcctttctgcttggcttgtagacaatcttctccctgtctctttacgtggtctttcctctgggtatgcctgtgtcctaagaacaccaatgatactggagtagggcccacctgatgaagatcctctctccaaataccatcacatactggggtttaggatttcgacatatgaattttaagggaacacaattcagcctgtaacacacctacgaaccaaaaattaactcttcatttccaagtggctctataatgtctccttctctc

SEQ ID NO: 66100 - DNA, 6043 bp, Homo sapiens
caggactcggagtacatcaagctaaatgaggttagcatgagaaaggaaagaggctgaaaaagaaagaaaatgcccatccagccatcggtctgtgcagagtcatggaagatgggccttcttgctcagtgttgcaaaaagagagttcttatcagctctcctatcgactcccaagcccagtctgcagtggcgcccctggcctacttacaggcattggaaagaggcaaatcaaatgctgccagggaagaaaacaacagaggaggacttctattatcaaacctcaaagcctccgcagcttagcctcagccttctcctctgtcccggagcccacttgctgacctagacagagatatttcgaggcatgggtgtagcacgtgcatacgtgaccccaatcccaaacccccaagcaatgaaatttcatctggattttcaatattagttagcataactttggaacagaagtggctttttaaaagactgaaaacatgtattcgaggtaagaatgttgtccacatcaaagaaaaagaaggaaagcactccgtcctataatttgtgggagcaaaacgataatcttagaaacgatctatccaagacctagcattttataaatgaactgagaatcagagaggcaggtgccggctctctgaaattcaaaacactgagttcccagatgtcttgatcaacctgaaacttttgagtgaagtcaaaccctggcagaaagaacactcaacctcaatgtcagagtgccaaattttgcgttaacccatgctatcaattagcataaagattgaaaatgtcattcacctgtttaaacccagtatactaatatgcaacagggaaagattaagagcttgaaacacatgatctttcaagttttttttctcagatgtaaagttctatgattctgttctgaactgaataagaataaataacaagaaaaaaatgtaaacagtttaaactgcagttaaaataattactttcaaaattttaaactaacaaacttttacaagtataccctcattttttatagattttcttccctggcctctgccacacatattcttctatctacaaaactagaaggacagtctgaccttagcatttaagggtaacagacaatgagcccgacagacaattagctgttaacagttagatatatttagcatttaagaaatgtactatcagtacactgaaagtatttggaaagtttagtcatcagcagatagagcatgaatcacgtccatgtcaccagcagaccacttatctaatcacccccactataaatgcaagactctgtgtctccagagctggtttgtttcatattttagctccacggtcacaggcaaattcactgaaccaaaataaaaccttctgacttgctgttttcactgtcctaaaatgggttagtgatgtcttgcccacagaattccacaccatgatctgaatgagtggaaaaagattctgtctggctcacagcagagatgataccaaatggccagtaaagaggccgactcaaattcctttgaaggaggcaccgaggtggtggattcagcaaaaggctgtgaagtttatgtaaaatttcactcataacttcaaacgcacttaaaataagttaacaggcaggttttctaaaagaaagtttcttaaaactacattatagttctcatgatcatctttttaataagccaataacctttactaccatgaagtatgtaggctcttataaatatcttctaattagtcattcaaaccttgttttacaggaaaagagaaaaacaacaacaacaacaacaacaatttcccgaggatccctgcccacattcagagtagcagatttacctacttcaaagtggagatcaaagccacactctaaggctccttatttccacaggctggcaagcaaacaaggcatacaggctttgcaagagtgtatcctaattctcttactgaagaaaagtcaacagcagagacaacacagaaaaaggaatcaaagaggccaaatctgtggactcaaaacaataagaaaaaataaatcaactttgctaaaatttaagaatgccaggggggtaggtaaatgcactgggaagtatgtgtggactatgatgataataaatctcctttcaatacaactgatatttatcagaccttgaataaaacactgaatgtggatactatagtgcaaagcatctatataggaattaggacagtggaagtatgaggtaagctgcaagtgtaatttgaaagtttccagcagccagattaaaaaggtaaaaagaaacaggtgaatggattttaatagcatattttatttaacccaatatatccaaaatattatcatttcaatatataatcaatattttaaaaggagacattttatattctttttttggtacttggtcttcaaaatccaaggcaaccacattaaaaatgatcaatagttacatatggctactggctaccatattgaacagaacatttaaatacctacatagttaatcatctggaatgcagaagtgtcaatatactgaggtaagccagcaaaaggaaaaaaaaaaaaaagatgatgaaaaaaagaaatatgtttaccaaagacgtggcacaaatattctccactgcctaagaagggaaggcgaggtagatttagcataactaaaataagaatgatttggatttagatagcttcatagctgatgagatgggaccaaaacatttctactactatgggcatttttacagaatcctcttccttggaatactgtataaaatacacatagtttaaaaaaataacagaattagctctgaaaaaaagacagggaatattcaatactgctataaattcctttgagcttttaaagatgactcttaatgtatataaagttacactccataaaaggctgagtaatttataaaagactgagtaatttatacaaactcccaagaggcacaatgaaaatatgcattttccttttaaaaatcgtgaaggaaaaatgacagtatctggagaaagaaaaaggaaaaagactatctaaaacaagagcagtcatttggaatgaaatcagatttcatagtatttagtagtggcatcctccaacaagtaagatgttaggtgggagaggatactagaggctggggagggagggatagagagagatttgttaaaggatacaaaattacgactatataggaggaataaattctagtgttctatagcactgtaggatgacactaacaatatttcatagtttcaaatagctagaaggaagacactgaacattcccaacaaaacaaatgacaaatgtttgtgcgtgctaatgaatatgctaattactttgatctgatcaatatacattatatgtatagaaatatctctatgtagcccatgaatatgtacaaccattattggtcaaagaaaaaagatgttagatggggcaagagaactggatcttagagtacttccaattgattccaagcctctatgcacacagtacactattttttctattggtcctcatataaacagtatataaacagaaacatatatccaatcggaaaaaaaagtgattcaatattttatatctggattaaacttatacttgaatttttcctaaattggcctgacaattgatgagcaataaaatgggctttagtttcatttaaattatgttcttctcctttaaattcctttgccatggagcagtcaaaggtggtttttaataatgactcacatatcaagctgtagttcaaagttgacgttgtctggacccggtgtcagtaaaatacttaagttactaagtcatgagagattttagttatagggcttctaaattttcacatccagaatctgttattaatatgccatgaccttaggcacactacaaccttagactcaacctgtccatcttcttaaaaaaaaatgaatgtattcttctccatctaaattgtaggctgcctacagaatgcaaaaaaaaaaattataaaaaaaagtcttacaatgaatagctttaaggtttaaattcagtttgtcaaaaattgttaggctccttgttgttctcaaccgttttcttgcccagtccagctaagtgtaacaggggttcctaagtcatgttccagtgatctccaagagggaggagaacgtttcttgcctacagaaattcagtgggctgagaaccttggagtggcaggagtcttcaacctgtccttaaagcctgggaaacaaactgatatccagaaagacctggcgttactcagagcgctagctcctggggtaggtgttgaggctgcagctttttatgaaagagattcctgacaaagattcctctgcccacaggggattgcccatagcaactacttccacaaaaaatgccttgtgggaagtggggcatgagtcatactgttttagttactcccctgttctccagaccctccaaactggaagatgcaggaatatcccagtgtgaatcactgtgctgtcctggtgctgaccaccacaacatccaccagtgacttagcagaagtgaaaccagtcaaccctaaggattatcaaacatgggccagggcaactgtctcctactggctggtgacaaagcttccactggttcctggtatcttgctcagagaaattcctgataccagggcccccagctacacaatcctgaggatagacagaagatggctgcggccctcatccagaaccacacaggaaccaccacaaccaatttattatgggccagctttccaattttccaagattattccaaagtcaggaaactgaattaaaatgatgacttccatttatacaaacatgtctatgtgaattttacgacacttttttttaagtgacagaacacgtggaatatccgcactctacttcatctcatgctgttctgaatttttcaaacagctatcaagaaaacaagcaaattcagtaaatctcatgaagtttttacactgcatttttattaggtcacctgaagtttgccacgttattctttcttggaaaagcattcattcaaacatttttctatgttaaacagtgataataatcatttgtttatttaatgaagtggttctcaaccaggggtgattttggcttctggtaaaatctggcaatctttggagaaacttcggttgtcacacctgtgaattctaatgggtagaggtcaggaatgctgctaaacaatctataattcacagaacgacgaccctatacatcaaagaattatctggttcaaaatgccaacagtgctgaggttgaaaaaccctggcttaatgtcttcggtaggtgtattttttttgaaattttacttttcaatccatatggcctggcatataaaaaaggcaacttgttagggagaggccactaggcaagatagtttaataatcaaacagtttctgggctttgaagcccaagcatctgtaacaacgaaaataataatgtgacatttttgaatcatgttttaaattttactgttttagcacattttctcctcagactctaggtattattttgagtgtccttttataaactatgttgagtcaagccacatgaattttagcttagaacaaagcaaagtttcttgaggaaatcactatttcaataggaagtcagttatcactgcaagattttcagtggagagtgaatgaccatggatgtgcctattttagaaacaactcccaaaagggtagactaagccagatgataccaaaggtcactgacattcaaggtttttatacaaaaccagctaatgattgtcatttccctgtttgtctttgatcttgagcacagaatcagtgtaatacaatgaatgctcaaggtctgagtgcctcaaagtgtgaactcctgacttagagaactgacccagctttactaaagataccggtgctacctgaaagaattaacactggcatactctaaaggaatagctgcttgttttatataataagtacctgtctcagtaatgaagggagaagaatcagtattttatcttttaaaaaactagattactcaaattttgtaggcggagtagggttcactaagcagcctcat

SEQ ID NO: 66101 - DNA, 1732 bp, Homo sapiens
ccagagccagacccaaaggtcccacttggccaggcaggtggacttcctcctcaaggcactgtggacccacgcatgagttcttaagcaggagaaagacatgctacctgctgtgtataaagaaaccaaatggaagacagcttggagaaaaactgtattaatttttaaaaatgatgagtattgtgttatttatgaaatcactttcttttgtagaaaaaaaaactaattgtcaaatcatcctatccaccaacctgatttaggggaaataatactaaaatctacctggcttttctcctagttcccacaggagcagttacggattcagtggatggattcaacttctgagtggcttgggaatttataagcttccccctaataatagcaaattttccaattctgttagccatagtgacaggctgttccagccctatctgaaattgggacgcagccataagcgcaaggccctgcggcaaagggaaaatactttccttatcgtggcgcaatggtcaagccaattttcctaggcaaaaatacatttaagattttatttaatgttcctaaaataatgctcatttcactttttaacaagaaaatctattaactgagcaccaaggctgattacaatatagcaatttaagccatgaccaaaaaaaaacctgcaaatacttatgaatacaactacatcagaaaaaaacagagtttattacagctagaggtaggggtgcctacaagtccttcaaggctatttcaagacgaattcaaatagaaaactctttcataaagggacacaaatgtgtgacatttcttgcattttatatacacacataaactcagctaattgtatggttaacatattgtgaagctttatgtgcacaggtatcaaagcacatgggtaatactggccaagaatggcagtggtcaaatattttgcaaagctaacctatcaaatattaaccagaaatcctaaaagaatgctcagtggcaaacagtttagataacaataaaaagataaacagatgatccattgatcatgacaggttggctgtcatcctgggacacctcccacattcccaggatatttgattaaaggaagtggttaaaatatggttagtataccactaacaacaaaatggagtctatggtaactcatgatcacactttttaaaagtgtatcataaaattccctgtcagtttttcaagtgtatagtaaaagtgaaataggtcacatcagaatacagaattatgttctgaaaaacttgttcaatttggctaagtctcataatctcatcacttacataaagtcacagattctgcatcaataactctaggtgtacaatataatattgtctgtgcacctaaaatatcagatatacgtgtatttatttctaatgatgtggctactgttcaaaaactagtgactgctgacagggcacggtgactcacaccttaatcccagcacttgggaagcctcagcaggcggatctcagaagttcaagaccaatctgcacaacatggcgaaaccctgtctctacaaaaaaacaaataacaaacaaacaattagctgggcatgcctgtagtcccagctacttgggaggctgagatagaagagctgattgagctcagaaggtcaaggctgcagacagccgtgatcatgccattgcactccagcctgggaaacagggcacgaccccgtctcaaaaaaaaaaaaaaagtctgactattcaactgtaatacc

SEQ ID NO: 66102 - DNA, 411 bp, Homo sapiens
taagccaaaatgagacattattatgcagtccaccagatttttttaaatgttgaggtttgactacaacaagtatcctaaaattagggggaaactatgcacatactgctggcagaccagtatggaaaacacaatcttgcattagctggtaatgatgaaaacatgcataccttgcaatctagcaattctactccttggtacacatccaagagcagaacagtgttccatcacctgggagtctgccagacaggcaaattctcaggctctactgtaggcttactgaatcagactatcagggctagggccagggatccacatttaaacaagctttctggtgattctcatataaagtttggggaacacagccctagagtatccctggcatttatacccaggtggcatgcataagaatgc

SEQ ID NO: 66103 - DNA, 587 bp, Homo sapiens
taactagtatgttccatttaggaacatttagcaggctgtccacttctatgtatattttcctgtatgcatttgacacttccataaagtaaatgtatatgtgtgtattatatgtacataatctgaattttgagttccctaaaatatcatatcaggtagcaggatattagaactcaatcgtaaaggtgttgacaccaaatagactttagcaagagagtgggtgccaaaggccaatattttcgctgcaaaaacagacttttctttatttactcaacccgagagccataaagaatgaacttcagactttgaatgtctgtgttaaccaattaagacaacaaaaggaaaaataataacaaagtggtcacagtttcgagtttattaaagatttatgttaagcgggagcggggggattacatcccctttcaatttagtaaatgtaattttttttagtcctttatttcagattccacttaatagtttcccaaccaacaaacaagacatttcgtgcaagattacagtcaagccaagtgtatccacccaccaacaacaggtcaagttacaagtaaaatagttctaggtttttcccagca

SEQ ID NO: 66104 - DNA, 6015 bp, Homo sapiens
aggttagggcagactttgatgaaagtataaaagtcagaaagtacctatggtttaatatatagtgttttaaaaacaagtgaggatacataaaatactgtttttcaaattacacctagtatgtttgtaacctttcacctattagtaatgaccgcatgcctcaagttaagaaaagcaaagaaatatacataactgtgtctagtaagtaaactctgaacaccaagttaactcttcttattttcacaagaacttatgtttcaaaagcacatgaaaatcaaataaatactgagaataaacacgatttacacttaaaatcactgctgaatccttgccacattctagaacaaagctgcttctttttatgtatacttcatatgttgaatattaatttctttaaaatctgtacctaataggtgaaaaacacataaggtttatccatcgtttttccaaggtcctcacgcagggttgaaaccaggatctgttaagtcttagaaatgaatttctatgaacattaaaatactgtcctagatgccccataacccatacaaacgtatttaaattagaacaatggggttatgcaattaagatgtgaactagaaaaacaacacaggtttctaatatattaattaactaggtcaatggtaaaagcaacattgattttttttcttaacaataaacctatgtaaagatttgaaagtcacttgtattatttaaaaggaaagctagttataactttgtgatataatattttatacttttatcaggtaagctgaatgctcaaattcggattttttaatataaaaaaggctaacatcttaaaataagactaaagaaaatcttgatgttgaacatcataacatgcaagattgactagaattatgtaaatctacataacaagactaactaaactagtaatttctctaagtaaaataaggtacacagacacttcagttaacaattcaaggcacagagtcctttgaatattcaattatatttagcttgtaaaaaaacaagggtgctccgtatctgcactaataacctacatattctcttttctaaaactatcggctgcttagtctggaatttaaaaaaaaaagaaaaaaaaaacctagactgttaatagcagctgactgcaggacagccactttcaccttgcagatagagctttgttgttcgggcgtgtaaagcagaccattagcacaaagtcatttctaatctcagttgtacaatccacatggtgcacttaaccctaaaactcatgttgcgtaaactgctctgcttccactcctaatgacctttcaaatcattcaatgttactgcttgacttgtactcatgaattagaggactgccaaataacttgatgagaaagttataatttctcctttcctgaaggtttaaaaaagtcaacattggtatagaagaaactgagaaagaacatacaatggaaaagcacattatttaatgcttataaacgatatttttagaaacacttaagaaaaaactgacagaaaattcacacctgacttcaaggcagatgactaaaacagaaaatgagagtgctccacttgtaacacacatagatttcccacagtattcatgaccaacaaatgtctcttcgtgtcctaacttcgctgcacagtattcaattaaaactcacttttagatgaaaaagtttgtgaaaataaccatctgctgctggattcacactgaggatttactgtctgtaaataagacgacccaatgctgtccaaaaattagtgtttttaaagtaagatttgtaaaaaatgtatcacatctcctttgttaaaaaaaaatcctaatacacaggagtctttaagtttgtcttgccttccatttaacttcaaatactttagaagcaggacttttttccttcttcctccttcagcctaacctctttaataaaccccatttttaaagaagaaacaataaatgaagtgacaggaggtcaaagaatgaggagtgtgcgctgggagaataaagggcggttttataacaggaggtacttttgttagcaagtgactggcaggtctcctcccccaagttagaaggaattccatccactctccaaaactgcaaaggccaaaaatgtctagtctaatagttctgaaatccccgagtcaggagagagccgagtggcggatggcgagtgggggaagggagaaagaccggtaggagactaaagaacaaaagaagaaatccaagaaagggaaaaggaacgctgggaccctggcctgggaggcaggggtggggagagacaaagtgagagagcacgacccgggaggagagcgtggagccgggcagggacaggcgtgccgcaccatggcgcaccatggacagggctccgcgcggcggcggcccacgaccgtctaggggttgcgggagaaagcgcgagagactgcggaggccagccccgtccagcccctgcccccgccccagcagcactcaccccccggcgggccggagcgcgccaggccctgacccgtgaagaccacggagcggggtaatccacaccacctgtctccacccccggagcaggcacttccgagctgcgtccgcacttttcggggctgccagctggcagtagagcacctctccccttgccccgagggcgacaggcagggggaccctccgtggattttcctgccccgcggcgagggtgggcacgcccctttcccgcaaccttcgagggaccccacggcaggcggagaccgacttgggaccagggcactgcacccgcccagctagagggtcccggccgaggctgtgtgaagtggcctccaggcctgggctggctggtcgggaggagcctgggggcatcctcgggttggaggcggcggaaagttgggctgcccccgggctgggaacccgcagcgtgcagtggcgagggaacctgcgcccggactggagcaggtgcttcctgccgcggaggagcctcttagtagagattaaatgaaaaggctcgctggctctctcccgagggtatgaaaagtacggaaggctccaggcaaaggcgcccccggggcgcatatagggcacaggcagccggacagagaaaggagcagccgcgtaacggaacttctcgcccgggggagatactaggcgtgagaggccagactcgttctacaggcaggcgctgaccggcagagactcctccgggcaagagggccagattttctttccaggtgggacgaacacagaatattgtgagggcaagagaagaagaaaaggaggcaactccagactgggataaagacaataggacagtagagcccttgagcaccgggaggcgcacgggtgcagggtggggtaaggtggaggcaagtcccgtaactaagacaccagagtgagaattcctactgtaaactcgcgacccatccctgcagaaataaacaaaaaaattggagcaaagtactatgcgaggggcgaaaggcacagaaaactgcaaaacctgggagttatcctgcctcaccctcctgctgcctggggacaccccccgcgagcttgctcggccccgaagaaggagcagaggggacccgcaatccagcccctagagccccgccaggaaaggcgcgagagacctactggccccggcaaccctgccccggcgcccggacggagcccgatgcctgcgcagctaccggccgcgcggcgcggcgcggcgcggcgtggcacctcccttcccgggtgcgcagcccggccccgcagcggcgcggggaacaaagggacccggcgccgcccgccccaccccgcccgtggcccggcccgcggggaccgccgcgtacctgaagcagggccgccagcagcggcagcagggtccgcagcgctcccgctatccggcacatggaggcggagaggggccgagcgaagagccggaggaggcggcggcggcggcggcggcggcggaggaggaggaggcagcggcagcaccaacagcggcgcggagaaacggctccaggcagtttccacccccttcccttcccctcccctccccacccccttcttcgctgctctccgctccccgccaatggagagcgagctgatgacaaatagcgggccgcggagtccgcgggactcgcaccaggagtaataaaacagacccagagatcaaggagctggggagggggcgggggaacagggagggagagcgtgtgagcgtctgcgagtgtgtggaggcggctgctgtggcagcgcaggcggctcggctccggcccggagcgcagcggaagccgcgagggatgcagcggcggggaccttggccggtggaggatgtggaggtggaagtggagcggatggcgctccccaagagctccgccacgcgaggtttcgggctcgtggttttgcttcctccgggtccccgctccagggccgctcggcgcgacgaagacgccggggacagcgccgcggggagggcgctccgggtcgtgcgtgctgcacccacaaagagcagcagtcccgccactccgcgcctccgctgcgtgggggccgaggggcgcttctcggctcctctttccggtcccccggcgagttggagactgttctccggcctcggccgcaagggggtgaggcgaggggccggcgcggtctctcccgccgcggctccgtcccgcgcagctgctgccgcagccgcccctgctgcccgcgcaccggcacccgcccgccggtcctcgccctgcgccgctcactcgcgcgcgccgccctccgtcgccgaccgcgcaccccgctcggcctccgctgcgcgacctgggcgagccgccgccgctctccccgcgctcgccccacgcgctgcctggctgcgcggcccgctcccctctcctattcctcccgccgccgccgccgccctcgcccccgcctccctcctccgccgagcctccccgcccgcgtcgtggccaatcggaggccaccaagctgcggctgtagccggccggatccgcggcagccgcccgcccccgccccgccgaagcgccccgtattttgctgcagcccgcggggggtcgccggagggaagcctagagtgcgccgagcaccgccccggcaggtggaggggctgcgggaaataaaataacttgggcaggaacttgattggtagcaggttcatctttggtccgcggtagggaatctaatggagatgaagaatggtggggaagggggggcggtgtctccttgggagcctaacgtacgcttctttattttgtcattctttggagatgggtaatctttcctggcaggggcagacacagcaaactaaggacgcaggccaagctcatcctagctattgttgtctgaggcgctcgccgggagccacctgcgggcgggggagggcggaggccgcggctcctctctggagctcgcaccttcagctcccacccttgaggatgtactggaacagcccaagtttttgtgttcttgttttgttttcttttgtcccctctgggagtttgagagtgcatgtttgttattttatttgaaatctcccgttttctatttctattactacctgttagtggtactgttcacatttggggccaacagtttcagggtacttttaccctctcctaccacccctaacaacaatttttaaaaaagagagaaactaaaagccggaacttgagaaaataggattatataaaagataaaatgactgatacagaattctcaccacgtaaaggatttctgctggcttcctttaaggcatgaacttcaagtgcaacacagtgagagactttacaagtttgagtcacaagcatttgtggaatggagcgggggatggggagcagtttttgttttttctaattctggtgaggtaataaattttccggaaccttttttaagaaaggtttacaagtaaatagaaatatccgttttatgtaagcttttcaacacttgggagatcggtgaacttcattgcagttaatgaatattttctgcctttattgcttgcttttctgctttgggtgactgaaatattaactttatttgagtttcaagataccgatcat

SEQ ID NO: 66105 - DNA, 1512 bp, Homo sapiens
attctttaaggctgtggattcaactataagaggaatgattggtgtctaatgttaagtcacattttaatgatgtataatcaacaagccaagtgcttattaatttttttatcctttttcccacttattcataaattttaaaaataagttatctttctcattacaaaggcaacattcacagatatttgagaaaattatattgttaaatgcatcataaacattcatagattatgcttacccatccttatattccagtaccagctgggcagatatggtctgagttttccttttaaacagggaatgtaaaatatcaacaatattcctatttattacagaatttacaatgtatgtcactctgacccattttttacatagtaactaaaaagagctgagtgattatcacagataagcatgatctctgggaggtctattattttgactcatccttgagaaaggtttttaaagacctgtctgcaagagatggggatagtctcatttgtaaagtatttactagagccaataataaaagtgcatttgcattccaagaccagtttatccaagccatgtgaaatttccaagtcttgcaggccaggacacaggctgtctcaaattgagggaagagggctttgaggagcctgctggtcagtgctgtgagggaaaggaggtgagagacagggataaaggtcacaagtggacatcaggaaggactaaagcacttgaggtttgtattctgtcagcagaaggggctcatgatgtggatacagcgtggactatggtcaaacgataggatctggggaaggtcataatcgtagcaattgctcaataaatacttgcccagatttaggagtgagtcatacaggaaaataggacatggatttggacaggagggtggggacaagtctttcggtatccagaactgataggaagctccacacaaagggagtacctgatatgtaacagttcatccaggccagttcaccctgtactgtccctagatttgcacagttcttgatgagggagagcagcttctcatgagatgcttgctggggatgtgtggggttatcctcagttctaaaattgctacttcaacaaatgtgaaatacctatttatacttctcaacttgtttttataaggatggaaatgatatgaaatggtttttgtactttacagtctttttcagtcaaaaataagcactatttgactgaaaataaatgggatagtataagctttaactgaagaagatgtaagttggctttcttaattttattgcctcattttctgaacccgtttttttggatgcagaactttccggagtattgatttttaattttttgatctttcttttttctcttcctccctctttctcttcttctttccctttctccctctctttccctttttctctaaaataaaaaaaaattggagagtttcttcacctttttttcctacctttctgttgagatgatatttttgatttccaagaggttttaatgttctctgatttattttttata

SEQ ID NO: 66106 - DNA, 2457 bp, Homo sapiens
ttaaaaatagaatttgactcttcatttcaattaataactgtataattattttcagagacttgatctttatgaggaagcagacatatttgcaaaaaaaaaaagtaaataaaaattagcagtgtaaaaggataaaggcaagaaacctcaatgctaaatattcaactcccacattggcacctttacctcagccttctgtcagaaacagtgtaagtgatggaaaaatgaaaaagtaacatgtagcggccttgttttcaaagttggaattactggtgactgacaaaggaatctaccatctatgtctgcttgtcactctgggagtcagctgttactggaagaataatggatgtccaacttctgatatgcctttcttaccaaagatgtggataactatatttctgaataatcatcagctcttctgtcataagtgatcatatttccacattcaagtttgttttgttttttctttcccaaattatcatgtgcctggagagtcatagaatggtctctcatgaattcaaagacacagattgtttactgtgaggtttaagaaatttacatgaataatttaggtaatcatcttacccttttcctctgaagcaattgagaaacaagcacaggagtcaaatgaatattcaaaaattaagttttaaaaaccaataaaacctggattggaagatgaaactcagccccagactggaaccatatttctacttcctccccatcccttgtccacaatgttccttctgcatccagaatccaggggtgatggctgcagtgcaaaacatacactagaagatgacttcataatagagtggtaaatatatagttaaggatcccagaaaaaaaagaaactagggaacacagttttttactcactggataaatgagtcttcctttggaaaaaatgagtcagagaagccagagtgggagtatgagatcctgaatcctgagtcactcttgagtgactcaagccaacagcagaacactattaaagtgcaaatatacgctctcaattaaaagcaaccacttttaattcatcagcatcttctcaaagataacagcagatgatccagctgatacaaagaactactgtcaaaactataatactcagaattgaaaatttcagatgaaaaaattggaatatagaaggtatggtgaggtataggagaagcaggtccatgtgagggtcatagttcagggtttctggtgtctgtgctgctgcattataattctggatttgaacacaaacttcagctaccattttgctttttgctaatcaactttctaagataaagacagcaacatctaacatctgtattatactatcatctagaattagcaaggtatactatttctcttctacttttcttttgaggccactttattgagttgctagtgcaaactgtacaggatatattaatttttacctttagtggcattataaacaacctcacctacactcaatattaacactgaacataaacatttgctgaccacatctaattgtactaagcatcataccttagccacttggcagatattactgcatttactattcataactttatgaggtatcattaaaccattttacataagactctgtttctatctgagagtaaaactttttctattgggtgcaatcccttaaacaactaaataatcacccaggcaataagataagtgaacttattcaacatttgatactactgaacactgtatttatcaaatcactttcttttcctatcaagagagaactttgtattaattcagctagcacccatggacccagcagtgggcacctacctaaggaaaacagcagtgaacaaggctcatgctagacttcctgtcaagccaccatctaggtggcaattggttgacttgacacagctgaattttctattttttctcagaaggctaatagacctagtaagaaatgatggagtgttaagaatgtaagaacccgaaatctaatagagcaaatggtctcctccaggaaagtattatttactcatatccgtattacctagaagtggcagaaaagaactggaagggaagattgctatggattactgtatactccgctaagcattctctgtgaatgaactgcattcttgagtgaatcaccactggcattattgaatagtttgaattccagggctctgagctacaatttggatgttccacaaacagtgagatactggaaaactaatatgaactcattagattatgagaaactgaaatgaacaaaaggaaaaatttttattaacagtccaacattagtgaattggtctttatttgcattttgttgttgcaccaataggggatttttgacagttgtactttcatcaattggctgagaaaaataatttttaaaagatatttaaaatgtataaaatttgcgtgagtacatagtaggtatatatatttatggagtacacaagatgttttgattcaggc

SEQ ID NO: 66107 - DNA, 934 bp, Homo sapiens
attgggaaagttatttagtctctttaactcttctcttctgtgaaattgttgtaagaatgacatttaacactacagcataaaataaggctttacactaaattctgagtaatctctcaagctgtcacagaggcgaatgaagggaataaatgctgtatgtttttgttaacagccaatatattgcaataaaaggagacgctaactagtaagacaatgtttgcaagctttattcagctaaaagtataccagagcaattcttggtttggcctactgattacttaactctttgaggtataaaggaatgaataacatgcactctttccctggatataattctgactagcaaggaagaaccagggcattggaagaggaggattcctttagagttaacaacatagtgatgtcattctttaatcagtactcaaaaggttagtcatcattaggtacatagcctacatgacagaaacatggattttgaacaccatgattatacagtgtttgattttcaaataaaagatgactcactgagattaaaaagtacttaaagatgccaggcacggtggctcacgtctgtaatcctagcactttgggaggccaaggcgggcggattgcctgagctcaggagttcgagaccagcctgggcaacacggtgaaaccccatctctactaaaatacaaaaaattagccgggcatggaggcatgcgcctgtagtcccagctgcttgggaggctgaggcaggagaattgcgacagcaaattccaaaaaaaagaaaaaaaaaaaaaaagtacttaaaagtactccatctccaaaaaaaaaaaaaaaaaaagtacttaaagacatgatttaaccacacaatcacaactctttcccaaggaaaagaataagatactttcaaagactagcatggctatcaaaggagccctgtgataataattca

SEQ ID NO: 66108 - DNA, 599 bp, Homo sapiens
gacggcgcccgccagagcgcagcgaagcctgagcgcgactcagaattccaacaatcgaacaccttgtctcaaaacaaaaagctcagtccagagtcgacccgcaaacacacgttttctctcctcactcctgcaggcccgaacttggggctgctaccagacccgcagcattgatctgagccgcggttgtcacgtttcggcccgctttgtccccagctccgtgcagcgtccagggcggatccacccccgtccccaccccagccctatccggcgagatctggcttaccacgagggtcagcagcagatgcaggcagacggctccgcgcacggagcgccggggcccagcggcggccatcgggatgccgggcagggccaggagaacgcgggcgccgggagggtgccgagagcgagacctgccgaggtgcagggcgcgggaggtgcttttctcgccgctgcttgtttttaagtgtatttggcctctctcaggcttgcctgcccgggagcaacttcacttctgaaaccggattggacccagaggacgcggagaggccactccttgttatttctcaagttttatcatcgccggcgcggctgaggagctg

SEQ ID NO: 66109 - DNA, 2496 bp, Homo sapiens
tgttaactgctgtgtacttggccctttctatgttattaatatgccctgagaattcagttaagggtttgaagtccattgagctcctcgagaaagacattctaataacagtaacaattaccaattcatgattgtaaaatgtggaactctactgcgaagtgagagcggaagagaaggggaaattatacgaatatttcagcccccagttcacttctcccagaaggaattagccttccgggttcctccctttgtccttcaagattgattggcgcccaacgccttctgcttaagacaaggagcacttttccacacctgtcgatttttttcctcttccagggagccaggaaaagtccaatcggactttttatatccccaattccccagacgctgctcccggcattggctttttgcgtcttcaggctccccaacgagatcccatcggtcaagcctgggaaaggggctgtcccgccccaaataaggccaaccacttaggctcccagctctgggaaggggtagggtcattgctgtagtgctctttaaagaaagaaagaacctggggcaaggggcggtggcgcggggggcgggtggtgagcagaaaaatcgagtcgcctctggggacaagaaatcagaaagacccttccttcctccgaagatttagggaactgaagcctcgcacgttaagaaaccactgaaactgtacaaatgctcacctagggctcgccggtcgacagtcctcaggagcaaagggtcaagatcccctcccccacccgccacttccccccgcccttctctcagagtaaacaattcccagaaaggcgagcagttccctttttcacccaaggacactcgctctccgtcccggccgcccagcggttcccctttccgtggcctgggcaggcgctgaggcacagggagccgcacgttcccgaggcacagggagccgcacgttcccgaggcacagggagccgcacgttcccggggaaggtgccagaggccagctggacggccccggcgcactcccgccccggcgcactcccgccccggcgcactccgaccccggcgcactcccgccccggcgcaccctgctccccggcgcgtacccaggggccacgattttggctgggcgaaagcggcccgctcccgcctctccttgagtgcgctgattacatctaccggagacaccttcccttcccttggggatcccaactctcaggtcgcgatcctcttcctatctgccctcccccacccccgccaactccattttctagccacccagaggccccttcaccccagcttttcccgccacccccacctatccccgttcccctagttttcctctgcaccctaggcgatcgcccccttccccggagcggtggccgcggctacactcaccgcgagggtcagcaggagcagccggcagagggctccgttccaggagccggaggggcgggctgcctccatggagagggctcggggcaggtcgcgggccgagcgtcgggccggggtaggagggctccgcggggcgagggccgcggccggagcgcagtctgggcccgctgctcaggaggagcgcgaggcggaggaggtggggcgcgcggagaggtgcttttcttagcttctctgaagcgcctgcctctcatccaaggggcttttcctttggcggagggaggggctccagacgcgtccaaaagacaccgatcggcccctccttgttgtctatttaagacttaagacttcatttctctaagaaagccacgggtgggaactccctctcgccgccacccttttacctgcgcaaggtgtttctcaccagcggacgccacctataaggcccatctcccccaccacgccccggtgtccgctccgccaggcgagattaacagccggccctgcccagcagaagccctgactgcacaaagactcactcctgagtgcgcggtcggccccggctccgccctgcccgctgccctcggcgacggccgtggtccctgccctggggtcaattacagagcgaggtctgagccgcagaggctgggttttaggtcacagctgcctgaggcccacctgacagaaagttgactccagggagactgttacacactctactggagtgaatttcctacacacacccacaagcagttcagacatcatagtcatctgaggcaccattctttggggtcttgtgtttttaggaatttactggcatgacaatgatacaagacaatcgccataatttagagacaaaaatacatatatacatacatacgtacgtaaagttagggaatcaaggcgactgcaaaataataaaatcgagggtgagttactataagaaatgcatccattgaggtcctagtcgtgggctacatgtggttactgattttctccaagaacatccctggtcacaaatagagttataacttatttcctataccggactcctgaacatccagtggagagttctcaccttctttactaccatcaaaaccagagttcatggtg

SEQ ID NO: 66110 - DNA, 893 bp, Homo sapiens
tgtgccccatgtaggttatacttactgcttattctgaatatggcaaaaaaaatgacataatgagcagatttttttcagggcaagtccaacaacattttccagcatgggccagattggacaaggactgtggtaataagtaacctgtgaaataacagagggaagtcatggagattggaggttggaatttggcatgggaataaagaggaaaagcttcacataaggggagcacttggcaaggcttggaaacacagcagagaagaaagaagagatcaagatgatttcaagtttcatgcatgcacagctggaagagctgtgaagtcactgagatggctgtctgcggccagcccacctgaacgtgctaggtgctgtctgtgaccagaggagttaggaggtgcgagtgcagttttctcttctgagtgtggttgaccttgtattgggacagagtgtgctggggtgacaatatcaccaccaacagaaaggtgcaaacacaagaatagtagcaagataagagggcatgatagaaaatgtttttgtgaatctttggcacagaagtgaaagttgacaccacaagcttgaatgacagtcccagaagtgaaggaaaaggtgaacaagagagcagggactgagccagtgggactgactatcaacatgacaaatctcatttggctttgttttaaattgctctccagttccatatggattttttaaaggaaggatgagttgcttttgaccaaagtcatacagtacaatttgtaaatatgggcttattatagatagaaaggtaaattgggttagaactaacacttttttggttttcagtattttcatcttattaccaaatattcaacagtcattaaaacaatttaaaagaaagctttggacaaaagtttagg

SEQ ID NO: 66111 - DNA, 1124 bp, Homo sapiens
taaaagaaatcccatttactttatcagaatataaattgtcttttcgccgtcctctgtatgtataatttttatgtaaagtaaaattctgtcttcaaatgtggcaatatctctttaaaagtcttcaccaaacagccagcaaaccagcttagcaactttcctgggtggattcttaggtgaatcattagccttgagcaatgaaactgtccagcaacacctccttttgaaagctttgatctgtctgagactgcaggagtcacaaaagaggtgtttgtttcatgcagcttcagaatattgacagggaaaaagaatctcctttgtttcaatgcaccagccttaggcaccctggcggtggtctctgcaattgcactggatggaggtggagatgcgggattctccattcccagggggctgttgctgtctcactatctgccagtcaggaaatcttttctagtttctcagaccccaccttcaaaagctgaaattacatgactcatatttattttgataccatcaaagttttgctgacaacatgaaatttttgcctgccctgtattaacaagtatattcctgaagtcattagaaagattcaggccttgggtaagcacttagaaataaaaacttaatttattgtttgcactagttcccctcttttcccctcctcaaggtggctatttggggattagcaaattctgtgacaaaagatggtcaagtgtagatacctagaagaagtcacatccagcaattccatcaaaagagctctctaaccatgttcccatagtgacatgtaccaatatcttgggtaaagggcacacaggtgaattaatttggtagtggatttttatagactgtacaatacacttgactctttgccaaaatatgagtgcctaattgctgtgtctttggtgaacatgccaaagattcagtgattttattcacgtaggaggaggaatgatttgggggagtagtttcagtggacaggttttattgtacttactagataataaattctttgaggcaagaagagtgttattgtactttttgtatttatcacaacacctaatgaggtgcctgacttattggcaatcaattaatactatctagacaaatggacttgagcaggtgac

SEQ ID NO: 66112 - DNA, 2399 bp, Homo sapiens
tatgaaagctatgctggatagaggtgctttctgaagtctttttttttttttcattcaacaaactttagcgcaaagtaaaagagacaatgtttctgctttcatggagtgtatacaatgggtgagggggtgggaaggaacaagtaaaaagcaaggtgatttcagaaagtattaactgctgtgcagaccatacaacaggggaaagagataaagagttaaatcccctaagacggtcctggctgtttgttggctttatttttaatttctcctttttctctaaatagaaatcaacagactttcttgaaaagaggacttgattatcagaatcaactgtggagtgttttacaaataacaggttttcaatgctctacagattttacagggatgtaaaccagaaccctgaaagctctagtgtcttcacaacagttcccttgaaaacactggtactgctaggggaatgaacaatttacatataaataatttatattttagttgtctctaagtgtgagactgtaagaaattcattttgaaaaccactcaaaggtttcctgattttcatactgtccttagccgataagctcttagactgatttgacttctaaaataccttctaacttgaattcatttgaaaagcccgaagtgttaaaactcatggattgagataaataaccttccaatggagtctagcaaattggaaactggacttggtctttgatctcagggaggtacgcgtactacagacgggtcattgtgcttgcccagacaggacacgaggtaagacttccttacttaaacttgacacatacagcatggtcagaaacagcagatggggtcatttgttatctttaacactgtacgccggcccaagtagggcaggacagtgggaatcccataaaacagagccagctttcatgctaggagcagtactgtagtcacccaatcatacggcagaaatagtaaaggtcatgcttcctccacagtggtgaggtgcagcagcttccttggcaaatgacttctgcgtactctccccacatggaggagattggtcatgcaaagtaggtgttttcagggtacaggaaagctttccaagattgcttctagaagctatggcaaatgtattttcaatttaaatgtatcttcctattatcagcactttaaatttgccatttatcagaaagggcctttttcctcttttccttcctgcatttgttttctgtgtaggtttgctttttgtctgtttgttttggcctttgaggaatgtgacttcctaaggtcaccctggaaaacaaagaagcaaaacaaaacaaaaaaagaactccgttttcactaaaatggagtccgaagatgtgggttcagtgctttatctggctgtctctgtaacctggggatcacattcgtctcacagggaaagttttgtgaagatcaaataagaaataatttggatattgaaatgctccccaaggttcaaagacctgcacatttagaatgcttggcagcccctggtctttttgtgtgtgctgcacttgggacatttatcagaatctgaacacatcagaaactgacccaatgatagaaaagaactggaactaggggtgatcagaataacctcctgagaaggccgtcccaatggagaaaggagttagtgtcctgagctttgtggtcctgcaccagctcttggctagtctgctgctgaagtattctgtcagacctgaagaaaaatagagggcaataagaatcggtactgacaaacaggcccaggcaccacactcccgaagaccaacaccataaacaatctgcctggcagggttagagtctgtagaggctggggaggcagtagtacccagagaaaaacaactcgaaagtggaaccttttgaataacagcccatctcacagtagagtcctttacaccaacaaaaacgagtcttggtcagtgtctctaacatacgtttaatttcctagacaaatcttgcatctcttcatgatttagcttcttgtttacaatgcagctttcttaaatggaaaggaaactgctgaatctcaaattgctgtgtagtttgtcagacaatgacatccttcactgccagcgttgagcacactccctttttaatccattttgcctgatgaagcatagcattttctgcagccttctgagctgttaagagaatatttcaactgcaaacacaaagaagaaatgtttgaagtgaaatgaactatgggctaatcgggaagggcttgaatgaatgtcaaaataagagctcacctactgcacatttttaaaaagaagtctatgttaatggagtcaaaacactggcttcagtgttttatctttattgatgaaattaccacatttgaaaagtaaacactattttattttatgtctgatagaaaatatatatacgct

SEQ ID NO: 66113 - DNA, 1114 bp, Homo sapiens
aacagagtgagaccctgtcttaaaaaagaaaaaaagaaagaaaaaaagaaacaagctttttcaattaaattccacagaaatgataaatctttgcagttgtaacaatatataaaatgtgcagttcattaagattttaaatatttgtatgccttaagcagtggtgaaaaacgagaattaagccatttagaaatactccacaagactaattccataaaaaaatttatggactacagaatagagaaaatgctttaataatggacaatatagtttattgtccctctcttgggagagaggtagctttattctctaataattaatttagctacctttaagacaagtcaactgaagaacacgtcttagtttttctttcttgctcatgatagaaaaagtttctaagaaataagcctctgtactaaatactagtcaaattctgaaaggcccagtcactggtaaaactagcaccacaagtcagagctgctaactaccgcttaggtactagaaccacctcccttgtgaagtgttaatggcctcagcccagctcctagcagacatctgtctacatcacacacaaaataaatttaaattggcagtgtctgcagagaaaatgacatttcatggatgtggaaataaaccaacccttcagataagaaatgacctcacattctagagatagtctcttcagggtgagctctgagaagccaaactttttcaattcctttctcactatttcctgacccataaagaacagacaaaacaaacgatgccctcagaccttttgcaataagaaacacatcaaactctatgagcaattagagctattgtgtaatagtggtgatgcacgtttctaaacgtatttccacttctgttttacctcagttaaacactcatatattctcctaatggtatgggataaggggaaccgtgcaggtgtcaactataattattgttttccctgtttttagtcagagatatttgtccctcacctctgttgaagaaaacatacataaccagaatggcaaataaactggttagcactttgacatactctaaatattctctatcaacatgaccaatgcattacaaatgagcagctacattttaaaaatattgatgg

SEQ ID NO: 66114 - DNA, 2425 bp, Homo sapiens
cacaaacttttcttatctgacaataaaatatagtttgatgatttacttttgaaactgtaatgcactacacaggtggttgtggctgttatcattatttttaaaagccaagtttccacatctgtactttgtgatcagggactctaatagcaagaaatagttgtatcattggtcaacagagttattttgaacctaggtattttccttcaaaatgagatgtgctttcccccgtcataataattttgattccatcacttctttgttattccatctctaaaaatgaagataaacatctaaattctacagtgtttggtcaataacctccctatttagattttagtgcccattcatcattatgcatataccaaattagattgctgtagaagcaaatgtttctcagaaaaataatgaaaccctttatttcataggttcagagacatgttgcttctttgtaaatggtaacttgccagccagctaacccacggttaagcaaagataaactccctggaaggcaacagatgtaatctcagcattattttttcttcagagttttcccaaccagaatttttgtctctattcctgttgcattttcatgttttctttctttccatttctttctttctctttcccatactcttctgcatatgattattttcttccttttttttttctttctttttttcacctctgtccttctctctgcagtttctgatgctgtgaacctagtgaatattaagggactttcctggggtatttcccagaggttgaagaaaagcaccaggactgtgaagtcacagaagcagccacaacacagactctgggaggatgggaaatggctaaagtcatgatttagccagatgttacagagtacaggaaaaatagaaagtgaagaccggaaaagttctatgcactttactgaaattgaaaacccaaaattctcaacatgttcatccaataaattttttatatatatttgggataagtaaattaaaattgtataaaagatttgtcttaaattcctcagctaatatagacaaagtagtacgactgcacaagcattatcatagattcagatgcgggtatggagagagaagaactggtctgctttattatatattttgccaaatagagcttatggaagagaagatataagaaaaataatgaggaacctgttttaaactggatatgggataacttcagcataagtgatagaatagaagagagaaaagtaaaaaaaggagaaaacaggcatgactgactagtatgggaatgtgaaagaaataagaaagaaataaaagtagaaatgcaaaaagcaatggaagggttcatataagtgatcaataattgcatcagaataaaattaagggatatggccaatggggaaaaaggataatcaggagattatctgattataaaagataatgtttggaataagagagagagagcaaaggaaagagagacagagagagagagatgatcaagagacctggggaaaaaaatcttgttgactgaagtagtaaggtggaaataaatttggaaagtaacatggaggaagaagcagtaaaatgttgtcatgaataaaaggagagctggtctgagatcatctgccaagtggaggagatgtggacacctgagacaaaggaaatatcagtgactactgagcgaggagttggagctttgccataaaccaagtaaagtgaaaacactagttcttgccagcaagctgactttcacatgaaagggcaacaaacacataatttaattatcattgaaagcaaaaatgacaccaactgtgttttaaactcttcctcatctcatgggatgtgataataagtgaatcatgacagcatcaagctcatttctggtgcttcactaaagtaacacagtaaaaacattagcagtcaagaatttgtgtaattattcagtatcatcttcctggaaaattttagatactttgcaattgagatgcatttacatgtttcctgattccttcttcaaaataaaggtccatatgcagttttttgccaaaacgaacagagaacggagaggcaaagcagaactaccccaagctaacctcctttgcccatgggtagaacaggcttgtcacaccgaaagtgaaaaactccccattagaatattgactctcctctgtaaacatccagtacaaggaaataagaatacatggatgcaaagtaaactcttagtttctacaattggtagataaaagctggtgttaatttttctttaagcagcccagggtgcttgacctccttgaatctacctatggtgtcggaggaattcgttgacataaaggtcccccagctcagcaagagataagccagggaaacattggagtttatggccgggttctcctgatactgttagaacactaaaccttagggaaaggactatttttttttcttcaaac

SEQ ID NO: 66115 - DNA, 1276 bp, Homo sapiens
ataatactgaatagacctaatgttttagaactatatctatctgtgctttcacagagccaagtttgtgagatagacacaacactaattaatatttctcttattcttttaaaatgggaaaagtaataaagatattagccaattatgtttcttattgctctccttatgttctcagacatttagctgtccctaatttagccttctctcctgcctgcttgcttacaaactcccaagttcatattttaagcaatttcaatcaggacagattaataaatcccagcctattcatgggaattaactaattcagaatgaatctttcctaattgttttgtgttcacatgggtgtttgctttggcccctctccaagcctccagccaagggagaacattgtctcaccacacccaactaaaaacagagtcaaggaatgattcctttggtgaaagcgtcactgaataagcagttttagcttggtgcgtgtgtgtgtgttttttaaaaggagatctgtttgtagattgtcaacaaagcagtttccacatagaagaataccaattcctattgttgctttttttcctagcaataacattctgaaatttgcaatctttagcaccaagtttttaaaatcctaaatgacatgttgttttttcctgtatgaaagttttcttaaaaagcaaattgtaattattttctcaatcgttttctttttgtttttcacctctacccttccaaaataacataatttctgatagtgtcatcttttaaattttaaaagcgcattcctgagttagctctttcttttcagaaggcaaacattggtgctccagtataaaaactaaaaggtgctgacactattatggcacagaactttttacatagtttcttgcccttctgcatatgaaagtccagaattagttattacatggttggatctggggactgtgtctgagcccaccagagaagcctggtccaagcttcccatatcagggatctcttaatttttgaagaataatgcagattgggtgcttataaaaaaaaaaaaaaaaagagaaatatgcccatgagctgaattgatattctagagaaaaatggagaggctttcatagagaaatgaggaagtgctagtgaggttttagagcctctggttcctctccaaatctacatccaggaagtatcaccaccactttccaaggtgatgaatcagacaatccactcctctcaggagcggtttctgcagtggtggctggcaaagcacttagcttgagggttcataaacactttttga

SEQ ID NO: 66116 - DNA, 683 bp, Homo sapiens
cactttggaaaacagttttctgtatactctattatgcaaaacatcttaagtgtattttggaaacaattttctatactctattatgtaagacatttattgccatcacatttaatacttctggatggaagcaaatattttcaatggtaaaatattttgttaagattccgtagtttctgcttaatatgattaatatgggttagagttgatataacattgacacaagattcctgatagaaataggtgttacctctcaatcaatatatctgaatgtatgcagatttacctgggtgttcttcccactaactctaagtccaaagttctgtgactcacaatatacaagtttgactgcttgcatgtgcatttccagaggttagtcatcagcatttcctaccacctagctgattatatcatggaattttgatgatgtttgcagttgctctagttgaaaaaccctcccaagaaccagagcatgtttttaaaacctgtttcttgttgtaactcttgccataattgccaaaaatgatttgctgcttactggctgcaactgcaatgtaattcttgaagtccctagcagtagaaaaaaatgctatacatatatatatatatatatatatatatatatatatatatatatatatatatatatatataactgcttgggatgaagggatgaggaaatagat

SEQ ID NO: 66117 - DNA, 894 bp, Homo sapiens
ccccatccattccctctgtctctgctccagcgtacctccttctcacctccagtctgctttgatacagagaccctcaactgctcaccgtctgtaatcactgcctcttcccactagtcctaccaactgttgtcagagttagctttaaaaccacaattttatcatgctcttctcacatctaaatacttcaatattttcctactgcacacaggcatttaatattacagctggaaagttacctgtataaaatttagtctactcttgtcattttacaagtgagaaaactaaagttcagagaattggggaaatacgttgaagattttccaactctatcaagagtcagatttcactattttgcctttgaaagtccaagagtgactttgtatcagagtttattctagactctgagcaacagaaaataagcttacaccaacccaccacatttttaagcagacttggcggtttttagattacaaatccagttgagagtctgactgtatggtgaaagctacttggtcttctgcccaaattgtctctcatgggaaaaagagtgacccagcttcataaagctggaaagatttcttagtcatctgcatagctttccaaaacaaacagcaagcactggcgctccaatgcagtaagggaagcgcaataacagataacagatccatgcacaattctgtagctatgaagaaatggctttcaaacacacaaataaggtatgcccatctcccatcccacactcacaaacaagagagagggaaaagtgttcataaattcacaggcagcaaggagcatgcatttacatgaacaccatttcatcatttcagttctgcacccaagatgggctctacagataacatttcagttacatgttttaaaatttgggccatttac

SEQ ID NO: 66118 - DNA, 3207 bp, Homo sapiens
tgtcaggtactgcaactattttcttcatgttctatggttctatccagtgttaattcatgtagcatgcgctaatatatgttggttgtaatacttttggagggcttttttgcttttattattcctttgatttaaaagactattagagcatttgaaatcttagaattttaagtgttttagaggcttcaataatgtaagggctccaactagttataaaagtaattgtgtccagtgagtaattgtaagatcaaagagcctcctaaattactccataagtctttttgatcttttgtggccagtttgttctaccctggaccggggctgattaagccatattgtgggcaataagtcaccataaaagttgagtcactgcttgttttcttaaacctgtgttactatgacttagagactaatttcaatcctctgcttaatctaagagaaaaaccacaatcatagaagcgaaaaacagtgttttagaaaattgataggcatagggagagtcagaagaggagaaataaaaagatagtattggggcactaggtacctagattatatgtgaattagaacagtgtaaaatattctggaaataaccacagtgaagtacacagatcttctctatatcctgcccttctctatctccttttcttcttccaatattcttagagtaaacgaagtctactgacttataagttaccttgatgttcacagttttagttattaaatcagttaacaaattgacagacgcaaaaaaacctgtgaagtctgccaggatgggtggaggtaaaagcagttcagataaaggaactgaagacttgaaattgtgcctggtagagaccagatcttcttccagtgaggtcaagcactttaaatctatcatctgtaacaagatccagatagtcacactgaacagaggatatcacaagcccccaacaggctatcagtgaggtgctctgaaatcaacatagctgaaaagccacaaaaaaaatcctaagtataccacatacaaaaataaataagcaatatgtgtttctgaaaatgaataaaggatgttttacattgctatgatttaataaatagagctgaaataaactcatacattttattaacaattatcctaggagccagaagagtaaaaatgatgaaattttaaaacttgcagacctgtatattaatgtatatatcattgaatttttattgatatatatgtactttttataaaccaaggcaatcatcactataaaacataaaaacacaatattaaagtttgccacattgtagctgttacatgatttaaaagtactaactttcataaaagcatgataacgaacttttttatttaaaaacagatatatcatagggcatgatgcaggcagctggttaaaaattgattcaagaactggtgagatacaattttctagagaatttgataagaagtcaaaatatattatcaatgggatatacacagcagagatcctggctatagatggtaagaaaatttattttcagtattttaagaaaactagtactattatattaaatattatgttattctaatgctgatatttgagtgactcagacatttttaatggtgtatgcaagacttatggaaagccctaaacaccttaaatcaagaattgaagtcaattaaaatcataatttacactgaagccatagtttatttcatctacttccaaaactgagttgtatatggcttacagcataaaagttaaaatataattcatcttctgattatgactttgtctcttgagtatggctaatctcacttgtagggtatgttgggaatgtttacttaaagtaagggctacgtgctctacaaagttcatttggggatcaccttgtgggaaagcaatgtctccaagaatacaattattttagatccattaaaactgaactacagtgagaagcttgtgtgagtgttgcttgattagacatatttccatagtaagatgctatggaccaagaaagcacagattattccaaatataagatccatattaaaagtcataaatacagatgcactgacttaacttgtaagcgagccacctctcacatgggtaaatctgttaagcagtcctcttggtgagcagcaacaggatttgtttatttatcaatagttaatgattctatgaagcagtgcctaggaaaccagctgctgtagaaccaaacaagagacaaaggtcaggaaccacgaaggaaggggaaagacaggcgtccaagatacatgcctaatgtaagacagatactgtaggtttgcattgagtttatagctgacctttccagtatcaaaacaaaaataaagataaagaagcagcataaaattcaaaaagaaaccatgataaaaccaaaccaactatcatctgtacatcctgggcttcatcctgtggcgggtaaattttaacgcctgggtcagttttataaataacattgtcttattcattatcagtattctggaagctctaatttgaaaatggattctaaccatgttgattgcaccctatgtttgcatattggtcatatgtgaaaaatcttcaaatgctagaataaataattagtcattccaagcaaataaagagagagaaagtgctgtcaaaatgtaccaagagaaacccagaaacaaagctgattgtttattcacctaagcagagtgtctgcactggcacagagctatctgaatggttggaataagtttgcttcagcacacaccatcatcaggtgaagagacagacctctatgcagagcaaactttactgggaagcaaacactataagcaatagcttgagctttggttgccaatcacaaggtaatagaagagctaccaaagatcaaagaatgacaaataaaacaatctgtggaataatctgatgcctctcgaatgagaagctaagtgaaatcgacatccttcatctagtaaaaacaagtccaatgctgaatagggtatataaacatattatacaaaatcatatagactataggtaggctctcagtttattctcattcagttacctcaatgactactacttaggcacacagaaaacatctgtaaaaggaatttattgctttctcagaaaaggacctagtaaggtaccccagagacgacaacgttctagtttaaaagcgagaaagctaagattcttttcaagttaaaaagaagcaaaaaaaattccgtattcgctgtaacagaacatagag

SEQ ID NO: 66119 - DNA, 2237 bp, Homo sapiens
catttgacagatctggaaactggggcccagagaggctagtccaggccactcagctagtcactcttggagcggggcctctgatctagctagtggtgtaatagaaattgtaaatcatttcaaagaatatatatatttcccgtaacaccctagagttttctcctagcccaagaattgtcctttttgacctctggtgattgtttctccttgagccagataagctgcaaacctgttggaagcagtgaagggccatagggaagagcagcctttggggagacagccacctgaaattctgctccacaacctccgctccaggagagcgggccgaacgcaccgcggtcgcagctttcctgaggacacgggtccccatgtcactagcgacacctgcgctccgggcccaaagcacaatcacaaagtgcgggacctttgggcggtgctgggcggcctggccccgcagccactgggccggttggtcccgcaggactctgctccgtggagcttttgtccttgggccggggccctgcgacccgcgctacccaggtcgagccccgccaggaggctccctcctcccgccattctccagagagtagggggtcgggaaggagagaacggcggggcggggcctgccacccacagtccccaacccaaggacgtcacggtcccaggtgcgagtgcgagcgggcgggagtccaccccgcgcctccctcctctgctgaactccccacctctgtaaaagcggcccgggccggcccccggctccattttctcgcggcggccacacctggagccgcgcctttgggttgggctgggctgggccgcgcaaccgccacgggaagacagccctcggggcggggagggagagggtggccgggccggggggaggccggggccagggaggagccgagtgcgcgctcggggcaggcggcggcgcggagcggtgcggcggcgggaggcggaggcgagggtgcgatggcgcggagcccgggacgcgcgtacgccctgctgcttctcctggtaagtgccgcaagcgggacaggggagccaccgccggggagggcgtcggtaggcgaggtctagacctcgcgaccagacttgcccgccgcccttgtgcgcgttacctgcccggcgctccttcctgctgcccgaggggggaaaagggccgggcaggctgcggcgagatccgacctggggcttcggaaaatcctcttggctggagccaggagagtaagttgcgacctatcgaagttgtgttttccttcccgcgtcacccaggccccagcgcccttttctgtggtgtgtgggtgtagtgagccctggggcggggaacaccattgctgggggtcggaggctttgttgagagtctctgggacgagaaacgtggaggcaatagggaacaacctcgcgcttcttccacgttccttaaatttccctaggattccccagctcctctagccgccgacacaagccagtgaactggggaaaccaggaacatacttgtattcttagagtgcaaaaagttggctaaaaattttttaaaaaggtgtaatttacaaagcttaattttaagtggatcacccacatatagttttaacttaaagtttatgaagttggtgtttcaaaagttttccaatattaaagataataaacatatgtaatagtttgaagccttattcatttaaaaggttacagaaaatggaagtgtagcgccccctcccccacgccccacccctcactcccggaaacgacgttcagtccctggatttagagttcttttgctcaaattggattttaaactgttggttttctgtttgtttaaggggttgcacgtatgtatctcgcttataggggtttactaaaggggttttaataaagtgacagttatgctgcaaatataggtgtgagttcaccttccagagagttcacaaatatgtgtttacagagattagatgcaaaatcatactcagttttcttacgtaataattaaaaatgcaaatacattcactatattcaaagttctaacttccaaaacatgagcccttctatcctcgagttttggtgggatgtggaagaaaatcgtgtgtgtgtgtgtgtgtgtgtgtgtgtgtctcaaaacggaaaaaggcgtgactgaatccagtctagagatttccatgaactctcaggtggaagagcatgataattagggcgtccaggcctagcacacagttcattttcatgctctatttatccatttcattttc

SEQ ID NO: 66120 - DNA, 851 bp, Homo sapiens
tactatatgaccaacagtcttctaaggacatgtgaactgccccctgcaatcctggagcttacagtggagaaaggagtataaggacaagaacttgacattttttgaatatccgctgtgtgccagtcactggatttaatgaaagttaataatgggtgaaactgaatcaaacccaggttcacctggcaccaaatgcctgtctgtcaacccagaggcatcatcgtgaattccccttacagcagtttgctacagtgagtcatcaataaggtccgaacttctggaactagataattaatttcactgcaaattagaatcattctagaaaggaaaaaaacaagaaatgtaaattaagatttacctcatttcagagatataatcctgcaaaactgtacatataactttctaaagcccttgattttcactcttttcaattttgctgatccacttatttgagaccaatgaaacgcctgcttcccactttagaccttggaattgcctgtcggttaatttctggtagttcctgcagtttgccttactgacaggccagtgccatctaatggtaaaaaaggacagtctgaagctcttggttttcttaaactgcccagtgaaaagaaatcattttcttcattttacttttcagttcaggaatatattgcagcaaaagagtggagacaacctataatttttgtttatcaaattttgtgaagtctgttatacagctttatttatattttgcctaattccaaaagcatttgtggccattacagaaaacacctaccaataaaagagtaaaatattttttacatgtctagtcatttaataaatgctattttgaattgaaattgtattttagt

SEQ ID NO: 66121 - DNA, 2215 bp, Homo sapiens
cactgaatcttcacaaactgaaaacaccatgtcaccagtaacgaggtgaagaaacagattgccagcatcccagaaggccccttgtgctcccttcagtccctacgatccccctgatagccgctgtcccaattcacagcagattagccttgcctgtgtcacgctggctccctagatgctcagcaatttaataccagccttttgagagaagaaaagaaacattacattaaagatgtacaaaacctctaatatgcatcccagttccttaactaaaaccgactgatgactcccaaatttttatctccgggcataacttcttttctgagctactaactcctatatccaaaaggccattcacacagaacacataaaaacggctcttacctcccatttcacccctccctcaacaccacccctgtctcctgcctcaccttcagcttaccccatccctctccccattctgtctcatctctggaaatggtgccttcactcacccaggtgttccgggtcaaaattctaagggtcatctatatttgccctcattcattccattcacaggtctctgttgcctctgccttcaaaataaacactggagatatctactttctttcatctttactgcaactcccagggtttaagctagtgttatgtattgcacgtgcttctgcaatgatgcaatgactacagtctggtctctatacatttgttcttgccactttatggcctgttctccatacagtagcaccagcgagctttttcaaacataaactggttgtatcatttccaaacataaaagcttccagtggcttcctctcacactcaggataaaacccaaagtcctctccctgactgggtactggcctatccctgtgacatcatcatcactgattcaccaccgcatggcctgggcgttccttttgcagggctctgcctgactggcttcctcataccattcacgtctctgtgcagatgcagccccttctgagagttttcccacacttccaagtcactctctactatcctgaccctgctttaattttttttattgctcttatcaaaacctggtctgtctttgtctccccagtatgtaagcatccaacagggtaagaatattgtgttacttaacatatcctacaagctcaggaaattgagggtatgaattaattcaaacttgcagaaattttaagataaggaccatgcaaaacttagaattgaggaaatgtctcataaattctgtttattgaatgccagtcactgcaatagttacatttcatatatttctttaatttgcacatcagccctgcaaaatggatgtatcctagttaggtggctttcagatgcaagtaacaaaacccaactaaaactaggttaaagaaaagaatgttgaatatcaatcgtaagaaaaagtttagagagagagttggtccaaatttgaacgattctgtaacttaaagcctttatggtttcagtttggcttctctagcatttcattagctttcccctcatggtcacagcatggctgtagctattccaaatgtcacctcctcactcaacagtctccagaggcacttaaataggaaggttatgcatgtgcttctcttctaatcagtgaggagaatcttttgtagggtctcctgatacctcattgaccaaaattctcttacacatttatgcctaaaccagccaatatcaaagtaaatgggcatacataccatgctttgtcatgccagtcattcagctccatgagctaggcagggtctacctgagagtacaaagtagagttttatgaacactgaagatgagagaaaatgccaataagctagacaattgaaaatgtctgccacagtatgtattactctcctgttacagataaggaaattcagactaaagcatcttgtctggcaggatctcctccccgcttccctctgccctgaggatgggttagacttaatgactcactcccaaagaatggaatagggactgggaaaaatagtaactttacaacggagaaactgcaatcagtaccttagccagtggtgtcatgtggctattgcacaccagctagtatggtgtgacagaaagggcacttcagctctgtgatgttctttccaaaaatgcataatactgatctaatcgtgagaaaaacaacagataaacccaaattggaggacactgtgcaggatactcagccagtattcctcaaaaccgtcaaggtcat

SEQ ID NO: 66122 - DNA, 841 bp, Homo sapiens
tgcttgtctcctaagcctctgcctttaaatagtgaatgacttcctttgtcataaatgaaatcttcagtttacttggatgttactttgattcactatcttaggtctctgtcagggacctaagatagtgtcctctctaatcctcttgggtcctaaactagagaatcattctgactttcaccttcctcaacaccctgtccctctgctattagtccttgctcaacactgtctgttgcatccaacccttccttctataaccagtggtactacccccacccagattactattgttgacattacagaagaggtgcttgctgaggtcagtgtctccaggtggaggccagctaactctctctccagggctacctggatgaatttaccaattcattcaggctggccaatgcccaaagtccactggggaggctcagaatcacagtttcattagaaatctcagaaacggactcactaaccaagctcacaaatgctaaagcataagtaagaatctcaatgtagtaatattccgtaagaaatcctgcagccacacaggccagaatgactaatatattctctctctggcataactgtgtaggaagtctttgcagctgtgtttcctgctccagcaaaagtcctgcccataagactataaatcttcagtccaaaaagccaacacactacaactgccttttttatttccttccactgctaacaaattccagggatgactgccattttctttacatgtgctcgtagattccattcgattacagccaagccttgatggcctgggggaggttattctgtctctgtgtccaggttcttaaccttattgtgcataaaattaaat

SEQ ID NO: 66123 - DNA, 2052 bp, Homo sapiens
aaggaaggaaggaagggagggagggaagatgccattcttagattgaagtggactttatctgggcagaacacacacacacatacacacatgcacacacacattgtggagaaattgctgactaagcaaagcttccaaatgacttagtttggctaaaatgtaggcttttaaaaatgtgagcactgccaagggtttttccttgttgacccatggatccatcaagtgcaaacattttctaatgcactatatttaagcctgtgcagctagatgtcattcaacatgaaatacattattacaacttgcatctgtctaaaatcttgcatctaaaatgagagacaaaaaatctataaaaatggaaaacatgcatagaaatatgtgagggaggaaaaaattacccccaagaatgttagtgcacgcagtcacacagggagaagactatttttgttttgttttgattgttttgttttgttttggttgttttgttttggtgacctaactggtcaaatgacctattaagaatatttcatagaacgaatgttccgatgctctaatctctctagacaaggttcatatttgtatgggttacttattctctctttgttgactaagtcaataatcagaatcagcaggtttgcagtcagattggcagggataagcagcctagctcaggagaagtgagtataaaagccccaggctgggagcagccatcacagaagtccactcattcttggcaggatggcttctcatcgtctgctcctcctctgccttgctggactggtatttgtgtctgaggctggccctacggtgagtgtttctgtgacatcccattcctacatttaagattcacgctaaatgaagtagaagtgactccttccagctttgccaaccagcttttattactagggcaagggtacccagcatctatttttaatataattaattcaaacttcaaaaagaatgaagttccactgagcttactgagctgggacttgaactctgagcattctacctcattgctttggtgcattaggtttgtaatatctggtacctctgtttcctcagatagatgatagaaataaagatatgatattaaggaagctgttaatactgaattttcagaaaagtatccctccataaaatgtatttgggggacaaactgcaggagattatattctggccctatagttattcaaaacgtatttattgattaatctttaaaaggcttagtgaacaatattctagtcagatatctaattcttaaatcctctagaagaattaactaatactataaaatgggtctggatgtagttctgacattattttataacaactggtaagagggagtgactatagcaacaactaaaatgatctcaggaaaacctgtttggccctatgtatggtacattacatcttttcagtaattccactcaaatggagacttttaacaaagcaactgttctcaggggacctattttctcccttaaaattcattatacacatccctggttgatagcagtgtgtctggaggcagaaaccattcttgctttggaaacaattacgtctgtgttatactgagtagggaagctcattaattgtcgacacttacgttcctgataatgggatcagtgtgtaattcttgtttcgctccagatttctaataccacaaagaataaatcctttcactctgatcaattttgttaacttctcacgtgtcttctctacacccagggcaccggtgaatccaagtgtcctctgatggtcaaagttctagatgctgtccgaggcagtcctgccatcaatgtggccgtgcatgtgttcagaaaggctgctgatgacacctgggagccatttgcctctgggtaagttgccaaagaaccctcccacaggacttggttttatcttcccgtttgcccctcacttggtagagagaggctcacatcatctgctaaagaatttacaagtagattgaaaaacgtaggcagaggtcaagtatgccctctgaaggatgccctctttttgttttgcttagctaggaagtgaccaggaacctgagca

SEQ ID NO: 66124 - DNA, 2452 bp, Homo sapiens
taggctatccaaaaaatttcatcgctcgtctatacagtattccttcaaactgaagaaaagagagcttgtatttccccaaaatcttccattgtccagggcaaaaataattagttccttcaactcgggcacagtagaatgagtcaggaatcctaaggtgtacatttcagctcttccaacaatgatgtgtgacactttcggcaagtggccatcttccagagcctgtccttccttctctcatttcacagacaaggctagccctactggcaaggggtcaggggtgtggcagggaagacatggatctccaaatatggacaacgcggtgggctctctttgggattttgctcttggggctgctctgctcatagctctggctccagaaaccaatgcttctatgcccaagtttcccctggccttgggcccttggacaggggggcaaacgcaagggctctgagggtgagaggaaaagccacagctagaaccatcagagatgaggcccagaaggacaagtgccctgagaagccctgcaggacaacctgtgagaaacaggctttccacaggacgggttaggaaattaactactgtgtaccacactgcctcaaaaggaaaatgcattttagtcccaaccaaattacacgtagtgtttggaatacctattacacacagacactacaaacctaggtgagaagtttctcttctgaaagtaatcacagacatggctatttttatctttaataaacattaaaggcagtaatgataagcactgctgcagaaaaaaacacacctctgcctcactctgccacattgtttaacagacttcaaatgtatttgtaaaaggaaggctaaggtgaaaaatagcagttagcattgccagatttcaatgaatcaagtttcccttcaatattgcctaatttcccacaaggccatgggatttggattagtttacactgaagagatatagctgagtcacatatgctacttaggaatggcaatctgactgtggaaacaatctctaactcatctctcatctcttgagtgtggaatggacccaatgactcttgtaacaaagctagggagtgagaaggagggtagcaaatcccatcggatactttcaaactatacttggtcttcctctgtattccaatttaacccgtgattccatgtttcagaggaagtcacacagtgagtcacttccagttgaaggagtgagttttattactcagatgtgttggaggataaataaataccattcacctacatgatgaagacaatcaaatctctctcctgggcagcacgcccttactttcatctgcctacctactaattcttcctggatatcacacagggatcccaactcaatttctctaaaagcaaaatagccccccaaagacgtgactttctatactccctattaatagctacctgaatgtctaagctagaatccaaacctcatgttaaagctcttcctgtttcttcaaacctactattcccatccattcaactctgccctgatgaactaccaacctcgacagttctaatcttctattggccattgccccctataacccatccttcatgctagaagggtcactctaagacaatggactgcatcgctttcaagacttctgacatttcctgttactcacaggacaaaaaaagcatgggacatgtggccagtaagggaggcccagaaaaaagagatgcccaataccatggccctccatgatattcggataccaaatccgaactcctgaaatgggccatgcagatcagagcactgggtgaataaaactgaaagacctttgaaacaaagcagactattaacagctccaaagaacacagccaggcccacttgccagggccaggaggctaaagggctatgataagaaagctgcagggttaactagctaccttctgtgctagcccaggaagaaccccagccaaaatgccagagggactctgaggaaaggacctaagatacctctcccacaacatacatgcttgcacatagaccccacactttgactacccatcgccatcagctccaccatttccagcagggcacacaccccagggaggcccaaataacaaagcactcagccagataattcctccaagggcccagaggaagtcagaccaaagtggcccaaccagatttcacctctacccagagagcaaaacagcccgtcagtgtgtctaggaaaggtcagggcttctggtgagtcaaatggacagtgaaatccccactcccagggaagttatgtaatctcctcccattatatagccccactgattacaggcactatcaatttattttgtaatcacagaagctttgataaagctgtatgaacaaagaccagtctctctctgccaggaattttagagacctcaagcatctgaacaccatggctggacactggagccccagagacctttcaaaacctggcccatgtgc

SEQ ID NO: 66125 - DNA, 1419 bp, Homo sapiens
aacagcttccaaatcccagaagtaacatcggataacagcctgcgctggctgtggtgtgaccaggggaagcgagggtgtgtctcggtgcttaccgatgcctggggccacatagatgaagtacagacaggacgaagagagggagaagaagaagatgaaggcgaggagagagcgattggaaacccgcatcatccgcctgagcacagacatcttcctcttccctgccagcagcccaggctgcgctctcaggccggactcggggccactgtccaggccctaaacttccataaatgtgctgagaaccccgagactgcagcggggtccgcgcggggaggctctggggagagggcccgagcggaaaagaggaaatgggagggagcggacggaatgaatgggaggccagagagtcgggggaggggaggcgcggaggccgagggacaagaggtggaggggggagaggggactgggggctaggggcccggggacggcaggacggaagaaagccggggaagggcgaggaggagcgttttctccgccaagcagcggcgggaggaggggctgcaggtgggaggaggcgcaggctgcgcgccgcggcgcccctgcggagaggggcagctaactgcagcacgcccggctccgctgcccgcgcccggcggggtcccgccgcgaagccccgtgcttaaggtccgggccgcccgcgtccgctcggcaggccctgcgccgcctcctactccgggccgcggcgtctcctgcctgcgcggggctagcgtgggcgccggggccgcaaccagcgcgcgccacgcgcgggggcccgcgggggccctcggggccgaggagctgggcgctcgcctgcaccgagccgcctcctcatgccgcgccgggccccggcgccccgcggccgccgcgggagctgagcacaggccagggcggcgtcccggccagcgacgaacgcgctccgactccggccgccgccagctgcctgcctggccgcaagggcggcagcggcattaccgccgcgcgcccggggtgaggcgcccccgccgggcccgcggacaccaggcgaagagcaaccgggcgacgcgcgctgcgggcagagccggggagccggaagagcagaggccgagcgccgtcggagccgcgtctggttggagaaagaggcggacgtgaaggggcgggggagccgcggaggaaaaccgggaccggcgggaacgtctcgagacccctgcgcgcttcgcgcgctcgctcggaactcggcaggcggcgctgcgccgggccccgaggaaacctggaggtccccgccctccccgcgcccgaaacaccgcgcgtcctgataggcccgcgcccagcagccccctccccgcgcccgccgcaccggggccccaccgcctcctgcgtcaccgccgcccccgcccgcccggggac

SEQ ID NO: 66126 - DNA, 1330 bp, Homo sapiens
cctaatagggtggtgaattaattaccaaacatgcaacaaaggatatcaaaggtttggcgaaaatggcaacattttggaataaatgaccgtaatgtgtgctctgcctgccaccctaactggcgcacattttgcaggtcagttgctttccctatggccaagaggaggaaaagcatctctcggatttcagcttggaggaggaagagttcaggctgccagaactggactggcacttctgaatatcccgaggcaaggtcccataacttccttgggaagctctgccgcacctccaacccaccccaccccaccccaccccaccaggctgctggagtcttgggaccgcagaccccgcggcccaaattcttcctcgcagaggggaggggaggggtgttccggccgggcagggcggaagggaggtttgggctggattgtgggataagattgccctggtgacgcggagcggatctggacccgagcctaataaaggctgcgtaaataaaggtgtagttaataaaggacgggatggggcgcgcggttgccaggggcgccagcgtctcggggctgccctaatggctcctgctcagtgcgcggcgccagcgcttgtcttgtcccggctgcgtctctgggccccacgggcccctcctcacatggcaactattgtggctactagtccaggcggcttagcctctggagtgggtccaggacccgctccagctgacctctgactccctggggccaacttagccctggtcttcccgctcctccgatctcccacgcgaatcgccgccatgagctaactccccacccccgggcagacccgggagagctttgattacctggggtcttctgcttcctcccagacgtcagctccgcttcaggaatcgactgagactttggctcagagtttggttccattcttggacacggattcagctggagagctgccccggggccagagcagttcgctgctgcacactgggatctgaatgacaagctgactcggcacagaagtctcccagaggtggttgcaatgctagactgggatcagaaccaggccctagctcggcctctttgcctcaaaagtaagtttctaactgtagatctagatcaggctgcagatcatcaggcatatgaaatacttgttccacctctagatagaaatcaaaagcaaggaactttactgtttcgcccaagaaccggaagaaagatctagctcagcatcaaaggcttgccaaggttgttgttggaactccataccgatttgtatcaaaacctcagcgtcagaaacaaactctgcagaatgggtatttagattcaagtatggatatactgt

SEQ ID NO: 66127 - DNA, 2803 bp, Homo sapiens
aggctggtctcaaactcctggcctcagatgatccactgcctcggcctcccaaagtgctgggattacagacgtgagccacctcacccagcctctatttttaataggataaattttcatgaagaccttatactgtataccctttatacacatttccactatttgctatagcttttcataatttcaggaaaatgctaaataagttaagctttattgtttcttatcatttacatttaaagcacattaatttacagaaatgatacattttgctccaaaaaatattttttgtgcatctgaggaaagggaaatgcttatttttataaagagaaggcacagtactgaagaatatttcaaacttcttttcaatgcttctaactccctgctttccttgagacaaagacagacttacctgtttggagatagagggggcaaataatgggttcatgtttggttctctctcactcttgctgcagactcatttctcttctagctcactgccaagccatgaacagtgagctacacagtgagtgtaccagggaagggcctagggctgctgccaggagctcaaagcactgtgcagtgggtaggtcttgaggcaagctaggattttccatatgactggagagacaagtatcttaatctcaaatcaggttgaatgggtgcaaaagctctagatttgtggtaggacaggaatttaggaagatcgaatccaactcagcatacttatgtttggggataattatttgatgttgttctcagcctgttaaatatagtgaactccatgttcctcttcaaagaatcagtatgtcagtatgttcagttctcttactctgtgttctccattttaaagtttaactttctggttctcttcgcccccttgcctctagcttcagtaaacaactttcctgccagttctaatcagtagttcacatctgttcccctggtcaccggctttaacctgagtcacccctggtcacctgctctgtcctgactcatcctgagtcacccgttctgtaaccgcctttcccgccaaactactcaccccgccactctggctcgtacccctgctctctttaaaatagccaatgggaattaccttagactgtgtggtctaaccctagccaataagggaacgacacagcagtaggagctacctgtgtcaggaataaaaaccccttctcctcccttgttcaggtgtgctcttgccattgctccatccgccagtcatgcccttctatagaagtaaaaattgccttgctgagaaaattaactttatgtgagagtgctatttctttggcagcaccgaaaatttatttataacaagcctcatagggctctatgtcattttttttccaaatttattagaaggcccgaagaagtatatttatgttggcacaggcccaccccaacccctacacaatcaccaaatcacccacttcatagtcttgaagagtccaaattaaaagactactggaaattatatctctgcatttaaccttaaataatactggccaaggggggaagaacagattactgaaattctgagtaagcatctaaattcaacactagatgtctctatcctgatattttgaattatatgtaaaaccttttttttctgttttatattcttcctaaaaaaaaatagtaataaatgccagatatttcaccctagattatcattagccagatgacttttttttggaacgcttctccttgccattcgtctagtctctgagaacataaagtctgaatcactgcaaccatgtaatgttttggagcaagggttctcaatcttggttacacattaaaataacttggcaaacttttaggaaatactgtgcctgattctcccccaaagatcggatttaaatggtagatggtagagtctggacagaaatatttgtttaaagttctgtaaaccaaaattaaatttctaagacccctctcccacccccaactatctgaatgtgatacggctccgttgtctggagaaacatccagggtcctttgtctctcaccaagaaaattagtgacatggacacacatggagtggtttcaagaagtggaaagtttaataggcaagaaagaagaaaactgctcccctgtacagagggaggggggctccgaacggaaaaaccccacgtgcagcggaaagcagtcagttatattgggaggctggaggaggcagtgtctgatttgcatagggcccaggggattggtttgaccaggtgtgtcattcaggtagcccgtgaaaaaactggccctgccaccctagcctttcatatgcaaatgcggtttgccatgatgtcctgcacacgtggctttatctggaggttgccatgacacctggcacacatggtgacaagataaagagggcaggagacaccatgttgaatgtacctggcttctagccgccagcatttgcatatcagtgtttgctagtctggttttttaagtcgctttctgttagaaaaaaaatgcttttggggttgcttttcattaaaggaaaattccactgagaactttcaccctttctggctgcctaaaaattatttctaaataactcccatactatttccaccatctggggaagtaaatctaactgctgttagggggtgttggatgacaattctttctggctacttcctgctgaaaaaggggcatcctgtgagggacagcagttgggcctcctcctgaggttgatgtaagggttctcagaagaatggcgtgtccatgtgaggttctgtctgcaacaccatttggagtttgattgcttctagatgaaaagagatgcattttataagaa

SEQ ID NO: 66128 - DNA, 1142 bp, Homo sapiens
cagactgggcaacaactgagcgaaactccatctcaaaaaaaaaaaaaaaaagaaaaaaaacaaaaacaaaaacacaaagttctcagcacaggcaggggaagatctgtggctcgtgcagcattcctcatgcagttatagaagcaggtaaccagaaaggcatactggagagaagcaaagacttcttggtaaaactgaggaacttagattcaattcctaaagtaaatgttgatatttccagatgtcaagactaagaactgtctgcagatacaaatccataatctctcatctgaaacccttggagcagttgtgtttcagaattcagaattttcagcatttcagaaaggatactgtgaaacccaactaatgtggaacacccgtagcaggatgtgtagcaacgtctcatataaaacaaattaaaacttcctccacgaattattagtaatatcccatatgaaggggtaaggagcgtgactagcctctctctggctcgagcgtagttttgcagtcaaatcagatcaggagagggcagtttcgccaccaaatgggtttcattttcagagttcttggactttggaattatggataatagactgttagttgctatagtaaagagatctaacacaagaaaatgatacattagtgtagccgagggtaggaaacaagaatgtgggaaacaggaaaatataagcagactctgaaagaggacaacagaccacacaggcaaactaaccattttcttaaccacagtggctgaaggtcttcgtgacatggaactagaggctggtttcagaaacaactgcatttctttaaaattactctgtaacaggaagaaaaacagccctctcccacacatttggggacctgagaatgacagatgcccaccccagctctctttctcttagaaagcttacctgaaaaattgcctaaaaattcaacacaacactaaaactagaaagaacaaactttttattttagagcctttgattggcttaggaatgagcattactaggggctttgttctttaatatatttcaaggcacagtctgaaaaaagcaaagggaacaaaggcaagtgcctccgttgttgaccctttacttaactcttttttttggctggagcaagcatcctgagtattttgcaga

SEQ ID NO: 66129 - DNA, 959 bp, Homo sapiens
actgctactgaccataacctcaagagttcctggagagcttgcaatagacctcctcataataagagtaggcctgactccccaggcacctctaggcatccccacaaattaagttcagacccaattgcacccgaggggatgtcctctcccactccgtcctacctcaggatgactggcagtagaaacaggtattccccgcaggggaggaaccctcacactcaccatgtgatgtggcttcacggctcagacactgcaatagcaaaagccaacactaccctcagtcttaaaacctcccttttcttgacacttccaccttctaaagatgccaagtatatggatgtgactgtgaaatgtgcccagataaattttaaggagatacaatattgactcctgagtgttaaaccaataaattacaacataacagatgtgattcaccctgttcaaaggttactttagaggttatactttctcccaggccataaacaggaataacacataagggcaactgatgcttgattggacacaaaaggagactagctttatcactgctatggacacatcggagacagaataggtgagcagaggatgttgtctatgtgacggtaatagatgggtattggataatgagaagccattcatcagagcccaggaagaagaaacccagagcctgggaagaagaaacactgaatctgagaaactcagtcaccagagagtacttttctgggaagctgtggtttatggaaaagaaggaatgcaggttggaaaagcaaaaagagagcagaggacagctgcttcctaattccacaggtagctcccacctgggctatctctagtgtatggctcttgagacttcatatttatttagattctgctttacagtttacaaagggcttcatatgtctcttatatgctgaggaaagatagtggtgttatattgctgagggaaactgaggcaagatttt

SEQ ID NO: 66130 - DNA, 2699 bp, Homo sapiens
aacaaaagctaatttataatggaactattctcccaaaaaacatggtagcgcaaaaatggtacagcactgattttttttgtggataagtcatattaagctaacaaacatcacagtcgtttgcctgacacaggcttattatgaaacccttcagttcttaccgaccttaacaaaaaaaactttacttggactttgttgtttgcaagatattggctaaaacatgcttgaagctttaccacattattttctcctaataaaaaaatccaaaactggagaaaacgggtagcttcttaacaagacattcattaacaagagaagacatttccatccctataactatagataactccaaatatccaggttaaattaaccacaacttgggcttgcttcctcttccttagggcaaaaagctgcttcaagttttattcttcttataatacttttaattttcttgagaggttaagcaaaataccgtatagctaagaatatattagtaaaacagctacacggtagttcagacagagatgaccctcaacgctacaagaatgtaataacatccacaactactttcaaagtccagtttaacatccaagggaggatgacaggtcttccttactcagaccctgtcggtctaagaggcagcattttcctaccttagctgctttgcaagtgcctaattccttcgctatggccgtggagaacagtctcaatgccgttctcgaagactcacgtttatctttgcaccaattacttaacgacctaggttgtccgaggaagaaaggaagtgcccagagaaactggagcttaggactgcgctgtcttgacaacctcacggtccctcctccagccgcccccggagcaccgcggggccacagccccagacgccacggtaccggctccaggacgtaaacactgcccttctcttccctgcccgcccgcaacttccttctcccgaccacggctttgcgggagcccactggaaaagggaggataccacataccctcggaagtgaggcgggagaagggcttaagcagctccgcgaagctgaggtgattgagacgagtgagccgctcggcttcgtcgctgcacagcgcagcgacacaggggacgaaggagtccgggattagctcctgcactgattgtacacactgggccatcgccgcagcacaggcagcggcggcgcccgccctccggcccaccctgcgaggttatcctgcggctgcagcagctaccgccgccgcccgccggcctggcccggccgggcggggccccgaacgcactggagcctagaaacaagaaggaacagacgccgccgcttcggtttctggggcacaatccactgaccccccccttcccgtcaccgccgcttctcagcgctcgtccccgcgtgctcgcattccaccccgataggtggagacgccgacagtcaccacttagtccttcggacggcaaaaccttggtcactgcccggccggaaccgccatgttgaggccgaaccctgaccaaccggcagtactactcccagctgcccccgcgcgcgtccctcacgtgactgtgttaaaggagacggtaggggcaagggaagagagctgaggagagggaagtgaaaaacgacggaggccggttgggaggctggagccggaagtgttgtgacggaagctccctgggcggggcggggctacaagtgcggtgggcgggggcgggggcgggggcgggggcggggggaggtgcacaactgtaggccgggttctcaagctcgcccttagcagagcagagctgagagccacctactagcggcaggtggagcctcgagacgggtgctgtcgtggtgatggaggcgcacgctcgcttcccacgcagtttggcctttttgacgtccctggctgttgtgggcaaccgatttggttggtcgcgctgcttcctacgctcgccggcggagcagctagtggcacctgctcggagagagggagtggatctctcggaagtgcttggggtttcgctgaagcggacctgaacagaccatgtgtcctttaaatacagccatgcttttagaaacggactgtcactttatgtggactcaaccattgaacagaatgtgtgcttttgtgagtgctgcaattccttcaagtgtaattgcgctactgcatttttgttggtcgcagggaaggggtgtgcctgcaaatgtccgcgtggttcgtcctcagcctcttcctttttacactgtgctaggatgtttacttgcttgtggtggaggtaggggaagccagtatttgtgtactgtgtactgtcctgaaccggctttcattcctaacttttcaaagattgctttaaaggggggggggcgcgggtcaaatattgttttaaagggggggacggggtgaggtcaatggtgtgtgccttgtaagtagaaatgaatgaaaggaattttactaatgtgtcactcaattgtttgagctccttctgttttgcatgccaaaaatataaggcaaggaaaaatgtatcattctatcatgattttatggtgctctaattaaaggtgtcttccccaacgtcaatgtctcaaatttttcgacttcttgacaccctcaggttttcactaaggtaataatttatgacaagtaagatgtgtgcttctcatgtaagttgataaatgggaggtaggaaggcacagtaggacatattgatgacatgccttggctac

SEQ ID NO: 66131 - DNA, 858 bp, Homo sapiens
gaggcaggagaattgcttgaacccgggaggtggaggttgcagtgagccgagattgtgctactgtactccagcctgggcgacagagtgagactccgtctccaaaaaaaaaaaaaaaaaaaaaaaaaatttaaatttaaaaagtcaaatcatagaaatgccattcaataacttcagtcaatcccactggccccattgagtctcatggacacacctatctcaaaaataggctggaaaacataggcgcaaggattctgttgctaaaggaagaggagtagaatgaatgtgggataatagtgatctccaccacactttatcaggaatgaggtacccagcaagaggtatttccctggggtctaggatatcacattacttgtctgtgtctctgaatcatctggcattgggccctgcttgcatcacatgccctttggacaatttatcacgtccagtaaaagtgagaacctatgattacccaggtttggtcatgtgccagccttcaaggccaagaggacagggtctgtcactaaaagagaggaagcttgctggacaaattaataacaaaagcacaagcaattaaggacgtcttttcccagtactgaagatgaaacttgtcaggcctctgagcccaagccaagccatcgcatcccctgtgacttgcacgaatgcatccagatggcttcaagtaactgaagatctacaaaagaagtaaaaatagccttaactgatgacattccaccattgtgatttgtttctgccccaccctaactgatcaatgtattttctaatctcccccacccttaagaaagtactttctaatctcccccacccttaagagggttctttgtaattctccccgccctt

SEQ ID NO: 66132 - DNA, 1104 bp, Homo sapiens
agggagaaattataatgacaggcagagatgttttggaaagtatttttgtggcaagtgcctaaaagtaggagtcagagaaacccaagtccgtgagttggccaagagactgaaaagaccctcaagagaaaagacgggatgggaggaaggcagctggaatcacagccaaggcagcactacaatgtgctggaactccccagcattctgacccaatgacctacttcgtgcaaggctgggagtgctgtagattacagcaaggtgtaacaacagagccctataagtgcaaaacaccctgtgcctatgtgcccttttttgagaactacttgtactttaaccagatgattggattaacagcagcgcttgccctattgcaggaagtgtgactattttctcagagtaaaacaggcactaattttgggacttggccctggctcacataggaagggggcgggagagtctgactcaactgacaatggaagtccagccaggagagcaaagaacaatgtcctcaggtaaggccattagtgtctggcacatctgtggcttggtggtgacttccattcaccaaccagcctgggttttggggacaggctctcaggccccaaggagagagtaggcaaatgcaaggcaaagctctcaagccagaagaagtatggagagtgggcctggcagtaccgtatgaacctgctgtcttgatataatgataaataacatgcttttttgtcctcaacgggctcctacttaggacgataaattatatgtcattttccgcatggaatacttggaagaatcccagaaaaacaactttgcaacaggaaccaaggcaaaagccagctttataaactgggtcaagaaagaatccaggtgggaactatggcccaccttggataggaaaagcaggctatccttgtagttactagaaatctcagagacagtactacccatatcctatgcagaaagcaatgacggtctttgtccttattaacaatggcacccgcgatcctccaaaatgcagggggagatagtcttcctatattggtgtttctgttatcagactcatcattgagaatcactactatttatccctgaagaagagaatgttttgca

SEQ ID NO: 66133 - DNA, 2147 bp, Homo sapiens
aactcctgccctcaagcaggagtttcaagcccgcctcggcctcccaaagtgttggaattacaggcgtgggccaccgcgcctggctgatcatgtttaaagggcggggtggggagcgtacaaacaacagaggaaatcctgagccgcagaggaaactggagatggcagggtttagcactagaatctctgtaggagaggtaagattggaatcctaatctccaggactctttccactacccaggctatctctccattaatggactattgattggatgacagagtagcgatagcaccgtcttaggagacgcccaatcataggtcataggtcatttttgcagcttattgtgatgacaacagtggaggatggtcttccacttcaccttaaaagcggctgttctctgattatcattaagcatggccacgcccgcacttaacttctgacagtggggaaagcagctgtgtgtgatagcttggaaggtttactgctgcctcaagtcctcttctctgcagttgaggtttcaggtttcaatcctcccaataccacaagacagagcacggggcggctgccgcctccgcctccgcgccttaacctaggcggcttgccgaagatctcagccccgcggccgcgcgctcgccctgccctagaccagggttgggcgcagcggcggaggtggcttctgggctgcgcgagctgggagagctgggaggcggcgatcgcagctgggccgggacttccttcctccaccgcacggcaacaaaacaaccctgcggcaggcactgagtgcttcgcagctgtctgggcgagaggcacagcgatgggctccgtgctgagcaccgacagcggcaaatcggcgcccgcctctgccaccgcgcgggccctggagcgcaggagggacccggagttgcccgtcacgtccttcgactgcgccgtgtgccttgaggtgttacaccagcctgtccggacccgctgtggccacgtgtaagttccaggggagctcggtttgcgcccacccctaaggagggcgatgtggggaagctgagggcatggtgtggggaaggagggggacggaagacagcctcttaggaaattgctgcagggagaaacctggacccgtcggatgcaggaccacggggaaaacgcgggtcggaaggtgacacaggatttcgggaggagaaaaaataaacaagcgggtcctgtagcccccttgcgctttcagctcccgaagcccaggtgcggaactccagagaaggggatccaggcacgggtcccgcccagagccagggctcgccaactggggagggtgctcttggctggagaaccagcgctcgcccaggcacggaaaggaaacgagctccagctacaaggcaggggctcccgcaaagcgcagttaccccgctgaacacggtagaacgggctgcgcttccctctgccccagaaacccgggtccgttttgttttgctggagctgtgcacgtgttcccagaatgcccacagaggctcgtcttaagcaaacaaggatctgtgcaaagtgtctttccacccccacccctgctaccctttcccaacacagacacccagcccctcaaagggcaagtcaaactggagcttccgagtgactttccacagttgttagagtttaacaacctgctagggtggggcttggacgttagccgccaagcccctgaatgtactccttcaaaacccagccacaacgtaacaggaggtggcaggctacctgctttacgcacggtctctccaaaccggcggaaattacagagtaaaataactttctcaaaaccgcatagtacttagctaaaactcacagttggtgcaaagccgtggtcgtttctaagaagaatttaaaaacaaagtccctatataaaattggcacatccttaatgtgtgtttgaataactggtggagttggagctgtgaatttgtgctctctgtttactgtgtgtgtgtgtgtgtgtgtgtgtgtgtgtttgagagagagagagagagacgtagtctggctctgtcgcccaggctggagtgcggtggtgctatctcggctcactgcaacctccgcccactgcaacctccgcctcccaggctcaagtgagtctcctgcctcagcctcccgagttgctgggattacaggcgcccac

SEQ ID NO: 66134 - DNA, 2545 bp, Homo sapiens
agtgaataaccttggtgaaaagccacgtccatgcttctacggcatttctcttcaaagctaaaaaaaaaaagaaaaaatcaaaaatcaacccaaaggtgtagtagaagactgcatctgcgaccgtatttaagcatcggtcatgctgttaaaggagaaagtggacatcctctcaaggaaactttaatcctgcccccaaaggattaaaatcccgtaacaaatatttgtttataacacatcttgacaagatcaaaacattctggtagggcaaatagtaaagactaaatcttgaacattgacgaaaacttcctgaaaggcccaatgtatttgacaggagaggtaactggggtcccgggcctagcgaggcggggcggggaggcgcaggtgtcaccgcgggcgcccagctgcttacgtcacaacccgcggaaggcgccgtgcgccggttgctatacaggccgcacttcacaccccgtgcctccccgcctctcctggctcctccgcccagatccccggcgctcccgcgttcggtgacggccgggtaggctgtaggcagcgcaatgccaagacagagctgctggcggcggcgggcgaatctccctgcaccatgagcctcggctccggccccgttaggggccgataagcacagcgcacgccgccctccatttgccccggggcctcggctgcgaagatagcggcggccggacaggaagctcgaggaaagcgctgggccgggtctctacgaacacgtgaaggaaaagcagctccgtccacaacgccgcttcggggctcctaggtgagagtctccccggcggaagcgtggaggggccggggtgccgggaagcggggcggggaggaagccgcggacacgggctgggcactcggggctcggggtcggggtgagtagaggcggaaaagcagtgaaaagggaggccttgggcgaagacgggggctgagggcggggcgcgagcccgcgcctggagcccggtgagggcgtggcctagagcgtgaggccgcgtcctggggcggggtgaggggcgagcggggcgggcccacggcatgctgcgagcccagcctcccgccaagcaccgtcccccatccagccccctgtgggaggagccgtgggaggggtcgcctcttgcccggcgcgtgcggcagtagcgtctctgcgttcggccccgccctacccagggccccgcccccttcctggcgcgcgctgtatcctgatgcgatccccctcccccctccgggttcatgtagggagtcgggccccgggccgccaccgtcacctcggccgctgccgctgtcgccatcgccttgtttccccatcccccgccatggccgaggacctctctgcggccacgtcctacaccgaagatgatttctactgccccgtctgtcaggaggtgctcaaaacgcccgtgcggaccacggcctgtcagcacgtgtgagtagacgccccctccccctcgcggagccgggttgtcgcttaggcccggcctccggcccgggaccccgggctgccgcctggcgggaaccgagcccgccgcggcctgcccgagcgtcgctgccccgcgaggtcccgttccccgcccctcagagtcccggggcggccttttcctcagcctcggggcccgctccccgcgtccagccccctcagcccaagctcccgctctcccgctctcccgctctcccgctctcccgctctccctggctttcgcgcccccggggcagtggccaggccgttccctgcggcgtcttcaggccccggaggcccctgtcgtctccgccaggcccgggaggaattgcagggatcttggagcctttttgtttcttagcaacccgggtgaaggctggggtgtcgagtgtcaaaagcggccggcggtgctcgcgcgggcccgctcgccccgcgacctgccctgctttcaagtttcctctttcagaaccttggtccgtcccctcggtccaagagctcttctgtaacttcccctcaaccctgcttcacagaacaccctcgagagcgttttgtttcgtttccagtccactatgtgttagagggatctagaatgagttttcttctctggtctcttaaaactgacaggattttcgggcattgaaatgagcgttcccctttgttttacctttctgcttacttattacttgattaatacaagggtggagaggagaaaggaagacttctgttatgaggaatgagccgaaattgagatgctacccagggtgggggagaacacaaaggggttgggtgagataacgcatgcgtttgattggcaggcatatttacaagaactttgataaaattttatggacagctagggtgtgagtaagggttggaaagagcccttgttgagaaggtgtatagcccttctgacagacctgactgatgatcagagtccccggggaactttttaagtaaacataccaattcccaggctccatttcaaacttaacaaaagaatgttcgggcaggtggggcctggaaatctttatttatttatttattgtatttttttttagtagagacggggtttca

SEQ ID NO: 66135 - DNA, 703 bp, Homo sapiens
cattactaaaatataaactcccgtttaatccccattcattccctgaaactgcagttgttgaatgctctttgtctggtgcagggactactaagtactgtttctctggagacttaatagtccgctggagagacctataaatgagtgtgattgatatagaagagattttatgtgagcatctagagcaggtatctaaattagcctaaaggatagggataatttcctagatgaagtaatgccttaggtcagcgtttgtattcagtgtttgtggggaatgccagagtcaaggagggtacagaggatgaatgtgagctggactttgaagtttggctggagccaaagacagcgtagtggagatggagcttagcgttattggcaggaacttactgtgtaagctaatttgagtgttttcctgaaaacctattaaataattagataacctaatgaataatactagacctagtaaataatttttggcaggggagcagcgtggtcacatttcatttttagaaagtttaccttcatagcagggttttcagcttggtagtggtgagactagtgaagaggtcggtcattcattgatgtgtcagggagagaaatgattagaacctgaactaaggaaatgatagtaggaatggagcagagagactcctgacattttaaggacagtgtaagatttgatgactgggttcagtagttaagtgtg

SEQ ID NO: 66136 - DNA, 533 bp, Homo sapiens
tcagatctacagaattcattaccttctttgtaggggttctgcaaataaagagggatctttaagccaccatcatccagaatcagctaggtgttccctgtaataccaacctggcatttctaatactgtgataagttcagtttttgttacttagattatcatgttgtatgagtgtcaataattgttttttgctttttgtagcctcttccttgagttttatggactcgtgcagttttgaactggaaaatgtgtgtggcatgatccaaagttcaggagataatgctgactggcaacgggtttcacaggttcccagggggccagagagtgatcactccaacatgggccagtgccaaggtaacaggagtgagatattcctagactgtatactcagtggctacagccacatacttctctatgaaagaatgggattttatctctaatttctatcagaattattaatgattattcattaggttactactgagaagtaggccttgcacctgataaagacattgttaatttctttgcttttcctt

SEQ ID NO: 66137 - DNA, 652 bp, Homo sapiens
ccaatcagcggagtataactacagacccatttatgaccaccggttcgtaactcattttctttattgctaataaacaatcattgctctaggagggactgataattttgggaatgagggattgcacagttagttacctagggaattttgagccccaaatcttaagaacagatatttaggggaaaggtttcaagaattgtggactgagtctgtcagacaggagctcatcacaaatgtcagcaaggactccaacaaatgctgactgtattcctaagaactgatggcccttctcaaatttccacttctgtgcaagaagtgttggttttagagtctgacatgcctgagttcaagtccaaagtttgcttctcattagttatgtaatcttgagcaaataatctcttagggccccagtgtcctcagctgtaaagccagggctgtagtaatcattccacagatttgctatgagaattagtacaggtcaagtgtggaagctgtggaaaggcctgcggtggagaggccctcagatgttgggttcttctaactcatgctaccttgttcacgtcactgggattgtcaaaaataattcagcgtttgaaatgggggtagtttttgaccagaaggaaggtattgagcaggtgcattcaagtgttggtgg

SEQ ID NO: 66138 - DNA, 1026 bp, Homo sapiens
ggaggaaacagaactttcacatgcagtcactaacaggaccaaagagcttaagaaacgtaaaaggacagttaactaaggcatggtcttagcagttttcagatagccttttgggaaaaaaatcaatttcagagcagtggtgggtgctcaactcttacatacaagatgatggatctagggacatctgctgacagggccatgtatttcctgagttaaccttctagaatcaactgtcacatgcctggcaggggcgtgggggagagagtatacctcctgtctcaaagttcatattgtttggaattgtggacaatcaataaggagattttggcatacttaggtggtgtaaggatcgttttgtttccatattgacaatgattaagaaaatacatacactgtaggggagcttgatttaaaatgagattcacctttcttgtgcattttcttccctaaaaagccaaatgcaggacaatgtcagcaacccaaagaaaggagttttgtaaccatgcttccttgaactttgtaactttgccttcactgactgccctctgccctgtattttacatttcttcccacactcccagataacaaaatcattacagccgttaagaaaccttatttataaagaggcttttatacagagttcataaccctgtcacataaccatcagcggatattttcagtcaaacagaaattaaagttttataatgacaaagtacaataaatgaacctctatttgattaattacacaagggcaaatgtgatttacagtcaaaatcctgattcttagatgcgtgagcttcttttttccatttttatacattgatgataaggacctaagacagacctttctcagaaatggtctccaatattccagcctcaggcaagggaggcccaggggaaggagcgggcagccacttactcagtggcaggaggggcaagtggttctgaaaagatgtacttgtttaacatttagggtgctttcatggactcagaaagtatatgccattgaggagtagaataaagatcttt

SEQ ID NO: 66139 - DNA, 1406 bp, Homo sapiens
cattctgacatgtgatatttaaataatcagaaactacattaatactgatagactgaaaatttcaaaataagtgtgaacaaatgtgaacatgaaagagccaatcctctaagatggatcctgagtggctaaccgggtctaaatttaaaatacagccaaccaaccatttgctgattggaggtcacacatgtgctctgagttcctggaaaacccatgcctccattcaacttttggactttcagagctaatgcgaaccaaccaattagaactcaccagcctcagccaatcagggctcagcagcaccaactagtcagaactaatcgtgtttcaatccttcatttgctatatggacctgattgagaacctgagtgggcacttttgctataaaacccgggaccttccctttgttctcaggaattgcatcttcattttacactgaaggctatctctccacagtctgcaaattgttcactggaagagtctttccttcaaattcctatttcagagaacttttgttcatataagttgcaagattttattttttaaatactggcaccatactttactattaataagatataaaaaggtacatgtataacattcataaaagctgccaaatcctgtgtgtcagaccataaatgtttcagaaatacaaatgacagaaggattttggctatattgtaccatatgccataatgattgaacatgtttgtattttttaaaaaggaaaatgaattaaactatacaagctattgtgtcaaagtgaaagtacattctgatcacaatcttgggccttatctcaaatccataaatagagtgtgatggagcagagaggtgactggattgtattaggagacctggtttctatgctgggctttgctgctgagtcattttgtggcttcatatgaaccaatgaagtcagctaacatagctgtttctcagttttcatatttgctaaaagaagcaggattaggcaacgtctaagggcctttccagatctaaaatgtaatgattataacaactcaaagtctataaacttcctagtcctgttggataatttatagcattttatcattttactcttggtcatgtttcttagtattgcaaggctctagttttttcacttaatttctctgaaacttatatgatgttttctccaattaaaaagaggcacttctgggtatatatacacaatggaatactattcagctttaaaaaggaggaaaatcgtgttatctgtggcaacatgaatgaacctggagggtattatgctaagcaaaataagccaggcatagaaagacaaataccacatggtctcatttatatatggaaactaaaaacatcaaactcatggatacagagagaatggtggctgtcagaggctggagagtggggagaatgggaagatg

SEQ ID NO: 66140 - DNA, 1252 bp, Homo sapiens
cgaagtggacagatcactgaaggccaggagtttaagaccaacctggccaacatggtgaaacctcgtttctactaaaaatacaaaaatcagcctagagtggtggcacatgcttgtgatcccagctacttgggaggctgaggcagaagaattgcttgaacccaggaggcataggttgcagtgagctgagattgcatcactgcattccagtgagagcgctctgtcacaaaaaaaaaaaaaaaaaaagcaaagcaaagaaaagaaagtgactcgtccttttattgcataccactgaacagtcataccagagtctcttgtaaggtacctgaaatcacattctaagttgctcatgtttgtctttgaatggcagttttgccttcaaacaggagtctaatatcaacaagtaaaagctgtagaagtggacttatattaaaagaataatgtaaataaccagcaaacatgaaggcctacattttctcactgtgttttgcaagataaaatttctatgaacttttatttcgctgttgctttttttttttttttttaaagaatgtaacattctcagattagccaacgttaagtactctgggaaaaatgctgagtattactacctcctctgtgattgctgtgtcctggaaatcggaacttgttggagtcaaatcttggagacaatctaaagagttaagagccagtttcctgccaaaagtgaaatcaatttacatgacacatattcccacaatccccacatggaggaactaattttttaagaccatttcacgaataacagagtctttgtgccaccaaataaaaacatttggagattgttgaaacatctgttctgagatgttactgtcaaactctgttcttgaaagggaggaagctgcattgtctttcaggagctttgatgatttcataaaatgtctccattgtaagagctgttccatctgcaggcccctgaaagttccaggaacaaattcaacaccaatgacatgctcgctgattatggtttaaataaatttatggtaatatttaaaaagcaaagatggaagctatatttcatgatgtatttctaaaactgtatttcataactgacattatgaaataaccgtcatctagaaaatatccattttgtgtgtgcccctcaagatagccacagtgagttatttcagaatggataacacatcagctaagatgctccaaatccttccttcatctaagtttcgatcatctgtatggggctgaagggactaaactt

SEQ ID NO: 66141 - DNA, 2611 bp, Homo sapiens
tgtaaaattatagtcagactatatgattttcaaggatcatttcagaaataaaattctgcacagtattgaattacatgggataactagatcaaatgcagcagatataaaatagaacaggttttattttaaacctttgttctacaaaaatccataaaattgggcttcaacacattttaaatgttagaaggactgaactcttcatggccctctgaacttctgtataaatgagatgtccattaaatttaccaggacaaggtatacacaaagttcaactactcccttcaatcatagccatctctctaaataagtttcaaaaaccgtctggattttctaatatttatggcttacaggctcaaatcatttattaaataattagatacaatgatgtatatcatagtggtttccaatcagctagccaagaatcaagaaataatacaaggtatcagaattcatctgataagttccatctcctacacagaggtattacttcccccaaaataggtagatgtcattgttatttgtgaaaaggaaatttaaaaaatcaatgaaacatcataaattataaatatagatataaaataaatacttgctaaatgagagaatactattaataaaattccaatttgttaaactagcaaatctgactggtttcaccaactgataaacttttggtcattctgtatttaatcgacaaatacaaaatgtatcgtgtgggcttgtaaactgtcaagctgttaaaaatggatccctgattctgaaaaggtagcacatgaagggcaagtactgaaaacaaggcatgctttttaaatccaatcctgaaacttcagtgagctctaaaaggacatttgctcgagtccagggaatgtggaacacagcatgagaaatgtgaacattcttggtaaactgacatcatcatgacaactctggcagggctccaagtgtctgaagcagaacgaagtcttgtttatgaagtgggagaaagaaacttgggctttctgatttacaccttggcaggaagcagaaatggttaaaagaaaaggaacactttttatatacagtaactggcaattttcagtgaagaaatgggaagaagagaaaagaaagctatttgaaaagttgaaaactgcccccctttttttccagaatgagtcattcagaggctctctcctctctaaatatatatacacatggagacatgtttttaaaagtctatttatgaaagtaatataaccactttatagtttggaaaataagaaataaatcacctctaacagttcaaccttaatacaactactattacaatgcactgattagattttttgttggtttcttaaaattatttaatgtatccaactgaaggatttttggctaatattagtatactcttgcctcaatttctttaaaaatagagtcagggtctctcaacacattaaatagagatccaaaggcatttaagttaggtagaaggaaggataaacatttctactcaaacttatgatatttctgactatatatgtgatctgatattgcttcagactaaaaacaagaccccttctctctaggatatttgaaaacagcatttcaatgcaattttaaaaacagctgtacatgccaagtaaactcttgaaggttacgaatcactttaaaattcttaaagtgtgtccattatttagcaaacaataaattgttttcatttctactgtagaaacaaacaaccaagtgatggccttctggtttcaaagtatacatgaaacccaactggtcaagcttttacatttctggtccaccattaagttttatggcatatcaggaatgtaaagcatgatgtttaaacaaaatttcaatttattagacaaattcctacttttgataaatacagtatgtttttaaatggtatgcccatttttaattaggaagagtacaaatactggcaaaatgttatgtagaaaaagttgacttgaatttttctaggaacttactatttcttagtcctttggttgaacttctggtccttctgattcctcaatttctaattttgtatggtgtactggtgtatttcctaacatcaactctaaaaagtctaaagtagccaatgatgctattttgatggaattaggaagtaattttcattcaattgcgttaaaactagaaatgaacacccaggcaccagatgaaacacatctgagtgccttagtcacatatccttttaaatcataattatatgttcactttcttggctctccaatggttttaaaaggttatctttagatttattactcattaatctgactcaaatttatcagcagagaaggcctatgtaaaactattgatgcaagcaggagaaaaataattacagttcttggccctaacttaattcagatataaacaatatattaataaaggttcagacattttccatgaaaagctttaaagtgcacattcaagggcctgtgtgaactgaatgggtttcacacagttcagctaagttcctgaggacacacttcatgtagttaagtttaaccaagagaagtatgtggataattacttctaggatgatgctacacacacagtgtcctgataacctggttaataaatattctaaaaaatatac

SEQ ID NO: 66142 - DNA, 551 bp, Homo sapiens
catttccctcagtacataattaattagaattaaaaataaccttttcccacaccaaatgtcttccttaaaaggacacagaattaacccatagaagccaccgtaacaactttctacggtatcatgcaatacatgacttccaaattccctcgtgagggaatgtcggtttacgtcaatcctggtggccttatcaatatgtgagtggtgaaaacagcaggccactaggaggtcagggtcaaaggaagtagtagcaacctcactcaggctagaatccaaacaatgtatctattagaagcaggcctggctacataatttgcagggttctgtgcaaaacgaaaacgtgggttctctcttgtgcctaaattattaagaatttcaaaacggcgacagcagagtattaaaccaagtgctgggtcctgttcactgcacgggatgctcacctgtgaacccacacctcactggaagaacccgtcagccatcctcagctgtgcagtttacaactctcatactgtgatatttgtgtgccatttcaaaactgtatgtggtaggttttg

SEQ ID NO: 66143 - DNA, 2737 bp, Homo sapiens
aaatgaggcaattccatggctaggggaggatttatagaagtgcaggtgcatttccagaacacctttaaatattgtttaaagttcttagtaaatcataaaagatcctccagatctgattcctgtttatcagttcagttccatctctccattttctttcttcaaactgttagcaccagtagtttcaaatgagtaattttatttcattgaaatatactgctacctctccctgcctgccacacttgtctcctcccctcactccaccctgcccacctaacacaccctaggacccagcagaacatcaccttttagttcccccaactctacctagtaccagctaggaacccctttctaaacagtcccatagcacctagtgcttccctctataatactacttattaccttacattgtaacagtaaacacttaacagtaaacctcataagcctgcctcctttcaggcaggcttatgatttccttgtgacccaaagactagtccagggcttcgcatagaagagtcctcaacaaatatctgctgcaggaatgaattcataaataaaattagggcaagggctaccccaggagaaagcaagaaagagactttaaagtatactaaattttacatatttttataggaaagggaacctgtatataatagagaaactttgttattcatggagttccatccattcaaaaacctaaaatggccggtagactagaaaactgcaacaatgcacttttaattattttcctcatctactttcacaagacagtctaatgatcacatcataatatatcaactctggttaaaatcattaacttaaatggtacagtcagtgggcagttatgcaataaagagtgatttaaattatgttttgtttccggctagctgggaggtctacataccaaaactgggttggcagctcttagttgttgagaaagtcctgcaaatattctggaaaaaccagtgggtggaatttgggtcctcagtaatacagcttttattgtcaacaggtgaaatgtaagcttgaaaaaccaagtatcatgatattagggtcacacacttaacagtgaacaccctgtcaaaaagtactctgaataatctctcctaagctctttcctaatcccacagccctctagcagtgctcatgtctttaatatttaaccttatacttcagatcttcaaatttattcatgtcaaacaacaaaaccacacaacataaaaacaggacactgtactctcttttaaaatatatctatataaatcctttcattttctgcaaagcccaagaaaatagtctctatttataaaactgatcaagtactattttcaaacagtattttaaaagaaataccacttacctaatagcaatagtgcttaaggtttacatgggatactgatttctgactggttgaaggacactggttggcaggtatatatatgcatgtagtaacagctaatataggtaacagcctgcttttcctcctcacagaggcaataaacttgtctaagactaagattatatactgagtctaagactcagacaaagcctcttcttctcctaagatatttagttttatagatttatatagcatctaggaaaaatccaaactccattgatttatagaagatatgctcctttgagaaatttctcatacttcattcacccagttttgaggttacctcccttacaaaacaaatacgagaagagcaatctctcaggtcttcactgccaaagtccaaattttattttttattttgttttattgattgggcatttccaaactggccactcgcttaggttttagggatacaaggatggcagacacggttcagtcccaattctaagcaagccagggagacacatacgaaccatgatgaccatacaaagcaacagggagataaggaggagaagccaagcaccttcacaggagggatggctgtctgcctacgggagccaggtgagatttcacataggaggtggctttgagtctggagcttgagggatgggcagggagaagggcgttcctgagacaaggcagagtcaaagaagaccatgaaatgtttgagacgttcactcctaaactaagatcctcaggcaaatacatctattcacttttctctaaacatctccagtacattcctatccgtgcttacccccctttcttttatctccccctccctttaacatgcttaaatccaggatgcctttttaggcccagctcaagccaggccttgatctcccaagaagccctggcagctttcgttccctcctcccctccaaaactcactcctacagttctcatggtattcctcaatagattcaggcacttttgacttatgctggaacttgtctctaagcttaggtctctctgtccttgagtgtagggccatgtcctgctagcctctcccttgtaacatcagtgcctgggaaatttcctatgttttaatgaatgtctgctgctaatgaggagccattgatcagcactgagtcatattatttcacaactttattgcacttccatgtacctctggatctttgcatcatttgcaaagtgtcacagctctcaagctactttcctggaatatcaggccaaaattctgcctagtagaattaaaagagagggttcaagatttcttcagttggtaaaaacactagtctcctttttctactctgaatcactgctcaactgccttatttataacctctagatggcaggaagtctatcttttatatatta

SEQ ID NO: 66144 - DNA, 3285 bp, Homo sapiens
cagcatgaccaaaggaaggacgtggaggtgacatggcatgtgcagggaactacactgaacactgcagagagccactggcaggacccaggccagggagcacctacttggtcatactggggagcttggcctttctcttgttggtctggagatccacaaaagaatttatgccaaaagttagaggtggatagattttaaatactgtgtttttaaataccgaggatttaaatactctgatggtttatctaattttaggggaacaaaactggaggcagttaaaaggcccctataagtgaaaaatgaaaagagtttgtattagggcagcagaagtatgttgttgtcttcttaagtcacatttgatatgcagagaagatagaatcagtgggatttttaatcacaggatgtgggggatgaagtcgtgggagggctcccagatttctggcttgggtagggataccaccaaacaggatacaggaagaagagtgggattaagggtgggtagtaagtctggctatagagagtggagctggacactcctacagacatatcccaggagggaaaggagtgggcccaggatggtactctggatgataccaagtaccacaaggagggtggcaccgagggcaggagagctcagaggaaaactaggtgcatgtggtgatgtcttggtagccctgaggtccagaatgccaaggaaaatggcacaagtgataatcttaaatgcagtagaaaggcccagctaggtcagggctgggaaatgccactagatatagaaagcaggatgcattgaggaccttagttaaagctatttcagtaaagttatgagaaagagagtcagaccacaatgagttatgaagtaaatgagaggttatgaagtaaatgagaggtaagaggtaaggaatggagacatttcattgagtagctgttaaatgtagaaacagggttaaaggtggatcggattgctttgctttttaaattaattgaaatttcactacctacagataaccaacactgacattttggtgatgatcttttcatatattcttctgtgtgtatgtgtacacacacaaagcagacagaaaatatttactgtcaacaagattattatgtactaagaaggcaaattaaatatttaccccaagccaccctttaagttatcagaattgtaaacatacacctaaaaggaagtgtagtttctcttctaaatcaaaacccaatgcttctatgtgacgcacactaatctgcttcttactactgagaaacaacacagcacagtcagcctaggaaacagacacacccaatcctattgatttttagatgttaaaaattacccacttgaaatgtttccaggggtttaaacacaatcttatgagtagagccctaggagctatgcctctgaaaacaaacaaccttttagcaagggggtactgacaatatacacccaaagagtgacacccagtgagtcatcagaaagggacaagtcccaccctgtggagcttccacacctgccttctgcttcatgaccatggaaaagagcaacacacaaagctctctagtgtggtgttgcaatgtcaacaaaactgggaatactggctaaactggcctagttagctgaatggccactggatttggcttgggtttgccctaccaggaaatggggcaagaggtcagaattgtaatacagagaaggtggcccacaaatacttccggaaaacagaacaggacatggggtggttcctgtagaaaactgggggttgtgtagattttttagtagaggagcagagcagctcccaggcagcttcatctcgattacagctctctcccgcctcacccacattcctactctcactgcttaagctaattctcttccatagaagttatcctggcagacatcagaggaacatgtttgacaatgcttttctgtattaatcactctccctagtctgtaaacaatagaagatttacaagtattcatgttgtatctctttatatagtagataaatatctaattttttatttttaaatggagaatgaaaaactaaatagtcaaacagtctagctaaaggggacacataaaattgttgtatcaacttggaagagaatcctacttcttgtttataatgtcaaaactcaactctttctgaatatattttaataaaaggaaataatacctacttagtaaaaactaagtcccatttgggaggagggatttctttctaccactaccctaagctgatgaatgtctgtatcccctacaaaattcagatgttgaaccctaatgcccaacatgaaggtatttgggggtagggccttagggaggtgattagggcatgcgagtggagctgctctgatcagagagacccagacctacattttctcttccttcacattttcctaagaagactctgacaagaaatagtgaaacaaattttccaggtcttcatggatactttcccaagcaaaaccacctgaaaataaggcatctggaagaatacaatgccaaaggcgacagctgacacatgctccgctccagccgcccacaagcatttctataaggatatctctaaggttggtcactaggtgccatcctggtttcttttcaaccgccagagagatatgaacctggtaattttccatcacctgctttagagtggaccagatctactgccaatggtgtcaatgtaccagaagtctcagaattattttataaatcagtctttaaggtcttataaaacaatagatgagaattcctggcaaaatgaacacactggtatccacctaagtaaaccatgccaacatagtgttcattaatgatgacaatgttcttacagatttcactttgccaatacactccctgggagctttgaatgcttaaaatctgatgtgtgattcagcagctttcataaactgagacatgacttggttgagttctcggatgtgaaatgtttcagcttccaccaaagaccatgaacccagcattcacacaacatatctcctatcagatatttcacacatggtcttcaaaggcatgaggaacattcaagtagatattagaaaagtgacactctgctaaaggcaaaatgaggtcacacagtcataaattccttttctgggcagctagccagctttctacattgcgttcagtcattacatctcactccacttcttgccctggacaataattagagtgcttcctttaatttgcaggttggttttctagatatacgtttatatgttcttggatgaacaactgaactccccaccttctctgcaagttttgctctcctt

SEQ ID NO: 66145 - DNA, 2033 bp, Homo sapiens
gcctcccaagtagttgggactacaggcgcatgccaccacacctggctaattttttgtatttttagtagatatggggtttcaccatgttagccaggctggtcttgatcccctgacctcgtgatccacccaccttggcctcccaaaatgctgggattacaggcgtgagccaccgggcctggccagaagattatttcttaatggttcctgcaagaggtcaaatgcatcaaatgattttccttctaccacctcacaaaagactattcacttactggatgaggaaagcaggctttgggatctcagccaagatcccaaagatcacttactatataactgtgtgtgtgtgtgtgtgtgtgtgtgtgtgtgtgtgtgtgtgtgtgcgcgcgggcgctttggaggagggcagggttgaggtgaagtgaagtgataaatgccaggaattctgtagttcagtttaaatctcttcattctttaagttctatagttgtctgttctttcaatctacatattgggtttttgatcaaataaaagaactgcttggcagggcatggtggctcacgcctataatcttagcactttgagcggccaaggcgggtggatcacttgaagtcaggagttcgagaccagccaggccaacctggtgaaatcccatctccattaaaaatacaaaaattaaccaagcatggtggcaggtgcctgtaatcccagctacttgggaggctgaggcacgagaatctcttgaacctgggagggggaggttgcagtgaactgagatcacaccactgcattccagcctgggcaacagagtcagactgtctccgaaaaaaaaaaaaaaaacaaaaagcaactgctctttcccaagcccatttacaccttgggaaaacatagaagacctttctgcatgatgctccaatgggagggaggcggaacaaaaagccctggcacttgtgagcttttcctgctatagaagagctctggttaaaaatactacctaataatactggctgacaagagggttaaaggtaaaggaaagatgaaaaaacaaatgctttctcatatccaagagtgtgccatccttctcttcctgactcatacagcctgcctctgagtctcctcagcagactcagggaacaacagaatgtactatttgctatttccactttacttatgcaatttgctagtcacgaaaggccattcccatctgctgccaaagggttatctctaaaacacaaatattgtatcatgggagtgagctcactgcttacgggagacagatcaaattcaaaaggttcctaatcactctgccacctggcctcctgaggcaggctgtacgttgagtgcttagctctccaactgggcggctctgggtttgaatctcaacttcaccacctgtagatggtaggaccttggctaaggtcccaaagcctgctttcctcatccagaaaaggacagtttctatattaaatgagataacagcagtgtataaaagccctggcccagatactgcatgagaggtgctcccagagtacttactattatgtgtcttaactgccacactgcctcgtcaccagttgtcccctcttcactcactgctcagcatctagtagatcttcaattattcagttaatatctgaatagatccacggacctgcagcaacaatatttcaatggagtctctccttcctagacttggactttctatgacgttgcccaaacttaaaaatgctgggaaggggccaggcacgatggctcatgcctgtaatcccagcactttgggaggccggggggggtggggggcggggtggatcatgaggtcaggagttcaagaccagcctgaccaatgtggtgaaatcccatctctactaaaatacaaaaattagctgggcgtggtggtgtgcgcctgtagtcccagctactcaggaggctgaggcaaggaaaatcgcttgaacccaggagacagaggttgcagtgagccaagatcacaccactgtactccagcctgggtgacagaacgagacttggtctttaaaaaaaaa

SEQ ID NO: 66146 - DNA, 2198 bp, Homo sapiens
atttcagttgggttaaaattatttattgagtccttaaactattcaaggctgtgttagatgctgtatgagataggactgtcctcaaggagcctttagtggtgggaagagtgacagcaagacaaacagtcatgggtgcaaattgttacagggattctgaaggggaaggatctacctggtgagaaagattaggaaaagcttcttgaagaaggtggtaaaaatgaggccggatttcactattcttcttcttgaggaaggtggtggtggttggggcaggatttctctattgggtggtggctatgaggtgtgagccctccaagcagtagacacaggcgggaacaaggcagggcaaagcctacctgagcaacaaccaacaacctggtgtggcgagtgcctgctgggttgtctgctggaggatgatgcttgtagtcaaaggaacaccagacctcaaaaaggcccagcgttagaccagagtttatactcacgtgggaaacatctctgaaaactcctggctagctggtaaaataacagagctgtacttgaaaaaaataataatctgacagtaacatagatgactgattggaggaggaaagggaggcaccttgctctttagagcaagggagacacagtcactgtaggctggaaaggaggagcagttttgataggaattgtgtggaaagaggatcaacaagactcgctgcataattactctgtgggtcaggaggaaaggaccctaggtggacagagaactgggactcccacacgaggggaccagttttattaaaggaaaagagttgggactataaaatgttatgaaggtctataagaaaaaatgtaattgccactgagaaacgtatggaatgtagaaggcatgaatggaaaaacggaatctttctcatgtctatgtgtctactgcatttggtttacctacaatgatttttaacatctaaaaaataaaagctctgtgtttattttgcttgtctcacactcacgcattggcttgactcactattagggacaaaccctacggtgttctgtaaaccagttctaacatgttggaggccctgtgtaatgtatacctcaccaaaaatcaacacagacacgtctgaatcatctaccctcttgctccagatatcagaaaagttcacatggtacacatagttttgttgttttcctgttgcagtacactcaacaactacagaaatgggtcagggttaacagaaagccagcacaagacttccctggatagtgactcacaaaggcaagtgattccaagcctaagaaatggagcagagtgacttcaattcaggaagttttgctagcactgcaatcagttttggaacccatgaagtctgttttccacaaatagaaaaagctcaaagaaattcctaaaaaagaaccttttaaaaggtcacactacttcttagaggtacaaatccaatatggaaatcaaattatgaagtgagacaagcactttcccacccatgctataaacactccattaacagtgtggtcacaggcagcttgtttaaactttccacctgatgttaatcatattatctcataggttaaattatatttgaactggcgttagccctttcaagtaaccaactttccactgagtacctaaatgtaagtataaagaaatggaaaacagtagcctaggagttttgaaccccatccctgttttgtgctacaatttttgtgggtttttttttaatactatactttctgtttgtagattcagtaaataatttgcaaggattctgagtaaacaggctgaaatgtgaaaatagcaatcaaaggactctaaaatttttagagctttactagcatttatagagcaatctagaaaagccacatagtatgacaccaaataattctgcaatgtatttgctcatattctccctttccatatctctcataaagctcttattttaagaaaataatttttttaaaagttcctttatttccaagttttacatacacctatccaaactttacccccctttaataattaaatcactaccatcaactgggtcagtcgctagaaaccagccacagctgggagcaatcaggtttccataagaagccatgagctggaagcttctaccacatggtgaaaacaacatcatttcttcctgaattcacccttcactgtgttgttgccacaaacatttaacactggaacaaaacgaccc

SEQ ID NO: 66147 - DNA, 761 bp, Homo sapiens
acttaaattgcataggagccctttctttccctttattcatgctattgtgtgttggaagttttttgagacctaataaattttaatccattctattcctaaatttgttttactctcgttgtcccaacttcccatggtagtttctgggagctccaacttttgagagccatatacatttgcactgcaaatcaataaaagagatatcaaatgaactaagatagggacttttcactggggaagttatattgcaaagaaaacacctacgtcattaagtggctcagtagctaccatttactgagcagcaattcttttccaggaaacatattaagtgtttaacagtcaacaggtatgtaaattattcttcccaaatttatagataagaaaaacttaagttcaaagaggtgaagtaaccagccccaaatcattctgttaataaatgacagagctggagagagaaccaggaatgtctgcctccctgagtttgacatggaaattgagagttcaatcttgaaatgattgcaatggtgatgtttgagggagctgaggtctggtgcagtatcaccactatcagaagcatcgacagaaaagctgatggcagcaacatgcttatcacccacaaatgctcattaaaatttttcctccaagggactgtatcattatattctgtcacatcataaaaatcaaaatcagacacgtgaagataagtgatactctgggtttaaattaagcatctaaccttggagagaaaaactggcattaagctc

SEQ ID NO: 66148 - DNA, 2864 bp, Homo sapiens
accaacaatcaaacgaggatagcaagcaagccaagattgttttccagccttcacgaactttcctgcatctatttttcacatcagatatacaaatgtctaatcaaaccccacagataagaaacagaataaaaactcctttgtgtatgtatacatctcacgttacccactcttctaccccaggaaacaaggagtaaccctagtgcctgtgactcgaaatgacatctttctgcttagtgttcttctgacctggcctgtgtagtcacagctctgcctgcctgccagcctgggcccgtgtacttccacagctgccccacagcagggcaggcttctttctgcaaacagtctaaaatcgcatgacgccaaagcccactgaagttatgatgaaaacaagagaagaccaaacacacctaaattgccaccttacgtgtcatcactctccaactgaaaggtgtctacttgcttgacagtatgcgcaactatgtgtttgcagctgtcacaccgcagaataaacagttggaggaaggagttgggtgggtttctggtggtcagtttcaggaaatacacccttcttagttctgagctcaggttccgaatcaatacgttttggagacttatttttttttccagactggaaatgcgctaaacctaatagttaaccttaagcatgccatcacttctgctgaaaacattttctacacacagccccaaattactttcagttgggttaaacaaaacagacaagctgtaatacaaggtctctgagaaatgtgatccttttcaatggtcacccaggagcttttcctttaaatctgtttggcgggggatgggggagatagggaggagagcacccaaattaagatgccacccggagcacaatgatattctcaagaaagttgcctaagataactcttcagggtttccctggttgagtaattcttgcaggagggtggggagggatatctggcgtccaagattacgatctgcagaggtctccctatgttgactttttttttagggcgtcctttttaattatactgcaaggactctgatttccacctccttgtctgctgctggggggagttgagagcaacgcgccagggctgcggcagccgctcgggccaactccggcgctcaggggcgggcagcccactccccgcgggtcccaccctctccagcacacgcgcgcacacccgcgtggagacggctgtcctcgcccgtctgccccgcgccccagctgggactcaccgttgtccaggcgcgcgatctggggcagccggtaagtgctgaccaggaggtcgagcggcacggccaccgagctccacttcacatccttgaggctgcagcccagcgagggcgccgggtccatcttccccgaagcctcctgtcccgcgctcccccgccgccgccaccggcaccacccgcgcctcggcggccgccgctgctcgcgctcgcggtctggggcgcgcgggaggcgccgggcagctccggccgcgggcagccgggggggcgcggcgactggggcggcccggagggagggggccggcgcccggctcagctgccgctgcggggcatggctggggcgccccgcgtgccctcacgcccggagaagactcagagcagccgcgcggctgcgggcggcggcggcggcccgggtggctgcggcggctcccgctccgcctcctcctctggccctgggtctgcagctgcggcggccgcccgctcgcctcctcctcctcttacccctccttccctccgcctcgagcgtgtgaggaggagccgcgggtctgagaaacgccatagcagcgctcccagcactgactaatcaacaaggtgcgagcaacgcctgcgcagctctgggagacaccgcctccgcctcccaggcgccgcccgctccgcccccagctcggcctccgcctcccgcagctcccgcggcccggcaggctcgcgtcagctccccggccggggccgccagcgcccgcggctcggcgcgctccgcaagctttagctctcgctcccccgtccgaccactcgggcgccctgcagtctcgccgggtgctgctgcgcgccccggctccttccccgcccaggcccgtccccggagcccgggaattgccgagcgagctcaggtatcgctccctgagtcgtggtgtcgggcaccgtccgcctccactcccatcctggcaatgcggtggctaaatacaaggcacaaaagatacctttagtggcgctccctcttgcttcccggtgacccagactttggtcagaagagtaccacagcccaacggggctgcggacggcaggcgtggagcacgccttggcgtttcccctcaaccctactcctctaccatcggagctggaaatgactcccaacagtctcagctttggctactagataagataaaaagggcaaagcaccgaaaagcggaaaggtggtgggtgatgagtacccacatacaggaaggtggccattcggtctaggaccttcactgagtgaacgagctgctggaggcgacgggagttgatgaggccaccaaacaccgtagacacggagatgggaagggaaaactaggttactgggaggctgctggggtcagctgttctcacccgcttttcccattcagttctcttctcatcttaaaggttgggatcattctcgttttctaggtatatgtaccaagacattaggtagtttggcaagattttataactcgtagatggccgtgctgggattcaaacctacagtttgctttgcatgatcaatcattctctgtctctcccgatgtttgacacggcctgctcactgtggacagagctcagaatataaaggtggcatgtcctgccttgtatgctaatctgctttcttt

SEQ ID NO: 66149 - DNA, 604 bp, Homo sapiens
ggatccacggtgacggctctttggtcctgcattgtttgagatgctgtaggtggttcaacattgtgttaagttgcacgtacattattagttctgtatccgaagacactggctctgtaccctttcaacaaggctctgggagttcccccagccaagcagagacagggttaaggcagtccaacagaggagagtagtgcggtgtgtgtgtgagtgagtgtgcacgcgtgagcgcacaggacagaggcgtcgaggtgcggggcggactcctacacaagttccaaaggccaccgtgtccgcggctttcggcctgagcgggacagcgggaagcgggtggaacggcctgcacggagtgggcagcgccccaggaatttgggggctgagttggagggagaggggtctcgcgagggtttcagggcgtggctggagtagggggcgcgcggcgagtgtgcacgggtgtgcgcgcgcgagagggcgagtgtgagcgcggcgagtgtgagcgcggtgagtgtgcggccgcgtcgccattccccgtgacgtcagagtgtattgttgtgagcggggccgagcggagcatccccggagctgtcaccgcagcggccgcggcggt

SEQ ID NO: 66150 - DNA, 881 bp, Homo sapiens
acccactccaccccaccccctcgctccatccctcccacccgccgccgccgccgccgccgccgccgccgccgccgccgccaccgcccgcgcgcctccccccgcggagcgagtgcgggtcaccgggtcactgggtcattgtctccgcgcccgaaccccgagcaccccgtggaatcccccacgtcatcatcagaaccatcaatgagatgcaaacatgaaagacaagaggaagaagaaggaccgcacctgggccgaggctgcccgcctggtacgtaccgccccccacacgccgcccgcgcctcccgccggccccgccgctcgccccgcgccggtccgcggcggcggagacggccacttccagcccgagccgccgcccgctcgccgggctcctgctctttgttattctgcgggagtgggctcgcccgggggcccctgtgtgtgtgcgtgcgcgcgcggaggggcgcagcgattatctccgggagccccgcgtccgggaccgcccgggacacttctccccgtacttcgctctcggggctctgctgtgccttctccacgggtgaatttccgagcgctcggcgcagctcgacttccctctctgccgctccggagacctttgtgtggcaattaccactccctcccggcccctccaccccccggaatttcatcaataactctgtgcacagtctgtgtgtatgttcggcgtttgtgagttcaaacattttacacgtgcatgcatggtgtgtgtccgacacggacttgtggggcgtgtgcatgtgggctaggtggttgcgtgtctgtgtgccatgtcgtgtgcattatgtgtgcacactgatacgtgcatgttttgtgtggctccagttcgtttgtgtttgtaggtattgtgc

SEQ ID NO: 66151 - DNA, 909 bp, Homo sapiens
gagcaattaatttttttaaaagagaagaaattgcttctgactattcatattaataggtttcaaataagaaaacaaagagttacacatgcaagctgcaagtttggattgaagtcagggaacttataaatgtgtcatgcagtacttttgagaaataaaagctccccactctgctggtgatcacagaaggaaaatattttgatcattgcagaaaatgaaaaagcatacaagagtcatccagctgataacaccaagatatatatagtgccagagattagcttcacctgtatcagtatttttccaagaaatgctcgcctgtttaagtgaatcctaccactctcttaattccacactggtgactgaggacataagcgatgactgtcactccatagagaagcctcgtctgtagcaccaagtggtccacgctgcattgtcatcctgccccagctgtgagagcatgacgttgggtgattcacattcctgctccgtgtctgactcatcatcttgcccacaggccaaacccatcttttatcacctcttgcttgcaaatatttatcttaaagccatctggcaacctaatgttttaagtatcttgataagtatttatttgaagatattgtgaaactaagaaattttaagtttagatttagtgagaaattgcattttcctattttcaaaaagagatattttaacttccctttctacttaagtaaaacatgtcatctcactgaatataaaaagacctcactccttgacctttaatacttgtcaagggattctaaagatgaaggcactttcagtgccaaaattcatccaacgttcaaaagcaaaaatttttttcatcaccatctctatgctaggccctgaattacagggaatacatggtttttctcatgacttgatttttcaaga

SEQ ID NO: 66152 - DNA, 1664 bp, Homo sapiens
ggagcgccgcgcagcccgggctcccgcccgtgcctccgcctccacacctccccgcgagcagagggagccggctccggcctcggccagccccagagagggggtccccacagcgcagcggcgggctaaagggctcctccagcgcggccagagcggacgcctaggccgaggagatgccgagagggagcgagggctgctagaacgttgtcacctctcaaaacctgggttaaacctgggtaacctgggttactctctactggtagagacattggcttctcactgcagaccttgatagaaatgtgtaatgattaattttattttgacttaacaacgaattaattttatcttaaattaacaacttgactgagtgtgtttgtatgtttcccgaacagagtagcatttgaatcaataggctgtgtaaagaagatctgcactcaccaatgtaggccagcatcatccaatccactgaaggcctgtatagaacaaaaacttaccctctctttcagagctaggccatttatcttctccccttctcagaaatcagcacacctggttctcaaacatttgacttgacctgggacttacttcagtctctccccatctccctcccccatctcacctttggagttgactgaattacaccactgtttttcctggttctccagcttgcagatggcaaatcatgggatttctccacctctataattcccataataaattataacatgagtcaatttccatagtaaatttctacacacacaaacacgtagatgtatgtcctattggttttgtttttctgagaaatactgcctaataaaaaacgtgtgcgtgtgtgtgtgtttaaataaattgtaaaggccaggctcaagaattaattgaagaacatttcaaaagtttctgctttgtatatataaaaaaattaaaaacactcaacttcccaatttatttacataagccatatctcagtgaccttccattttccatggtagatatgtttccatacctcagatccttacacataaagctttgtgctctttctataacagcaaaatctttctctccaggatattaaagttgttatgaaggtcatgtgacctcacacaatttgcataggccaagactaaatatggccaaatgtcttcattgcaatgagtcagaaagtaaagctttcattagtcatgtcttgtgtaattacagggaacagagaaatgattggcaacataaatatgaggcatgagtgttttgtttttactttttcaatctgaacttattccaataagaaaagttataacaaaagcccaagattcaaatattcatgcgtcagaaagaaaaaccccctttcctgctgctttcctaataatacatatcagcagcaagtgattgcagtttagcctcagcctaatctcaggtggtttctttcataagctgatgctctgagttgacaagaatcagctgccgggatctttcccctttcccctaccaatagtcaaagcaaagaagtgcaagttccttacctggctggataaactgaaggctgttaagtttcactggggagtacgctactggggagggatacattgctctactttaaaaagttggttcattataaaagcccatttcaaatgtgtcacactggttctcacggatgcctgtgtcactaaggaata

SEQ ID NO: 66153 - DNA, 864 bp, Homo sapiens
attttaaaatcttcttttcccactgtctttatccatttgtgttttatttcatttttctgatctaaattcaccttgtttaaaaaaagacagaaaaattgctgttgaacatctcagcattttgctttttatctaagggggttttctacacattaattttaaagagaagcagttatttgccacattggcctttctaatctttcctctacttgcatttgctaattctcagtactcagctatgtaaactgactgagtttattcagtaaatgacctttctacccaagcttcaaattcagtattttgtggagacctaactaatcctttgataaatcacaggataacctaaagtgagaatcagtgtcccagcagttttagaaatttgtaaagcgaaagactcctagcatgcttctgtttccaggcaatttttggcttctgggaaaagatacaaatactgcaggagagagaagagttactttttaacttaagctgaacaaacatactacataatggcataatgatttactgtattatttgtttatgtatatatttacatacatgtatacattttcaaataacaggaagcaatccctaaaaccagaaagaataaagcatgaatttattattcttcagagagcctatgaggtcaaaaatatcacaattgcttagaccattgggttctctggccactgttaaagaaaagagaatcttatgatttgtactcccctaccattcataattcaacttcatttctcctgtttcaacaagctgacaaataaacaaggaaaatagtactatttatagtttacttgtaaataccgtagggggttaattgtttgcctaaattcacatagcttggaagtttctaca

SEQ ID NO: 66154 - DNA, 2632 bp, Homo sapiens
actattagtcaataagccatgaaggcaaaattacaattttaaggaatagaaaatttaaagaatctgtacttagatgtagaacacatgtgtctgacttctcttagtgatttcttatcaaatatttacattgcttcatcaaacatccagaggtttaaaaataaagcacaatcattttcgtgaacctagacagcataatttcttgtatatgaagaaaggcagggtggatggattcccattaatgttaatgcctgtctcctcatttctcacctttgttattaagttgcttagaaagcaaattagtattttattcaaatttattttttaaatggcataaattgtatgtatttatcatgaacaacatgaggttttgaagtacacatacatcatggaatggttaaatctagctaattaacaaaagcattacctcacctagttattttgtagtgagaacattttacttctactcacttagcagttttcaagaagggcattatatgaagtgaaataaaccaggaacaaaaagacagatgctgcatgatctcactcatatgtggaatccaaagaatttgttcacatagtagagagtggaatggtggttgccagaggctggggtgaatagggagtagggaatattgtggagatgttggcaaaagagtgcaagtttacagttagattagaggagtaagttcaagaaatctactgtatggcatagttaatgctgatatattatattcctgaaaaaaaccaattaatattttacaagaaacagaagaaatcatgggagcagaccacagatggacagagtggtgcatgaagaatggcttttaaaggatgtaaacatggagagctgagtatattataaatgtacgaaagatatgtctgatttgaaaaaacacaatgaaaataaacatagtatgacctccttcacaattatggataaactgtgctcataaatatgctttcaggaataaaatgtaaaaaaaaaattcttgtaatattgtcccaaataacacaaaagacataataacctatatcacctgaaataggcaccaacaaaaaaaatcctaaattcagaagactgtacaagctacttttagatccattcagaacacacaagaggattatatttcctaatggatttaaattataagaaataatttgtttccctccgtggccatttagatattggccagaatgttcgtcaatcacacatttaattttgtaatcagttttaattctgaattttagtgagtggaccaagcaacaactcaggaggcaaaacttgcactgtgtggactcacattcaaatgtatctacttccactagttctagcaattgttcgtggatgaaaaaagggtttacagaaaaaacatttttaagtgagttaagagccaaatgacatttaaaaattaacttgtgccttgaaatcacaaaagaagatgttagcataataattgtcatcatgctcaaaggttgaaaagtttatgaagagggaaaaacgaagacacatttagcatgactacactcttggaatgattcaagtagacagacccaagctctttggtggaggtaggcaaatgcaaacaagcttggttcctatttctggaaattccatcagtacccgagcccaggaaagggtaatgtggacaatggctggctcaatgtccatataaagagtgagatttctgacttcctgaaaaagcaggacattctgagatccccaggagaaccccttcctaagtggcagagggctggtgagaccagtgatatttaactggtttgttcagatagctccccagaggatgtgtcaaagttcaaaggaggctgtttaaagaaaacaacccaagccaaccgtaatgagcccatgtcacctggaaagaccctaaacagtttactagcagactcaagaaggaaggtcccaggatacttttcattccttcccttcagtgagtaggcacaccacaaaattcccaagaggctcttaagagtatataaatatccattttactgtacagttagagaacaggcttttaggaagctgctgccagaaaagcctgatcaatgttgaactataaaaccaattacaagtgctggatagttcagggaacacacagggtcactcacctcccttttcagggcctttcttggaggctttctgccctgcagtaaaccagtgaaagatttgagggctcagccagataaactgaaagctgcttaattatattcgcagataatttttcacacaattttactttcaatttttcagcaaatgattaacataattgtaaatcatcaaaatttacaaataagaatcatctctctgaatctatgtatctcaatatatatctttataaataattcacaatatcaattaaattataggtcattatcatactatttgtgggaaatctggaaacaaagaataagctcagtgtcaaaaatgtggtcacatttcaaataccttgagtttaagcttgctttccttaaacattacacagtttcaaattctgtcacaattaaattcttttaaaatttgttttgtttctagtttttaagtaatcctagcctatgccaaagtggttttcaatgcctacattataactcacactgggattagttcttctcagaacct

SEQ ID NO: 66155 - DNA, 681 bp, Homo sapiens
tgctgctacaccaatgtcacataagcatggccatctataaaatctttccttggataaagcgcagtagattctattttgaaaatccttgtttctttacttaagccaaacagggaacatttactgagctttgcagcacctgattcagagtgttcactgctgatggcacatttccaggatccttatttagtggttatccatgcaactaaactaaacagaacaatgaattacattgaatatatcatttggttgtacacatctcatttctatgctcccttctagtacaaatcaacatgccaacagcctactgcattgatagccacacaactagcccaggctgaaactgccaaggcaggcgcctgaccaaagggcaatgaaaccacaagtcaaacccacagccaatgcagccagaccggaaaaatgaattaggccaaaggatttcatctcttggaatttgaactaacactttcttcttaagggccaatgaccacatcaaaaccaccagtgaatttagaaatacagaatcagagactttatcccagacctactaaatcagaatctgcattttaaccagactcccagaagattcatttgcatggtaaaatttgaaaagttgaaaccactaacttcgttagtagctgcagcagaagtaaaagtggtaggggagcattgagctggagaagt

SEQ ID NO: 66156 - DNA, 901 bp, Homo sapiens
ccaaataagcaggtttgatcattatacattctatgcatgtaaaaaatacaaatatcacataagtatgtgaagtattatgtatcaataaaagaaacaaaatgtaaaatatataaacaatatagacatcagaacattaaaatctcagctatatattatagttatatcatatcttattctggaatttgaacaattttggatattcttttccctcgtcttattgtcacacaataacaaagtagagaatatgtcacctaattttaagtggttacattggggaaaaaagacaggtttattactaagggttccatattgagtagcataatagcataatagaatgagacacaattcttttgacaaccagatcactacttttgctcataggtctgggtggctttttttttcccctgcaaattccacaggcagcattaattagcaagctgaaagcactttcattttcacttttggctagcagacttcaatgaatctctaatttacacatttcagctctgcagacatttgcagaccaatattttaagagcaagtctttatttggcttagcctccatttctgtataaagttaagatgtgcatttacttgtcatttcagcaaaacccttgccacaattaatgaatggttccaaaaaaataagtgtgtggtcaatcccattccacttttctttagcctgtaaattgttagttcttttgtagtaacagctagtttaaacacaatgaaaacatcagcaaaacattggcaaaatgttctttccaacaactgattcaaaatcatgatataaaggaaaaacatatacagacggttcctgacttacaatggttcaacttagcaattttttgactttatgatggtgtgaaagcaagacacattcagttgaaagagcattttg

SEQ ID NO: 66157 - DNA, 953 bp, Homo sapiens
aaataagtagatgggcaatgaaaaagatctttttcatacatgttcactattcataaaataaagagaattcctaaatattgcattaaataagataactcagcaaagtcattgtttatagaattacttgtgacatgaagaattacattaaaagacacaagtacttacatgggagtgtggaaaacctcttcctgtcttgatttttcctgaagagtatgtgtaatatgatacatttatatttcccttgggccctaggggagaaccacaaagaatgccacttttctggtctagagttcattggcatgttcaaaacctcctagacttctgttgcaactccccttgttaaagtttacctttcttacacactgctggtctgtggggagcaagcatttctttttgaacacatatccaagaatacagttgctgtagccactcaaagcaggcaataattagccatcttagggagacagagaaagacggcgaagatttcacttcattctgttagggactccagtaatttgcatatcgttcatgtatttatgcaagaggcaaagtgcagagtctgtgagatgacgacagtgcactatggttgcagaatcagttgtctgaattattgaattgctaaacaactggcaaataagaaacacatttttcaaaggtaccaaggagagaactggctatgtggtttcctttataaaatgtctctcaactgggagtgtttactgttctcactaggtgacttttgcaaatagagaacaagaaggcattttggttattacagtatctggggtttggtggtgctgaaagttaacatattatgggatatcaaaaggcctggagtacttgggacaatgccacctgtctgcccctaaggcctatatagcccaattgagagataacactttagactatgtaaataattagacactaatgaatatatctgaccaaatatatca

SEQ ID NO: 66158 - DNA, 2222 bp, Homo sapiens
atacatatagtaagataaaataattttcaatcttggtaacttaaaaataatcaacaatgttttcattattttcagtaaactaagtatctgggaattgatcatagtgaaaaagcaacctgtgagtagctatgcaattaatatttatagtgagatactgacttattatgtgtacttggataggtcatgttatcttacttatgcttctgtgtctctgaagtgacaatactatttgccttttcatccacctcctctgcaaagatgctctgcaaataaatgaggtaatgtttggggaatgtttgcagcttgggaaagaaacccactgcatacatctaagaatattccatattcaagccttgtatattttgcctctgttttaaattgaaattgtactgtttaagttcttgggttctgaccaaaatctgggtcaacataagagaataattatttttaattttaaacctgattctctgttccaatctcctgcacgtgtgagggaaaactgtaggaaataaacaaagcacataaatcaagctttggaagagaaaaatctctatctgaaggatttttttttttttcaatgacgagcgtgcccactatttccctagaggaatatttcggtccaggaaggaagatagtgcattcagcatgagtgtgtgtgtgagtgtgtgtgtgtgtgctgtgcgtgcgcgcccgcggagagaggggcgggggaggcggatgaggaggatgagatcatagtttcaggatcctcaggaaaccctggtactggcagcagccagcctctgctgtgcccacatgacccacaactctggcagcggacccggcacttccaacattattaaataataagaaagcggctcctactccaggctcaaacctccctgcagaccaatggacaccttctaagagtttggcgagtcagtgactgaagcgcccgtccattccaaggtgtgtgcacggcgttttcttctttgacagctccggagtgggggagggcgcgggggtggagggggtccgtgtgccgggcgaggagtgggcgcgaggccgggctgccgcgctgcccccggccgcccggtgcagaggagcccgccgcggggcgggaggtgcacatgacgcgcagccccggctgcgcagggaccgcagccgcccacggcgccggggcgcggacacaggcggctcggcgctggagcaagggcaggcgccgcgcaccgagcaaagtcaagagtggaagcgggcggagagcgccggcgggggcagggattcgcctcaacgcccactcacggggttcccacctgtgcgccggcgccggccgcggctagcgcgaagcatgtgccgggcgccgcagccaggactgcggcgcggcgcctccccgggcggcgggcggcgcctcaggcccgcggggcggcggtagcggctgctgcaggatgtccggcccgggggcgcggggccgcgcaggtaaatctcccccgccctcgaaggccttcgcagcgccgcagcccctgctgctgccgcggcgccgctcggggggtggctatggcagccggctccttcgcgtcgcgggttgagttgttttcgttgtggtcgctgccctcttggtcatcctctcgggctgagctggtgggaggtggagtgtctacctccattagggatgatactcacgtcggggaacagtctgaggggtactgactgggacatccgcgttgggttcctttgcagccagcggcgtcctttcgtgttgcagtgcactgcggtgcccgggccgatgcctgggtgggagtgggctccgggccccggggacggggggcggcgggggcgggtgggcacgggggtgagtgtcttcggcttttatagcctgttgcccacttcgaagttttctgctggacagagggcaggcgggaggttcgttctggtatccggagtgggagttgaagagaggtgtctgtcaaaagaccaaagccaaagagagaagaggggtggcgacggcgaggctgggactcagtggtaccactcctgggacttgaaggtaaaactttgctgtttagtaggcttggggtatggctttggaaagataactgtagaacttggccgtgaggggcgcagggggagggggcaggggaggcgcaaatattggatgtgccttgcagtgaagcttaccatgctttacatttattcttattctaaaaaaattgtcttttgagttgatgcttatgttttcctgttat

SEQ ID NO: 66159 - DNA, 2097 bp, Homo sapiens
ctaaagattgctcttagttatctgttattttattaggctgaaggatcaatttccatctttaaggaaatctatgattttattatctttgtcctaattccacatcagctctttgtgtgcatgtgtttgtgtatgtgtgtttgtgtgtgtgtataaatgtatgtataaaacagtagttcaagcttttagcatgcctaagaattacctggttgttggggggagtgaaaacacagcttgctgggcttcactgccagaatttctgattaatcagtctggactgggaaccaatatttgcatttctaacaggttgccagacaatgctgacactgctgacccagggaccaaactttaagagtcatcgatatgacacataaggctcatggtgaatcacagtgactttattaaaaagtgaatcatttaaatgcaatatctaaggcagtattaaagaagaaatggggtactgaagtgtggccaaatgagtgtgtcttagtctgttcagactatagcaaaatatcataagctggtggctaaggaagaacaggaatttatttctcacagttctagaggctggaaagtccaagattaaggcagttttggtgcctgttgaggtcctgtttactggctcatatatggcaacccttgctgtgtcctcacatggtggaaagggcaaggagtctctcttgggacttttttcataagggaattaataccattgatgaaggttttgtcctcatgacctaattacctcccaaaggcctcactcctaacaccatcaacttgggtgttaggatttccacatgtgagtttcagggggacacagacattcagaccatagcaagatgtgtgttttaatatgaaactcaccctgtgctggccttgaaattttgcagtgtgggtgttgggagggtagactgagtttttgggttgataaagctttgggggtttgtttagttcagctattagggtagactccccttgcttgatgccttttaaaattcttgctcagaatattgcaaaacagctggctcaactcattccacctgactttctctaccctaacgtcagctctgacccattccaaacaggatttttcacttctcttagtaagctcactggttttgtttggcttgttagatggcaaactcccttgagttttcttcccttgaagaaaaaactcccttaatttttgtttggactgttggtcagctaatccttacagttttaattgttgctcaggaaatctgggtccttgtgcatctccagttttaacttcctacacagacctttccttgaaaaatactattacaatgcaaaagggtgttagtaccttggtcaattatttcgaaaatacttgcacacacatacacacaaacacaacaaaaccattcttaaaaacatcttactattccatagtcatagttgtatttgtgaaataagccttgtattcgattgtattgtggggcatcctgatcgctgtaataaatgaaatatgttactgttgttctctactacttgtgttttaataggatggtgctgtgttacgtttccagttttgctaagaaagtgttcttaagcactgttcattgcttaatgtatcctgtttccagagattagattttctcgtaaccaacaaatgctgtcccaaaaccaccttggcgaccttaccaaaaggaaagattctgccattttcttctaaccaggtcccagtgatatttttcatattcttctgtcaaactcagctcttatcctctacttttgtcttaggatcatgacgtgcttgtggaacattaaaactgaaagaagcagaggtatcatttagccccaccctttcatttaagagagaagctaaacaaactgctcaatgtcacacactaaattagtcacacagaaaatgactaagggtcaagaccttttagccaatctttttctataaccatgcttgaaattttaactaatacagtgaatctcagctattgggggaaccacccccaataattcaacgtaggttcttttctattttccctaagtgttggccggtctgagaaataaagggaaagagtacaagagagaaattttaaagctgggtgtccggggaaggca

SEQ ID NO: 66160 - DNA, 628 bp, Homo sapiens
tgaccttatgaggggaaaatcagggaagatcagttcaatttccacccaaaacacagtaatagatattagtgataaggaggccataatgtggctgaatttttgtaaggctttagggtctgctccagttggcattcttcttaagaagctacacagatgcagcctggggctgtcacatgtggacatagatgatgagggtttatatccagatattatttattgtttaagggtgtctcaccattaatttggaaacatttgtctgtagctgataagctcactgaccaaaggtgtgtgctaatggcatcaaagtaatggaaatcccctccatgtggactcacatgctcctggagtcacattaccagctgggctcactccttcccactgactcacaatgcatgtttttatagctagaagaacctgacaaaaatgatagaacaaaataaatttgtcatcaccactagaagaaaagaaaatccataaattctgcttaagcaaaagtctatatctacggatgagtctgagagtcaaaaaaaaaaaaaatcgattcattcaaagtatctaccacttcaagaaagctgatgatttaagtgacttgatcttttttgtgttcacttggttggtcaaaacaaac

SEQ ID NO: 66161 - DNA, 624 bp, Homo sapiens
tatttcattctagattctaacacgtacacatacacacagacacacacagacacacacacacacacacacacactcatttaacatctgggttttaacaacctattctgatcttcttctaaataaacttgaaaaataaaatacttcctctcaccagccctttctgaaggagcatgtgagcctgttatcttgcgcattaaccggtgaccgtatttagtgctgtcagagctgctgactcattgcctatgaatggccccgctgccagtggtgattgtttgacagaatgccagtaatggctgcctacggctgctgaaaagctgaccttgtaacaacatccacattcttttggttgcttttgctgacatactctcaactcaaaaactgttttcaaaacaaaagtataatgaagtattgagcttttaaaagcaattgtatttcagttctttaaattatctgagtgtaccaaggagggcagaaggcaaagaaatgagtatacaagagagggaaccatccttgaaagttgacatttgagctacaggcatataatacttggggacagtgttctaagacaccatgggcatccaaatgaagcaaagctgtgtaaactgaaaataaaattctaagccc

SEQ ID NO: 66162 - DNA, 790 bp, Homo sapiens
ggggggctggaggagggatagcattaggagaaatacctaatgtaaatgacgagttcataggtgcagcaaacccacatggcacatgtatacctatgtaacaaacctgcacattgtgcacatataccccagaacttaaagtataataatttaaaaaaaaataaaaagaaagatttggagggatcagaatatccaaatctatcattcttcccctggtcccccgaatttcatgtctttctcacattgcaaaatacagtcatctcttcctcatagcctccaagtcttacctcattccagcatcactcaaaagtccaaagtctcttctgagactcaaggcaagtccttccacctatgagcctgtaagataaaaatcaagttatttgcttccaacgacagtaatactacaggcattgagtaaacattccaaaagggaaaaatcagcctgaggaaaggagtaagaggccccatgcaagtctgaaacccagcagggctgaccttaaaccttagtgctccaaaataatccttcactccttgtcctgaaaccagagcacactggtgcaagggatggactcccaacacttagggcatctccacctccatggctatgcagactgccaccgagtggctgctctcctggattggagttgagtgcctgtggctttccaggctcaggatgcaagctgccagtggctctaccattttcccaactgaaggacagcaacccccttctcacagctccactaggtagtgccctggtgaggacgctgtgtggggctccaaccccacatttccc

SEQ ID NO: 66163 - DNA, 2607 bp, Homo sapiens
agagacagagggagagggaaacagaagagagatagagacagagggagagagaaacagatagaggaggcaaataataaaactgatgagactaaacgttaacattaggtgaatctgaacaaagggtacatgagtatcccacatagtattcttattattgcaacttgtccataaatttgaaattattttcaaatagaggataattttaaatgtttgaaaaaatcttagaaattagatgaatcaaattatatcactcccatttaaaaccctttaacagctttccagtgctcttaggatccaatccaagctgctcttcctaacacctagaggatgcatccctcgctaccagccccacccaatcttggcggatctcctcccacaacctgccacactcatcctccatctgtttggaactctttcaggcttcaagggttttcaaatcaggcttcaaggatgggggagggggaggttgtttttacctacccagaatccattttccctctggtaaaatcctcccaccgtgggtttctgcaccctcagtgccaagcaggacatggggccttggccatgagcatggtgagggcatagcttagaatgaaactactacacagggaagcagagctgcgaggtgaagagcaggaccaaatcctgaccacgtcatttgaatctttgactctagccctggtgggaatgaaatctgacctttgactttttgctgccgttccctctgcctggaaggcctttgccctctctcttcatatgactaactcttttcatccctaggtcccagcttaaatgaagccctccaaatgctttcatgagcgtcctacctaaaggaggtcccctctccaaatgtgtttttcttagccccttgatttttttattttttttattttttggcctcttcacacataacacaatttggaccatttcatttagtttttatgtttatttctttttaaattgttccccctatttgagttaaggcaggggtttataaggtggtttcaggctgcttttgttccccagggcctgggatgttacctgatcacatagcagacactcactatgaattaaataaatgagtacatcttttttcctcattacactaggtcttttaatactgaagaatctacattgtccaagagaggaaaaaatatgaattggcacataatatttaggcctagaaactattttgctaaattataagatcactaaggaatatgttttattgcattttgttttctgctcatcccaaatatcttgcattgtgtcttatacatagcatgtgtacagtaatgggaatttttgcccccagttattatgccatttaagcccctaaggagccaggcaatactgaaccaataacagtatgaaaagcttagatcttcttttcagaacttactgttcgaatccagtggggccaggttgactttcagagaagggcattttccaggcaagtggattagggctttgtaaatatttgttgaatgaatcataagtcactttagctaaacaaattctggaaagagaggaagggagggagggaaggagagaatctaaaagccttagtcattgagcccagataagtcgaactcatctgcaaccccataattagctgtgatgatagccgtgctttcaacatttcaatttccaggtcttatgaatcaattttcaataatctatgaaaaaattacttaggcctcttcttcccattttccttaatcccctcatgaggctggccacagagctgagtcatgggttgggtagaaaggtcaggtgttgcaaagctgaaactatgagatttaaggcagagcatatgatgtgagtccccattggttgtggtcaagtcatgtaacctaacaagcatctgtttcctcatctataaagtaagaattcataagaacacccaagctatgtacctcaaaaactgtttctataaatctaatcatataatacactagtaaaagtattttatgagttgtacaaatatcaaaattcagttatgaaacaatctgttatttttattattactgatacaaaaccatgctcagatagttttaggattccctagttatttccatttaccacaaagatgaaatctttctaattgtataatttgtataggcacctatgagctgtttaaaaaataaatgttgtccaaccacctgtgataaaaatgtctgcggaaaagacttccagatattcattagccctaaattgaacttcagtttgtttggctttcttttttataatattttcttaaaacatgtggtctcttaaaatttttatcatgcagagaatcatgaaaaaatgatatatgaggtatctagacaacacagcatagattgtccctttgaatggcagagagagtcggcagtttcttttaagtccccattgtctaatcttaggcacaacccaaattagagttgtgggttgcaaaggattctcagaaaagggtgtgttccccagcctcctaaccaaccatagtagatccaagaggaaagtactttttggtgggaaggtactaaaaggaatgagcctcgtactagtccagcttgtttcccaacctcagcaacatggaaaagagccacgggagtgatacacaat

SEQ ID NO: 66164 - DNA, 1130 bp, Homo sapiens
aaagcatgccttttttcccccaaagccccacactcttaggcacctttatgtatgatttaagttgtcagcagattaattcaaactttttaccaataaattattcacattttttcctccaataatgactaatggaatatgtaggaagtgtgaaatatattcacattttgacagtcatttttatcagagtactgaaagcacatattcttaagcatgtatcactggactacattaaaattagtagcacataaaagaaacaatagataatcattatctaaattcctgaagtacataatgatgtggttataccctttaattaacataatgctttacacaggtaggtctttcatatatgtcttttgttatatacactgcagctaagtgtttatgtgatcaacattaaaagccctgagtttacaaagtgctgagtcacacatatttaaatctcatgatctttaaccaggggaaggccacattccaaatgacagatgcactgaaatatacgcagaatatgaaaagatggcatcatattgccataatgtgcttttcctcacactttgccatatttcttcattgcctgcttctctgaagcaaaaataaccagctgttgcaaaacatggcctggttttataaagtgatcttttgtcatttccaggaagactgcccatgatctccactgacctaaagcaggctaccgtagagctaccaagtgtgggagctcaccattcaaacaggccatctttgggaaatataaagaaaatatttcaataaaagcttttattttccttcaaaaaatgaattcactacacttcaaagtttggaggtgtacaatcaagggggtgctactggtatctggcaggcaagtacagtatgttaaagaatatctatcaggttatcttgcaaatcagatctttttccaatctaaaaaggtggtattgagcaaataaagggcctagatggaagagcctcatgtttaaataaaagtttttcccaaaaacaggctcatttaagacaaaatactttaaaatataaatatttattgattcttatcatcagttactgttgccctacatttaggtttcaatctgtatttcttaagttctttgatgttttcattgctatcgcattttaga

SEQ ID NO: 66165 - DNA, 3296 bp, Homo sapiens
tagtaatattcatgacaaaactagtttgccccttatcatcaatcgtgctccaggtaggagtacaaacactgggtgtaaaaagcagatgcaccccagttggtgtgcaagcccccgtttgcaggtaattaattcacagtgtggcggcgccttttcaagccccctctgcaagccgcgccggcctcctccctctcgagcggggtcaaaccacttagtttatttcacccgctggcactttcttccctgtcacgaattcagcctggcttcctttggcctgagacagcgtcttcaggcgggtcggctcggacctgcccagtggggcgcccacctgcacccgcacccgcacccgcacccgcgggaaggggcggcgctggccggactctctcgggtggactcccggagcggcggcggcggcggcggtggcagactgcgagtcacgtgcgacagaggaggcggagcacggcggccgggtgggtggagaaaacaaagcccccagctgtcagcagaggaaggaggcgacagcgccggagcaggtgagtcaagtgcatttaaagcggtaccgccctggcgcaccccgacaccccctgcactgaagcagtccctcccaggccaggggctggctgcgcctcctcctgccgctgaggtctgcagcccgcggggctcggagcaaccggaaccgggggtccagagtctagcaagaagttgtgcaagggtcggctaggcggtctccgggtgtgcaccccgccgctctcccgcgggccacatctctggttcggtgccccagctctgtgcaccccaggaaagtggagggagggagttggggctgccacgctggcagaagcgaagtggactggttctgaggggtgaggctggggctgtccagggtaggaacacggcgttggtgaaggaggggggctcgcgactgcgcgaccgcggcgcacgaccctccaggctctagctggggcgccggcactgagagagctgggggctctggcaggggctgcgcgcttgggggcagatcaggaagtgcagcgcgctggcgctcgcgcgcttgggagcatcccctggaccccgggcacttccccttcggcagccaccactctcccactccgacgccggccaccatccgcgctcccgggactcaggagccgggtgggtgcaaaaggaagcgggttgttattctgcgcccaagcatctcttctgcagggagccccgggagcgcagggcgagggctactcagcgacttcgcactcggcttagtgggaaattcttcggtctacccttagaagggctatgcggaagccagaaatcccacaaagagccaggagaggggtggacgcggaaagcggtcccctctgaacctggggcgctcgataaagctgattttcagaccccaaaagggctagtgggtttggtcactcctccagtgacttcgtcaatacagtgccaagggcagagccgtaacctcggagaaggggcgctgcagccatttgatcaggagaagcctttgtcttaacccccaagcccctcctgctagtcctcgctgggtcagtagcgctgggagtaattaatattacgaacattagcctttccttcacctccgcaccagccaacactgctgtcccctccctgattgtcttctctatcacttgttcacatctccttttccaaaaaaagaagaacaaaaggaaaatagtgtagacccgctaggcaggaagaggtcactaaaaatactatcgtgctgtcaatgtagaatgaagggttaagcgctcaaacccgcgcccgcgcgcaccgaaacggaagaacttccttgattagcatagtatcgaccctggggccgcgctgcgaggcggaggttcggtcccagctggggtgaagtgtgcagaccggttgcgattgtggtcagacgcagcacctacttctaatctgaggacccgcgatttacacttttgctgaataggacactgtggaatgaaacagaacagagatcaaaaggtaatctgaagaatggcaacatttcccctgcttctcctgaacgctaaatttggccaaatttttatcaagcaaaaaggggtatggctcttggttagccagtgtcccctctggaaatgaaatgcttccttactttgctttcgttcttttctgccaaactgattaaagacatcagttaggggtaagataagaggtccgggagctcaccgagtgattggtagataagcttaactggtaaattttccttgcgtgggtagagctatgcttcttcaaagcactggttctcaaattttgctgcatagtggaatcatctggggagctttgagaactcctgatgtcctgatcacatcccaaactatttaaatcaggttgtttgggagtgagaaataggcacagtatttaaaagcaaaaacaactcctggtaacttcattgtgcagccaagttggggaaactctacagcaaaggaagagttcagcggccagcagcagcaggcattgcaagacaagatgccactttaactacttgggtgggtgagagaaaagacgctgaaactggagtgccgatgactaacaccctggggcggggaactgtcatctagcagcctagctggtggtgacacctaccacaacatttttcccttccctggctagggtctgattggaaaaatcgaagcttacttcaatgcctggtttctgcactgttgttaagggagacggatagaaacttccattcctgtgatgactcatgtgtagcagtcagtaggaaaacccagcagaaacatactccagcagcctggtgagtcagcaggctgcacagcgatcccagtgaataggaagtaattacagcgagtagtttgttgacacgcacaaactgcactcctttgaaagcacatttaatatctgatcaggatctacttgcttgcaggagccactccctttgtagcacaccattctgcctgtttcatataatgctctcttctgttagaaggggaaacacaaagctaactagacatcctgtaactttcttggtgggaagcatgtaaaaaaaaaactgttgggaaagtgtaaactggtttgggttatttcagttatgtgaagcagaaaggatgaatatgtaacacataaattttgcatacaaaaaagtcaaatactacttgattatacatccaggagtgaattaaatgatctatttaaatagaaatggttacacttaacattttatataaaacctcatgttggctattaaccaaaggtttcttgcctttaaaactgtcatcccaaaaggattactccaggataacctgtta

SEQ ID NO: 66166 - DNA, 1605 bp, Homo sapiens
ctcatctttaaaatgggaataataatagtatctgtcacatagccaatatatttgaaagcggtattgcaaggatatagaacagcttgaatgttaagcactttcaaatactaagtgaggtgatcacttttgtaattcaaatggaaatagaataaatgtcaatgaattaatgatctgtatcaggaggcagcataaagaatttgaattggagggttttgggtaactggtaaaatggtggttatctttttttaaaagaaaaaccctctttggggattcctttgtacagatgatctcttaatttgccatctttaatcctcacattattaaaggctacattgattagaaggaaatacagcttccttgtaggtttttagctttttggcttgtttttggggagatggttgctgctatttggagaaagggagaaaggcagaaattttaaccttagtctgataccttttctacaagctggccaccaggtcctttttaggtttttctgaaacctgaccaagtttaattgtcatggcataaaaacttggtattgaaggagttaaagggtctcccacacccctttgcatgaatcgttcttttgtgtacacagctgcagtggcagcacgggtcggaaaggaaatggttagaggaagagctggttttcagacaaggcgagtctgcgaggggggctgcagggtggcctggggttttacatgccagatgtaggcctgccccggtgcctgcctggagctgctggcgtggtcacgccgcgaccctgtgcgaattgaggcgaggtgatgagttagcgggttgccatggcaacaggctggccacgtgaccagggtgctgctgccggcgctctgacgtcagctgccagagggcggggccgcaggagggcggggcgcgagcgagagctgggagaaggcagtgagcgagcaggcggcaggcacggtccgtgcggagcaggcgagcgagcgggaagacgcagccaccttcctcaccagccagcccacagcggtttgttccccttctcgggagtgcgccaatgcctgggccgacccaaaccctgtccccaaatggcgagaacaacaacgacatcatccaggataataacgggaccatcattcctttccggaagcacacagtgcgcggggagcgttcctacaggtaatggggctggcacgagagcagcgccggggaccgccgtgagggcgcgcggaaatccagcccgttatataatggagcagacactgcctgcgacccctgctgcaggcatgcatttgtgaaggcggttgtgattatttggtatctgtttccatgtgtcatgttgggtttgcattgaggctccgcgactgcagatggaaagcattttgtgaataggtttgctgccttcgaggggtctccctccatctctttccttccacactgataaaaatgcatgctgttttcccccgctgtccaaagggagacaggcagtagcacttcctttcctccttcccttttagattttaaaggagccattaggtagcagtgccaaaaggcagaaaacgggagggtggggagaaaaacgtttgcgcttaacctggagagtgtgcaggaaagatggaatcctctaga

SEQ ID NO: 66167 - DNA, 856 bp, Homo sapiens
gaccactcctacaaaatgtgtgcaccacaggactttgcctagtggcagcatgattgtttgatgaccgcatatgcttctgctatattgcatgcgcctgattttatgcagtggactaacaactgagcatgaccacccactatggtaccagcagcacctatgtcctgaaaggttgacccagggccctgctcgttgggggcagcgtgggcatgactggaaaagacctgggatcatgggaaagagctaaggtcagggtaagagggaacgaggccaagtagggctgggaaagtaaacagaaggcatatggtcaagaaggagtggatgtgctgggagctgagttggcgggggagggggtactgagaaaagttggtgccctgaggagaccagccaagccctgtggcatgggaatgagctctaggtcattgaaattattttcagagcatggacgaagccacccactgctagaaacagatggacatttaggcaaatataatcagctgcatttctgaccatatgaagaagcgtatgtctatgtggggcagggaagggttagccttttactctctcattgtacatgtcaagtttcattcatatccatggacgttatgaatgctacaaagaacttttttagaattccaaaattttgtcataccctggataggagccaaatttccaagtcatttcagggctgtagctattgacttgttaagtctgagtttagaaaacaaaacaaaaatccacccgtatatgctgttttgaaagtttgtcttttttgtttagttacgatagggtggctagccaaactaagccctgtatgcaaggagctgcctaatgaatagtagtggatgaggttaatgca

SEQ ID NO: 66168 - DNA, 536 bp, Homo sapiens
attggtgattgataaatctctttttaaattctcataatatttgcagatacttagaaatgtttacaaaacggctatttctgttagaataacacaaaattcttctaagtaaaaagccttctttacaagcgcatttgaaataatgcacctcactttacctgctatgctggaacaggccaactttggcaatcctaaaacctttaaccaggaacaactctgtgaaatgagaactgacagtgtggccttgacctggaccgagcgaaagtccagtgactggcaaagaaagccattcttttggatcacaggtccttctcccctgttggcatgtgtagaaacactttgaaaggatctcaaacacctagtcagttggacttaatttccaaggaagcatcgatatttctaaccattaccttaataaaccacttgggttataagaaattcagaaatcattatatgctcaagcccaaagaaataagtttcttaggtgaaagaaaaatatactttttctttatatctctcttctagtctgctcgttgttt

SEQ ID NO: 66169 - DNA, 684 bp, Homo sapiens
tttcttttcctgtacaagaaaagagatgaaaatgtccttcaacagtttattctgtgtgttcaagggaaaagatggggtgcttttcagcactctcttcagttcacataagccgcctctgtgtctgtaggagttgaaatcttcctgctggctattactccttttcctctacatgggatcagtttgaaagctacttgtctttggacttatttacaataggaataaaaagcttctgacaatgtcaggtagtggagagaagcaggaagctcagctgaggaccatgggaattcaagggagcaatctcagttgaaaccggatttctgaactcttgatctttattttggcatttgtggctcggggcaggtaaggtaaacagtgtccaaagttccccttaacagactgaaataatactgtggtaactgaagctttcaagctgctcctccatgccaggaatgtgaaggatgcctatgaaaacaacaaaaagctactactaatttaatcagatttttgttagattagaatgatacagttgaactttgggattttaaattcctttaaaatgttaatatttcaaagcattatttcacaattgccattaaactccttacagcatgtatttctgtaggtagagagatttctgctgatgtgctggaaatatgtaaccttgtattttgcagcctcactttc

SEQ ID NO: 66170 - DNA, 591 bp, Homo sapiens
cataaaatttattcttttacagcatctttatattcaagtattttgtagaaagtattcaagattatttggttccttaggatgttatataatttttatttataattaaaatatttgataaagcctttagacatttaaaatccaaatttctatgtccagaaattatgtgttactgggaatgagaaattacactgcaggctccgctaggatccttctgaacgtgccctgctttaaatggccaacagggggcagcatgttctagggcaatgtctcgaatcctgcaacagtctttgtgacgaaaaacagtcgccgaactgccaccagaactcttggactgtggaatgcagggtaaacaaaaatctatttactggctccagtcaaactacttctaaagcagtagaggtcatcttatggtttcaatcattttacaattagtttcaataccaccactaattatcacctgcttgttaatgcataataataggtgaatataacacaaaatagcaagtttcctgtcaagccagagaggagagaagaaagagctaaaagaatcttgggaacatgaaatattgaaaaatgcttaagtaatctgga

SEQ ID NO: 66171 - DNA, 2123 bp, Homo sapiens
atcttactcccttaattttttaaatgggaaaagccatctctgaagaaccataaatggtcagtaaacatgaagggggactatcttaagctcacaaagttgaaacatgaggcatcatttttcaccgactaaatagccaaagaaaaatttaaacagtgagacaataccagcaagcttccactgaagaacgggaagaccctaagataggctccaggagtctacgataccagtctccttgaactatggggacgtggacgtccctggtcacaagttgcctgactttgggcgatgtctacggctgtaaatttgggattatatagccacagcacagaactgttgtaaggctccagtgatactcataggcaaaagcaatataagtgactgttagtttttgttcagcctattcatccttacatttacttttgtcggaaaagaactggaatcacaggaaaatctgaggttttttttttttttttttttttgagacagagtctcgctctgtcgcccaggctggagtgcagcacatctcagttcactgcaagctccgcctcccgggttcacgccattctcctgcctcagcctcccgagtagctggaactacaggcgcccgccaacatgcccagctaaatttttgtatttttagtagagacggggtttcaccgtgttagccaggatggtctctatctcctgacctcgtgatccgcccgcctcggccaccgcgcccggccgaaaatctgaatattttaatggaaaactgggagtgagattcgggaattacttgagaccaacaatgatgggtggtgccaggagaaagccagggtgggaacggcccaggcgagatgcgggaccctccaggtgccgccgctcacaaggacccctgactcctagcgcaccctcccctggccttggagattccgccgggctagcggctaccgggagaaggcggtggaaactgtagagcccgcggctctgattggctacctcagagcaaggggcggggcggcggaggacccgaagggcgcgagagcggaacactgcgtacgcgcacttccggtctttgtggcttgcagctcggggtgggtggctcatttcctggccgctcctgggcttcgcggtgagggacgtgggcccctaggaagagggaggtggggttgggagcgcgcgccggacagtggaggagctccgctcctcggcctgcccatccccaggtcgcggccctttggcccgcgcggcgtctccaagcgactggggaactcagaggaggccagcactcaaactcctgctttccaaaggaaaacgcagttccgctgaccccgtgacttcgtaaatgctgcggtttaaccaaggatataaaaatagaagggctagttagttagttagttagtgcggccggactggttaaaccttaaatttgtaggctaaatattttaattcatctcttaacgttaaccgtagtgtgaggaatgaattttactcatctgtcctgacaaactaagggcatacattcctatcgatatctcgccatcctaaaagcaggtcaagtttggtctgtgtcacaacatttaatacctatttgttaccatattttgcttttgaacatttttagtcttgggatattctaagctttttcagaactgatacggatctctttgctgcttttgtgtatgtgatacctatcatgtttttgaacacatggtaagcattttacagatacgtcttggttcttggtcaattcctctgtagactcgtttattcataagcaaaaatcttaatgctcagtaagtgcctcagtgtttgttgaagtaattcggtaaacaccaaatgcgatcaaatgacaaatatccaatatttacatcaactcatgtttaatgtgaacttttaaaaaaacgttattactgccttaaatgaaaatcaacattacttgctttagatagaaagtaagtaaaaataaatgtttaaaatcagtattactaaattctgcctaaatatttttactcttggaagtctgattctgaagcctgtattttatttaaaagagagttctacaagttttattaatacatacatgttaaagatagacttttctccttgatacaatcagaattgaaagaattggaaaggaaatt

SEQ ID NO: 66172 - DNA, 1891 bp, Homo sapiens
aagaaagctgtttttttaaaactatctgcactccctacttgggagggttggactcaagttcccacatctctttcctcttacggttatattaagggcttagtcatacatccctaaatttcatatatcccaacagggacttgggctgggacaggaagccctcttcctccacctcaactaccacttagccacccaccattttctcaaacctcttcctttccccaccggacagcttaaaccaagtcacacgtctcattggtctcaacagaaatgaggtcccaactcctcatttcccaagatatttccatgaacacagcaatatcctttcctaccctgattaccccgcaccctccatttcgggtccttctcaccctgatcagtgagaattgttctagcaagcaaaccttaaatagacctcgtaccctttctagattgcaaagtagataaaaatccaactttccgttaattcagggattaattactgagcatcacttatttcttgggcagtggttctcaaaatgtggtcccaggaccaacagcttcaggatcacctgagaacctgggctgccaccgccccctcccccactactaaatcagcaactccggagttgtggggcagaagtcagtattttaacaaggcctccaggtgattctgatgcgcgctactcttctgggggtgtgaaaaaccagagaggacaggaagaaagttagaattaaagcatacctacgaatcagataagcgatagggggaggggtggttatttaaaaaacgataactaattaagaacttgtatgtagtaagaaaacctaccctgccccagagagctttcccgaaagataatggattccgacattcacctcaagaaccggcagacagagcagcaaaggatctgtcgctggccaagcaggtccctggctaaggcactgctagggacagctcgcggcggttcgggggttaattctcggcagccctccgtcacccggtgccccacccccgccctgcgcctgcgcggtgaagcgccatagagctgagcactcctcccagattcctagagcggacagggcgatggcaggttcgccgggtgtgaggcttcacagcggtccggtgaccaagtcgaggtaagggtgatgtcggctcgcggatagcagaggagttccgggtgatcttgcctaacgagcaggaaactgtgcatggtttctcgagtccttggagagtgaaggcccccggggtcgctcccgggcacggagagacgattggttcacggcctagtgttcggtttgttcccagtcagcccttgctggccttgggttcaaccgaatgaacgccagaaactctgtggggtggggggagtcaccaaccgtggtgcatccatacgaatcagcctaccgtactgggaaagagccacctgaatttgtgaatgttgtaaaagcaaaaggaagaaaaatgatcagtagtgtcatttttggataggaagggcagcgaataacatagtgttaaccactagaattcactgtaaaattcccctctctgcgttatctttccagttatacctttttttggtagcattaacccctaattttgtttgaacatctctagacttggaatggggaatgtgtgtcttaagtgggttaatccctggctcttggatgatggggaggaagcctaatacattctgagagaaaagcaactggaagtcaaatgagattttttgttttctccttcttttatatcttgaggatttttctggtggtctagtctcagagattacatctgtagtcagcacaatgattcccttccaagcccagtggtgcccagttgcctccaggtcccagacctttatgtggacaagaaaagcttacagaggaaatggtaattctccacttgcacactgag

SEQ ID NO: 66173 - DNA, 2687 bp, Homo sapiens
cttcagtgaaactgtatactgcttctggacctttattatttgcacgatcatgcccgtgctgttgtttacgacacatactagcaatgagccattcagcctatttatttattcagggcccaaaatctgaacaataacaacttaaaaaaacttattgtaacccaagcaagatgaagactagaatcagaaaaggccttatcagacaagtaatacatactggtttaattaaataccctggagtgtggtggccttatacataaggtctagccaacattcattcgttcctattccaagaccctgcttatcaacggtgcaagtatttctacataattttctcttccttttatgctgtagagcataccgcttgtgggaaatggagggaaggcccacggtcccgacaatgtttgggcagggtacctcgtcccaggtggatcgcccaccttactgctgcatagacctgctgtgtatcccggccccggccccggccccggcccgacgtcctctagcccctcttcccagcactcaggaccgcggatttcagatgaccaaaggccaccctgtgacaacagcgtcggaaccacggcacttccgcctgcggccggtgagactacaaatcccagaagccccgcgcaagtctcgtcccactaccaccccctcccatcacgactcccagaaccctccgcgagacgccagggcctcgaaatagaacaaaaccggccggtgggggagggggaaggtgagggtctcggaggacacagggggttagagagctctctgcaaatgccgaagacccaagcaggcctgccgcctacccctccccgccccacaactgctaggcgcggagaccgcggcctgttccccgcgcctcccgggaagctgaggaaggtcccggacaggcttccccgccggctcctgctaagaggtccgcagaccctagcccggtgtcccccctccctctcataacgttccccgcacaccggcgcaaacctccggctcaggaaccgcagcagcttcgctgtccacggcagacgcagaaacgccgttcacaagccttttcccagaagcccccggcgcgggctgcttccggtctgcgggcctgaggaggcggggagaggtaaagcccacgttgccatggagaagcgccccgggcgggggaggggcggccccacgacaatgaccgcattgaggctgcgcttggcctcgcgcctctcctcgaacagcccagcgtcctctggaccgtttaaaagaaaacataaagaggactctaccattaagatagtccttacaatttcgcaagccctttcacgtgcattatcttgtggatcctctcagtaatcccctgcaagaaggaatgaaagtgagtgtttgtgaaagcttactacattgtgccaggcgctctcgtcgtgctttacatgtcatttttttttccacaaataaatgatgtaggaactttcattatccccatttcacagctgagatagttgaggcacaaatacagtaaataacctgacaagagctcacaactcatttgtgggtagcaagatttgaaaccaagacgtgattcaaatctttggctcccactagttatgtcatggagctttattccgacctatttatctgtcaggaaaactagataagacaggttaagagttttggcagtgatgtcacggtgaatttgtagaatgcatggtcatcttaaagctgggcattttataccataaaacaactgctgacgcgatcatttaaaattacaaatcagaccacttcactcccctatttaaagccctccaatttatgtcataataatttatgacataaaaactccttataatggcctgtaagtcccctgtggtctgttgcctgcccgcacccccagaccctggcgcccccagtcacctcagctcctcggctcattgtggcccaagatcctcagcctcaccacctgcctttcatggcgcatgacccttcatggcactgttattaatggaagtgatctcatttatttacttgttttattttttgttttgttttgtctttaagtcccttaagggcagggaccttgtctgtcttgctcaccacagtatcccatcctagatcctggaagctgactgcctggtaaatagagaactcaataaatatttgttgaataaataaatgaattgtgggatggttacattgctgcctttagctaggtcacatgattggcatcagacaccacacaaaggagccctgttgtttaaggactggtcaaaagtgtagatccagcctaacataagcatttcaagatcctcaggctttgactttttgcctcattggagaaaatgccctctgaaaagtgccgtcaggctccgctggattcgtgcatgagagagcaagtgagcgagcagctgatggtataccactgcttttcattccgaccagagctcttctcacaacccctgctaacacttctctccattgcaggaagcttcagaagtacagccttttcactctgctacttggatacggcccctaagcaacttggctgctcttcccaacctttccctcttatctgatttgtaaaggctagctgaaggcatttttgttttaagagtttttacatctaattaatgttggaaaacaaaaataataaatctgaaacctaaccttgaggaagttaaaaatgttgcaaaattttacaaaaccctttt

SEQ ID NO: 66174 - DNA, 1006 bp, Homo sapiens
gtgctgtgtggttagaggccataggcagcaggggcccttgtggtgacccctgcgcgttgtctcagcgcagaggaggaagtggcggcaggcagccgcgctcccagatgaagcggggccagaagagtctggggaacaagacctgagaggtgggaagggttgaggccaccggtttggagccgtcaggtaccctaagggatatatgagggaccccggggctaaagcagcctctggaagagagtggccgccctgtcacttcagcaccaggcgcagaatctgtgctaaacctgaggtgagggtaaggaacccccgacaccgcacgacaaccagaaagaacgtccctggaggggaggcttcgatcaaagcctgggacgcaggggtctttctgcaggggacgccgctctcggctctaccctgctgtggtgggccggctctgggagggctggcttccgaccatctcccgacctcccgcgcccaccgcgccgcgccgcgcgcctcccaggctgggaaccgccggggcgaagcggcaggtggcgcgggttcacctggcagggcaggcgcccggggtccgccggggaaggacgaggggaaggggtgcgcggactcaggggcaggcagcggaggggaggggcctggggatctgggacggtgtaagggtgctgcacttgcgcgcgaagggaggggtggcgacgagtccgcggccgcctctccgcgtcccccttccaccacccggggaccaccgcctctgaccgcagcctgggggccctaaagaggcctcgggtctcacctcccgacgccgtcggggagaaaccggggaactgccagctgcgcaacaacttccggttctggtggcgggtcggggcggggcccggaacgcggggacgttgccatggagaagagccgctgtggccgcgcacttgggacagggaaagagaaccgggaggctcgaccggtgggaatccagctgctctgctcagtgttccgttcaataaactagcattgttgcttc

SEQ ID NO: 66175 - DNA, 1624 bp, Homo sapiens
cttagttgtcatgtctgcttaagcttctcttggtcgtgacggcttttcagactttatttttgatggccttgtcagttttgaagactactggtcaggtactttttagaatgtccttcagttgggatttgtctgatgtttttctcataattaggctattgggtgttgggaaggagaccacagaggtgaaatgccattctcatcacatcctatcaagggtacacggtgtcaacatgacatcactgtgggcattaataggatgattttttttttttttttaccttaccagggaagcatggagctccctgaaggatgagccagacctcagtttccaggcatatgtgggagaggctgtggggaaaggggcttgagcttcagattcagtcatggaaaagggagagaaacccgaccaggcagagatcatatgcctgctgggaagccacagtgatttacactgctgagtggagaattgctgagtaaatattgcttccaaggagggaggatgtgccctgctgcctgctcccacccagtgcctggtaagtggatgcccaaaaaagcttttatctatgctgcaaggaagcccaggaatcctgtgggtggtggcagtggtggtggttcaggtgggagtaatttatgaatataagtatttgcttaggaggcagaggttatgtttaaaatgtgagcctgtttaagggagcaacctaagtaaatgaaggcaaaagcattacatagatatggcccaaaccaggctggtaggagaaatgtgcccgaggcttgactccatgggttaggagccaaaggggatggatgtaccccaggctagcctggaaagggattaattcatgggctgcagggccccagaaggcaggagccaggtggggtagtaataaaactgtctgtgcagcccagtggatgttggccatgcctcctccccaaacccactgtggattggtgacagagggatggcatttccagtcttcttcttgctcaccctcaaggactctgtgcagtatgcaggccaggattctctcaggctgtgggtttccacatgtgcttctgcatggaaagtcccctggctgctgcaggatgtcctttgcagagccccatcctgtcctccttatcgcagctgcaggcagcctgagccacattcctcctgcctgagtcactgttccaggccacaggccaccttgcctccagcttggcctatggaccaggccactgtccattccatcatttgccagacactgtggagtgtccctgcccttaaggtcttaccctggtgaccatgcaaggcaacaactgtggagctgggggactgccagggttccatggaggaaggcagagggcagaggaggggacgggggagcctcctggaggaggcgactgctgagttaagtgctggggaaaagggagtgttccaggtaaaaggggataggggatgagattgccacattgtgggaaatgaaatgttgtgttgaatgaaactcatttaaggagacgctaagccagaaatgttaatgggattaaaaaggactcttctatacctaggatggagttctgaggatggtgatgctaggatacaaagtcttgatccctttgttaggctcttctcttcaaaaagtggtgg

SEQ ID NO: 66176 - DNA, 5967 bp, Homo sapiens
cagggacaaacagggatattacataataataacaaaggaggcaattctcctccgtacataattaatttggtcaatttgttagataagttggagtcatattttcattaaaatgtaaagtacttaaattatttttccaaatttatgagatgaaaaaggattaagaccctgacatgcaagagctaattaaaagaatctctaagttcatccatttgtttaagaaaacaaaacaaaacaaaacaaaacaaaacaaaaaaagatgaatcttaggttccaccttctgcaaataaggaaatgggggtgttctgaggttcctgagctttagcaacttgcccacttcccactatttcagctctgctggcagtttctgaattgtgttccccagaagcacttgagcagtcactgtggtggggagtggggaggaagataggcggccagatccacatgggaccacagcagaaaggtgggctccaggctgttatatattggattctgtaaaagatttcatttggaaaaggggttctgatgcttaaaaataagtttgaatgtcacaacctttgccaaagcacctgtttagagaagtttaaacatggttttgtaaatacaatcatcatctaaaatgcaggtttttaaaacttcagcagtaaaaaaagaaatacatagttgtttctttcatgttatctcatatagttaactagcagaggtaaagaagagaagctggagtctcctgctttctggttcaatcctccctgcaggctgcccccacagatgcctgtttgcagcaatgaacacactgcacaaacctatcacctatcactgtagacaggctccaggcaggaccagccatgatcaatattcaacacttgtctaattagacattactgtgaaatcttttccatttaatgttataagagatataatcatactcacaagcagacctgaaacatcagaatacttcttagctggcttaaaggatggaggagcatcaatactgaagtctgggaaaaaaaaaaaaaaaagataactaaactgaactgaaaacattcaaatcccttctctttttttttctaaaatagtatttgataatattcctgaaaatttcctttgtgattaagtagtcacagaagtctctggagattaactagagaagtaggggaggattctcagaaacaagacagtatgtcacaggccaagtgcaggctccagatctagccctgccctgtcaccagggaccctctattcccacagaaccaccggaaagctcatctgcccaccagctattttcacgatctcacactacatgggctgatggtgatgaaatgccaaatgagccaataactggatctgagcaccctgacaccctcatgtccacacccagacgaatgaatgactagctcacttgtcacccatgtgagtcacccccatgaaagaagtacagtggagtaggagatggtgagaactttgaacttgtactttccagtgaagctgaacagaacatataacagtgttttacataaatctggacacactgcagcatgaagtatttactaaacactggctcacaaagtataaaagagctggcctttaagctggttgtcaggaaccctcctaaatctggtattatacttgggctaccttgtttttggaaacacattttaagagtagacttttgaataagaagtttgtctagtagaaacaccaatattatcatattgggacctatgaccctaaaaaccacacatccatgacaacacaaacaaataggctcaatacagatacagttatgagaaaatacacacataatctgcccagactgatgccactataaaattctcaagctaaaaattatttcctacaatgatgcaaacacaatacaataatgtaggttgttataagacagttcctactctgaacattacaaacacatggaaggctctagacagctcacagttaggatcgttcagttgccacggcaatgccctttcagaagcgaggatttgtttcaggttcttccaggttctgttcttcttgccagctactgcgccaccgtggccagagtgcttgaattgaaggcatggattagaagaaacaaaaaccaatggagactaccatttcgacatctgacatttatgcctaatcataactgtaatatacctctcatctgtcaacaatcattaagacccctgagactttttttaaaaggtatttcactgtacacattaacatgttaatcttagtttaaaaaagaagttttcagattgtcaaaacccttgagttagtttgtgctggagtagaaataaaaggctacttctttatatgcacgtaaaaaaaaaagcctttattgggtctaactttgtagaattcattcatgaatttcttcatactttaagataaatttactacaaagtcagatttaaatccaggactgcatctctcaactcccttctcggggcaagtctctgccatgtaaactggggatcctggaaaagttgagaaagccccagttgcagtatgggtactcttctaggtacctctttttttttttttttatcctacaaagatgacacaataaaatggaaaagaataccaaaatctgttgcaaacactggtaatattgtatttccaaaactaattcattaaaaaaaaatttaacagtataatctgaactgctgcagtttattaccagtctcaagaatgaaaggaagaataccctgtgttctactccacagcacaacagcttggatttaccttatgaaactaatgaggaagtacttctcatttagctaaatatttcaagctttgtctaagattgtaagaccaatgaaaaggttaggggaacaatcatcatggaaatgtcccaccctccaaacagtatcctttaatgaatccacaaaggacacccaaatccttgggatatggcacattaaaagatcaacagaaagaacccttctcttgtccccatcttgcccataggggagaaggaggtaactgagactgagggaggagagaatgccagtgccaccctggctacaggcccagcaagatcagaggctgaggtgtggcatttggatgtttattcagctaataccttcgatgcttaccacaaagttgggatccttaaatggcaaaggtttggcagctttttccacaggtcctgtgctaaactcagagggcaccattttattctcactcatggcttccatgctgatacccttaaaacataataaaaatagtttgaagaagtcagtttctttcagctgagttccccacctctgctctcaacagggcatacgatgatgccacagggcatgcaagggaagacagtatgcccagagctccagcaggcagcctgccctaggggagggcacaccacacggggagtagcacctgctgtgcagaagccacaggagaaacaggccaggacctccaactgctatgtttcccgggtaccctaagtgccaagcacagggatggctgtcctacgcaagttagctcatttaattctgacaaccactccacagtaggtgctattatccccagcatacagaaaagaaaactgaggcccaggggaacaggttcaaggtcacatagtgattgagttttggattcaaacctaggttgggccagttctaaagccctcataatctccatgacaccacacagttctgacttccactgatcttatgaactctgtcttaaaatattaagacaacaaaggtccagcccctttaagggtctagttggccagagaacccagactggagctggtatgcttaagtggcacaacaggacatgggcattccaaggaaggaaaacggaaaaaaagctggagggccacaggtcagctggcagcagccagagagtgccctgacaagaacgctaatatggtttaaagcaaaaaacctttaagctaacaatcacaaagaaaaaacaagccaaagtaagaaaccacttctgatctgtaatacaatttcccatcttgccaggcttcaattaacttttaaaaaattgagatgtgatttacatacagtgaaatacacagatcttaaatgtagttgtcatgagttttgccaaaagtttacactagtacaattcctatccttgtcaataccttccagtcccaacggcaaccgctgttctaatttctaccacattacttctgcctgttggagaacttcgtataaacagcatttaacagcatgtactctagtgtctggattcttttgctcagcataaagtttctgagatgtggccaggcatggtggctcacacctgtaatcctagcactttgggaggctgaggtggttggatcacttgaggtcaggagttcaagaccagcctggccaacatggtgaaactccacctctactaaaaatacaaaaattagccacgcatggtgatgtgtgcctgtagacccagctactcgggaggctgaggcaggaaaatcacttgaacctgggaggcggaggctgcagtgagccgagatcatgccactgcactccagcctgggcaacagcgagactctactccgtctcaaaaacaaagaaaagtttctgagatgtatccatgttgttgcgtggatcagtctgtttcagtgtatttgcacactactcaacacaatagtattccacggtaaggaggcaccccaatttgtttattcattttcgtgttcgtggacgttcggttcattatcagtcttcagctattacaaataaagcctctgtgatgttttcatttctcttgggcaaatacctaggagtggaatggttgggttatagggtaagtgtatgtttaactttacaagtcactgccaaatcatgttccaaaggttgcatgcacccttcaaaaaaagagttaaggctaaaagtcatcatgttgtcatgtggaatgtggaagacactacatgattaactaaatcacagcttatctactctcagctggaattttagcaacttattctggttccctcatgctgataaggagctcaacttacttagtaagtgaaaatcttacttatcttagtaagagagtatggtggaatatgaatatatctacattcattcatgttgggggaagaggagtggagaagacaagaaccactcacattgctgcaatagttctttgggtgctctctcctcaaacaccttctctgacccctctccaggtctctccacctgagccggggttccagccaaggccctgtgctccctctcctctgtggccgccaccttctgtctggattccccttcacctcatcctctccacttctaaggtctttcttagcttttcttccctccaagctcagtgcaaatgtcaactttaagaactgagaggctgcccattcctcatccttttcctaccatctgtacccacagtgatctatctcttccttcctcccaccctcccttccgcaccccactctcccttcctcccacagtccttagcgtttatctggtaacttcctgagctatataattcagaggtgggactgtgcagtacacatcttgcctactccagccgattctctacagctcagccagtgacatacttttcaatgcaagcatgatgatgctccgctacttaaatctggccagtggtttctacttcccttgggattaggaacaaattcaggcctcctctccagcctcgcctcttgctccccatccttcctacattttgtcttttctggtgcgatatccatttagccattttctatacagcaaaaagagtctccaatttttccattttcatttatgctgtactaagattattttcattgggattcgtccatgtcagttttaattttacaacaaaggttagatttagtttttttttacataacttttattgcttgtatgattttttttcctttatagtcatcatatttctaccaggtacctgtactctgggagacccagtctgataaggaagatttgattctcccatcacatttcatcagtaacgaacatt

SEQ ID NO: 66177 - DNA, 1761 bp, Homo sapiens
gcccagctatttgtaaatttggatgggggttggggagcaggtctcgaactcctgtcctcaagcaatcctctcaccttggcctctcaaagtgctgggatacaggcgtgagacaggattcttgaagatctgtggttcagccagtattcttgaaaatttgtgcattgtactctgtgtaaatcttactatagcaaagtatttaatattaaaaggttaaaataaaaagcactaccaatcacctacagaagaaggaacaagatttctagaacagccactgactgactgggtgaacggtggtgtcacaccatatgctgaggagcacaaagtaacacactctatctctgcttttttgctttgaataaaatgcaggagccagagaaaacactaatcaagccactccctgctgaaaattcattgctggaattacggaacctagattgttcagaggccctgacgtctgagccaggcgctgagctcagtgcctttacactcattacttcataaccttaacaagcccatgagttaagaccaaacctgcctttggattgggaaacccagggtcaaaaaagcacttttctcaggatgagagaaagcatacttatcaatacatcttgtattcatccatgcaggacattacagcgctatgcgcctcaaagacactgggtagatgtctgcagaatggacgaggggaagacacgcaaatttctgaatgactgacactcattagtcctgaacctcatgctaaaggcgacctcgaggggaagaggcagtccttctattaatactaagtcagtaataacctccctacttcttcttctctccttacaacacaaggcgttgtaagcccatgtgtccaaacgaagggaaagagtagtcattcactccgcggggcagcgtctttcaaccccaacggagaccgcacgcgcagcgccccacattacgcacgcgccctggctcggctccgccccgccaagtcccgtttcgcgacgcgcacgcgcagcctgggagcgcgactgcgtacctgcgcaaagctggaagcggacgcttttttcttcttactggcgccatagcccccgccgctgctgccattgtgggaagggctggccggcctcttcttgctgttccggactattccgggagtggaagtggtggccacaattggaatttgcgccgccatcgcactccgagtcttcccctggtccccccacctttttcccagcgcgggccttggaacttcctttccgctgttacttccgtcttgatgcttgaaaacccggcctggactccaagctgtagctggcttctctcggtgcaatctaaaaggcggagctcggagtagcctgtgccgtcgggacgggaagatgtcagcgggcgttgtcctgccactcgggcgctctgggcgtgggccttgggtggggcacgtgcctggaaatccccattgatagaggaatagaaaatctcccaatctttttaagtaactacgttttaaaaaattaatgagcgtgttgtcttttctcatatagaagagtgattacttttgatgtctgtaagcctaaagctggggtcgttctcagtagaccgccaagctactggcttctccctctatccctccctgccttcccacgcggaaaaggtttgtatataaatagcgcccaaatggacatgaagggtagagtggttcttaatctctccctttttttttttcttttatttgagacggagtttcgctcttgttgtccaggctggagtgcaatggcgcgatct

SEQ ID NO: 66178 - DNA, 2196 bp, Homo sapiens
ttttagaatacttggaagatgtagacaagcaaaaacaggatactaaaattccagagataatcttcaggtttttttttttttttttcggacagccttttggttatgtgagaggtaatataaatttaaaagtgggaccacttaaatattaagtaatctcttattgcagctcttggttggcaagcaataagacacaaacctctgaattatttaagtagaaaattaatttattaaaagaatggttggttatgcctcgcgtgagtgacagagccagggttttgtcttctatcttcagggcagggtacagctgggtattggaattgtaccaagcagtgtttcccaagggggcacagagggagggcccctctccgggcactgtgcgggagccacttccccaaacagtccccgttctgcaagggccccggcgttgctgcccccgagacccgggtgcctgccccggcggtgcgggtcgcgggcctccgctctcgccgtcctccctcagtcccgggcctcctgcatcgcggtcgccaggcgcaggctcagcgcggctgacagcgctccagctcccgcgctcgcggccgcctcaggcagccgaccgggttggggcggccccgcgctcggcccgggagccgatccgctgtgagggctcctccatctcctcccaccccgtgacctgctcgacgcgcaacagcccgagttgtctttaacttgctgcggcagcctctttgtcccgacccagggtcgggggcacctctcggcctggcccggccctgcccgtagccgtgtgagcgggggccgggactgggcggtcggtccgggaggggcgccgcgcccgaccccggagtcccgagcccgaggggagcgtcgcggccccgcggtgggctcgccgcagcggagggggcgcgcatccgggtgagcgccggcgcccccgcctcccccgcgcagccgcacgggccgccgccgccgctgccgccgagcacgcagcgcagggaggaccgcgcccgagcgcctgcgggcgccctgcggcgcccgccgcgcgacgagccccaagtgagcgggcaggcggcgcgcatgcggggcggcccggagtagcgccgcccgagcccgcgagcggggcgcccggagtagccgccgacccgagccgggcgcggaggcgggggcgggcgcggcggagcggggcccggccggacccgcccgcccgccgggggagccgccggcagtggccgaggagcgcgcggcggacggcggcccgagagtagcgcgctggccgcgggaccggccgcgaccgccgcggccggcccggaggacgcctgccgccgccgccgccgcgcgcctagcgaggtgagtgtatcgcccgcggctgggcagtcccggagccgcagcgctgcgcgcgggtcggaggtggagaaagaggccccgccgcggccgcgtccccggtccctttgtggccggcgctgcctggggccggggcgcgggcacgctcggcgcgggttcgggtctgggaccccggtgccgttggacacgcggcgtctctggttggcagctttggcgagcagcgagtttccgtcctagtttgacattgagttagaaccgtttttctttagaagacggaagtttgttttattgacaaaaataaagctaaatatggcttctgggttcggccgtgtggtacttgcaaccgcggtgccagcctgaccctcgcggcgccacgggggaggggaagacacgccggcagcgggggagggggcttcccggcccgctgcccccgaggaggacccggacctaaattagcaaatgtttgtggttgggaagtagcgggctttaggtaatgtagtagcttttccgcttttcctggaagaatgaatgaatgagatgtcatttactcatccataatcaatacgttgcccatttaagcatttaccaggaattgggatgatttgcattgtcattgcttctcttatctggtcagccttgctagatgaggttcccttactccccagatttgtgaccttgtcctcattctcaaagccactgagctaaccaacccgtctaccaaactcacttggcatttttttggtcaagtgggcaataggcaaagtagtctttctgaactgtttctggagggcagagaatgtcactttgatcatatcttatgtttaatacattgctttataatcgtgtcaagaacgctgagagtta

SEQ ID NO: 66179 - DNA, 1831 bp, Homo sapiens
acataacccagcagatctactcttaggtattataccccgaagaacagaaaaaaggcactcaaacaaatgcatgtacacacatgttcacagcggcattcattcataacagccaaaaagtagaaacaattcaaacgttcaactgatgaatggataaaccattgtgataccgccatacaatggaatattattcagccataacaacgaatgaagtactgatacgtgctgcaaggtggatgaacctgatacattatgctaggtgaaggaagccagacacaaaaggtcgtgtgtatgattccatttacatgaaatgcccagaataggtaaatccatagagacagaaagcggactggtggttgccaaggcctgggagggagaggaggattggccgtaagtgcttcatggagttggctgtccttcggcgaaatattttggaaatagcagaatggtgcttgcacaacattgtaaatttactaaacgccactgaattgttcaccttaaaatggtcaatattacgttatgtgaatttcactttaattacaaaaagagaaacgctagcgtttacgcaggcggagggcaggctggactggggacgctcctcccggccgcctcgttgctggcagcgcttccgcccgccggcgcaccagtcagtaccgcgcccggcgaatgtggagggcgaagctgcggcagggcaatcacaaaagggctgtcagagaggaggcgaggcgggaggaagatggagaggcgggtgggagcctcacctttggactctatcgccacagcccggtctagccgctacgcccgagctcaagtctgactcgaaactccgctgggtgcctgagaggacccggcaggccaaggggtggaactgagggggcggggacgcggcgggcgggtggggccgcctcccggctgggcacgcctccaagccagactggacgcgaaggaaaccggaacctgtctgcctacggtgcctgtttccggaagcagcttgagtccggacaccaacgacggggacgctgggaagccgacttccggcgccctattttctcacctggttcccgcggcgagccagcggcagcggcggcggcgatgagacagaagcactaccttgaggctgcagcgcggggactgcacgacagctgcccgggccaagcccgctacctcctgtaagaggactggaggggaagcgggaggcgagcgggtaggtgttcctttgctcctcacaagtctctttctcttttacagctgggcctacacttcgtcgcacggtaagaagaacgcctgtctcttgtgctttgggctcttgtcgccccgctttcctctgttccgcacaacgctcaaataaggccgatggactcacttccctccataaaaacaacaacaacaaagcccgcatgtgtctcggtttcgtgaaaaatccaaattctttaatgtgccttgtcttgctttgttagcggcatttgacacattgatcagtcttgaaatagtttcctcccttggcttctaggtcattacgtagttcacctcttcatttattacttctcgatttgctttgctggttcctcctaatctccccaagctttaagtattgtcgtggcccagtactcagcccttggacctcttttctaggcacactcgcttccttggtgacagtttttcatccaatctcatggcttttaaataccatatactgaggacttacaaatgtatatactcagcgcagacctctcctctgaattctagactcatatatccgaatgtcttcttgacaaattcttttcaatgtctagtaattcaaacttagctaatatgtccaaaacctgagctttaa

SEQ ID NO: 66180 - DNA, 544 bp, Homo sapiens
ggaacaatacttttgagaaccactgttagagaattctaaatagtaaatgaagaatttctaattcttccagaaagactgaaagctctatcacacctaataaattcagaaagactgaaagaattagacattcgcaactttgcaacctgatgaaatgatgggtctaagtaactattattagtgaataatgtgacattatttgtctcctaatgtgatgcaacagaaatgcacaaccaacaatcaataaaacattccttgggaatcacatcatgagggctgaattagccaaatgaaattagacaaattctaaaatccatgtgacacagtcttctcaacaaataaactgcatgggaaaaaagggggggcacttaagagacctgtttatcaaaagtcatgtgtggacattgttggattctattttgaagactaactatacagacatttttgaggaaatctgggctactgaacatggactgggcttcagataaccaagagtcatagttaacttttttaggtgtgatagagcttttatgattatattaaaatt

SEQ ID NO: 66181 - DNA, 1500 bp, Homo sapiens
acaaagttgctctgcatacatgaactgattctgaatattttagtgacagacatctcaaaaaagtttacttcatttacaggaacactatcaaatgttttgcaaaacaaagacactgcattagggcatataatcatagaataggaaaggactttaggtgacttactctaaatctctccttttcaggtaaggcatctgcaacgcagaagttataagaaacttgcccaattgagaccctctaaaatctacaaattcagagtcttttccactgcattacccatcttcttatattagacttctaaaactattcctctattaatttcacaagaataagttgctgcgttacagaaatgacggaagtaactcccaaacccacaccaatctttttctttccactcccctaccttctccctcccttatcctccattatcattcacagaatgaaaaaaatacctgaccacctgaatttctggccctaattgggtgtggagtcccaaccccctgctactgtttccgtgttaagctaaccggagttttcttttttaattattcattcctttattcaataaatatctaagcccagactttgcagaagcgtggtgcacgcagctcctccaagcccgcagaccaccgcgcgctggcatcccgacgccgggaagccgggggcgctggagaaacggggttcccgggggcgcctggaggccggccgggtggtgggaagcggccgacataagcggttgactcacctttccgcagctcccgctcccacacggtgacgatgggacgcgagtgtttacggtggtgaatgagccacagggacaaggtctgcacgctctgctgcgagttgctcaactccgacagcttcttctccagcgccgcctcagagaaggctgacatccctccgacaccacgttcacgccgtcccacgcggtggggccgaggggaggagagtttcgccgccctagctgcggcctcgccccctcaccccacccttccccacgctctcaccacggccgccgcttcatccaagaccggccgcaaaccagcaagatggcgtccggccggcagtgacgtcacagggacccacgccccgcccctcccgctgcaagccctgggaaaacgcgcggccgagaagtggaaccgccaggcggaaggggcggagtcgaaacaagtgcaggggaggcggacaggggcgtgatgcctgggttactctcagaggcatggtgggagtttgccaggcctgaaccctccttaatggaaactctgtcaaagaagcagtgattacagatctctacataggcatgtaaactggtataaattggggcaggcactttaaagactatttgcatgaccaattacggttaaaaatacaccttcctaaatagagtataggatggtgaccagaggctgggaagggtagtgggggagggctaaatagaaggactaatagaaggactaaatataaataggacctagtatttgatagcatgacaggggactaga

SEQ ID NO: 66182 - DNA, 2274 bp, Homo sapiens
ttgaagtttcgggaattcttttactaggtaaaagataaacatttagaaatcattcccaggagagaggcgaggagcggggtgggaggggactagcacaggggacagctccgagcctttctccagggaggatgctgagcgcggtcgtggacccgttgaaggatctcctttcctgcaagttggtgtgtgctggaggaaaaaggaaagcagaagggaagggccttagagaaaaaggcgagtacagaaaacggaaaagagggcacaaagctctcttctaaaagctttttatttctaaacacgtcagtcccttcttcgaatatgggatgaaaagtacggatcttttcctcaaaaaatcctccgttgcaccccgaagcccatctgagcaccttaagaagtccggctctctagggtgagtgggcgcctgcggcgggctccccccagcatcctctttctgtagcccccctgcccggtccgcaggatccggttctccgcagaaccacccctaccccgccacgcctgtctggcctgaggagctcccctcccagccgccctgctcccggacctgaaagactcacgtctccgcggcctcgttgtcccacggcccggccacgcgcgcaggtttggttccacacgggcggtccagagggctcggaacgggcccactggtgtcttcgagaaatctctaccaggcgcgaacacgcggtggtttcattgggttggctgcccctcggtccgggggcagcgccgcgcagccacccggcagccgcgcccctagccttcgcgaagctggaagacaatcactaattaccgccgcgcgcagcgccgcggggaaccaccgcccccttcgcccaggactgcagggcatgcgcagtgcgaccccggaacccggctccgcagacggatccgcttttccgtgtgttcgccgacgccgcgggggcgtggcgcggccctagcgcattgtaagcagttgggggtcatttcctcgaggccctactcgctagccagcgcccccggggccagccctggctgctgctgggagccgggtcgtaaggggcagcgagatgtttctgacgctgccccaggcacatgagccccgggtccttcgggagggtcccgagccactcgggtcggatttcgctcttgagacaaaggcctggctcgttcgcggagcggggccacggtccaagagcagagctagcaaagcggcggccttgcacaggggttccagcctgcggtgggaacggagagtctcaggggggcggggctgcctccgtctggccctcggctggctgcgaaacgtggactgggtgatgcctcaggagaaaccaccctagtagttccgctccgagggcggaagtgcgcgtctcttgtttgtgcggctgaccagttggcgacatggtggcacccgtgctggagacttctcacgtgttttgctgcccaaaccgggtgcggggagtcctgaactggagctctgggcccagaggacttctggcctttggcacgtcctgctccgtggtgctctatgaccccctggtaagagaggtcgctggacggccgacccttgtgcttttcgggttgaacctgtggacgtgctccgggcgcgctgttagttgccgccccagacctaggaggcgagtcgggtcggctcaggggagcggggtttgggctcggagtctccagtggacctgccggactcgctcctcacccctcaccctttgccgtctcacgcgtggcgtcatcctagggtcattgctgcccatgagctgctagtaacctgttagtcccacgcagaaacccgaatgataagcatcttacctgaagccttccttgggaactgtagtaccgttaatcaatttgggttttaaaacaattgaaatttatatgtagattaaaaccatcatcccacaggtgcaatctcatttcagtatttccttcagttttggttaatgaacttttgttgtattgaatttcaaggaaatgttacctgtgttttagctacgggaatggacattttagagaaagtgtcagtttgggggaaaggtcataggggatggggatcctaagcactgattataaggcgggacttccctcgacttcacccagtcagttggttattttcttggtgctttcctcaccatatttctcaagtgaatagtttttgcatgctccccggaattcattataactccattcccaatggctaagttggtctatacagttagtcttgcatctcaaaaggaggctcagtgtaaaaagtaaaatgttgaaaattcaaat

SEQ ID NO: 66183 - DNA, 2058 bp, Homo sapiens
tgtaagactcatgagaagctgagacagcaagtttaataaggcttcttgaacggtttattgattctgcaggagtaccatcacatggggtgcccatgtagaaggaacccccttaaccatagcatttactgtgatctgggtaacaggcatattcagcaggtgaatatccctgtcatcacatagccagtctcacaaggcttgcatacaaagcatattagctgccccatctggggtgttacacttggcatttatagatgatgttaggcagtccccatttttgggggtaaacagaccttacagtggcatttatccagtccacctggctggccgttccctcaggaataatctcccgtgtgtctggattatatatccccacccacgattgttcactagtgagctgtgggtcctgcatcaacccaaacatgctcttccactctgtagcatttaaaaccaaagatactgcccctaaattaatcactttcatagtccactttagcaaaggttccccaggaaactgatgataccagtctataagatggaacaattccttagcactacaccctttggtttcagtagttacttggttttgcccttcccccacattgactaccttcttggtaaccacaggacttagaaatattttctgttgtccctgcataattctctgctttgtgggtgactttgaggctggtggcctgagctcgcacccacattttgagctgggtccagcctcaagtccttatccagcaccctcttgtactttcattttagccattatagataacagtgaccaagggattgaattttggattgaatatttcacttttttctttttagtttgcatttccttatgtatccaatgaaccaactcttggagttggatctatccgtaaattccactggtaactttaacctttagtaactgatctcaacacagctgcagcttcataccattggtgagcacatgatcaaagattcctcattccccacccttttatcctttttcttcccaaaccacacgattccgtgagtcagggcctttccagcaaatcctgcttcactaagtatgtagggaaaactctctctcttacaccacagcaatcattaacttctgtgagcaaatgtgtgggggtttcttccccgacaccaagcagcagacaccagctgggtgttctctaattcagttccaacactctctacccagagatagtgtcagatcccagaggttgagggctcagtccccaagactgcccctaccccagcagtcacagtccaggcctcaggaacttctgactgaccagcttcaagttaggattccctcgaccccctctttaggttcagttaatttggggtgactcacagaactcagggaaacacttaacatttattggtttatggtattgaaagtgacttgttttttatatagacttttttttttttatagagcagttttaggttaacagcaaaattgatctgaaggtacagagtttccacgtccctctacccccacacatcaacttgtagcctcccccactacattgttacagtcaaggacgattttttaaaagccaaacactgcccttcaggactgttactgtgggaaactgttagtccaaaagtgctgtccattgctcaaaactttttgtaaactcccattagtgctaactttagaatcagtttttgttcacagagggagtaacattttttgtcacaggcttttttttttttttttttggccagacataatatagtttagtcacagacttatccatcagattaggttttgaatgacctattagctatttatacacatttaattttcctctaaaggttaagttttagtcccacttgaggttgttcaaaaaggtgctctgtggaccaggcatatgacattttctatattttgttgtcattatttgtttatatggttgttgttgcaggcttcttagtaggtgaaccaactaggtttgattcagttgtctgtcctctacacctgtaactctttttacttaataaagccatcaggtccacatgcagaacccactgactcgttttacacaa

SEQ ID NO: 66184 - DNA, 2947 bp, Homo sapiens
cagcctcccaagtaactaagactacaggtgtgagccaccatgcccagctaatttttagattttttgtagagacagggtcttgctctgttgcctagtttcgttatgtcttgtaattttaggtttaattcattaggaagcattatcaagtgtacaataaaagcctgaagtcatatagtattagataatagtagtgagggcagtttttgtttaaggaaattttcactgtgttaggcacctagaataaaacaaaatgtaaaagatagatcctgttttcaaggagtttaccatctagctgtagggtagggctataggtagggggcagtggaactaatgtttctgtaattattagataagaccagttaattgctaagtgttggccctgagctcaaacagttgtaaaacttcactactggtaaactttgaactgctatgtggtagagaaaatcaggatcctctgcttcagtttctgatagaaattcacggaactgactgtgggtcagtccgtaagagctagtgaagtttgccactaacactactgcttgagtaacacgtggtagattcaaataaatagagttgagaacattgggaacagcatctatagtcaactgaaaaacaagtcaaatgattttgagtgatttttctgtggctcttggtaatttttaccaatactgcccagttgtggtttattcatggatgaatatttgccccatggttatatttccattgtatagtaaataattttcatctaataatttgcttattgaaaattcagcttttgaatgatcatttttgtttatcccgttttacccaggtgacttggcatgaaattgcaaggcctcagatacatgggtatgacctgaaatgtttggcaatgattaatcggtttcagtttgtatctggagcagatgaaaaagttcttcgggttttttctgcacctcggaattttgtggaaaatttttgtgccattacaggacaatcactgaatcatgtgctctgtaatgtgagtatttctctaaatattttacctaaatctagtcacttcattttaaatttaaaaggatttttgccttaggctttaaatggaatatatgggtagaaagaaagtaatattgtttcttaatgtaagatgtgacaaagtttttgtgcactgtggggtgtaataatttaaatactaaaactagaaattttgtgtagcaaatgagctcaaaatactacaaagctgcattagtgttcaattgagacatgaatatgatgttttatcactgtgttaggtacctagaatagaacaaaataaaagatggatactgttttcaaggagattaccatctagctgtatggtaggggtagaggtagggggcagtggaactaatgtatctgcagttgttagatgagaccagttaattgctaaatcttatggtactaaagtaaatttcatagaaggaagaggtcattgtattggaataacgagaacatgtttaatgggacttgatttgggttttgtaagggtaactttcttttttatgtttatacgcccttctaagaaagatttgagctacttataaaagtacatggattataaaaattatgaagtaattttgaaagaaggaaaattaagtaggaagataggttacacagaagtgcatattatacagtccttcacttagagttgagtcacgaatttggttctgagctcaaaaaggataagtacccttttgataggcaaaaagaaggggagagagagggagagagcaaagggaagagagagagagcaaaggggaggccagagctattgtggtacctgttggactgaagactggatagaagtggggagaatggggaaagtccatggtggaagacttgggaggcaggcacagtctgactgtggggtgctgttggaggctcctacacaaagagtgatgaaaaggattttggaagagagttatctggaagccaagagactctgaaagcagtgaaactagcaccagtgtgagtaagactggagaagaaaatggaattcattagaaatgaagtagccaactaaatttcctggaatgtatactcagcacctcatgctacaggctttcttgattatgtgaagaggatttaagattctgttatgcttgtttctaataataatggacaataggaacaagatcaaaagggaagccttaattgtggttattatgtagagctaagcgtatggaggtggagggacagctagtttcaggatctcttcagttctaggaattgaaatggggttttacgattccatgagaggcttagtcccagttgtacacttagttctgtgtcctaagatacagggatcctgtagagtagcgagctgcttgctctcgtttgggttttgctcccatactaagtgttgggataggtatgtaggaatgcctcttactgttcttttccatgttagtttttctttgtttctgagataaagcatactgtttcttgtgtcccaggtagccatttttgatggttttaaattcttactattcatgtttgtgtctagtttcagcttctgtgttaaagtctaagttgtacagaacactcttagcaaatgagcatgtgccagttttgatggttagcatatattttcacatgtaataatttgattgatataaattgcaaaatctaagcagatattgccttttcaaatgacactcatacgaagttttaaaatactcagttagttaggtatgtttaatgaaaatactatgactaatgctgtaactgttcccttctgggaagcatctgtgtttatatgagcatcatcaggggatgtgcctgtgagattatcttggaagtagagctctgggccttccattttcagctcactgcatttcctgtcagaccctgaaacccattgaaatgttatggttcgatgaggtccctttatggatgagaggatgcccgactttatggattgcatggg

SEQ ID NO: 66185 - DNA, 1474 bp, Homo sapiens
gtgtgctctgtcttgatccccttctttctagcatctgccagacattgtagagtttcgcaagcagttgtaggtttgagctgcagccagtcatttcttttattctttaaaagtacatagatttgtctttttagggctttactgaaagtaaaatatcctgacatttaaactgacagatgtaggaggtaaaaaatagagttctgaaacatttgaatttatgtgacagctgaagtcacgagatgagggatatatgtcccccagggaggatgcagaaagaagaaaagggtactggaaacagcatgtcagtggtgccagctgagggctggaggcagccaggagagttgggagcctgggtgctgggtggagagaggttaacagggaagacatgggaagtattgtgaaggctggtgtgagcaggggactactccagccctgttggaacatagagccatttggcagattgacaatgcagtgacagctgtatataataaatgtgttgaaaggaggaaggtgaggattttcttggtgggagtttatgctgttatttaacatattttgcttccaaaggggttaagatgttttacctaaatggaggtttctaggtcagtgctatacaatatttctaatctgtgttttatagtgtgagctacatatgtaattttaaaattttcaagtagccacataataaaggaaacaggtgaaatttaatgacatatttcctttaatacggtatatccaaaatattattatgtcaacctataatcagtataaaaacctgttactgaaatattttatagggcccatctcagttcagactagccacatttaagtgcttcatagccacatgtggctcatggccatccatatttggacaatgtactttagactattgcatctgtatactcttgtgccgtcagctggggggtggggtgtgtgtgcgtgtataccaaggcagtgagcatctgagctttgaacctcaaagaccaaaatgccctgcccattttcctgcttatcagctgaggaatctttacccacattgacacatgggcttgttctgacccaagtgcatgcaggcttccagagcagattcagaggcctaacttagtcctttagctttcctcccagcacagaactcccaaggttatctgcaagtaggccttgcctagagagactgagttttcaagttgtcagttttcccaaattgtcctcaagcatcttcctctggaatcaccttactgtttagtaaacattcagaggacttgctacacatctgggcagtctgcattgtaattcatatgtgtttacacatttgtgtcttcatctgctaaagcacctttgaaccatattgtaattcataatatctgaagcaattattatgaattgtagtaattcataatattgaagcgattcataatatctgaagcaatccccagatacgggttaggcatggccctgctctgagcaggatggcaaaagt

SEQ ID NO: 66186 - DNA, 2899 bp, Homo sapiens
aaccgcatgcctgggctctactacctgcacctgccgccccacccctgcatcccgctccgcacttcccgcgcataggtttggccaggccctccctattgaggcacctgttctccaagacagagccgctgtgtcccaggtgctctgggtgcaggcgcgagtggggattgaaggaggcgctcttattccactctgtccgggacaggggcggctttgtcctagggcactcttgctttaatagagagggcccggccacacccacgtgcgggaagtgcggggcgggatgcagggttggggaggcaagggcaggaagtagggcccaggacgcggttgggagggcggggaagctcagctcacttggatcccagctgcagggcccgctccgggggaagcccccgagcttcccggttccgaaagtgtgcagccactgagaatttattagcctcgtggatccctaatctttccccttttctaccctttggtcagccgcattctaacaaacggcaagcacacgccccgctgggtagcagcaacccgagaacgcccccacccccgcccccgccagacgccggttcccgcttgagagggtgagggtcccgagacccctgcgaggaggagggtcgcggggttccaggatgccgatgccaagcaggaaagatcacctcgttgcttcttccaccggcctctccgcgagacatagctaaacttgaacttggcattccaagggtctggaaacatcttcgtgggacccatcgagaggttgtttaaagactggcacccgctcccgcgcccaggtggggaaagggctggccagaagtgaaagtccggtcggggcgccacacctaggctgcggattccgagagactgggaggctggaggcctgggaggcgtggcgggggcggagtcgccgggggccggcttcgcgcacttcccgggcccggccggcctggatggactagccggggccatggccggcgcggcggcggagtcagggcgggagctgtggaccttcgcgggttcccgggacccgagcgcaccgcggctagcctacggctacggcccgggcagcctgcgcgagctgcgggcgcgcgagttcagccgcctggcaggtgaggcgggcgggcaggcttgggggacacgaggtttctggaaccgacgtggacggatcttttgctcctagtgagagcggcgctacctcattcgggcgcattttgaatcgaaactccaggagggacgtgtccacgcgtcctcctagtagacacggctccctgaggtcccacctgcagccccaaggcttcttgctactcttactcttccgactttccggtgggcaggaccaacctagccgtcttccccttttcccgccctccgcgagcggggcttaggatggttcttgccctctcttgcgggagacccctcactgtaaagggcctgctggggccggggttgcaaaagacagcatgtccagcggccgtgacccttcggatgtcctcccgaggtaggagcggtgcgtggaccgccagcgcccgggctgggacagcacctctgacggcgcgccaggttgggaccgggaggccaaggcctcttggccggggcctcccgaggctgcgctctgcagactcctctgggatagcctgtattcagctttgattttcgaaacctcattttccttactcttacagcgtcagaacaatccctctgagctccagttctctgggggactagaagaattagcaaacagtgcaatttcacctttaagaacagggcgagcctgtgaattagacaacaccaagatcacatcgtgcctttcctcagagcggaacaggctgatgaaattgcaaatcaagctccatctggccttggccgacccagccctctgctgccagggcccaagttcgtgactcatccctctgccagggactttgggtgcagggcttcatcaagccccagggccgcgtgccggatggtcaaggagggtgtgcaggtgaagtgggcacgtcttggcacagggcaccggggtttgagtgtatctgctctgtcgcgatgaacaactggtgactgctccccttctgggggcagaacagcaaccatgacttaggtttcactactcgggtagctgatttcagcgcttcgggtcacttcctggtgttgtggagggtaactgtgttttccctttgggggctgtgagaactgtggcctcctcctgtgtgtctcctctggcttcctaagtagggagagtcaggagggagacgggggtgccttctgccaacctctctattcactcctcatccttccctctcgcagggtcacctgctggagacagctcctcacccttctttcgtattctctctctctctctctctctcaactattaattatggaaatttcctaccactcagaaatagaggggtactatgaatgcctacaggtgctggggagggaggctctccattctttgaagcaactcttcaaggctacctgagtaattatatcagcaccgcacctccttaatcccctaaatctcctccagctgtgatctctcacgcccactattggccaacctctcccctcaatgctaccctgggaaagtagagctatgttctggtcccctcctggtttcactcttgtccctcagagaacagtacttttcccctcaaatgcaaaattgggatgtgtcagccaggctggccctcagaactcgttaccacttactgtatgtctggtagtgttgtgggcatcttttatttaatgcaagttccttgtatttcctctacattacggttaaagcagacatttgtgcactaatctgacgcccctcccactgctgggagtcttggaacatgtccacttgtttttctcctagaaacaagacagagagagggcgggaaaaaacaaaccaaaa

SEQ ID NO: 66187 - DNA, 611 bp, Homo sapiens
ctgggttccctggcgcaccctcctctttcttagcttctttgtccctaagggaaacctccccgtacccttaggtggggctcccggtcactgccaccacccctcttgctgccgaagccggctccctggccacctggtgccctgccggggtattccaaatctgggcagcagaagccggccgccgccgccttcatctggaaaggcttaagccttctccgggtggggaagaagtcagaaggccgcctgtctccccgtcccccaaccccccaactccccaactcggtcctccaggctccgaggggtgcagctcggccctgggccgcggggcgcacgtgcagcagagtccggccgcccggcctccccgccccgcctccgccgccggcctttggcgcagggctgcggatgccgcgcgagccgtctcctttgcactttcccggctgcggtccggtcgttcggggcagcccggccgggggtagaggacccggaggaggggaggagccggagggagaggggaaggagggggcccgccggccccgcccccgccccgccccccgcggccggagcccgggctgcagcccggcgcgcctgagcctgcgagtccgcgagccagcgag

SEQ ID NO: 66188 - DNA, 2118 bp, Homo sapiens
gtctttcaaaatctagcatcatctcctctgtgacatgttctttaacttccctggtaagatcagtcccctcctctgtgacatctctgagtaacagattactgacctcttttcacactcctagtgacctcatttgtttatttttttcacagaactgtgtctttttcatatttttaacctcacgtctaacatagtggtgagtactaaagaaacgtttgataggccaggcgcggtggctcacgcctgtaattccagcactttgggaggtcgaggcgggtggatcacctgaggtcaggagttcgagaccagcctggccaacatggtggaaccctgtctctactaaaaatacaaaaaaatagctgggcgaggcaggagaattgcttgaacccaggaggcgcaggttgcagtgagccgagatcgcgccattgcactccagcctgggcaacaagagcaaaactctgtctcaaaatacaaacaagcaagcaaacaaagaaatgttcgataaaagaaaaactctgagtcattcagtggtgcaaggttggattcctttcagacccgacgtagttgtcgccctgggaggtcgggtgcattacttcccccagagaaaggtcttgggtttcggggataatgccctggctgagaatgcctcctagggggagatccaacttcccaaccgtcaggtgcttgctgtgttccctttgcacgtctctgcccgtccttcctgggtgggaccttggttggcggtgagtgggggaaacttcaggcttcccagctctgcctccgaacactcctggcaaacactttcaaggcctaatcacaaacccaggtcccccactttcctctgtaacaacggaagtcccagcagcgatgtccactcctgttctggggccagcgtcgcaccgctcaccccgcacctcatccctccgctcctccttccttctcctccacaccctctcggcaccgtgccccctttcctcacctaggatgcgcgtgatgcccagggtcagcttctccaggtgcggcttgctgcagcccagccccggggacgatgcctcctcctccatggctcgcgaccgcgattcgcgcgcggcgggagcgggtggagggccggaccccgcctcagcgccgaggccaatttcatggcatgccgggaacggtagttctcggcgcctgaaagcgcggcgcagtgatgatgggggcccggggttggtctgacagcagcagctccgtggggcgccggttcccgcggccccgcccggtgccccacaccgcacctccgggacgtagcttccccttcgcccccaccctctcgccccgcaggggccggccgcgcaggcgggggcgggcctctgcgtggtgcggccaatggggaccgagcctgcaggccgaggcgtggcggcccaggcgcgacgccccgagtggcggttgtttcaagatggcggacgtggcgggcccctcccgccccagtgccgcggcgttctggagccgggactgtatcctttgcccgcctgacagggggcgccggcgccctccacgggacggcgaggggcgagccgtcgcgtggcagtccgagagcggaggagaagctccgaactaaccccggggatggggacgtgctgctcggccccagtctaggtgctgggctctccccttgcttgggtgttaggtggccgagagactggtactgtctgcaggtgtggggacacggctcagatgcttcccagcgctcactaccggtgagctcgagaaagatagccttgagtccaggctcagtccagggctgagatggccctccgaggtccctctgcccaccctgtcagagtgcccccaggctgacttgagtgtgcggagctagctcgaagttgagggaggagtcggtgttggctggacagggagcctttttgttttgatttaggattgtctttagtctgcattgctaggagcaagtcaggacctttcggacttaaaaggccctccagtgatgatgtattttaatactggggttttaggagaggtgtggagcttggttactgggatgtggtctggtggtgctggttactgcgtaagatgggaatcattgtgcctggaagtattgttgacttacttgtggagtgcgggtca

SEQ ID NO: 66189 - DNA, 620 bp, Homo sapiens
tgggacaggatgggagccttgggccacgtggaaccctcccactcagaatgtcgggctcacagggacaagggatccaggccagaggccccaggaggaaggtgtgagaaccaggagaggctggcactgcgggctcggctgtctcctgcggcgtgagcactgctgcctctctcttccctgtgtgtcacttaatgtttgcagttaagtatttacagatatgttcccatggcaaccaaagcctcaaagttactctcacaattctgttttctcaaatgtgtttctctggctgattgcacagggttttctggaagccagccaggctgagtgagtcacattccctgccctgtgctcccatgctttttcccttccccctccagggtccagccagccagcatggtccccacccccatctctcccacgctgaacagagctcccgggcccatactccccagcttggtcaggttgtcccagggcctggagtgcagagccacaacccccaccatctagaccctccagctctctggatcattgcaagcttccccttccaggaatccttctccagcttccctggcccatgaggcagacctgaaactgcccccaccccatgcttcttgaggttcctt

SEQ ID NO: 66190 - DNA, 768 bp, Homo sapiens
gggtactctctggcctcctctgcctggtccttgatgcacccatctgtctgcagtgaggcggctagtggtgtggactgacaggtggggaccacatctgtcactgtgtctccaggaacctattgcttctaagacccaggggccctctgaggagaggcctgaaaaagggataggggcacagcctctttgcctggtggaggtctttgttctatgcaataccttgtcctcagattcctttaaatgggaatgtttccaggggatttccaatgaggcacgatgggagcttctgtttgcacttaggcttggggagcagtcagtgggtgcatgtgccccttcccttgctggcctccttccctccttcctgcacccgtctctcctctccccttaccaccagcttctttacagacataatgttcttggtttttgctgtttctcaacccaaggtcctttccccggggcaggagaaatgacaagtgtcctttcacttctccctggcagccacttcaggaattggccccattcccagcctgggctctagaacacatgctggaatgtcaggcactcaggccagggctgaggaagacagcatggaacacaaggatcccaagacagtaatttgaggatccagcactggggctccaggctccaggctgtggtctagaggcatggctgtggtctgcaatcatgagcctggatggggtttctcttggggctccatctccctggggaccccgaactcagcagtgcatactatccaccaggcccaggtgt

SEQ ID NO: 66191 - DNA, 2229 bp, Homo sapiens
aataaattagttaggacatatgcccaggaggggaataagaacagcagagtatcctgtccaggaaggaagcatttttaccatgttcagcataaccttataagcgtggtgggaaaagcctttgttatttgagcccataaaagtctgtggcctcctctctggaaacattacttcctctacctctcaaatgccagttttaaaattttattcctttgcctaccgtgtttctgaaatgaacccccaccccccacccccaatgttgttgactttacttctacttattattctttactgaccaggtgccaactcttctgagaagcctctgtgaactgcttctcaacaggattagccactttatttttctcacctcctcccttaatggcatttccattattgctggcattttgctgtaatttaattattattgtctaggtcttttgcctcctctcttcagcatctgcctctcaacatcaaactaagagtttcttgaggctaagtctccaatctttcatcttcccatcctggaaaatctgagctactggtgtgcagtaaagccaaatgtgtgcaaacagaagtgatgaaattcagaattatttgaatgattttcttaaatcagcaaagagaacaaacttttgcagatgccctgtgtgataagaagcacactcattcaacaagtttagaacatccatttaatcctgctcttttcttgctaatattcaaatttctttagttgacttgtatttcaggaccttgttgaaaaaataacaatattctagattctagagtctagaaaagtaggatcaacctttgacatatatcagaattgagggactaagtggctaagttggctggacttcctgggtcaacagggacttccccagggggactttcccctaagccaaaatgagtcatagctgcaaggtacgggattgaaacttcacccaatcaacagggactttcccctaagccaaaatgagtcatagctgcaagcgaagggattaaaacttcaaccaatgaaaggggactttcccctaaaccaaaatgagtcatagctgcaagctaagggattgaaatttcaagcaatcaaaggggactttcttctaagccaaaatgagtcacagctgcaaactaaggcattgaaacttcaaccaatcatatagggagtttaagctctagctgcagcctgatgtttttaaccaagcaggcccaccaacccacaagcggatagaaaataagctaatcctacaggacaggaaaaggaaaaggggaggagtcataaggggacataagcctaagacacccaagccagaaacggcagccattccggatccccatggaagctttactttctcttttgctttactttcgcttttgctttacttccgcttttgctttactttcgcttttgctttactttcactttcgctttaataaatcttgccgcagcacactctttgggtctgcgcgtttctctaatcgagctataacattagccgctgtggtccagggcttcattccttgaagcccgtgagaccatgaatccttcaattgagaaaaaccttcaataggaagacttctcatctcagaatcttctaggggagattgttaaagctcaagttgttgggcccaaccctagagattctgattcagtagtttggggttagggtctgagaatttcaggtgatgtattcaggtgacgcaactgacagtgatgctgcctgtcctgggactgtgcgctgaaagccactgctctacagtgcaattagctgcagtttagagttagagaaggacattcgaactgtgcttcatttctaggcagaggctggagattttccttcacagctcacgctttggcttggcaataatctcaatcattgtgtcattttgctaggactcagcaggggtgagggaggcaaactgctaatatagtggaaaagggtctgcattttgttaaccttgtgtaagtgaagttcacaaaagatttgtcttcttaggcattcttttcttggacttcttcaatcaaccccaatgcacgtgattataacagaaaggctcctggtggatccttttgtaacatgtaacatcattcttttaaagcaaataaggggccattagacagagatagtttgtaccagaagctcttagttaagcaaactgaaacttaacttggagtcatttcctgtaattgacttacagaaataaaacaaaagaacttcaaaacaaaacaaaaga

SEQ ID NO: 66192 - DNA, 1147 bp, Homo sapiens
ttgggataaaatagagaaggaaggaggagcactactatgaacagaggattcatccaacctaaataataaagtagcattcaagttttggtggaagaaggaagaaaatggtatctttctggtctagtatcgaaagccaaggacagcagaatttgacaatagtttaaagcacaggcccagaatttccaggcagttgttaatatcaaaaagacttctaatccctgtgtcagagaagtataccaaagtcaagttaaggtcaagccccaaagatgaggaatgaagataaataacacagattatttcacggtccagaagatgctgtcttggctgcagggccaggctctgacagcagcagattactagcatggagattagagtcaggggtaaaacctcctaaaaaggcagaatgtgcagacaaatgatcacctgggcatccacgggagggagtttaccccactatctccagaacccagaagtagaaatagcagactgccttccagccccctcactaacagggaagaaaagcttagaaagtatagtcaggctgagttctaattagtttggggattgggctaagctggagattcagatggtaagtttgcagtaggcaggcttggcaggaagggcaaggacagccaagctgtctggggacaaagtctttttctatctacataccaaaagttagcacaatggattaaggaaacagtccaagagctgatctgttttttagtttactgggtgactaagtcacaaacttagtgggacttagtcacccagtaaactgaccgggtgactaagtaaataataaagtgtgacttcagttcattaattcgaatacccaaaccttgttaggatggattaaggcatcaactagtactgttgaaacatctcatagtctcatatagtggctatacagtcaactctccatatccacagattcctcatccttggattcaatcaataatgaataaaaaatattcaaaataaaccaaaacaaaacaagaaaaataacacaacattaaagaaacaatttttaaaatgtggtaaaacaattatttacatagcatttgcattatattaggtattataagtcatctagagatgatataaagagctattataaatagtccagagatgatatgggagaatg

SEQ ID NO: 66193 - DNA, 442 bp, Homo sapiens
ctatttctttatggagccacacatttttaaatacctagacatttatggttcaacatcattgctcatcagcccactgcagtctgacttgcatcccaagcacccagtggcatgttccttcttgtgatcaacagtggcctccaggatgttaaaacaataggacatgttctcagtctgtaaatattgatgtctctgtccactggtcacttgttcaacctcaacctccttgtttgaactttggtattttggattttgtggcatcaatttattctggatctcctcctatctctttatctatttgtttttacttggttactgggccacagctccaagcacttctctgttctgctcaccaactgaattggttggatgccattcttctagcttgatggtttcaaactttagtgtgcatgaaaatcacctggagaacttgttaaaattcaga

SEQ ID NO: 66194 - DNA, 694 bp, Homo sapiens
tggatgctaccttttctgctgaaacactttctccctcgctcttcacgtgggtactgctacttatatttaatgttccagcttaaatgttaggtcctcagaaaaactctttgaccttcagttccttgtttatttctcccattgtacatactgaatttatactcttttaaaatgtatttcaggttatttgtatttgtctgtcttcccaactgaaacgtgagctccataagattgggaagcatgtacaccttgttctccgttgactcaccatcacccagcatagtgcctgatacagggctcaacaaatatttgttgaacaaatagatagcgaaatggtattgggtgccaggatgccacctttagtcaataagctaaaggtctcttaaggggtattggtaaagcttgaaaaattatattggtaagttctcaacaccctgaatctctgaaattatatttttttctctaaaaaattttgagactctttggaataaattatgatgactctccatcagtttaggtactattaatacaatgtaatatgaggtaaaatttgaaagaaaatctactaatgacttgttaagtatagataatgagagaaaccttccaggaattacacagatgtttatttttcaatggtgctccatggaagcatatgatgaatgttacctggatttcaatgaatgtccctcaatatcta

SEQ ID NO: 66195 - DNA, 1064 bp, Homo sapiens
gagagctcaccatattctcttttccagttaaagtttgtaaaatttaaatataaatctggctgaacagatgcaatatttcatataatcttttatatgatatttcacacaatacaaaatttgagcttagttaccaatgttatatgtgaaaaatgagtggcataggtgttttttaaaggatttgtgagttgttatgggtgttttgttttgtttttgcttgttttgtttttctttggccagagaagcactgactacattggatttacttaggcagctcagtactaaatatctactcatccctgattaaataaggtagtaggtcttcactttctcggaagcttctctgtaaattagattatatctagatgcaacataagaaggggaaaccctaatgacctctctcaaaaccagtttgaggcaacattatttgcacttggccagacctatcactttgacaccaactagagagtgacctgacctgataaaaagaatgcagcatggcaggacctgtgactcactggtcaacagcccttactcaggacctgtgactcactggtcaacagccctgatttagcttcatcatcatcctgcaccttttctagtctggaattgtgaacatttataatcctaaactacctctttgagagcatatactccagcaaatgtctgtgtgtcaatgtcccctcatcaagaggaaataagaatgatctatgttttcttcaaaaactgggaaagattaatgtctaattacctgtccatttttctcatttctttaccccaaaacacataccttgacaccttgtgggagttctctttcttagcttctaagttggctgcattgatatcatttgcagttgagcagaaatgggaaaaatgtgtctgtgtggatgggtcaccaaggacatggggaattcggattaatacaatagctactttaggacttttcgggattcacagtggcctatcagaaatgcttgaaaaaatcagaggacataaaatcaggagtccagatattggcatgaagatccacagaaatataagagctattaatacctagaatgttacag

SEQ ID NO: 66196 - DNA, 1711 bp, Homo sapiens
ctaaataggaaatggcatttaccccactttttattacaatgtcaaaaaattatgctaggtacatttaaaaatattatatactgtgtttttcctttctggctgaattttagttgatttatctgtttttaaagtattaaataagttacttaagttaaacaactggcttgactactttttgaaggaatggacatgtgcataatacatgttttagcaatatatattttatccaagtgttttcgtttgtaggtcaaaatgttaaagaagttctcacataaaataatccaatttggaagcaactcaacaaactgtattaaaatataaagaaactatatttaaagtttgtgtgactttctaaaaccattttttctctccaggcctgagtttcctcacctaaaaacaaaaagaattgaactagattttttggaattctgatcagttccatatttctgtgctgtaatgacaagttgtggccgaatgatgaactagttctatgtagacacggccctccatatcatatttctggctgtattttcagattttttttaaagaaaaaaacccagcaatttatataatctggggtttgaatgatagaaaaatttatcctttatacagaaactgttgtccaaaagtctttaattgaagctgatctatttttttttttttaattttgctgtcctctggttctgagaaggtaaaatatgtgacactggcactccccaagattttttagggctgagtcatcctctcagaaccagggcttcctggcagggcaggtgtaagcatcagaaagctgaaaggttagaggattctctcaacctatttttggctctcttcattgctggccttggcaactccttttctgacctatcagagcttatctttgcatagatgtttctaatattttccaagatgcatcttcagtacattacacaatgttctcttcctaatagtgtgagtcacccatattggctttaggaggtccattgcttgtaaataagccataatcagcatagtttccaactgatgcactacagctcatttctcccccacagtgaaggaagtagctttgaaaaggacagaatcactcttattcccctaatgtgccatcactgcacaactgcagggtaagccagtagtcagttctgaggctttgtgtcagcaatcaaactcatttggtgacacattaagtattatcaggacactcagagaaaagaatgcacaggcaaaccaaaagagagtatgcatagtggcaacctataaatgtgtctaattccatattttaagtactcactaagtgttttgtagacaaaaagtgctaccaaattgtaagaatgtaatttcaataagtgatcaccatgatcaaagcctgaatctttagttttgctgaatgtctgagacacttccaagagtaccatcaggatttcattgacagaagagcctgtgaggccagagacgctctatttcaggtggcagggccatttcaagcccactcagatcttctctgacatatattaagaggcagcatagagttgacaggtaaaatatttattttatttttaatgtggtaacactgatacaagtcattgtctccttacttgaactgagagaagagagctgaagaaagaaagcaaccacatcttaacctgaaaaagtcatttgtgtggaaatagaaattttatttaaaaaaattttcagattatgtattttctca

SEQ ID NO: 66197 - DNA, 611 bp, Homo sapiens
tgcactttctgggaaaatggtaaattaaaaaattaaagatctggataatttcactccacagatccctgaaacaccattgcaatgagaaagacagatactttggtattgtttaggcaggttgtggccaggaggcattcttacttcagtagggtggtctgtgaaaaatggagagggggggcagaaagagtactggtagatcctatttctgtaatccaggcaagccaatccttccagttggctcgtattttgggtttggaattctgacttctgggtaaaaatatcaagacaaagtccatatgtgttcttgcagtgtgtatctgtgtgggagtgttggagcaaagagcatgaagggggtgggggttaagagatatacatggctgctgtccagctgatgaggacacccagaggtcatcctctgaatctatgagcaaggataaaaggagttgacaaagaactcaacagaattttcagccctatgcacctaaatcattgcttcctgctggaagttgtagaatgtcaggataaacattatgaagtaaatatttcgcacaatggggagggaattagctgtgtgcaattcccattaatgctaatgagactttggtggttaa

SEQ ID NO: 66198 - DNA, 482 bp, Homo sapiens
acagaattctggtgggcttatatgcatgtggttcaatgagaaagagagaaaaaaaggtaccgtttacatctacaatggaataagtggggacactgacattctcaagaggccacattttccatttgaacaagaacttgtttagacatagaacacaaaaagtcaagaaaccctatgcacaccctgaactcagcatgcttatgtgtgagctgtgggggcagaggtgatagtatgaaggttaaggtccatccagtgcatagcaatgccctgatgaggctaccatctggccacacttttaatttcacatacctctgggcttagtcattttctcctaggaccagcacctacacctgaaagaggtgacaacttcaactacccacctggtattgaccttaggttatcatcctagacttctgattcactcaacaatattttatttggggatccttgatgtcttccacatcactgggcttttgagaggcacc

SEQ ID NO: 66199 - DNA, 900 bp, Homo sapiens
ccttgttgaatatccaccttagcatatttacaacattttacatcaaaatggagcatactatgcacactgtttcgtaacctgctcctttttctagtaatgatggctacctttccatttaattatattgtaaactcatcaaatattctcccagatgacattcacatgacttgtgcagttggtttctcctgtatcaatctaggaccacattgagccaggttgtaatgtcacttaagcagtgacatgttgcagctggcttatacctcatacaagactcagttgttaagctttcaggaattttaggagtgggttgaggtcacattggcagcttgaaagtgccacggtggaagtatttacaatatggaaatcagcaaatattgcaaatcaaagcctcgtcatcactccaaattggttgtgaaacattactaacacatctttgcccctatttgccactagtctcttttaatccagaagagcagaagaacacccccttgcttctttgttccttttttttttttttttttttttgagatggagtctcgctctgttgcccaggctggagtgcagtggtgcaatctcagctcactgcaacctctgccgcccaggttcaagcgactcttgtgccttagcctccagagtagctgggactactagcacgcgacaccatgcccagctaattttttgtattttttagtagagagagggttttgccatgttggccaggctggtctcaaattcctggccataagtgatctgcctaccttggcctcccaaactgctaggattataggtgtgagccacagtgcccagcctcatttttttcttttatggcactgacttgttaatgagaatagatcagttgtcctatgaatgtactatcttctgtatctggcttgtggtgtc

SEQ ID NO: 66200 - DNA, 1153 bp, Homo sapiens
gctattgaccacatttgaactagtcttgtagaaagtgtgcaaaatgtgtttaggtgacctgaagtatttgtatattggttaaaaaatcatttgcctatttttcattttttattttcagctttagggaccctgctggtactgagtgaacaagcccaggccattagctatttggagcacttcatctcagcaccatttctctggcgacttgtaacaggcagggctatacaaaagaaaatcctttttactaccccaattcatatcaatcaaagaccaaggaaaggctcctaatatctttttaaaatgttttcatttatcttggagtttacttgtcataaaaaccgcatgtttaaagtgtccattgggtgtaaatggtcccataaactcttgtaactgagtgacacgtgataatgaaagtagcttcacaaagaacaacaaaatagatctcttttttattgtaatcatcaaatagtgtgccccaaggtattgattgaattatacataaagctgatatggagctataaaaaggatgatagcatgctgcttcaaaacaaaccacaaacagattagcctttgagaaataaccttaattccaacaacattcacaacctttgctggatgaatcacaaaacaaaaatatttctggaagaagatatttcctgtatatatgtaaactaaaagtgcactctgagaaattttatcagccaaaaggtagaattgtgtattcaaacaaggaagagacatatttacttatgaggcaagactaaatacacaggagaatatctggtatctaatagtccaggtgaaatccagagtttcactttttgtggtttctgaagtcaaccacaatctaaaaacatatggaaaattccagaaataaacaatacatacgttttaaattgggcgccattctgaatagcatgatgaaatttcccattctgcccagcacatgaatcatccctttgtccagcatgcaggctgtagacactcactgcccattaatcacttaggaactgtctgggttatcagatcagctgtcatggtactgcagtttctgtgttcaagtaacctttatttgacctaatgatagccccaagccacagtagtagtgatgctgtaatattattataattattagttattgttgttaatctct

SEQ ID NO: 66201 - DNA, 3053 bp, Homo sapiens
ttattgcaggtgcctctccattcctagcttactcagcatgccctccttcctcaagcaggtgtgacttaggtcatctgcatcatgatttctctcgtcactaagatgagaaacctccagagattacccacaccaaggctgcaacctgttgatgtgactacctttctctgccatgggtagtttatctcctctattcatttactctgaggatacaaatctttcttgtcatctttggggtggagggatagggtaattctaccttttaccatcagccactttctgcctaatcaatacttcaatctcctccccagaaagagtcattgattttttttccagattctcctctgacttgtttgagggtcccctatcatgttatatatcacatcccatctagggcaccctctacaattcatgaaacattctagacttctacattttagtagggtctagggaatcaaatttaaaccttggatgtttcaagcctaccagggtaaaacattaactttacaattagaaccacgctttgacacttgaatgagttctcactgcaggaatgcctttgaaaagagatctggcttattatgatggatagatggggtggagcttcttagcaaactacttgctttagaagttaatggaagaacatctatgttcaggaaatcactgtttgctggtaattgaggcaatcagatgtttcaaagtaggtgaactgtgaacaaatgaactcctgaatgacagcaggggatagcgtgtggcctcaatatttatactgtgtaaccatgatcaccaaagcactctcatctattttaaaacagaagaaactatcatcagtggataaaactggatttaaaagcaagccaccaaaagctcataattttttgaactgagcatttttcaaggatgataacataaatacagtcaagctatttctatagattttttaactttgatacctttttggaaaacagatcccacagaacaatcttagtaaaatggattatttttataggggaaaataccaccaaaaacccttaaccctagaatctccattcttggcttaatatttatcaattctttttgattatttcttttatattttccagattatttagattttagagctagaaagattatttagtaatgacattttagtggcattttaaataatgggttcacagttcaggtcagtgtattaggtaacagttgtaagttggaagcaggcaaaggcaaacatcagcgctaactcatgtgatagctgggttaagagaatctttgtgtataaatagcctttctatgaagtaggtataatagcatgagtcaccctttttttctttctgggactctgaatgattttatataaatgttaatgagtccccaacaattcaagttttctttaaactccttcgtaagtattcctaacttcagactctccttttttcaactattttgcatattaatagcaattatcccacacggggagaggaaacagcatgccaagccctgctttagaatcattagctcatcgtaatattaatcctgaacacaaccacagttactacgtcaacctcataaaaaaaaaaaaatgagtctcagcgatgctaaataacttgctaaagtttggacagtgattttgaggctaagttaggattcttttcttttttctttttttaaggcagtgtctcactccattgctcaggctgaagggcagttgctcaatcatggctcactgcagcctcgaacccccaggctcaggtgattctcccaacttagcctcctgagtagcttggactacaggtgtgcacaaccaagtccagctaatttttgtattctttgtagagatggggttttgccatgttgcctaggctgttcaacttctgggctcaagtgatcagcctaccttggcctgccaagttgctggaattacagacgtgggcaactgcacctggtccctgagttgggattcagaaataaattctgatgaatacactgctgttctacagtatttttccttctgttatggtgagtttgcctgatttttcttaattcatttagggtggttcccaatgattgcctttaaaatctacctgtttaatagccagccttgtaattttgccagtgaggaatgttaagctccctgaaggtaactggatattgttttcatgttttctgtcctgggcttcttatcctttaatagatgtcctgcacattcttgtaaaagattttttttttttttttttttttagaaaagaacagctgcaaaatagggttgagtcctgcctgttctctgtaacctgccaatattacctgactttgagttgctgccaacatctgtgactgtagcattcccagttctctccccacgcacattacagggatttctccatcattgtcctgttgacatttgactttgcaaatctgttcaagttctcatttaggttgagcatgtagagtaaatatgtgtaggggccaaaggaaaagcttccctttgtcctctaaaggtttgctgaaaaatcaactgataaagggcagattaataggagaaatgacgtacaaattttttagtatgcatgagcggaaattgcacagtcattgctccatctcccaatagggtacagatactcatatactttacttctaaggggaaagggagatggggaagtggggataattttaaggggtggtaaataatttttaggagaattcaatgggcttgaagaacatacattggcctgggacaaaatctgttgagcctgcagagcagacaatggcttttgacaaaagtccgttgacagtctttagcctttcttcctgcaatatgagttcaattactgaaaactcagggaaggaatcagagataattgttttcttctttggcaggtccagatgttaggcagataagggaacttcagataacaatttcatactgtcctttgggagagacaggattaagagatagtgggagctgtggtcaggggtcggggagtggagatgagagagaccttgaggcttcttcttcagttgagcatgtcaacatgccatttttggggggtattagt

SEQ ID NO: 66202 - DNA, 6828 bp, Homo sapiens
cttctgaaacaattttcctttaagaaatagttgtgagcttgctaatgaatcatcatatagaagatatcataggatgtaagtttacatttaacctaagttgcttatctttaactgggtttagtctaatctactgtgtcataaagtcagatgaaaccaagagctttttatcaataaatttaactattatttagaatattgtgcaaattacgtaggatatcgctggcacaaagccagctgctacaagtgatgcctctcaccccaatatgtctgagtggttgatatgactgctactcactgggatggtgtcctaataaagacatggctctctctctccttgggctttgacttccattctctggaatgggaaatacagggaactcagtttaccataagccacatccattgggggaagggtatgcctggatctatttggtttggaaaataggttgtcatgtgtcttttttttttttctgtttatttagacatatgaggaactgagactaagaaaggttaaacgaatttcccaaggtgacagttttaggaaatagttcagctgacactaaagttctctcattctttatccaatgtacttttcactataactctgtttcacttgggctttaactgttatttctttaagaactctcagatgatgcctttacatagtattaaaagctgttacaaaaaatccttattcttttcatttcccaggggcttctctattttccaatcccaaaattaccttctgccctccatcccagtctgtcactgctcgatcttactcttaatgcatcagtagtttgctttctgattgggctacttttatctttggaatttcgcagtgtaatttcatcatcatcattctttccccttgcccttgccaactttaggtgtattggtttctgtccattgtttactttacatcataaaaacccagacattggaaaagtaaaggaagattcaaagaaatattaagcagaccaaacctaaatgataagcctatagtcctatctaaaataataatttgtatcccaagacaatactctttcaaatatgtgaagacaatggtcattttcccctttgagtcttcttttctccaggccttccagccttcctaggacttactgcctcagtccttctaaagcattttcataagccctagttttgctttctttttactaatcttgtgggtgggctccctttttttgtgtggacaacttgaccaactagccactaccagcatggaaaaaaaagatgatattttctcttgctctgatctttatatttctattaacaatgtccagttttattctcacttttttcctcagtaatgtcacactttgtttctctttagtttagctgaaacagtcaatgtatttttaccttgtatcttcctttagcattcttgagttgtttcacattcctgctacatgactaatatgatcaccatccattgtcttgctttgtcctatgggatgtgctctttattaccactactggtaaaatttccctactgtgacctctcttccactttcagagttatgtaaggatacttgcttacaagcctagatgtggtccaattggctatctacgctaatataatcctgcttcacattgaaggcacaatatttgcaaatttgctttacgtctatagcttggaactgacatattcttattttggttttttgggaagacatttagttcttcttggtcctgtctgaacactatcaaagagaattccctccttcccctaccccatgactttcagaaagttattgtgacatttcgacagctataatgttgatagtatgtttcctttatttcctcctctgacttaggtagaactctatagagcactggagactcgtgaatcaatggtgcagttattcatttttcgctaactttgacaactgtcttgtatgtttcccttccccatttggcccagacctaacctgtggctgtcttgctgaatatggggacctggacgtttcacaggctgacagggtgagacaacacaagcaaatgcagctggcctgatggggatgttgtcagatgcagtcaaccccactggaggtatactcactcagagaggctggtcctgagtgctcctcccatctgcctccctgtcccacggttgtgccctggctgccccacgctgacagtggggctagccaagcatggctgttgtgaagatctcaagacgattcagagaaaaagcccagacatcattttgcagaggatattatacatacagacttggaagcattttgaggaaaggtggataaggtccaaggcaattttttttagccctacttgagggtatgggaggggtgagtgggaatgggggtggggctgcaaatccagggaaaaaatacttgacgtgactgaccatcttgagtgcaaattgttaactataaaaatcatgagtggttggcagctactgtttttgtttgcttgttttttgagtcagtcttgctcttttgcccaggctggaatgcagtggtgtgatcatagctgacatcagccttaaactctgacttatttatttatttatttttagagatgagatctcactatgttgatcagtctggtctcaaactcctgggttcaatctgttctcccacctcagcttctccaggaactgggtgtataggcgcaagccactctgcctgggtctttttttttaagccaattttttccctctgtaaagatgttcctctcacttttcaccaaacctggacttcgtggttgccacttctatgcatagtggaagggacaaatgtgaagggaattagtgttttcatatacttaagagagtgcctatcttttattgcattatgaatatggcatttggtcagggaaggtgagtcccatagacagtcaaaaaaaatgtcctgtaggtactgtttcaggtcccaggtgttcttcaggctgccaaatattagctttcttcaaggcccagtcaaattccaccttattttggaagcatctgcttattaatttacccagcagaaattattctccctctgagctcgccagagcatgcatattgtctgtgatgtcacttacttggtagattttgaaagaggcagtttgttctgctcctgtgtgcttccagtcttgaagcttacctgactacctgtgtggccttggggaagttagctagcctatctgaatccacatgctctcatctctccaagaaggatgataacattgccccactgttgtaatcgttgggtgttgccatgattcactgttactatgttagtgccattgcttcataagctatgaggaattccaggaaagtcagtaatgattattatgatatcatataatttctgaagtggaggcatctttttttttcccaaccacactgacaagtacttgagatcaaggattaaacattatgaatctctgctttcctaacactgtaatgctatgaacatagtagaaagttaataaatacttactgggggccagacgggagtcgtgattcccttgaaaaattaccaaaatgttgacgtatcgtcaccaacctctttccagaaaaagagtaagcagattaaatgatgatttattttgcaacattgtaactttaaagccgttgcactgtggaattcgtgagtcacagcttcttgtctacagtatcaactctaagaagagactacaaaataatgagaccagttaaacaaacttgccagaactttccatatctaaatgtttcaaaatatttactttaggaggcttctcagttatttcagaagccattgctcaccacaaccaaatcctagtacaattcaaaatcaaaacagacaaacaaaaagcaatcattgctctgcccaaaacaatgtctacccatccaaattcttcagtcttccaatcaaggcccatctcaagctggcttcagcccacttttcctctcttactattcactaagcagatttagcatggtgaagataatgttagatttgtaagaaatgtaggagaaaacctagctctgtctcttatttttctatgaccttggaaaaagtgtctcgtctattctgagtcttaattcttatatctgtgaatgaagatactgatgtttttctgtctcagcataaggattaaataagatgaaatacaatgtatgtaaaagtgtcagtttgggaaatatagtaggctcctaacaagtgctaggtcccttttttggcattctttagacaaattcctgattttctctgtactcactgatctcagtgttggaaatgtccacccaatgtctctcttcctacttaacttttacagactaatttaagttagttttactgggcaaaacctttactgtcccctctggccagaaaggtctctttttctcaacttctttagtacttgtaaaactaatcatgtatttgccctttgctgatccatattattaagtaaaaaaaattcttttcctccacaagattgcaagttatctagaagacatgaatttctcatatatatttatatttcctctgctctgtaggaaggtgtcatgcctatagggaggcagctcattgtaggggaaagaaccaatgcttttgcatgagacacaccaatttccagctacaaagtggacaaaatccttgaaagatgatatattcatatacacagtcaggtagatgaatgtttgatttcttctgttaagtacatatgtgtccattaagtatagatacacatttttctttacgagtataggtaagattggatataggaagttgtgagtaaataaagttctggtgaaagtcaaaactgagccaagaacagggattaccaggcagcaccagcagcccttaagaataagcaagatgctgtgtaagatgatggatcagacaaaaatgccaataaaagaattgactaaaaattatcttttgcatcacttgagtaaatgtcatccttggctccctcctgcttccactccccatatttaaatccattccaaaaatatgttccaaatctgtctacttttttctgtttctacagctgctactccacatgaagctaccactctctatcatcaggattattttacagtctcttacctggtctcccatttctgtccatttttcctttctttacagaagaaccagaatgactctttaaaaacataaatcaaatcatgtcattacctgcaaaaatatctaataggttccatttgaaatagaatattttaatcctggcttatacgttttttaaagccaaccaactttttaccagaagatggtattacacatggatgactggcagatatttctctggtagaataagatttgatgctagtgatttgatatatggccaggggtcacagttcagtcaatactaatactgcaatttgtatttaaaaagaaatgatattctaggcattcaatatggaggaaatttttgtttcaacatgggccataccatgtatctttgtattgatgcaggagtttttcttgaactcttcatcagacttgcaatgggagtgccctgtttactcaggctgccacactcaaccttttgcaggaggaaatgcattagctagtgagtgcaggatctggctggccattttgggcactagcaggaacaggctcaatgagtggccccattttagtgcccagctgggggtgcctgctacccctgaaaccccagagggtgtgttacagtagtatcttagctccaccacccattgacagcgtgtgttatcagctcagtaggtcccttacctcatcgtgtagggcagctgccctttgccagtgagggcaaagggccaatgtgacagccttttttctgtacctgactaggtgagtcctgagctcttgtctggcgtctaaaaagaatgaggtcgcacggacacttgagggatggtggaggtggagaattttatttagtcatggttagggctgtcagtggagaggggagctggagaggggatgggacaggcagataatcttccctaaagtctggccatccccagccagcccttctctgaagtccagtcatctggacttcatctgaagccacctctcctccggagtccagtcatccctctgaagtctagttgcctctctgcagtcaagcagcttctctccctctaccaattgaatctggagtctttataggcacaggatagggagcaggacaggccataggcagttttagaaaaggcaccattcaattggaaaaaagacattattcagaaagaacaaattgggagagagcaggcaaacagggatagaagtttttacattgggttgtgggtttcaggcttttcagctcgtaggtggggttttgccaggacctgccgctgtctgcctagcatttctctgcctcctgcccctatcagtatagaaatagtgaacaaaccagcatgataagtagcccttgaacctggctttcttgtcttaagtcttcctactgtgttccaatgaaatactccattgtgtctataaaaagcagctgagtttttgtttacatgtctaaaaaccaagaacgaataaatactgcagtgtagtgaaaactacaggtcactttgtgttatttattttatctgagttttaccaagcttcctgataatttcacagaagactaaaaaatcctgtgaaagctgagacctttacattttctgaacttttataaaatgtctttatttggttctaaatgacctctgataacatgctcatgtcaggagttgaggttctatgtacattctacccacccccttcccaaacacactaaaagttcttctttgataaaaatttatagttcttggaatttcagtgacccaccatcctaccagatcactttcttggctttattatcatgtat

SEQ ID NO: 66203 - DNA, 845 bp, Homo sapiens
gcagcaagagttcttaagttagcaggataaatcctgccaggactgagtccttcccttcaaggcagcgggttctcttctggcccaccatatatctatatatgttttccaggggctggggcctgaaatggaagcttcagaactctgcccagttccctattctactgtgactgagcttctatccaggatgcaagacacattcccctttattctccatctcctctttttaagcagaaggaaagagtcactttcattgctgcaaactgcactgccaagggttgggggaggggtagtacaagcacagcctcccagctgatgtctcagtaggatgtgtgcccctacatccactgattctgtgtccaacacagcactcggacttgcctaggaattgtggttcttgtggcctaaactgcctttcaagtttatttagcaccccagagcactttagcctgcagttgcaaggcttgccaaaactcaagttctgacaactgggatgagcaatgggcaattccctttggctaaggctggtctaaatgctccctctatggatgagcaacagctgagtttagcctggttttactttccactgtgacagggcagcgctgacttcaatacaggggctcacaattgctgcattctccttcccccaagtgaacagattctctgcatcatgtggctgctgctgcttctaggtcagagtaggggaacagaagaggggtggtgtcagctattcaagtccatctgtcctacccccttcagtttctctttctgcaatataaagtaaaaactaggtactgtgattgctcacctgatttttggttcttatgaaggtgccttttttggtgtag

SEQ ID NO: 66204 - DNA, 3476 bp, Homo sapiens
aatatgttcacaatctctcccacatatgcatgccacacacacacacacacacacacacacacacacacacacagtttatcagcaactttattgaggaaaagtttaggtctggagacaggaggtagggatagaaaagtacctggtacatagatatggagaaaggaattgagtgcaggccagagagcctgcagccttcagtactgggttagaacagctatgtgcacacacaataggaagccattgcaatgctgaaaactgaggaacaaggaaggattctgagaggtcatctaatatctttcctgttttcagacagctccagatttaagctattctgaaagcatttatgtggaatttgaaatgaaatgtagctgcttagtctttaatagaagacaaacaaaatgcaggagcttgtgggtcgattctgaacaaggtatctttttttaatgcatcacactggggggtgaacacatatttgaaagggcttagaatgcacataaaggctctgtactttgaccttgaccaatgccagagaatgcaaatccccacagtaagaaactaccacccagaactataaataaaaagaaaatgagaaataaatgagctacatgttggtattttgtgacaaatcccccagattgatgagaagaataccacacaaactcatcctggaatgttgagatccataacatatgtacaaaatgcaaaagccactcttcttaatgcttctttatgggctgcttctccatggggttgtcctgaaaaaaatgtgttttgggaagtaaaagagaaccttcactctaagatcttagttctgcagtgcttaaatccctctcacagtgacaaacagagaccataactgatgcttttgaagttaggtttaatctaagaaaagattcttaagcttttaacaagactctggatagaatagctggatcaggattttttttttaatatcatctgaatgtcactgaacaaagcatttggagatggaggaagcatagggcattattaactggaggaaaagtgatgacttttccctttttgttcattcttaataaattatgtgctttcagctaaaataaatggggctcagtattcataaccatttcacacttcacgttaactcttttttgttgttcctcagctccctgagagccaagttctttatgaaggcttgtttttattacctgaattaatctagagttctaggtggtaaagattatcccctgaaaccgtgaatgagaaaatggatataggtgaggtgcttttcctctgctgcttatcataatttacagtgatctggattgcaagttttaggggagattttgtccagttgtttgttggtagatgtttaacaactggctctccagaaaagaaaaataaataaataaaaagagaaaaaaatccccactgataaccgtgtttgacaatttcgttggtataaatactctaaccaatgttgaattcaacctaccagtgccttaacaactggccaaattttgccaattggcagttgttagtgctgacttcaacctttcattatctcttttagttttgcttctcaaaatcctctcaatcaaaattggaaagatcatttgaataagcagaaaccaccaccaccatcaccaccaccacactacattaagtcaagcaaaatcacaatgtacccataagtatgtgcaattatcgtgtcacctacaattttttaaaaataaaacatttaaaaaagaagtcaaactgaatactgaaccctgtaacacatcactagggaatacagtatgtccttatttaaacttgcctataggtttttggatatactgtatgttatagaaacttaactcttatttatatcaattagcctatggtaaaattatttctttaatgcagtacattgtttcacttgaagtcaaacttttcaaaaacctattgacaatgttataggaggactcactgtataccctagtttacttttatgtctatttaaggtccacagagagtgtattaaaaatataagcccagtcctcacttctggatggctgtgaataataaaacataacctattcttctttatgtttttttttaagttcaaccaatttttacataaacaaaagtgatttattgcctttaaccaaaagtctgtattttggcaggaatattgagttcatcattgtacagttctaacccatgagtgcctgcttactatgcctgaaatattctcttgcattttctgcctgtcacagatgactctttgtggtcagcaggcaaaaaagaacacaagatacttagctggtgaggtaacatgttgattttagctttgaccttttaaacctcagttagtttttattatttggtttgttcaggaatgaggctaacattcttgatgaccattcattcagtggtcagctagggcaataacattgatgctcctgtaattgccaaacaatggaaaggaagtgatgaagaatactcatggctggaatttaggcagctaggggaggaaggtacagtttggaaatgatggctacttggttcgtgttagcacaagagtcaggcaagagagcatttagggagaaattagaggaataagattgcatgtgtcagtccaggataacatagtctagataaactttgtgtctccagtcctaattattaacttaatgcctttccattatctctttggcttggaatcatggttatttccatggaaaatgggctaaaatatcagggcataaataaggagagtctatatgtgttatcctgatagggtggtatgttagtttattcttgcattgctataaagaactacctgaaactagatagttcatattttaaaaaggtttaattgattcacagttctgcaggctatataggaagcaagcttggaagggctcaggaaacttacaatcatggcagaagttgaaggggaagcaggcatgtcttatatggccagagaaggaggaagaaagggaggggagaggttccatacacttttaagcaaacagattgtgtgagaactcactcactatcatgagaacagcaagggagaagtccacccttgtgatctacattacctcccaccacaccccctcttcaacaccggggatcacaatttgacatgagatttgactagggacacaaattcaaaccgtatatttgcaaccctgcctgttcccaaatctcatgcccttctcacattgcaaaatgcaatcaactattctcaacagtcccccaagtcttaactcatctcattatcagtattaacacagaagtccacagtccaaattctcatctgagacaaggcaagtcccttctgcctgtgagactgtaaaaaccaaaaacaagttaatacttccaagatacaatgaagatatggggattggctaaatactcccattccaaaaggcagaagtaggccaaaacaaagggctacaaaccccatgcaagtctggaaccaagcaaggcagtcattaaatact

SEQ ID NO: 66205 - DNA, 712 bp, Homo sapiens
agccaacccctgtaaggcctgcattatgtaaaggagagagctttgaaaggatttggcctgagagcagtccaggcagtgggacagagaatggaaagtccttgtaccttgttctagaaacaagaggccaatgtggttggagtgaagtgagtgaggggaggattgtgtggtaaaatatgagactaaagattgcaaagagtacagataagaaaaagtttcaagccctggtcttaaaacattcatttttcttactaaattctaaccatgaaatataacttctctgaattgattaaagtgttcttttccttaccagctcaaacaggaagaatgtattttattgggtttgcttaattgtggagtcatgatgtggttgccaaggttgtctagggctggtgatatcactgtggttcctctttgaaggtgagccaactgacctggacatgtgtagctctagggctagagggttatcctccacactactgactctaaataatctctaagtactggcttgagtcccctccataactgttctaaaatttaacatctgtttgctctcctatgtataactcatattatttttattatgtaagacattgacagagggaaatattgaataatcggccatacaagtccatcctaccagatccttagtactcgtattcttcacatctttaatattcatggcctgtcagctcactggggtcacataatgacc

SEQ ID NO: 66206 - DNA, 1704 bp, Homo sapiens
aattatggcccacatatacgaaggtggtcccataatgttataatggagttgacaaattcctattgtctaatgacatcgtcattgtcatgtcatattacaagacatcactaacatgtttgtggtgatgctggtgtgaataaacctactgtgatgccagttgcataaaagtctaacatatacaattaggttcagcacctaataattggtaatgtacataaacaactatgttactggcttatactttttattgtaattttagagtgtacttcttctatttacaaaaaaaaaaacaacaacgttaaatgtaaagctgccttcagcaattcctttaggaggtattccaaaagaagtaacactccatgcgtgttactacctctgaaaatctttcagtgggaaaagatgtggaggtgaaagatagtgatattgatgatcttgaccttatatagacctgggctaatgtgtgtgtttttgccttagtttttaataaaaatgtttaaaaagtaaaaatatgctttataaataggaaaaaccttatagaataagaatataaaggaagaaagtatttttggagagctttgcaatgtgtttgtgttttaagctaagtattataacaaaagagtcagagttaaaaaattaaaatgtttgcaaagtgaaaaagttatagtaagctaaagttaatttagtactgaagaaagaaattttaaaaataaatttggcctaagtgtacagtgtttataaagtctacagtaatgtcctaggccttcacattcactcatcactcacactctgactcacacagagcaatttccaatcctgccatctccatttatggtaagtgccctacacaggtgcaccttttttttttaattgtcttttatagtgtatttttactgcatttttttctgtgtttaggtatgtctagatatacaaataccagtgtattacaattgcctgtagtattcagtataataacatactgtacaggtcagtagcctaggagcaataggctgtaccatatagcctaggtatgtagcaggctataccatctaggtgtgtgtagcaataggctgtaccatatagcctaggtatgtagcaggctataccatctaggtgtgtgtagcaataggctgtaccatatagcctaggtatgtagcaggctataccatcttggtttgtgtaagtacacactatgatgtttgcacaatgatgaaataatctagcgactcatttttttggaaggtatccctactgttaagcaaagcatgactatagttagaacttctattgttccctctttgctctggggccttacgcctgctaatctctctgcctgaaagcttttgccctaagcctccatgttagctctcttgttttagctgcctcatacccatattttatgtatcaaacaacttcccctttctctgagaatcttttctggatatctcatcttggactaggtgcccataccatgtgttgccatgccatcctgtgctgcctttattatacatagatattgtcacactttattgtaatcagttccatgccttcccatagactgtaaaaagtttggatcaccttcattttattcatcatttcattccagtatctctccccatcccatcgtttctagcttatagcatatgaataaatgcagtttccaagttaaggctatgaaaaggtatttttgagcgcagaaataagtag

SEQ ID NO: 66207 - DNA, 1862 bp, Homo sapiens
tggtatttattgaataatacaaaagcaatcttgaataaatggattttaataatgatcctcttggcttatgacccccgcagtcctccagtactaatgaactagctttgtattgactcagggtctaggctggggaatgcctgattcatatgtcttggtctcctgggaccaccaaactttgttcctgagatgcctgtcacctgggtgatatgttcatgactcctttcaacacctgaattttgagcagtgctttgagaaatgaaacctacaggatgaaggatttttttgttcaacaaagttagtaatagactggtgcttacatgaactatttttaaggtaatatttatataggtaatatacttaaaacaagaggttgatataaagagttgttcttcaatttataacaagctatttggctaaattcaagtattttgtttctgaaaaagcctaaaaagtataaatctaaactttagaaaaatgagctggtagaaacagacaatgctaaataatatgttactttttctaattgtttcatttgatcagtacacagtaaataagacatgcaatattttcttctcttaccaaacaagaaactgaagctcagagagggtaagtggtgatgttaaatataacaagggaagaatgagtggcagggttttatgtctccatattctggtcccctttcgtttccagtacatcaccctgcttctcatcacttgaagttacaaggtacttttcacaatgtctactcagcttgtagctatatgttacagcccacttcttcatttaatttagtcataatgtggattttgttcagagactactaggtttttcatgttcaattagttttaatattatttgtttacagtcttttaaaaaattacatctcaaatataaacataaaattagagaacagagaaggcctgtgcacttggcccaaaagtacccgattcatagtgtgacagcctgggtttaagtcctgtgtgatgtagggtgagctactgcactcagagagagcagtcatgctgagccagtgtgggctcctgcatttgccaaccctgtgatatgcccacaattggatatgaatgaggggaagaactccagcaggaagtatttgtaagtaaattggtcattctggttgcattgccaattagactttgcccagcacatgaacgactttgggcctattgatatttgctgtgacacttaaatgttcagcacagtattgattctgaatgtcaagccctctgcttagatgctgtttctatgtgatgagcagattaccacagaatactaattgaaccatttaaacacacacacacacacacacacacacttttttgtgttcacagtgctgacaaacagcaattttagtgcacatttaatcagagcctcttctcaactttaacggaagagaaaaaaagcaatcttttaagtgttgctgaatagtttgtggttagcctggaatgaaatatttttaaaagataaattgcttcccaccagcatatatatatttctattttttcctactacaaaataattgatgagaatatttcataaatataatttcaaagagttaaaagactgtttttggtaagtatctaccaaagacatttcagttgataagtgttagtctacagtgttgtaagaataattcttaatattctgcagctgatgatttggcatcttggaaatcataggccaagttaacagacaaagtagtttacattcataccatcttgtattttcacaggtgcagagaaaccgtattaaaaatcttccagccacaaaccccaatacctgtgttttgcttcctgcccaacaggagatatttccacctaacaacttcctgccactgtagaatt

SEQ ID NO: 66208 - DNA, 1585 bp, Homo sapiens
cccaagaagcagactgaattcagtgtctgtctatacaattttgtactgaaagtaatcttgcttttcttatcttgatttgcagtggccagttaatttaggcaaagtcgatctgggagtgaggataaataatagcaagaaaaagaaaaagagtattgaatagatttttttttatgatgaacaaacaaaagtctttatttgtataattaagcaaagcttttatgggtggaacaaacattttagaaagcatagctaattttggctgcgttcatatttttctgtgaccttgacatttatataatctggatgcaaatttgtgattagcttagaggacaggtgaggatgaactggctaatgggcaacagtttagagaccacacaaaaatatcaccagtctctaagttctacatgccatgaacagaatcacaaatttccaaagactagttaacttagagctcaacttctttcctttaggaccaattacagatggccttgaatattttcagtgctgtcaactgatagcttatgaaaaaacctatactatttttgtacaattctaaatgataagtagtccctttacattttgaaaccaaaatgaactgcctcataattttctctcttgcattctatttctgttcttagagaaaaaaatagacaaataaagaagtaaacatgtaaacttatttgaatatattgggtcttctgagagctatctattcatcttcatgttcttcaagtatttgttgttcagctttctggactgcctcattaatacagttggtctttttatgcatgagctcattttagaattttacattttaaatgtgttagccagaaagaaccatgtttacttagatattatctggcaattgcagaacttcatggaatgcaccaccttcagcattgactcatagtgagcttgcacaattagaaagtcccatatctttctcttaagactgttgagccagacattaccaactgtacacttttataaagtttgaactttttttcagaattaaatttagtaagtttcatatatggcatttctctcaacctgacttgtctcttaaaagttctatgttcacttgactcatgatcactagaatgcaaatctactcttcctattctgtgtgttgatgagactactaatggccagcacagtatttaagtcaagatattttcatttcaggggttgtcatcaaataccattgtgacatatagtgtcttttaattctaatcaaatacaaatcaagcttttaggctgattattttaatgcatgcatgggtcgagttttagaaaactctgatccctgacaagtgtatttaattcttatttttataatgtaataattcctgtagtattgatatctactctttttaaaatgataaaatttacactttctatgttacatttatcctggtttatttttgcctaggttccagccattatatatatatcatttgaatatacaatctgacatctgttgtgttagcttggtcagttcttaaagtcatactaaaatgtcttctgtcaatccttaatgaactatataatgaagagaaaggcaaggagagaattccattgactg

SEQ ID NO: 66209 - DNA, 1582 bp, Homo sapiens
caaatattttgcatttaaccagaatctcccctgaaaaatctgctgtatctctttcctaccaactgatgctaacttctaagcaatatcatatgctttagaattttgtttcattggtacctcagttttgatactaatttttggattaattcaaactattctgcagcatcaaaacactccccacccccaaatctcatgacttaactcagtgaaaaactgtcattacctaatgtctcagtgtgctatagagaaggagaagaatttgcctgctgacactcttccaagcagggactcaaggactttggctccctttctagagtggtgccattatctcatgcatgtagatgaggaaaagtgagcagatggaaaaccatgaaagataggtatgatcagtttctttttggctactgtatggacaaataggctctaaaaggtaaaggttaggaaggaatagactggttgggagactactacaataatctagatgagagctgctgatgatcaaagaggggagttagaggggaggtagtgaagagacaggatagtagataaaaatttagagtacaacccataagaccaagttatatagctaataagtagcagaacccagagtcagatcttgtactaatgtctgagtttattgcactattgcctatggctttaactttcttcggcttatgtgtggaataagcaaatacttaacagtcttctttttgtggctcgagatacacaattctcccctattatgatggattctggctagcaggttcacaatctagtcatttttgggcatggggagaggctcttacccattgagactgctcatacttcttgttaatgaataagctacactattcaattgctcaatcaagggctttcccccacccacaatcctcatggatttggttgttccatccattttcttgtttaccaagaggcaagtcaggtggtctgggattgctgctttgcctctagctggcttcaagttgaaatgactgaattcaacaccattgttgagacaatgtacaacccttgttctttaattactcctacttactttcaccacatattgtgattcatttgcttaaaaccactgcaatagttgctgccataacaaatgctttcctgagagtcagattaatgttcccctttgtttccagcttatctgcagcctgtctgcagtaatatactcaacccaaacaagcgtatttttcactcacagcctgccttttatgagtcccactgacagttccttaataaataatacatttctaaatgttcctaagcttttctccttattaataattccagcagctttcccatggctgaggggtttaatttggtcactgactcgattttattcttgcctgtttctctacattttactttttaagactaatgtctggacaagaaggaggttaaaacagtggtctatcatagcaggtgttcaacaattatgagttagtacacactacacattcggatgtgtaatggagactttcttgggtgttttttgtttgtttctttttgtagctctggcccttttgccatgagaacaaaacaaaatccttgaatcccatggaaa

SEQ ID NO: 66210 - DNA, 760 bp, Homo sapiens
cactgctgatccctaatggagcttccttccattattccaagagctgcaatgactgctgcaggaccataagggtttcttagtcccttcagtggcaccaaatcaactcttgattcttcctgaaggggtcactgaggagccccagttagctgtcactttttgagaaattattcagtctcctattcttacctctgggaaacaggcctgtgaaatagcccatgttgtcacatttcttgttgatttttagttttttttttttttttttcttggctatgtttcaagttagttcgttttactgcagtagctaagggaaagttctgaagttttctagaagaatctgctgagctgacttcttggcagccaaaaattcagtgttctagaatgcctggccaaagcacaaagttcacttgtaaatagtaatctccctattcacagagggcagagagacgcctgtgtaaatacctggagtaatcctcagttttcctaaattggacagggaaacaagggcagatttctggacctcattcttacctgactgaatcaacatctcaagtgggggacacgggatctgccttttaaggcagtgcctattccatagcaactttttttcctcactaaagttttaagagctctgatataaactaaaacatttgaagacactgaaggattttgaaggttgcgctttgggaagattaacgtactagcgtaatacaagatagattaaatcaaggagaaattggaggccatgatgtagttagaaagt

SEQ ID NO: 66211 - DNA, 695 bp, Homo sapiens
ctggggtttgggtaggggtggcacaagcccttccttagctgctctggctcgtgtctccttaggtcatgtgccacactagtcccctgtctctgagcccagttctgccctaggacttgcttaaaaattgctatgcttgtgttttaaagtttacctaggatcccagagcactttggtctgtggtagcaaggcttgctgagaaacccaattttcaactactaggaggggtgattcccctctggctagggcttattcaaatactcctttcacacatgggtattggctgagccctacacgactttgctctctgctacgacaaggcagtgccaaattcagtacaaagtcctccagtcactgtgttgcccctctccaaagtgcagagaatttccacaccacaaggctactgccagggaataagggaggcatgacattggtgattcaagtctgtctctctgaccctattcaattcctctgttaacaatatgaagataaaaccagatactgtgattactcacctaatttttggttcttgtggtattttttgagtgcagatagttgttaaaatttgatattcctgtgggggtggcggggaacaaatggcgtagtcttctattctgcattttgccccacccttctcatttttattttaatttatgatattgctttagaaaccttggtgtttcataaatatcttatta

SEQ ID NO: 66212 - DNA, 542 bp, Homo sapiens
tattacacaaatctacaaattatttccaagacttaatttgcccagggttatcttcctcaatgctagaagtctcgtgagcaatttaggtcttatattactttgcagcaaatattcccattcatttcagagatattcctcccttctcaaatttccactcactcctaccgataatctgccaaactctctacagggttccaagttttgagaacccagataaaggccctttgcatacctgccactcccaaggcccagctaaagtcctatcagtcccaggagatcgttggttatctttctctacaaatgcctgcggaattagtcaccagtgctactcagtctcgcatttagttttagtgttgttgtttcactcttgcgtaaggccaaaagttttggcacagtttgatgctaaattgtcacttttttttttacatttttattttatttcatcaggttcttaagaaagtgctgaacgcacagaagataataaggcatctggactggaatatgtaaaattacttagattaagcgagtaaacctgtttagtc

SEQ ID NO: 66213 - DNA, 2910 bp, Homo sapiens
accatattttgtaagaactgaagacattccactttgttcttcccaccctgaaaacaactgcatgccagtctgcgtttgtcatctctccgtgtccttcccttcatcaagtgtccaattctcttgaataacgagaaaatgcacatgagatctgaatgcatacaagtcgcttaacaacaacaataaaataataataataatttaaaaaaaccctgaaagtgaaatataattaccaggttaaaaaaaaaatgcgcccagtttcgagagcctatcacagctcacgtctgggcgcgcagtacccccccgacactgctcctgttgtgtcagatagtggcagtgttgagcccaggaatacgcgcggagcccgcggcgatccccgcggccgctcagtcttcgcggcggactccggcgcgcaggagccactgggccgcaagggcgccggggagcgggaggggcgctgggggcggcaaggggtcccagatcccaggccacgaactgttttccttttccccgggcaagagccccgctcccttcaactgacagaaattcactggggcaggggggcgagtggggagagaggtcgctcagggctcgctactggctgcgcctcccccggctctggtctgggaagcggctctgggccctccgggcgagcagcttgggcgccggcgccccctgcgaggaagatcgcggggtgacggtcggtacccgttcggctgggccgcgctgccgctccgatccacctcccttccgcgcccgcgccctcccccttcctttcactaggagtccgggattcggagagggcgcgggaggcaggcacacgggcccgaccccactccagcgctcaccggggacgcgggcgggcggcgacgggacgcggcgggggcgcggggcgggcgcggccatggagcagcagcggcggcggcggcggcggcggcggcaacactagcgaccgcgggcggacgagcgggcgggcagggccgccgggctcagcggaccgaactgcacagctcagcaaaagcgccctcgccctccgcgcgccgcctcctgcgagcccaaacccaccaacattttttaacgctccaacccatcctttgaagaaaagcaaaaaaaaaaaaaaaaaaaaaaaaaaaagcaaaaaaagaaaaagcattgatcggagagacggggatatatatatatatatatatatatatatatatataaaattttttttggctcctgctaaaattagcagggctcgccgcgcgcctgtgtgccagtgtgtgcgagtgtgtgtgcgtgcgggcgtgtgtgtgtgaatgtgattactccaggactcctcgggctccggagacgccattttcccccttgatatctctctccataaatcggtggcgcggcggaggcggcagagtcgggcgggaagcgcggggccggccggggcgcccgccgctcgccgccgcctccgcgcgcccgggggccccggcgccccccgagctagggcggccagctcgcggctcgccgtttgacagatgctcatcgccatggagttgccgcagcagcacctttgggggctcgggcgagcgacgggagccgggatctgagcgagcgccggggccagcggagccggagccgccgggacatgggtgagcacgcgcggcgaccttggcccgggagcccgggcgcccagcctccctccgcgccgcgggcccccgcactcccggaaccgggggcgacgtgtgtgccctgcatgcaaaagttcacgtcgccttgctgggtctttgactttgcacccggcgggaagggggagaccgggccgagggggcgggatgccggtccgggcgaggttgcaggagatgggcgcgattccggcgggccggcgggtgggcggcgatgctggctcaattggagtggctcgttggtggcggcgatggtggaagctttgggctggagggctgggagcttattgagtttcgcctaatctgatctaccccccctccgccccccgccttttgcaccctccctcggtcctgcagccggctggcggggctggcgggtttggcgttggtggagtggactcgggagggggagggggtaaggaaaggggtgggaaggcaggattttttttttctctctttgtaacttgcaggttaagtggagctagagagctacattgtaacctagttggatttttttggggggggaatgtatcagaatctaacgtgtcgttaatagaaagaagaacaggcaagaagtggtccagccggcgaaggttggtgtgtgcttgtgttgtgcctgtgtgttagtctttttcttaaaaatcttaatcaatggatttgagtctctttcttgtgctctctggttttgggactctgaaaagataggaattcccttaaaagcagacgaatgcctttttgaaagcacgcattgtgtgcgtttctagaggagccgtgggcttgggaatgaacggcaggcttccccgttcggtggtttccagtgggaaatcactccggaaagggaacccttcggtatcgatttattgtttttgtcttccaaaccattatctctttgaccgaaatactgtctgagaagttccgcagggacaaagtcaggtaaactggaccgggcagatctttggcaagatggtgataacggggatgctgttttcagtgtctgtttgtgatggaagcattgttgggtaatagcaatttctgatcggtagagcatgctggttctaaaaaaataagttaactgccgaaatactgtcttccagcccccctcccctgcacagtacagcacctattccccccgcccccccatccagaccgcttactacaagtctgaaatcggatccaactggaaatattttcattggagattgaaagttgtgcaattggaaatagatgaggctagaggtattgagagtgtgga

SEQ ID NO: 66214 - DNA, 1457 bp, Homo sapiens
gaaaaatattctatctagcagttttggaggggagggaggatgtactctggaacttatttgggtataagtcacatctagccaagcaggattcccctggccattcagagaaataattctttaggttcatgctgttcattttggagtgtacccataggtctatggctctgcagggcaaaattacaaagtgttaagtatgaaacagactttcgtcccaacccattcattgctaaggcaagtgtgggtcataagagatccacaaagtgtgggtaaaagactcatagtggcttgtctagcatctgactgcctgtgaacagcagagctaggaataaagacaaagttttggactcctatctcagtattctttctaaatacatctgtttcttttccttgcccttttgtttgcctggggccgacaaggctgttatctcctaagcaattttatctttccaatcctcctccactcccagcccccactgccgcccctgcccaagtcctgcaggcagtcatagaagagttaacttttgttggactgaaggcctgagccaagtacagagtgtccattgtgtgcccgccccctcaggaggagtcactgactgctggaatgtgacaaggcaaaacatttttaccttgccttggcttccccaactctgagtgcgtgagcctgtgcgtgtgctcacacgcgcattttggcagggctgaatcacaagaggactcgcagttgatacccagactcaccaaaaaattgagctgtgaatttggggaggcaggtacgtgctgggaaggaagctaaaggagaacaacagctttgtgtgctgatgaagtaaacagacaggttaggtttctttgctgtttcttttgaaaacttattttattttatttgtctaagatgagggtcacatatggacaccaggggctggattataatcctcaggataggcagcaaatttggctggggctgctgcctgggtgggtggagctgcagtgggagtaatttgaactacacgactttgaatagctgtcagagggcgaagccattttcattcagaaaaaccttgaaatcctccaagcacccagtcctgcaatggatgctataggtaatgtcagcattatacaactacagttaggctcaacctgaggctgagctgcaatcatgttagagaaataagatttatatgcccagaacagctagaagacaatacaaggctggtatttagtggcgaactatacagctgggtgcaatgtcagtccggccaaggagtgagcaccacggtctggagtttacagaatgttgccatggagaattgaagacttggggatgatctggaaatatggaaaggcttgggatctttttattcatttgtttattcattccttcgtgcaacaaacatttggggaacaccaattgcatggccggcattgcaaggatgagaggaagtggatataagaacagattctgt

SEQ ID NO: 66215 - DNA, 2490 bp, Homo sapiens
tcagggagaaggaacggttgcaggggtgctggggaacttgctgagagtgactctgtgtagaggagcttaaaatgggagacatgaaaggggagccttttggtaacacagttttcagcaaggagagattggtctagggttcttcccttttcctggcatgtcctgagaagcacatttctctcttgacctttaatggttgtagcaatttcgtttacacgtgggtgaggaggggtctatgagaggaggtgtttggcagagggtgaggggtggcttgctttgccaagggtgcaggttgcctaacctctggctgctgcacccatggttttcttctcctccacacaagtgggtggctcagagagccttctaccctcctggtggttcaagtgtccttcccttgccatcctattttgtcagcactttctctggtcactcccaagtgtactgctttacagaagacttggcctctcttcttctgggggtgggaatgtggtgtttcaaactcctgggagtatgagcttcttcctccacaacaccctcatcctgacttggagatgaggtctccatagcatttctacacaagaggttgaatttcccctcttgtttcattttagtttttgtctcctgagatttaaaaacatttttaagtaccacatttctatgtattcattagaatgcctggaaattttgtttcctgatagatttctctctgattatgttgtagctaaagcagcagggaaggtggggaacgaccttttctgcagggcagcagggagcattggacatgtcagctgaaagtgtgagggaaagaaccttggccttggagatggggagccctgggcaccggctctgcctctgtgactcacaatcacattcggccagcatactttacctccctgcttctcagcttctacatgttcaaaaaaaagaaaagaaaagaaaagaaaagaaaaagatgaagaagaaaaacaaagcagcattttccctctgaggtcttgtttctgttctataatctagaaactttaagggccattctgtttcatcagcagggcaagtgtttctctttaagaacgctcattactataaacagatttttgacctctgtttggacccactgttccgtcatcaaattgtttccttttagcccgaaatgtcaaaagatctaaaatcatgggagcaagggtcagagttgagcttaaaatgtggtgatttaccaaactcgtgttccgtaaatatattttgggaatatttggttatccctcaaccccgtcttctatttttctctttttttcttcctgtgtttgggattctctgggggtttaaaacatgtagcttggctgtttcctcctggtttggtgttctcttgtttgtttttttctctttggacccccccaaggaaggttttttggtgaattctatgccattgaaaatgcatctggcagagtaaccagcaaaaactgtgttctgttcagacagaaagtcatttattctctgaagcatggctggtgtgctctgtatgtgaaattctagatgaggagtacagggtctattagaaagagcctccactctggaagtggattagaactcagataccctgattccaggaacatggtctctctgcctctggacagagacagcctgcataatcttaggcaagacttaacctcttgaaacgtttcctgacagttggaaaatcagggataacagcagcccctccttgttgatgtcactgtggtgaggttgaagttgtccgttggacacttaggacagccctttgcttagtatgtcctgctctcattgctgtttggcatctctccctgcggaccatccataggagcttccttagttgaggcacagagtgggcacacagtgatctgcagtggtgctgggcacttgggaggcctgggctgtgttgaattatgttagctggggggcagcaccagtgcctgatgtctgatgcctggagaaacttctattagttgagcatatcactaatgattttttttttttttttttttggtgttggtggtaggaattgctatacggatttatttagagatagttcaaaggtcttttatctctgtggtcatttatctgccaaaccgggattactgctgagcacaaaggatgactcaaaatgaaagtttcaaagcagtgtcaaaggaaccatcaagtggggttcagctggcggctgctactcttccagcatttgcaaagtcggcccctcttcctcatcgttgcaattttacatcctcaaaaagtcctctcattgctacattgctagttgacccgcagttatatttcctttttttctttttaataaaaggcaagagaaacaatccgtttttgccttttcctaccacatctttgacttttctgattcctgcaagtttaagttaaaaacatcctaccttcaagctacaaaatgcagcacatcccaggacatccctcacctgctttgcttgtttattagacacaagtggctttgttcagaaa

SEQ ID NO: 66216 - DNA, 1754 bp, Homo sapiens
gccaaagtgtgtgcagagttcaaggagctgtatgaatgtgccctccttccttgcttcctaatttgggatgcacagcattcatttcttcactcactcatttagcacatggtcactggcaatgggggtttactttcaaaggagggtttagtagctgcccatagagttaccatcagataaatgtaaaaggggccagttttctctcccaaggctagggagacacataagcaggtgattgcaacacgtgagactcccatcttgatgctgttattgttcttttcttttcaacatctaaatctggtaatcatctgtatctgctcacagtttggggaataatttcatataatttcacatctaagagagactataaagtgattcctgcactaagtctggctatcccagggcctctgttcttaatgagttacctgtactgtccaaggaattgtgtagcaaaactgggttggggggtgtgtgtggaggggcagagtctgggtttggggaagtagttaggaaacaaagcagttatgtcttgactcaaccataaccagcctgcccttgcttgaaagattcggctttcatattttaggagcacaggttcattttgttttctaggctgacagtgaatagcactgatggtttattcaccaggacctttcctgaattataggggcatatagctgggaaggcctttagggtcattttgccaataggaacccacagaagttaagggacatcctcccggtgctatgtgaggttgtggcagagctgggacctcctccccctcggccccctgacttcccagcggctctgggtgtgctgtcacctcttccaggaagtgatgactcagattattttcatcaacatacctcccccctccaactccgttttcttcccacagccaccaaagccaataatagactaaggcagtttcagttttagacaatttccttttttacttagaaatctatggttagaaaagggtgtagggtggtaatagtggccaggggtggggagggaggcatgagaagcttcaaaggggatgggcatctcctggctctctggtggcctggatggaattagaaccaagaactttcatatgaccttgagtagatctctaaaagattccttccctctgaagttttttgacttttaagttcagaagggaatttcctttccaccaattcagggaccattcctaaagcttcatgaaacccttacataatttttaaactttaacaactaactcatgtgagttgttacacatagcttgtaagtgacatttcaagccttcttgattttcattccaacagttctagatacataatacattcttttcaaggaaggtagggactttgttttgttgtagtaactaaagctggcaatcattgaaagagattatgaataatcaaataataatacttatctcttgagttctgtatgggaggcaccaatctaagcctactacctgcaaatgtatatgtaatcctccccaaaactcttaagaggtaaatcttactgttctcattttgctgatgagttaactggcatggggaggttgaataacttgccaaatgacatctagagagtatataaaagaggtagtgtttgaagtccagttagtctgatttcaaagttcatattcttaaacacaaagctatataggaccgcctcccatttgcagattagaagtcataaactgtaataatattactttcaaatttcatcacgtgtttgattctaagtgacatgaacttgaa

SEQ ID NO: 66217 - DNA, 2536 bp, Homo sapiens
gttgaactttgtgactaaatatgatattcttggaatttagcttactgctccttgaagctgagcagggctatgcaattgtattttctttaacatgctacgacttgactgcagacgccctaaacccctgatgtcttctgcatgtacgatcaaaaattcctagctccgggaacttgctgtgctgagcagacatccagtaaaggaggaaacccaaagcctgtgtcccgacggatatataagtgaagacgttagtcaaaacaagacgttagtgctatttctcacccttgcaatggacaggagcagccatattgtatgttgcatttatttagacccttctgccgagaataagtgctctgtaaacatgccctatttagccctcaatgcatatactgctgcctttctgaggtcttgaagtcaatgaaataaattactctaaaaagaagtgctatgcagccccttagaacagtaaacaagaacagttcaggtcttttcaggaacctgaagccaagggatggtttgtttttttggtctccaggaagaaccagtacagaaggaggtattgacctcgctactttggctggcacccaccaggtcccttcctggcgctcacattccccaagtgtgtaactcaacacctgtccttctgcggcaaacagagcttacagtgatggctgagcccctcctgccctggccctaccggcagctcgcacctttcacttaggatttcaaactctcaaaaaccagagtcagagaataaattctccctcaggattctggtttgggccaggaaaaaaaaaataatcagaaaaacaactcccacaagaagtcctgggatcagcacagcaatctctttctagctccagacctagatgagggaaggtgtagggatcttagagacctctaaatctcacaagtggctccctctgaaccagagaggggcatgtggtctgagtgatgtcctcttttactgtttgaatgccagctcatctgagctacacaacaccccctgttatttctgtctgacatggccaagctgaatctctggtaagtaaataattaatttggaagttggggatgtcagtggaaaagtcggctctgacggctcaaataacaagccccaaatgtgatagccactctctggccctttgagagacgacctgtcggttctattagatctggacagtcctgtcttccggcctgtctctccacattaaagtcaaggaactgtatctctccatctttggatcacatctctgtccccaaatgcttgtgcacactgtggagtctggtgttttctttcctaactccaccaggcccatgcaagtccacatgactcatgagaagagatgagtcgcagctccagtatccctgtgggtttggggaggggtcaggctgtgaataaaccactacgtggctgattttacatccttctctttcaccacaaaaacctcaatttccctttttgtggaaaacaaaaaccctctttcagtgttccatcaaggggactgtggcctttgaattgcacggtgtccctgagaaattttaaagattaatcagcttttttggggagtggctgggagaggccctattcctgtccattagggagtagcaggtctccccttctgttccttctgaccaggctgccatcttcatgtgtagatgaggaaattgatcagcctatgaatgatttgcaaatccacagatgtgtggctgagaccctgagggcattcatcacaggatctgcccggtccaaaagttcccttctcccatcacaattcagggccttcacagagctgggggagtgagtaatgatgggggcaaaagtcacacactgaagcaaatgaggacaagccctgaaaatcagaccctgttgaggcctggtccaggggctttctagtacactagttgagatcatttctaaaaggaaataacagaataaaatctcagataggcagtataagaatttgtaaatggtaaatgtgctataagggtgagtaagatgcattgcttattgcttgagaggatttctttgcccttcagtgtatctggatttgtcattcatgagctattaattaaattcgtactctctgctagtattcgtttcttccctgggccttcctgaagactgcatgtgtgtcctagctgtctgctattccagctctcctgtatattctgggagtgtgtatgaatcaacttaggcccttgttaataccattgttcttgcaagacataaaaagaaagtgaaaaaatttagtttgacattctaggatcttcccatttcacctgaaatgttatttaaagacttatctcttaccagtttctgacttccgtgaattccctgaccacacttccaattcccacttccatacttctgtttacattgctctgaccttaaatgtctcctctctctccctatctagtcaatacttacctctccttgaagaatccccttccttcctggtgtcctcagctcatgccttccttacctctaaacttctagagcacctctccgcagtaacagtcatttcctggcaaaatg

SEQ ID NO: 66218 - DNA, 1245 bp, Homo sapiens
agaactggacacagggtcagagacacccacggtgaggaggacatgtggatgccattcatctcgggcctcccttgggctcagagggaccacgttatgcctgggaaagagcagaaggtggaggcagggttgtgccctgaattctcatcagcatgcagccctttccactcttatcaaaatcaacgtgggtatttcctgctcacaggcccctggaggtgcagcaagaacagaggctggctgggaagggaatggaggagaaactctgtattgtagattcaatatcagctccatgatttcccccccaagggataaatattgtgctttgcagcttatatgatggaacagacttcctatgtgtacgattccaggaagagagttaataaaacctcttgataccttgcctccccggcagcatttatttgtctagcagtgaggctgtgtgctgttcatacagtactggtgttaggttgacatttgttttgacctttaaactttatgcttcctctttccccatcctctcccccgccccagcctccccacctcctgttgttcctcagcatgtgagtttgatcttctgtgacctgggcttttccaaaggttgactctcctgggcttggattgggtggggtgcaggcttttcctcttttctttgctcaagggtcatcgtgtgactgtaaaattattgtctggcagcagtgcgagcgccatttcacatgtggggagtgtgtagagttttgttttttctttaaataagaaaaaggaaagaaaacacctcgaggacccacatctgcctggagagcacagggctaggcctcctgcactggctggagaacgcatcccctcctttggagtcctgccctggcccagcagggactgggaaccgcatccctgggaatgctggtgcccgtcagggagaggaacattcttggctctgaggcttcttcagatcctgggggtattttcataagagcgtaaccccagggctaaaggaaaattccactcttcagcagagtgatgcgtctgttcttggtcatcctcccaagtaattatgtgccgtgcttaagctttgagctttgcacttggactgaactggtttgaatccagctccactagatactaccagataaccttacccaggtttcttaatgtttctgcacctcagttttctcatctgtttaatgggattcgtggggaacattctgagaattaaatatagtaatcaatatagaaattcctggaataatccct

SEQ ID NO: 66219 - DNA, 1340 bp, Homo sapiens
tacaggcgcacaccactcctcctggctaattttctgattttttatagaaacagggttttaacatgttgtccagggtggtcttgaatccctgggctcaagtaattcacccgccttgacctcccaaagtgtggggattacaagtgtgagccaccgcacccggcttcctcctgttttaaaacatgatttaaagtgtcttatttcttttagatctaatggactttttgactcgttttagtgacagtggataagaggagaaaaggatcatgcagaagaaaacatgagatttgatcctttaccaaaatagctttgtgacctgagattaatcatttaacttccccagtcctcaacttttccctctgtaaaatgaaagacaaaatggttgttggtatactttccagctcaacatctctaaggttctaaactttaaagctgcataaaattgatttattgaaataacgtttccttgctctgtgtttcagcaagtacaaacatgccctcttgaatctgacttctttcagtttattgaagaatatagaaaaaaataagacaggatctaagtgatcatccgagcagtatgtggaagatcactcagcagaatttatttccaggctgtgtccatttaacttaaatactgttgaaatttatattcctatttgggtagcagtccatcacctccctgcgctctcgctcctgttttactctgcttctcttcttaaaaaacaaacagtaaaagattttattttctgatgatttttctgtccttatctatgaacggagaagggagtaggatggatattgtgcttttagtaaacggagtctgtcccaacctgtgtgcatagtaaactcactcctcccacattcctgaaatttagcaaaaccaaccatgacatgcctggtttatgttagttttatttcagaaagtacttttccacactgattcctcctgataaggcctgcccggggctgctttgctggccccgggagagtcagaagtcattgtgtgacaagctgtgtgatccaattcactggacaaacccaggaatgatgtcatttacccagatctattctttaaaccaaatccccacccatcataagatttttctcacttctcctttgaatcctggtagctgctgcacagattacagttctgtgatccctgcaggaagaacaggctgtgttttatgtggaaaaaaatagccacatgcccccctgtcagtttttcttgtgattacttttgctccagaaaggagaatttgggtacttttggcccaacttaaaaaataacacaacaacaattaaaaaaaaaatctcaaccaaatcaaactgttcgtcaagaagta

SEQ ID NO: 66220 - DNA, 794 bp, Homo sapiens
gtgaaggtggacttaacttggctttttcttgggttctttataactccttgaggtataggaagatacccaggaatcaaacttataccccagggtggaaagaaaaaccaaagtggctgaatctaaaatagcacttcccctttatgaggaaagtcatcatttttccggcaacaggggctttccacaatggtatctctgggttataaggaaacctctactcttctctgatgctgtgtttttaatttgtggggagctggaaacctcacactgagactgaacttaacatattgccctaggaatggaggtcacttacgtgtagctcagctgttttcctaagcattcaaaagaccaaaataactctcgcttatctcctatcttggagcctgagacctgaacaaacattatgtagaggtaagtgtaacttgcccaaggtcagccccatacttagcctgaagtcaactcatccacatttcatgcacttgcctccactgataggcagtgctaggcctctgctggattttttccatcctttggttcctcagtgaatcaatcaattatttgcttgtgtttattggacttcagctgtatattaattagccattgtggtgggcactgtggacgagatctggcctacaagaaacttttatgtgttggagaagtaaaatcaaagcttgaggatttttatgaacagaattatgactgtcattaacatcttatatttgtgtagacatttaaaatggctgtgtgttccccataatagctttaatagacaggtgagaacctttgtgtaagagtgg

SEQ ID NO: 66221 - DNA, 984 bp, Homo sapiens
attttaaattatccatgtgccattgtagagacatttccattcatatttggtgctggattttttgtttgtttgtttgtttgtttttctttgagatgtttctggccgagagtacttagcagtttcactttgattctgagagccaacagaaactcccaaatggaaatgatatagaattccctgggccagtcaacatcttaccaatttggatttatttgctgaagtccatttatgcctccttgattaatttttcaattattcctgttgtaagggaactagtaggatcttcatttctagaaagatttatattgctaatttagggtgtcctgcacagtgctattgctggaacccaacatcttttccagcctcagaggagaccaaagtggacagtgttccagttaggggggaaaatggaattcacaagggcatggtggtatagatgatggcagcttcagggtgggggaagtgacaagctggacatgtgggctgggtcctgaggctgcacagccagaaggagcaaaccaaggaatttggactttaccctcagggtcaacaaagccatcagaacctacgaataggcagtggaatcttcatatctggctcttagaaaggttttctggtgacagaatggaaactagattggaggtgaaagatatcaaaaccccaccagcactctggaggctcctgtcgttccagtaccttcctatttgtgctttaagccaagaggcagtaacagcttttctgttaataacttcctgtgcttccctttcatctatccacacgattgtaaattagttttccttaacaatcatgatttggatgtgccatctctttcctgttaagaccctgactgatctaccctccttcacatgtctttataaatctttgtttctttgtttgcctctccactagcccctgagcatccacagcagaacccatctatgtgtggttcattttcaagtcttcactagttcaactgacatttac

SEQ ID NO: 66222 - DNA, 3523 bp, Homo sapiens
actatcttggtctgctttggcttacatgataatcctgtcctcaggttaaaatcaggcaacaattggaccctaacaatttccattgagaatgattgtttcaatatgaactgggactgcgtgtaacctacatggacacctcttgaagacaaggcaaattgtaatgatctccaaaccagcagcaaaaagtaaggactcaacaaccaggttagggcgaagaaggatcattctttacaaaaaaaaaagttgccttgctgtacacgtcatcattgctgatggtggaaggaacagacaactggaagttgtactaggcttgcctgtcctggcagctttgggagactggctggttatgaggagtggcagcgcttgctggcagccctttctggccagctcagtagggggacattcctcaccagggcagcccaggctgggcttggagccacccagctgagcgccacgtggcgggcaggcagtcacatggctgggatttgggtttggaatcacagtgctgaacctacagcctagtcaactccctgttttagggcattcattttttcaatcacaccagttggttggcaggtgtaaatgttctgggggaggacaccagaatggagtgaagacatcatctgtttcctaactcttgtagcttttgactgggtactttcctggccatcaaatgctgagagatctagcacctgctggtcctctatgtgggcgggaactgtgaggtccagcctggtgtatgtctctgtcctaagccttatatttctgaatggtggtgggtgggggatggggaccaagattgagacctggggttcttttctcctttacaaactgtgcaggcacagggcacagcttcagagaccctccatactggaggaaaatagtgcaactctactagctccctcacttcgtcatccacacaattttctgaaatgtcaatcctgtgctcacttcctgggaatgcagggttggaatgattccagttccacaatgggcagagatcatgtcttgatcacttacggtggaaatattccatgtctagcacagtgcctggcacatggaaattgctcagttaacacttgtcttatggactgattgaagatgtagtctctgagttcaaggagctcacaatttagtgggaaaaggaagatggataaagagtcacaatgacattgtggtaagtgacttgatagaaatgtatacttggtagcttgggagccatcaaagtaacatttcctttcattgaagtaagaggattacagttccttattggcaggtaaggatcttgctccccacaggatatccaaagaaatatattgcttcccacaaagatgtattgactctggaaacagcatgggttagtggaaagcagtctaggttgggggtaggaagacctgtgttccagacctctcttgctgagtggcctcaggcataatctctttgtgccactgttgttttcatacgtgaaatcaggacgttaactccttctctgcccaccttccagcaaaggcattgcttaacaggccctactggctccctgtcctctacagaattaaatccaaactctggaaggtggaattgaggctcttgctggtgcgtctctttccttttgcatctgtcattatggtcacatcagtctcctggatttcctcagacattctttgtctttctgtgtccctatacatccttgcggggccctacctctgcctcaaatgctctttcagaattggcttgtccagagactttctaaacttaaatggcactttctcccctgtgcagaatggtcactacctcacccatggctggacccatgcctctttaggcatccttctaacagagtattaattccattttattgtcttgtttatgtacctttcttctccccctggtttctcaaagactttatatacccctgcctatcccctgttcctgacacacagctgagtgttaaataagtgcttgtattgtagttgaatgtatcaacatagactgattccttaatatctgttattgcagcgggaaagaaagactcatgggtggaagctacaaagaagcaggtttcagttgagtattcaaaagaatttcctcagaatcagagctgtttagcaaggacctgggtctccttggtgtacctggggacttgtgtgctgtccgtagctaggaacgcctgctgtcaagagctgtaccccacatctgtgacagcacagcccctcttgtgtggtgctgctggagcaggaaggcagaaggggctggggttctctgaagccattatttaaaggatattcctctctactgattaaattctcacttgtctctccctttatttctttgatttcctgctagtgttcaatcagcatttgttgactgagtgactctgtttatttgtacaacagtgacttttgttctgcagaatggaataatccagtctggaacacgaattccatgtctgatttagggagaatgtttgctgtcttcatttgtagctctttagtttgaccaagcactcccattttgagaagaaagttattgaaggtcagtgtggtctatccctaagtccttcatcatcagcagtccaggcagtatttgggaagttagaagtttctgagagtgaccatgtcttatccccttctttatttttcataccatctagtggtgtcttgcacataaatattcatcagtttaaatttgccttctaaaattattgatagttgacatttaaccactgactggcaaataagatccaatcaaaatgtcatggagtaaagggtgtttaaattctttagctgttcatcccaaaatttcctttagaaattaaccacctgccatagggaagatgcgtagatgattaggttagaagttagattgcaactctttgcagctcgttctgctaaccctattcaccaattagcctcactcttcaactgcctccgctaaagatactgaactgaaacttgctccctatggcagctacatggagaagctatggttttgacaggtagcatatgacaatggctattccactattgaaaacctgggcctctgacttaggtgcccccaatctcacctccccactagtacacatatacatgtagttgaaagtcaacaattacagttgttttcaatggagtatagaaataagagagaattggctgggcacggtggctcacacctgtactttgggaggccgaggtgggcggatcaccagagggtcaggagtttgagaccagcctggccaacatggggaaaccccatctctacaaaaaatacatgtggtggtgttagcctgtaatcccagctactcaggaggctgaggcaggagaatcacttgaactcaggtggtggaggttgcagtgaacctagatcatgctgctgcactccaggctaggcgatagagtgagacttctccaaaaaaaaggaataagagagaatttatctttgcctagctcttcatgtcttattaattaaaatagactactgcttacacaaaatatccagcagagtcaaaatcttagagtggatactg

SEQ ID NO: 66223 - DNA, 848 bp, Homo sapiens
aggatttggaggaccttattttcagaaataaggaaactgaatttcaagcaagtaaaatggcttttcctgggtgcctttgatacccattctggttctttggggaccagcccaagctctgtcattctgccatgtaagcatctaccagcttctccttcccctcactggagagtgtcctgagtgtatctaatttctaatggtggccccatgaaagcagtgattgccatgtgtgtctatttttgtgtacagactgaaccactcaagggctgatgaggtatgagcagctgccttggctaaattgcaaggcttaagggagggaagggagataagtggaattcaaccccaaagccaagagtcctctgggctggtggatgcactaacaaatttgaccttggggcatttaatgtttggccaaaagagtttgaaagagcactggggaattccctgtttctaataaaagcttcatagaagagccaacatttccagtcacctcctgcccacctttgccctaagcccaggaaggcaagttgccaaccttatgctgaggtggccacttacaacttgcccatggtaatagccaaagcccctccgcattgcccacagctctcccatgtgaagagatttagagggccaggtgtaagggagaggaagggtacaaagtttaacaccaacaatttcatctgttaatgtggtacagtatcttctcctgatgatctcattttagtggtctaagttgagcctcgccataccccttaaagatatcacaggatggagggaagactaactcatatttatgaggcactgactcctttgtctcattacagacatcgaaacatccccatccaaacatc

SEQ ID NO: 66224 - DNA, 562 bp, Homo sapiens
tcaataaatgcaattgtaaaaccctctccagcctggcctttctccaagtcagtgtatcccatatgtcctctctatctgccacccttcccaaggcttttgccacttttgcctgggtgaggaaagttggtcccagcagaaccttctcatggcagcattgggagcccaggggccatgaacctcacttccagttttgggtccagaacttttgtaaactgactttggattcagaagccagaagaaggtcattaggaaaaatggaactggaatccccagcaactgagtaattcacaagtatgccatcagggaaatagttttgatgattgccaagagatgacacatggcaaatgtgtcagtgaaaatactcttgtttgaataaaacttcttctagtctattctactggaccctgctggcacctcaaagagttttttgtttgtttgtttgttctccaaaaataaatggcatgggtaactgggtctctcagtttgtcatgagttcagtgtctaggtatattactacaaacataaaatatgcatctcttattacatatgtctgattactacg

SEQ ID NO: 66225 - DNA, 863 bp, Homo sapiens
ctcaccaccttagattttcatgatatcagaatggcgtctagacctgaagttgtcattacctggctgactctaagaaattccctttgcaaccttagctctcagttttcttatctgtgaaatggccttgatcaacattttgaaaatcatatttcctggaatgttatggatgtttcttgaaagaatctgtatcaaatagatttggcaaaggcagagttaaagaaaaaacaacattgaatattatcaatattctcagagctcttaacaagtaaatgagcacatgaatcccaagaaagggacttaataggccatagaatccttttttcctggcacacctgttagtatgttgtagcagtaatattcttcagaatatcttgggaagcacactgtaccgcaatcactaaggtgtttctaattcaatatgtgctggattcccactttttggtaacacatgaacattgaaactgatcccctggaatgtgaacctgataggattaaaaagctaatccatgtggcattgactcccatttatttggcgaaatcgaggagttaaaaattgttgaacagctgtaaccttagacctcggaaagtaaacatttcacaactgatatcaaggtcactgacaacctgagtgcaggtggactggagatgttggctgagattttgtggatgccaaccctggatcgtgtgtagacagggaaaacatgctcccaggctatgtcctgaagcttcacatgtgcccatttcattaaaaaaaaaaaaaacaaaaaaaaaaacaaggtgacttaccctgtgagagttgcttcaattctgctattccttgtgtcctccgtgtttgagtcttatattcaatgcagtttattttc

SEQ ID NO: 66226 - DNA, 1402 bp, Homo sapiens
gaattcctagcaaaaggtcttctcacactcagcttgtcagagaccttgcttgcagcagtgtctcaggaacacttgttggctgaatgaatgagtgaaggaattggtaaattagtgagtagtgtcactgtgtggtatctaagaagaactttgactttggggtcagatagaattggttctaaaatcgtgtggttcctcttagtagatgtatgaccttcagaaaattacttaacttccattttctcatttgtcaagtggggacatgaactccctttgagtgttactggaaggattagagatgatcaatgtaaagtgcatgatacaacgtaggtgcccaataaaaggaggtttcctttttctctcattgctcatgcagcatctggctcctagtgggcctttgggacatgtttgatgactgaagggagctgagcactatgcatttggaggccatgagtcattcacacccagaaattacaactcctttatctactgggctgctgttctcactggggaagtccccagttgcctggttggcacattgttccagccaaccaggtatttacagctatctctggctattctgagcatgaacaagattacctgggaatttccctcttgataggactagagactcctacccttagagcagagaaggcagctctgataatgagatgacaaaacagagggcttttctctgttctcaactaagtccttagtggcaggaaaacagactgtagtgtgcacaggctcaggccaagggccacagaatatcttccgagtaagaatacaggagcaaggacaagctaggatcatcagtgatacccactcagagtgggtaaaatcctcaggccacagacaacagaaaaaggcaggcagaaagtagtgagcaagtggccaattgtgtcccggatgcccagggcttattagagcaggggaaggccagaaggagtcaaaagcctaggcagaggtggtcaaacaaagatcatgtcaaggagcaacagcaggttatccaattgtaaatacctggaacccagattccaaaatacgagggctcagtgggaggcagagagaacactggggagcaagacagtagagccaagctaaaaaatatctggacaaccaagaaaatcattttctgggatcaaataaggaactgaaacattagaagagcagtcaatctccatcccagatgacaggcattccaagttcctgcctggatggagtatttcagggtgctggtcctggtctctgccaggaggggtgatcaatttctacaccaggttcccagtgagtcaacttggataagttgagcctaaagccatgcacctcaattggtgagaaatagagctaataaaactcaaaccaaggaatttatcccttgtgagttagttagttcctcctgcct

SEQ ID NO: 66227 - DNA, 3045 bp, Homo sapiens
tcctcattttacagatgaggaaacagggcaggggcaaagagactagatgttccatatcacacactagtgatgtcagttaagctccaaatctaagactagactcttccaaaaagttttctcttggccacacatagtgactcaggcctgtaatcctaggactttgggaggccgagtcaggcagatcatttgaggtaagaagtgtgagaccagcctgggcaacatggtgaaagcccatctctactaaaaatgcaaaaattagccagtcatggtggtacgcgcctgtagtcccagctactcgggaggctgaggcacaagaatctcttgaatctggcaggaggagattgcagtgagccgagatcatgccactgcactccagcctgggtgacagagcaagactctgtctcaaaaaaagttttctcttaactactctctttttctttccaaatcatccttcttattgatgctactcttagtccaaacaaacatctgtttcttttctgatttccgattttcaggctggctggagtttgtgggaccaggaatgctgcctgatgaaaggttccttggaattttcccatagaggacaatcttttgcctgccacccatgaatgtttctgtctttcctttttttctttctttccttcattccacagatatttattaagttcttctcaagctctcaaatatcctaaacttaatttgtgtaaatattgctacagcccaggtcacagtgaaatcttagactgagacaccaccttctatttacacaggcagcatgaactgttgttgccctatttggtgaatacggcataaagtatccaagaaacagcccagacacggagagaatattttctgagcagtcagcataatgagattgaatgagtcctaaactatgtcagaaaatctatatttaactcccaactttgctattcattctgtcaacctcagacaagtcatctgaactctttctgctacattgtcttcaagtataaaatggaactcatagtttcctctcttatgaactttacagggatgttgggtggtatgagggataacataaatgaaaatggtaccagaaagtgaaggcccccacctccctgaacctggtaacacagattttgccaaataagccgcttccctggtttcccagacctcatcagtgcatggctgctgtccagcctgccaattcattgacttcaccatgccctattaattgattctggggaaccccatcagggaaagaaattaataggtgtagctgtttggagatagccctattctccagagaacctcctgaatgtccctctgagtagatatcagggaaaggacacccttctcaaccttctgtgtgggataggaatagcgtgcaccaggatgcctgtgagacaggtgagctggaagcccttacttgctgcatgtcagtttccttatttgtaaaacgaaaaggtggtgagtcttacttggtggtttttgaacagtgctttccaagtgctgtgtagggcccactctagggtcactgcctggggagaggcagtttggtgcaggatatttgggagtgtttccagctctctgatcccagagttactcagcttttactttctttatttgtttatgctccagctgtgattttatttcaaccaagggttacaaagctttaaaatttttttaacccaggaccaagttatatctaaatgcccgactttgtggttctctgatacagttactgagtgagttgtctttctttcatcttcttcccttgtctatgtgcaaggggttcaatgctctgatgcctccccatccacccccagcaggagggttggagctctgcctcctcgagttgttgatttctgagtcctcagcatttccctcaccctctccagcttgtcctcaagcctgccagtgtctgtttcatgcagcaaaggctgtgaggtgccctggagctctgtgtccttggcttcagcactcaaagcccgtgcatggcagggctctgggatactgggcttcaaggggatgactctactactcaccatgacttttgggactcccgggagccaggtttggagaaggaaatagaaggggaaaggaagccctgagcatgtcagcccccaccacagcgagcttgtgtctcacctagaaaagcctcctagtgctcatgtgcccttaaatggacttgttcaccatggccctcccacagcatgccgccctcggtttgtattttggagggcttagtagattagatgtctgaaagccaaaatccttcccggtgctgccgagccattcatactttcttctcaataaacagttgtcagacaattggattaaatgaacccccacatatagtctacttcaaaataataatcctcgggacagcctgttcctctgcattatctgtgtttacttttggatctggtcacaatgctctggttatactttctggcaacatgcacttatggggcaagggtcactggggtggagccaccacctcatcctgaggaagaggggcccaggctcagctggagtgacctggagcgtaggtttccccaggccaggccttctccatgaaaggcttcctcggcagcggccttccaggagaggatcccagtgaaaagaccacttgactctgagttagaaaacatggaatttatcctacctggccactaacaagccattggactatcaagaaatggaagagatttccctcataatcataggtttcttgtcattagagatgttgaggcagagatgggtggcccttgctctgaaatgctgaggacaggaacccagcagtaggtaaaaagttggatcagatatcctcaaaggtcctttccaactgtgaatgtttccacttctagccttctcgtgcagttctacctagtgcacagaattgctagaatgtttacaaaagaagatgtacataaaaacatttgactatataatatggcaagagaatgtgagaatttgtgttctagttatcaactttaaatctgaggtgatgatcttatgtgcactgccactgggatggaccccacaaatgacagttcaaca

SEQ ID NO: 66228 - DNA, 1825 bp, Homo sapiens
aaaggcctaatacatctaaagcttccataaggccacagaagaaagcttttccctgcatgattttgtctgatggttagtgctgcatcatcaggaagtgccgcagaaagatgtttccctgactggggatgcagtgtcctcgtggcatgacacagtggtccctcaggggccctcccagcttcctcgtgccccatctcttcttggattcagggaatttctgaatgccattcccagaagtgcctatcccaaaacatggttaagctagtggatcaaggaaagaggtcctcagagcaactgccaatagggcagtgattagaagggcaggtgtctgagaaggggcctgcttaagaagcaaccaaaatcatccacaccaagctgtctaaccagaaatgctcaaggaactgatttaaaaacaaacaaacaaacaaacaacaacaacaacaacaacaacaaaaagaaattctgcaggagatagtcaagccatcaagctaagcaaaagcttcaggttcaggtcagtctttccttggaggtcggttcaagaatccagagctattgggagaggttctataggtaagaaagattcagcaaagtgtatgggcttgccgggtgcccagaggctttatgagggtgcttttcacatgtctcctgatggaagggctactgtcagggaaagtaggaggggtagcttgagattggagacaggagactgtggctcaagttctggccctgattatccatttgagtttaagcaatccattagtcttttaagacttgatctcttcatctgtaaaatagggtctccaacgtccttcacaactaagatttcatatatttacaaaagcaccatgtctcgtctatagtgccaccgaatgtatatgtttgtttaatgaatgattctctgatgaagagagtcagatgcctcaggctatgacctaatgtagctctgcagcctacattcaaccttcactgtcaccattccatgacagcaactgcccacagacaggcgccagtgctcatcattgaaaatatgtgattcatcttgtccccatgactctatagcatgtcagcaccctcaccccaaagcactgcttcaagaaatatacaatgtctagctttttatattttgatagaggaaaagacaaaactctctaagaaaaggggataaggtgtgtccatttcacaactcctggataactgatgaacaatcttaaggtatctatactccaggaaggcagagaagattgaggctgagctatttggcccgaaataactgcagaatcacagccagtgagtgtgcccaatcaaaatgtggcagtaaccagagccaggtctgggctggcctcctcttcaaagcagttattgtcactgtggttatcagtgacctctcccagacctggcatcaccgatcaggagtttgaactagaactgttgccaaaagggatgtggggatgactagggttaaatggtgcagcatgctgtacccctgttagtgggtaactgcatttatgatgggtgtcaatactagtaattaatttttaaaaggagactagtaatacctgacatttgttgaacacttccaatgtgttctgtgatgacattatatatataattatactttaagttctagggtacatatgcacaatgtgcagctttgttacatatgtatacatgtgccatgttggtgtgctgcatccattaactcgtcatttacattaggtatatctcctagtgctatccctcacgcctcaccccaccccacgacaggccctggtgtgtgatgttcgcaccctgtgtccaagtgttctcattgttcaattcccacctatgg

SEQ ID NO: 66229 - DNA, 2628 bp, Homo sapiens
ttagaaatgcacgcttgcagccccatctcagacttccaaaatcaatctgcgtttcggcagattccccaggtgactcttgtgcgctctgaatatgagcagtgctgggttccaattctcactccacggtttggtctggctctttcctctacactccaatcttcctctctttctcccccgtcccatagttgaagtgtggagggggaagagaacaatgaacagactttaaaatataaaatgatctctcatgttcttatcacttcgacacattcctctcagctccagatattgtttcgtcctcagcaaagtcctgatctgtgctgacagggaaagggactccactaattggaagcagggagtgggggagcaggggagggaggtgagggggcagacaccatggtcaggaccactctggagcaagccacgtcctgggtccctgcgttcctctgtgccaccactccctgctgtctggccccacaaccctgttggcttccctcctctggggaggataacaaaggctggctcccccaccaggagcgtcctgagacgtccctgaacgtgacagtccctccagccactgccgatgttattaatttttaaaacaaacttcctgattgaggttctggctgcctctaaattgtctctacaaggagactgtgtactaattaacccatagaaacaatcaatgatgtacctttttcaagtttcagggtgattagaatatgaaaatgaagagcacaatggtgcagatgttttaaaatcacagcagacagcaattagtgacacggaaaccagctgcttatctctccagataaagcctcttaatagggaattacactggaggagccattacccagatggatctcacatgatttacagaggaggcggggcagtgttaactttgatttgtgagccaggttcttgtcaagcttccttccttacctcggaggaaggtgaatttgtggctggggtggagacacgggcttcacctttctccctggtggcccaggttagggaaaacaccaggatgaggagaggagagaacaatggtgtttacagaagccaccagcacctgtcttcttgattcgggctctattgttttgagatcaactcagtcagctatctctgcacagaggggagagtgaggatctgggaaggggaaatagtgagtggcttgcgggccgccctatgtttcactggaaagaaaaggcccctgctttctgctgcttggctttggagtgtgtgcatgtgtgtgtgtgtgtgtgtgtgtgtctgtgtctctgtgcctgtgtgtgtgtgtgtgatatagggagttcatagtcatcatttttgaatggatttctcatttttgattattttaacatgattgaggttaaatgtacatatactgaaatgtacagatcttaaatatgaagttcaaagagtatcaacaaatgtacacagctgtgtgactcacactcctatcaagacacaaagtacatccataactcactggaaactccctcatgcccatgccagcccttcccagccccggtccccaccacactctaccctggaagcaaccactgttctgacacctatcataatagatttgttttgcctgatctacacctttatataaacagaatggtacagtgtggatcttggggtctagcttctttggctcatcatgattatgtgtatgtgtgtggcttatccatgtggtggggtgtgtccatggtttgttccttttatagatgagtttgtcttttctgcctttgattggcacctgaaccgcttcaaggtgctaacaactctgaataagctgctataaagtttttataaaagtctaattgtggatgtatgttttcttttctcttgggtaaatatatgagtggaattgctgggtctcaggattaactttaaaagacatgctgagagatcttccaaagtgatttttactgttttatgctccctccaacaacgtatgatagtgtcagttgctccagatccttgtcaacgtttgttattttcagtctctttcattttagccatcccagtgaatgtgcaatggtatctgattgtggttttaattgacatttctttgatggcagataatgtttgaagacattgatatgtgttcactggtcattcctgcttgttaccggcacagcatattttgacaaacgtattttgcagttgttgggtgagggtaagttggttgatagtacagatgaaacctctggtgggttttttctgattttttaggaaatttgttcggcaattactgagagaggagtgttaaaatacctttaattgtggaatcatctcttagttattgttttatatctttgaagttctatggtgagggacaaacaaatttaggatgattgtctcttcttggtaaattgactctatatcattttgaaatgtccataattatctctgggaatgctttttactcggaagcctatttttccttacattaataaaatcattacagcattcttatgtttagtgtttgtgtggtatgtcttgttccctccttttacttttaagctgtctttgtatttaaagtgtatctcctataagcagcatatagttcagtttttcttttttattcactctgataagatgccttttattttcttg

SEQ ID NO: 66230 - DNA, 879 bp, Homo sapiens
atttgcttcctctatgactgatataaactaaagagagggcaaactgtaaatgaaagctttgcttggaatactgtcaagttttgtggagtattactactgactagttgccattgattcctgaactatgtggacaaggtaaattatctgtcactgacatgaaggtgggctaagttttagtatcactatatttgcaatgatcactttaaaaatccaaactagaactcttctagggaatacgactacaaggcctgattagactgatttgtcagtccagaaacaattcttaaatctcttttatatacaaggcaccctgctaggccctttgagggacataaagacagacaggcattggttcttgcctctgataacttacaaccaggcaacctttttcttttacaaaactaactacaaaaattttatttttgtagtcagaagctcactctggctttgttctattttgatctttataacttattttaaagatcattcagtagttattcattgctcggtcagtctcactgacctttggccaaaagctgtaacattttgacctggcctgtgggactcagctctttccactccatgaagctgggggtgtaaataacttcaaataaaaccctcctggcaatctgtgctgggcacagcatgagagagaaatgggacaaagcagaggaaagaatcaagtgggagtacccacaataagtgagaatggtatccatgttttaagcgtcttttttcctcctctctcttaagatatttattctgcttctctattagtaggtacaaaagtaataatgggaggaaacaacaaaccaaaatgataaaatgcaacacacttccctctatgcgtaggtcttccacatgggctcctttcgggtt

SEQ ID NO: 66231 - DNA, 1190 bp, Homo sapiens
tctatatattaaaactttttggatattttaattcttgtgtcaaatggtgcataaagggtgttttatggttttgcatcatgagaccaaattcaatgatgacaggggtcatgcctgtttcattttctgctgcatatggggcctggctccatgcctgacacataggagccacctcttggttggttgttgactatatacacaaccattgaaagcaaggatttgagagtttgactcactgagagattagccatgtgtggttgttgactctaaatacactcctcttgtttcaacattggggaaaaaattggaaagaaaatgatgttgataaaaagtcatgttatttaaagccaattaatagccacaaggtagattgttgatgcaaaacttcccatatgaagtataatttttgctgaaatttgactaagtgtgatctgctgttgtatggaatttttgttgatgctctttggtgagccagttcattctgacgttgagacctgaggctactgcatgtgcgcttacacaactcactctataattgatctgatgctgacactgacactgccagctcttactcagtgctttcctgcctcttgcctcctgccaactcattcctcttctaaggttgcttccactggtgttacctccagagattttggataaggctgtaatcacagagtcagagttacattaggtttttgcattttgtgtatctctctttatgacaagttatcctgggcttaggttgaatataatgagatatgatgatattctgccaaagaccatttcttctccaccatacttaatctgtaaccctggaatcatccagaaaaccctgctccattttcccacagtggcttctttaccctaaacactgcccagaatgttaaggatagtcatagcccttgctgactcaagccttagtcatattatctagctattgggcaataccatctactcattattctttccacttgcaccatcaggccattaggaaaacagcaccccagggaccacccagtatccttgctctcagcacagggaatagctttctctcagaacctggccaataacaaaaacacaacctaaaaagaactaagtatctcaagagggctacaaccaaaatgccacctgaggttagaagagacagagaaaaaatttctggctgcaatgatgagtaaaatctttcagaaaga

SEQ ID NO: 66232 - DNA, 541 bp, Homo sapiens
attttatttaatttgagttttaattctaagacagaactaatgagaattaggtgcaagaaaaaatgcaatacaatgcacactgcttcctcatatctttgattccatctatgtgataacaggcttaccaggaatcccttgtattggtgatagcacaacctaacttgaccaacaatgacacccacaactctgagatcttctgttagtgtgtgggggtaggggaggccaaagtacatgaatcagctgtgatttggctgggttctctcacccatgttgacttttcctgggtcaattcatgcaagatgtgtgttgttcttgttaacgaggctaaacatctggctgaatgagaaaattttagtctgctacttgcttaaatagcaaaatctaaacaatctactaagctgaagggtttttttcttctactttatttttggaagtctttggggttaaatgatgccttgaccattgtttgccaaggccaagactcagctatagatctttttttaatctttccttatagttgtagtccaagctttcacaaggt

SEQ ID NO: 66233 - DNA, 992 bp, Homo sapiens
tcttgtttcctggacctgtaagctaactaggatagtggaattattattaataaggagtctagactggatgatctctaatttttggcacatctttcattttctaaaaggtttgagtttaaagctttgtaccctttgacccctaggcgagatctctttcccaaggtgaggctaacgactttcatgtagtccaatcacataagtcacaaaacccaaactcgtctacatggaatggtaagaaagaaaatacagaggggcttattccccaaagacatgactccctggtggagaaatttcccacagtcatgatggtcttttttggcaagaacgtcttcttgctttcctgtaaatcgcagactggggctgacaccttgcagtgcattgcactgaccttgccttgtgatcctggtgccaggttttttgagcctggcaggagtggtgagagtgtcaagtctgagatggtctggacttgcagctgaagttcagttaaggacccaaatcaagtactttcagccacattccattgcttgctatcatcagataagaaaagacagctattttattatactatttttgaaatacagtgcttagagaggtacagtggctggcccaagaaccccccaaaattcagtggtcaggatacatcgctacaacacccactccttttccagaaggaaaactgccttctcatctaaaagtgcctttgaactctgactacaacatcatctgcataaagattgcatcatcagtgctcatgggcttgaaccgagtggaaactatgcgatttcacatggggaaaattctgggcaacaagacattgaaccagggttcttagctgcagccctagttagagaattgcttccacattctgggcctgttttcttgtgtttacacaggagaactggttgggagaagtggttctcactatttggtctaaggatcgactgcatcccaatcatctggatccatgtttataaaggcaaatccctgggctt

SEQ ID NO: 66234 - DNA, 589 bp, Homo sapiens
atttgtagatagaataaattatataacttagtgttggacatatactggttaggtcaacataattagagcctggagcctggaggttgtggccatttagacagaatacctaaatgctctgtgactcagtgcatcaattcttattttcaaataaggaataatagtgaacactaattgaaggcttaaaaaaacatttccaaggacaggcccattgacaattggctaatgacatcaactccgtgtataagaacagaatgggacttacataacgttctgacatgtggaatttcccatcaaagtgaacacaatcgatttgataaatgttacacatttgtttgacctttcaggtagattcgcaacacatcaggtcagcaaatgtcatttcctgatctaccacctcctcttctcccatttgcaattaggaaattctttttgtttttagcctcttcaggaatgttgtgttgaactctcatgaggtatctggtccattcctctcctaatatggattagcaaaatacccttcatcaagactacttctcaagcccacacagcaatctatttgcagagttagcttgaaacctagatatgtgac

SEQ ID NO: 66235 - DNA, 862 bp, Homo sapiens
ggataggctcagctccccttcctccccctcaccccaccccctggggctgttaccctatcccaaggaattccagcaagtcttggaacaaagactggcagcacatgtaatgccctgtctggactgagactagaatgcaattagccaggggaggttgtgaaatttgtttttaaatgctatgaatgttttatctcctgaccctcacctccataacattcccctttcagccaccgccccccacccccgcacacacacacacaaccccttcacactgggtctttgcaaagtaaagtatgacctttagattgagacattctctgttgcaatatgttggaatatgtttcaacgccgtaactcgagatctatttactaaactgtttggcacattcagcacatcctgggggaattgttggcgggacctgcggtgcgtttttcactcctccctgatgcattaccagacataaggtcatcccagtctagcaaagatgggtgctgtgcagggctcattacctcgcagcaagccagccagatgaggccgtgggatgttttctcttcatcattcaagcttgaaaggaaactgtcagcctccacttgctcttaaaacaatgaaaatttaggtgacagtgctctcattagctcaatggaaatgaaggtttccaggcaaagacttccctctagaagtcaacgggtgagtctcagcttctgaggaatgggtggtgtcaacgtcagtgacccacactcggatgaccagaaactttcaggatacacagcttctgagctggggaaaatgggcagattttagataggtgacaggttttttcacagctgcccctttgctgggaaatggatatattcataagactgt

SEQ ID NO: 66236 - DNA, 768 bp, Homo sapiens
gtgctttctcttaaaccactaggacctaacccactgcattaaaaggaggagtgagaacaagtgagggggccacacagaccctctcctctggttactatgaactgggctcacctcccgcagttggtgatttcaccttcaaagtgaatagcagcatggcattgtggaaagcaccctccctggaccagtctgggaatccatgaacaaattctcttgctgtaaaatgaaaaggtcagaactttgctccctaaagagcttcctggctctaagattttctttgtttctcagtaggaataagcccacccacctcataagggaaatatttctcaatttcttagggctgcaggggacacccctgagtcacccccaacctgccttagcctgaatctgagtaaaggaagggatttatgatctaatgttaggcactgctgccctctgctggatggtatgtagccaactacccccgcccccaaccaaaaggtattcagtgcctctccccccgacaacccccagctgtccaggggctgccctcgcattgcccccacagtggtgacctgtcttgcatctcatgttgcaagtggaaagccacaaaaaaactgaggacccaggagggtatgtgtatgtgtgattgttgtggggagatgggaagtgagtgtaaatccaaatagccaattgctgtcaattatgtgaaagttcctctatgacttcagtgagaccttaaccaaggtcccactcagctgcaaaccatacacagctttccagcatgatggc

SEQ ID NO: 66237 - DNA, 375 bp, Homo sapiens
gggtggcacatttcgagagggtctttggcaaaggagggcatgccaagatgaggccaagctggatggatgagggtctggagcaccatcatctcacaggggatgatgaagctggttgtgtttggcttggagaagagatgaaagagctgcagccgtgtgtgtctgcagtattaggtaatgcatgtgggagaagtcaacttgttcagtgtttctccagagcacagagggagtgcactaggtacgagtgataagcaaatggactttgaatcagtggagaaaggcactttttaacaatggaagttgcttgagagataatgtcctataaggtcctaagatttctgccctgatagtgcaggagcagggtgtggaggccggttg

SEQ ID NO: 66238 - DNA, 902 bp, Homo sapiens
tcaggcagctgttaataataataataaaattagttgctattattaagcctgtcttaaactgcagagaacaagacagacacaggggatgacctacaagcttcaagactcagagaattcaacaaccttaagaaatacctcctgggcagaatgctgtatttggaaggttggaagactctgagcttgagaaccctgaagaaggcggaactgttgggttgccggcagccgggaagggtttgcctgacactcttggctgggcgggaagaaatggggggaaggagaagggcggcgcactgggctgctggaagctgggttccttccgaagggacgttacgctaccgtccgtaatatcaccccaagccctagcattctcaggaaagtcgcttatgaagctatgactcaagtgccgcagtgcttgggcccacgcttcgcagcgtggaatcagcggcggggcgcggcggcacgaggaagctgtgcaaagccgaaggggcagcctcagaccaggaaccttacccgtctggcgggtcttatggccgagtcaccgtggcggcgcggcagctcgggcccggttcttccgggcgggccggggtggtcacctctgcaaagcagggtttctgggccgtgatcgagtcttgctcacgggcatgtcgggaaacgcctgctgcgctccctgcctgaaaatccactcttgaaaatgcactcccttaggttaaaacgctgcctttcctaaggaccttctttaaaagtaaatcctaacataagttggtgcaaccaatttccttcccttacagacgctaaaagcagagcactgaaggggtgggattcttgaaggggagggagggaggtaaggctactgatgatcctggaagggacagctccactgcgaagggtttaggggaaggcgg

SEQ ID NO: 66239 - DNA, 1701 bp, Homo sapiens
ccacccaggaactgactcagtacaagaggacaccttcaacttcccatgatttcatctccaacccaaccagtcagcactctcgactcacaggacttcctccacccaccaaattatccttaaaaactctgatttccaaatgtttggggagactgatttgaataataaaaaaactccaatctcctccacagcccgctttctgtgtgaattactctttctctattgcaattcccctgtcttgataagtcagctctgtctaggcagcaggcaagacacagaccagctgttacaagaggaagggaaaaaaggaggaataaagagcaaatcaaaaaacaataaagggggggaaattgcacagagatgagtatatatacaatcatatttttgcagctattaaatttatgtttgtgggaggttagatatccaaggatattaagttgaaaatgtcttgtttttcagagcagtagagtagctgcactatctcaattcagggaaacccagtcctgagggccctgcagcctagaccaggtcattgggacagaaattttggaaagttttggaaagtctctgcctacatcagaagcataacaagacctgtccttccagcggcacagccttgagcggccacctgttggcctccatctctgtagcaggtgacccaaatgttagggccaaaaccacaacagaaaccaaaatccagaaaacctcagcaggtcccgcttcccctgacttgcaaatgactctcaaactcttggaaattcaaccctcagcattcagccacaagtccttgcctctcttcttttaaagccctgtagtgtgtggcaagaggtcaggtcttaggaggctgccaacatctctgactgtcaccacctgtgtgcccttgggcaaattcctatctctgaggctttgcttcttcatctatacaactagaatggggaatgttgcaatctatcagggttgcattactcatgcaaagattactcatgtaaaacactcagaaagaagttgaaatttactacagatttgttgattctcttatgattgttaatcgtgtcattgttttggggacaggctcaggagactgggcctgatgggaggtcagggagatgtgtgactttccttgtgatcacagcaacagaagggtttttccagcttgcaaatgacctctcaaaataacctgaatttccacccagggctggtgggaatgtaagctgatacaaacttcggggaaataatgaggtggaagatagtaactggcttaagaacgtaaagggcagaggagtggaggttgagactcagcgtcctaggattaagagaaacctgtcctggtcatcccactcctgaaagtctgtcctaaaggacttctacaccaaaatggtcatttcagatttacttatagtaacttaaaagtaaggtagagttggaaacaactcaaatatgcaaaaagtaagcaaatttgttaagcaaaataagcatatacttttggcaggttgtcatgtagccattgaaaatgatggttacagagtttttgtttttgtttttgtttttaataattattatactttaagttttagggtaccgtgcagttttgttacatatgtatacatgtgccatgttggtgtgctgcacccattaactcatcatttagcattaggtatctctcctaatgctaaccctcccccctccccccaccccacaacagtc

SEQ ID NO: 66240 - DNA, 2617 bp, Homo sapiens
tggcactgagcttagtgtgcaacccagaatttgtgacaattgcacaacacaccctcttgtcattcctgtcagttttattcattcccctccctcccttccattcctttcccagtctttaatccccctgttccttcccttctcctactcccttaatcacttacagtcccactcccaggaggaaggggtacaggaaactgcatttctcctcctgaaggtcactgtgtgcagctgaagccacttagtccacaggaaggaaggccagctggtaggagttcagatggcagttacagccaccaggggacagctttggcatccacccccttcagggctctcctgagagggaggagcagtgcccaccctagggagggctgagctttatcacactctctgagggctctctgggtcctgcctcatcagctctgatggcggaagggttgacagggggcagcaaggatggttttgtcctgtggcacctcaccctgcagtgtccactccctcctacccccagctcttcctgccttgcctcctgttccctgtgatcctcccttggtggagtgctgatgtgatggagtggcccttccttggagactccccacaacaatccaagtccccaacactctccagtcagggaagactgaagctacaacaagtactggcactgatctttatgactctggttcaggctaggcatggtggctcacgtctgtaatcctagcactttgggaggccgaggcaggtggatcatttgaggtcaggagttcaagaccagcctggccaacatggcaaaaccccatctctaataaaatacaaaaattagccgggcatgatggcatgcacctgttgtcccagctattcaggtggctgaggcaggagattctcctgaacctgggaggtagagattgcagtgagctgagaccacaccactgcactccagcctgggcgacagagcaagactccatttcaaaaacaaaaaacaaaaaaaaaagtctctggtcctttccagctacatccaaacttccaaccccaccccagtgcccagagaagggaggaggtggggactaagcccaacagggcccacttgtgcccaatacctttccccacactgtcctactgcctctcctcaccttctgccccaccctcactctgcatgactgaatgacttaattcaaattgcatttatttgctcatttctaatcacatcctaggatctcatgctctcttgatggtaaataaaagtgaacagaaaatgtcttctaatgacctggtaaatcaagtttatacctttcccaaatcagggtcaatttgctctaaatctagtcaagtcagaacccagcattagtaggtggcctgaccacatggccccttcccccagtctcttaaggcatagtgagtcactcacagaggccagcttagcccttcatgagtcagtatctcctgtttatgtacagagtcattactttctctataggaaaaaaaggaggtggtggtggaggtgcttgtctatagatggactgggcattgtaatttgaaaagcattgagaaaagtccctatctccaaagacattatcagccttacataatatctgaaaacctatcatttgagacatttctcagagcaatgatcctttataaaatatgggatgaggccagaagagccattttactatgtgacagtcagtacaactcagtggctaggaatcaggatctggatcgagttccacttctggtatggctgagtaaacgcttactgtactgagcttcctgccaataacaactataaactcaggggttgggagaggacaaaatctatctgaaggccctggagagtatacaacagcaagcaggctccagggggaagttaacacttggaagaaagggttagtaggaggttattctcctgtttttaccacttttggcctgatggtcagctgcagtcactgtcctgaggggcagctaaaactgagaagaaactcaccatctttctggcctgaagaactggcagacagagtttgagggcaaccccagctgctagaaagtgagggagaatcctcaaagggagagagccagagaaagaaaatcccaaattccatgtataaagtctgccccaatttttgcctgacccccaaacacccatgtacagcagagattgtaagcaccctatctaagggtgaaagaacaaaaagcagatatgaggggccactcagaaaaaaacagaatttgcagtttgaaccataacaagttaatttctcattaaaatgaaaaattcaaaactctttgaaagaatacaactgaatccagtctccacaatatgacattcacaatatccagagtacaatccaaaatttcttgacatattgagagacaggaagatgtgatgtattctcaagagtaaatataataggcaaaagtcaagctcaagatgacacagatattgaaattaatagaaatttattttaaaatggcaattcttactatactaaatgacataaggaaaaatgtgcttataatgattaaaacatagttagtatcatcacctaaatagagacgcctaaaattataatcaaatggaaattctataactaaaaaatacagtatctaattttaaaaaattaactgg

SEQ ID NO: 66241 - DNA, 1386 bp, Homo sapiens
ctttacacatggagaagcagaagcagagatgatagaatctttcgcccaaggccacatctgtattgggacgggggcagcctggcacccaagtgcccattcctcccttctgaccagcccccacccctccggctctggcgtccaaagggctaaggggaggggtgcccttgtgacagtcacccgccttctcccctgcagccgcgccgcggatcgtcaacatctcggtgctgcccagtccggctcacgccttccgcgcgctctgcactgccgaaggggagccgccgcccgccctcgcctggtccggcccggccctgggcaacagcttggcagccgtgcggagcccgcgtgagggtcacggccacctagtgaccgccgaactgcccgcactgacccatgacggccgctacacgtgtacggccgccaacagcctgggccgctccgaggccagcgtctacctgttccgcttccatggcgccagcggggcctcgacggtcgccctcctgctcggcgctctcggcttcaaggcgctgctgctgctcggggtcctggccgcccgcgctgcccgccgccgcccaggtgggtgcgccccagacacgggtggccgcgaggggccgggccggggctctctgctcttagataagaccacctggctgaccccctggcactgccagaatgtcggtttttttgccctatgcatcgtggcgctttcctctctttgcatgaagcccagcaggtgtaaccagcacgaaaaaatcccattttgcaataaggaagctgaggctcagagaggttaagtaacctgccttttgatagcagcacagagatatagagacccagacccggttaactctagagccgtccctttgctaccacccggtaaacgattcctctggaggggctctgactacagaccttcctaaatagcaccgttcctgaggacctactatgtgctgtgtgggtgctaggaatacactgatgaatatggcatggtcccctgccctgcagtgcgtgctgagcggtagacagatcattgcaatgtgctatgagaagggctctcctcaaccctacctctgcagaagccagaggaaggtatgcctccctctggtggggcatctggagaaggcttcacacaagccgtgctgggagagctaaataaaaatatgtaagtaggcatgagctaggaaaacaaggagaaacgctcttcctagcagagatcatggtggattgactaacagggtgtcctgagattgccactcctgctgtctctgatctggatcagaaatctgccctgtgccccagagagggagggagcttcttggagcccctcagaacccccaggtccatagcactaggctcacactctagtgagatcagactttgtcacagtgg

SEQ ID NO: 66242 - DNA, 480 bp, Homo sapiens
gatggctacaacaacattgtcaatgttctaaatgtcactgaattgtgcatataaaaatggttaccatggaaagttttaagttatgtgtattttatcacaattaaaaagaataaaagacgcaagccaaatttaagtaaaacaaaatctcgcagtcctgctatcttccaccgcaaacaaaaaaacatgacgttaactggtttggaatgagtgagtcccaaagttacaacatcacaatgggctattccacaagaatgctgacatcatcaagtttgcaaactcttttcaacactgacaagggcttgaaaaggaaaccatgatgtaagtaagtattatgagagaaaacaggagctaatggcaaattcttccatgccttgggattttttgcaacaaaaatccagacttgcttctcattacttatccttcttaccaacaggccttttattcattttttctgtttttttgagacagagtcttgctctg

SEQ ID NO: 66243 - DNA, 643 bp, Homo sapiens
ccaactcaaaaataataagtattattattacggatattagcaccaatgcacacaggctactaaggcgcacacaggtactaaggcacacacagtagtgggtggcagagaggccagctgtggatgtgtgtgtctgagcacacacacaggtacacgtgtgcccacagacacatgtgcagtgggtgggaggaaaatcgaaatccatccagtactcctctctgaacactgaacaaagttcaaattcctcagcccacattcaaaggcttccacagtatggctctgaatcatatttccaaccacagccctctctgtcctccttcagttaccactgcattccagcaagcctggagagaccccacacctccaggctggctccttccatgggtcaagccctccttggacttcctcctctgcactattacagaactccatccatacctgactttgccatcatcatacattctgccagtgatccccacactgtagtggcagaaaaaccacctggagactttctggaaaatgcagattcccaagcctcacctatagagaccatgattttgtaggtcacagctggggcacaagaatttacacctttatagtcacccttggtgactcagactcaagtgattcttaaaacacaacatga

SEQ ID NO: 66244 - DNA, 885 bp, Homo sapiens
aaactcatcaaataaattagctgaaaaagttgaagaccaaatgtaatgatataacagataattcctaaattatgaaagaaataaaacaaagactactgtgtctatctctgtccccttaccaatttctgcagccagagaagaatatcatcatgaaactgagtatcttcattaactctcctggtgaacatgaataagacactaatgcattcctttagttgacacagatcagagggaatgctttctgtctgcttagacgctgtaaatgaaagatattaaatgagtctctcataaatggtgtttttgggggaatttttagtgtcttcacttaaaccaataacaacaaaaacctttaaaatatttagtgcagataaaaggagaaaagttacatcaaaatacttaaatttttataaacagacaagtcaaaaatgtgtttaactttgaagtatttcaaaataatggaaaaatcaacctcatcataattttttttttttttttgacacagcctccactctgtcacccaggctggaatgcagtggcgcaatcttgactcactgcaacctccgcttcctgcgttcatgccattctcctgcctcagcctcttgagtagctgggattactggtgcctgccactacacccagctagtttttgtatttttagtagagaaggagtttcaccatattggccaggctgatcttgaactcctgacctcaagtgatccacccacctcagcttcccaaattgctgggattacaggtgtgagccaccacacccggccataatccactattttttatttgaaaatcagtacatctctgacctacccccagttaattgattagttaagaaaatgggggagggggaattttactttaaagtaccctaat

SEQ ID NO: 66245 - DNA, 1812 bp, Homo sapiens
ctgtcccaaaaaaaaaaaaaaaaaactatccagaccacccatcctaacctctcaccagtactcctcaactcttcaacctgttctttttcttttttccatagcgcttataaagcatgatatattttcttcttcatgggtttttgtttgtttagcttgcttgttttttgtcttctccctcttgaatgttaagctccactaaggccaggttctttggggttttttctcttttacatcccaagtgcctagaatagttttcggaacataatgggtgatcaatgagtgtttgtttaataaatgaatggcttttaggaggcacgaaagaagctaaataatactatgcagcatcccccaacttcaaaccaataaccactcctgatagaaaggaactagaggtggaaatcaatcatttaggcatggcacaagggggatggagattcaaaggtttttcctgtgaccttctgggacacatctttctgtccttagcaattaccagatgttctcactattaataagttgttggcattcagaatttaatattaactgtcaaagaaaacactataaaatgcactgctcctgcagagtaagtccaaatctaagaatctactgtacttataaattatcaagatcaatgaagtcagggtgctcagagttgggggattttatagcagagaatgacactaaagaaatgaaaacattattaggtctctctcttaggcatcaggtgataagcaccacatacctaaccacaacctagcagccgaggttagctatcagatgattaacattgaggaatgtaggtcagctgctgggtgaaatccagaagccactcaaactgtctaaaggcaacagcacatgacactatccacttcctgaactgagactttgaaccagtttgtggttccctaaatagctgccaaattatactatagatggtaaaggtttcattaatataggactttataactataatcgaactataaccagcactaagaagtgcatcaattgactctaaaaaaaattactttctagattgttttattctaaaagaattaactttctagattgacaaagataggggccttgctggtatcatggacttttttcatccgttttctcatactagtcagaggaaattcactagagtaaattcctctgagtgacaaagcttggaaatattcttcattactggcatttatttcatcattcgacgaacattatcaagtgacaaagaggctacgaagggtactgagaacaagacaggtccctccctcagtgagttcaaaatctaagggagaagagaaatgttgacaaagtaaccacaaatgagatgagtggcacagaggggagcagagtgctattggagaggcagtgacaccaggaagatgagaaaaagcttctctgacgaagtactgtttagctgacacctcacaaatgagtagctggctaggtaaaaagggataggaaggggtgtcagaggaaacaacatgggcaaaggccctgaagcaggaaagaatataaaggttaagaatcaaaagagaactttgggaggccgagatgggtggatcatccgaggccaggagtttgagaagagcctggccaacgtggtgaaactccgtctctactaaaaatacaaaaattagcccagcatggtggcaggcaccataatctgagctactcaggaggctgaagctggagaatcgcttgaaccaagagacagaggttgcagtgagccaagatcacaccacttcactccagcctgggtgacagagtgagactcggtctcaaaaagaaaaagaaaagaaaagagagaaa

SEQ ID NO: 66246 - DNA, 1411 bp, Homo sapiens
cagagcaagactctgtctcaaaaaaaaaaaaaaaaatacatatacatatatatacacacacacatatgtatatatgtacgtatatatgtatatatgtgtacatatgtatatatgtgtatatatgtactataataaaatgaaaatccagactgcacttataaacaaatcaacttaaaatcactctaataccacatgtagtctaatacaggaaactcagaaaattcaaacacttccctactgtgtgagtcccgccctgggttaatttctagccattcatgccccttataaacaatcaagacaataagaaataaacagaggcagcactactatcatcttgaactttcaaagtgatcagaaatggcacagcactagtctacttataaagttctgccaaaggtaccttctccgcgtggaggaggggaacattccctctttatgcatggcagggactaaaaatgttctaggatataaaagagtaaagagagagtcaacgatggggctggaaagagaaaaattatttcacggcaggaaaccagacccaggtgaggaaagccaagagagcagaaaaggaagaggccagtgaagtcacaggagggagaaggaaaaatggggtcctgacagagtgtggcagggggatatggagaaggaatggaggagaagggccggtgtcaacgggtggtgggatcaaatattggaaggtggaggcggaagatgcagagggctcagggaacgggagtagaattggctggggaggccgaagagaggagcaaggagacacagcacactgccagagcctcgggagggtgggggagatcctcacctttgttttagtccggctggccttggccttggcccggcgctggggcttcaccgcctcggccatagacccttccgcggcgccgtcaccgtttgtttttgtcaaacccctgcgcttcaagcaacctgcccggttctggcctccggactgtcacatgatcgaatctccgccactcccggagaagaggcggtgagtcggcgcctctacgggccgcaacgtaggacaaaccactccaggacgcatttgcactggaggaaggcaggcccgcccccttcccggagcccaggccccacccctagccctggctccacccggcgcgcaggtgtcttgggttgcgctggacaagggcagcgacccaggctgacccacctcctccgtctcccggctctgcggaacctcactcagtgcggatcccgggcgcgctcgcacacctcacccgcgtcggcttgaagaaatccggaaagtgggtttgccattcttttttttcatcttcagataaaccagatccagtcggttagcctaaatccgcactgcgcgcaaggaagaaaccctgacgcccatcggggtgtgcacttcggcgtcctcttttgtaaa

SEQ ID NO: 66247 - DNA, 749 bp, Homo sapiens
gacccgagatcgagccattgcactccagcctgggtgacaagagtgaaactgttcatctcaaaaaaaaaaaaaaaaaaccagcattcataaaaagactgtaactcatatattatgttatggcattccataacataatatgactatgatgcataagtcagccagcatctggaaaagagtaaaagcaaggttcagtgaaagctgctgaactctagaaggtacgctgggttgacctttcttaaatctccttccaaaattccattccagagtctctgttgccatctggtggcaatgcctgcttggtgaaacctcttacatatgatttccgagaagtcattcatgatacagatagttactttctgtacatcataacagcacaaggcgttatttcatcattcttcattactaaatgcattttttaaaattgcgaaagaatcaggttgcttctacattatttcagtttcttgagacaattagctcccagagcaagtacgtaccaaaaatgtacaacctatgtttttctaacaaactgtcttccataggtgggctcttttccattaacagacttttgcttccataggcagcaaagcatataaactttgtcctttttttcctcttataatctccaaacattaaatgagtcatacaagtacagttgacccttcaacactgcaggagttagggtcactaatcctccacacagttgaaatctgcatataaattttgactcctccaaaattttattttatttt

SEQ ID NO: 66248 - DNA, 806 bp, Homo sapiens
aaattagccaggagtggtggcgcgtgcctgtaatcccagctactcaagaggctgaggcagaagaatcgcttgaacccgggaggcggaggttgcagtgagccaagatcgcgccattgcactccagcccgggcgacagagtgagacagtgtctcaaaaagaaaagaggcgcgcatgcgcagtgaggtttcacgcgagcgcctgcgtttctcctcaaacctaacgatgccgcgggaactgaggagccgaatgaaactgcacagtagaaccgcagcgaagccgaagcgttagcccggaacgagggcggactggaaagccggagcggggccgagcgagccgccccaaaaggctgccgcttcatcccagcgaaaaccgccggccaggccaagcgcggcgagggaagaggagagacggctccggcagcggaaccgcccgacgctggagaagacaaaccggccgtggagtggtgcctggaggagctggtcttcggcgatgtcgaggacgacgaggacacgctgctgcggcgtctgcggggtccgtgggttcaaggacatgaagacttgggagactcagaagcggagaatgaagcaaaaggtaattgtgcacctcaaaagaagccaatttgggtggatgaagaagatgaagatgaggaaatggttgacatgatgaacaatcggtttcggaaagataatgatgaaaaatgctagtgaaagtaaactttagaaagacaaacttaagaagcgactttaagaagaattccagcatgccgtgggaggagtacctgcctgggcagagactaataagctgaa

SEQ ID NO: 66249 - DNA, 1856 bp, Homo sapiens
gacaggagttcaagaccagcctgggcaatgtggtgaaaccctgttcctactaaaaatacaaaaattagctgggtgcatggtgggcacctgtaatcccagctacatgggaggctgaggtgggagaatcacttgagcccgggaagtggaggttgcagtgagccaagatcgcgccactgcactccaccccggctacagagcaagactctgtctcaagaaaaaaaaaaattgaacataaaactgaaaacaacacagattattttctattatgtatgttaaggtcatggctttttgaaagaccattattcctggaaacttaacatagaaggcataagagtcagtagatttcaatgttcagaaagttggttaatgtttgacattacccatctaaacatcaacatgatccaaatcccagaaaagccccaaacccccagggacatgagaaattcaattcacaattccattgaaagagaaaacctgagaattgaagtaggtgttttaattcacaaacattcaaccacctctgagtgtattactgaagttaatgttcagacttttccagttaataaaaaacaagttgaagttctgttggatatccctgagaggtgaacaaccacatatatcacagggtagaattagtgatgcatcatattaccgggcaaatcagtgatgcgttcaagatgtgtgaaatgcagaccccacgggtctcctcctgatccatggcattccctgagaacccctgggcatgcccaagacaggagcggggaggcaggcaactgccaggaagtggctatacccaaaactggaactaggtccgcaaatatgggaccagaggaacagagtgagacaccaaacctcagcagctctagaaagcaagccaggtcaaacaacaaatgtgctgccactactgtcaaaagcaaatatagaactaggagctaggaacttgaactaggtcaaacccaggggaatgtccaacattgcttcaccagctgacttgtgttccttttcactccaagtacaacgtttaggcccaacccatagaaattccaaacagcttctgactactatgtcacatccctaccacaatacaattttgaaggtctttgatctctatcagctagcctctagttgagccagataagcaaagtacaacaaatattgaaggcttatgacaccatataactttgaagacctaaccacaaccctgtaaaggctgggatgcatttcacagctgctaactggggaaccttggcttacctctttatcccaagaaattgcaagttaatagaaaatgtttaatgttaatttaaaaaaaaaaactttttctaaggtaaaacctgacctcagtgcattcattcccattcagtttctcccatcttatccatcttcaaatcccaaagcataattgaaagaatcctccaaaacaaattcccttctgttcttcacacttggattttcccagacaaaagtagatttacagtttctaatactttttgaaccagaaatgaatcagtgttcattatcgatgaatcagaaggtacaattactaagattatcccatctcctaaatgttctaagtaatcaaagagtctatttactttcctacagtgctctagttttagagtgctaggatatcagaggtagagtacatcttggagatcaatcatatcattaatttccatctttttacaaatgaaaaaacaaacaagcatagattgcaagttgaccaaaatctttagactcttcatatgaacaaaaatacataaatacaaaaaagtaatctccaagtttacacatcagactgattaactttgcctccgataagtaacaccagtgtccattgtttattccaagaactt

SEQ ID NO: 66250 - DNA, 1978 bp, Homo sapiens
acccaatctctgtattgaaaaagaaaaaagaaaagaaaggacttgaatgtccatgaattttggtacctgcatgggagtcctagaaccaatcccctacagataccaagagatgactgtatagagaaaaaccattgagcaaagccagaggcaacatcagttcaaactctgctaaggctccagaatgacaagattccaatctggtaaaaggtttggatgagagtgacagccttgtgttgacagcagggcaatgagccagttcagacagccccaagactttccctagtcaatcccaggcagagagaagccctgcccactacaggaacagggttgctgaaacagcaactaggaagctggtctacaccaagaaccttgggaatcaggaaggcccaggaaaaataagtatctacaggaggttcagggacgatttggacctcacacccaagtgagaagcctggaaatccccaggggtgagagaacactgctttcatctacccttccaaaacgggtcccactgtcacccgtgcatgcccgtatctgaaggacactggtgtctgatcatcccaaaaactggaattttttctcattgtggcctggctgtttccctggatctttggaaactgtggtcactgtcttattctgacaagatacaatcaaagttaaccaagagaaattatacagcactgcttaaccaaagtgccacaaagaaggtataaacagggaagggtgggagagaaacaacacacaggtatgtaccaatagcaggcaaattcattgggggccaatcccagttttattcatttattttaaaatgatttttagagacagggtctcactatgttgcccagcctccttagtagctgggactacaggcacacgccagctccaagcccagttttaaacactgattattcccttttgaagcagattcatcgaagatttctttaaataaatattttcatgaagcatttaaatacattcatttatgaagtgtgtattgactcatactttttcaggaacatgtacaaacacgtttgaccacagtcctctcaccttccttggaatgtccctctcttgggcctgtgatagctctttcctggttgtatcccttcatctcttcctctatttctctgtcccctttctcctcctccatcaatagaggcatgcactaagagtgcttctttgtggacttccgatctcttcattctttctccttgaataaccatcactcacttcttttacttgtcacctctactgctgataataatagctggcaactataggtgctctctgtgtgtcaggcactgtactaaactctcaagtttaatcctcccaacggtcctaaggagtagacactgttattatccccatttttatgtatggaaaaactgaggcttgggggcggaagcaggctgcccagggtcacctagctagtaaggggcagaactggattcaagcccgggcagcccacctcagaggcttcatgctgttcggtaagctctcaaaactggacatcttcccaaggggcggggccatctccaccagcccctcaaaccctgcatgtcacccaccagacattagagagtactcactgacatgtttgtactggctgtgaagatattaaaatactgcaaactctgtggcctggaaccctgtcttcaccctgtcaccctctccgctaagacctccccgtatccagcatccctggcatggggctgaggggtggaggctggtggggaggggcttagcgcccgcctggccttagccttgccagtgctaaaactgtggctaaatactgaggattgtgttgtttggttgggtttgtttgtttgttcgtttttgagacaaacacaaatcactctgtcgtccaggctggagtgcagtgatgtgatcatagctcactgcaacctcaaactcctggcctcaagcaatcctcttgcctcagcctcccaagtaactatatctacaggcatgcaccacc

SEQ ID NO: 66251 - DNA, 2067 bp, Homo sapiens
gagccatctgtggtgcccttggttcctctgtgaggctgccaccaccctgcaccctagggtgagtagtgccccagaaggacctcacaaactccagtgaagggactcacaggcacagtctcaactgtgtccctgaggtccccagccaggtttctctaccctgcagcccacgtggggtagagggaccatctaggcagctgtgaagctacctgggtgggtggtggggggaggcaagcaggagccccagtaaggagtcagggccccttggcagctgcggtcaactttgaggtttgcagcctcctgctcctgtcttaaagggatgaggacagctcctctgaatgagggggcatggaccttgaggggcacctggggagtgagaggacagagggaagaggactagacagaggagggggacaggcagacctgctccctccaggctgggctggccctaccgggctgggtggggtaccccctccagcttatagggtctcccacaccatcagccccgctatggggcctggacggaagggctggggcaatggcctggggagggggctcgggaaacaaggctgtagaacagggaaagctccagcaaagggaagccctctatgctgtacgtttcctggaaaggacgatcccggggggcagctgctgctgtcaacccggtaaagctcacaagcccccacaccagatccccccagatcctctcacggctcagctccagggaccggcagagactctccccggacgggtctcgcctccctaagggtctctgcttcgcctgtgagaggaggggttgatgtcctgactctaaggtgtctcggctctctgcgtcctcaggagcacgcgctgctgggggcgcgggcggcagagggtgggccctggagtccgagcccccgggactcgcgggcacgcggtgggtagcgggggacagagagggaacagcagcccggcgtccgctccaagtctgcccctcgagcagtggggctggggccccgatcccttcacgcgcgagctccgccaagcccccgggcgcgcggtcaccgagtggcgccggagctggggagccccccacgcccgccgcgttggcctcccgcccgggccgggtcctgagccccgcgatccgctgtcggccccacgacttacccaaaagtttcccttgaacagtgagcgcgtcatcgcagcgcgagtgggggcgcggaggagagccgggccgcaggtagcacagagcggggaggcctgactgccactgcccgcggctccgcagactcaacttctgcgttccacactcgcgcagggaagccgcccccgggtcctaaaccactcccgattgcgacggccgccgtcggcgctctgcgctccctgcgcgagacctgggcgggaccctcggcgctcacccggccaggggctgcagcccgcacccggacccaggcccatttaaagccccacagcgtcgggccacgatcaatatatcagcccgaagctagctgcctccttctggaagtctttgggtattggaaataactggtcctggcttgggttcctgcccacaaggccccctggacagcacgaaatccaggctctgcggggtgatagacgggatctgatcagatggtcgcgaggacccggtttaagctacagaaggcctggggccgacaactcccgcagacgccttggcttcacggcgggccccaccggcacctgctgcagatcaggccctgggggacggttcattttttattttactttttgttgttgcaggtgtttttaatgaatggggtcacgttttagtctaaaatgtcatggagaggtcatctctgctgtttccccttgactctagtcacttggtggtgtcctaacagggcttccaggagctcagccgctctctgactccctttccattctcaaaaggcaagacccttccctgcccattccaccccagcaagaggggcccaagattccttcttctccctccactcttccaccctcacaaataaaaccccagggcaggtcagacccctctctgcattgtagtagattggtacaaaagtaattgcggtttttgccatg

SEQ ID NO: 66252 - DNA, 2236 bp, Homo sapiens
gatgaaaaccgttaaaaatgcttttttgttaacagaaacccaagatgctaccagcggttgttaaggcagcaaaacagccaacatgtttatttcacctttcaaattgagattacttttagaacaaaaaaaaagtgtcagtgtcaatgcgtttacactgaaatcatgttaatttcaagggaaacaaataacgaagggtattaatccttacagccattttccaaccttgttctcttttacttgaattctccatcactaaaaattactcaaaaccaggtggaaaactcaaggacaaattctttaaacacgtccaagtgccacaaagcacacactctgccggagagacaatttagaaaccagcttcactgttgtcacagtgctggccacatgaaatggttctttgcacctgcaggacgttttcacggtcgtttcgtattcagcactaagagaaagcctacgtaagtattccaaaaaccaccttcatttattcctttcctctaaactgagctccaggcagaggtgaaatgctgggcctgctgaccttcacacaatgtcagactccactgactagcttcaacaagagctgacagcagttttctgaccttcagcgggacgcgaccctaagaatcgaaagagaggaacctcaccgattcagaacaggcctcggagagctagcgcccaagccctgaccttcacccaagatcccccttctagggccgctgtcagccgaagacaggaatcttgaggccctgtctctggacaccatcgagttaactgtctgccctgtaccattctgcctctgcgcaggtgacgagcaaaagggcacctgtgtcgcctgctctgtccagccggagaagccacgggtgcaagatggcggcattcgccacagcccctcgccctcctgcagagagcgcccgagccggcgcaccaccaccctgcagccccacccggccgcctgcatcatgccggccttcggtgctcaccagtccggcccgccgaggaagggcgcggaccacggccgcagcaacgcgcacggacagcatctttgcagttactccgcaggcggtacttctgcagccgcagcctccggactgactgggacaaaatggccgagccgcaaagaaggtcaagacagccggcccacctgacccggaagtactgcccctcgcgttcaccacctctccccccgcccccgccgccactctgcattttttggcaggttacttatttttttatgtaacatttttaagtttaaacctcaaaatgaatgattagatatattccggctttggtcctggcattcgttatacatttattttggtcttttgagtcgaccttgtggttgccccgggtgaccacgtgggtagctgaatctgctaagcagcagttcccaggccccatctggtgctagaggatgagggcctcacccgtctggggtcgcggctgtcttgaggaccagggcgattaatagtgtcggtagtgttagaccgtggtttagcacgagtagcaacagtgaacagctaaaccccgggactggccaccagcagggagcctcccacggagcccgttaatctgcagatcttagccccacttcagaccctctgagtcgaaaattcggggcaatctgaatttttaacaaacaccagcaccgttccacgtgatccgatctgcgctcaggttaaagattcccagcttttttagattcattctaaaagaatcctgtcagtgaattagagcaaactgtttaaaaatcctgataaccgggggaggggagcatcaagataaatagctaatacatgcggagcttaatacctaggtgatgggatgatagttacagcaaaccaccatggcacacatttacctgtgtaacaaacctgcacgtcctggacatgtattccggaactttaaattaaaaaaaatatatcaacaatcacaaggaggcctagaagagtcattgccaatcctactgagaattgtccagaatcagaagtttacaccaggataggacgaggactcgctttttcctctgccaacatctagttcatgctattgggaactctgcttcttcatttggagtcaaagggagatgatgaaaaaacactttctatgcttacctggatgggctttttttttttctccacagaattaccatactgagatttttgtgatatatgcaagatttgtgtgtgtgtgtgatgctggttattattatgtcatagtggacacttattaacgttgc

SEQ ID NO: 66253 - DNA, 1248 bp, Homo sapiens
caatcaatgtggaagaaacacaaacatcttgctaagcaagaaccaaacgtttcaagtacttttttttaacgacaagtgattcaaacaagaaataaaaataaaagaaagaaaaaacaacctggttctaggcggctctatctctcgtagtgttgattataccgcggaaggcgggaagagctgggaagtggcaacgaagcgaggcttgcaatgccagagccttcgaccagccttgcacaggggctcaacggccaggagtctcaggtaaaaccacaactcccagaaatcccgggcccggcgaggggcgggtgccaacggcgtgtgggcggggcctagggagtgagcggggcgcatctcccgctaggagttcctagtaaagtggcgggagccgcagctatggagccgcaggaggagagagaaacgcaggtgatggggcgggaatggggatcgttggcctcctggaaaacgcgtttttgacacccccgcgccgacagcgggtctcctgtgcgcgccacgtctacttttctctcccctattccacacatccgtcttttagtgccgccgtcactatctgcaagccccccgtgcttagactctcctgaaggcctttcccttcctgcccgggcctccccttgtttggatctggcccgggagaggcgttgagcagcccgtgtccacagactctggagtgggacttatgaagccaaacccgccttccggttcgctgctcagcccggcggcttccacatctgaactgcttccgcgccctgcatcccaacactgggagcctcccggcgcggcggggcttctggtgatcgagggacaattgcttttttcagaccatgcacggtctaataatgcgttcgcattattatggtctattaagctttaaggtttttcaagcgaggcaaattgttagcctgtaccgcttttgcagatttggaaaagaacggattgttctctggtaattttcagtattgtacgtttctttgtgtacttgctcactttttatttcctgatatctagtatctccctaaagacaagtgaggttgtgaagtaggactccaaaatagtcacagaaagcatttagtttgcttttgatcacttctttgtcatattctcatcgagccattacagtaaacaaggcttataatatttgtctttcttttaatggttaggttgctgcgtggttaaaaaaaatatttggagatcatcctattccacagtatgaggtgaacccacggaccacag

SEQ ID NO: 66254 - DNA, 1943 bp, Homo sapiens
taaagaccgtttacattttcctcctcaaagctttattattattatttttcttctcaaaacactgctttgctttgggggagcgcgggtccttggccagatcttgagtcttgagatatgtcttcagcatctcctgctcctccttgggaaacgctccacccgccagtgggcctgcgccctcctccccttcttcggggttcgggtccacctcgtttcccccaccctccccagggctgactgcaaatcggagggcgactgcagaggcggaattcggggcagagcggggtctccccagcgggccacgtcccaccagcaggtggcggtcgatctgcaaggcctgcaaggtgcccggacagaaacttgagcagatattggtgccgctgcccgagaagagctcagccgagtctccccgagcccagctatcggcatccgcgaaaaagcggggagagaagggcacgggctctccgctggagcgactctgggattcagacaccgcaagctgctttcggaagggcttcaggagggggtgagtactgagcagcgcacagaaaagggagcgctgtcctttgctgaaggcattgtccttggcttgcattgagtggctttcccaccccccgggaaagacatttcgggaaggtgacggtctcaacagaaggagggagcgcgggaaagaagcccggggagccggcgccttcacgccccgcggtctgcagcgggaggagcgcgggttccatcgcgccagatggcgctgtctggcttttctcgggcctcgggcgccagtctccagaggtctccggcgcagctgcctctctagccggccgacgcgggctctgtgtttccgggcggaagtgaggcgcccagcggaacggcctctggtgacattttcttgggggcggcgcggacgactgaagggacttggtggtagaggctgcggaggcggcgaggttcactttggtcccggcaggggctctgaccgcgacccactgctcgctgccggggcttgttccgaggaggagaaggcggcggtggccgtcgcgtcctgagtcaccgcagcggggaagagtcccggccgggggttcggtgcgtgccccgacggggcgcgcgcgaagcgagcgagaaggcacggagtcgccgcggagcgcaggtgaggcgggaaggggcgcagggccgcggcctggctactggtcgagttggggggcccgggttgcgtcccagggaggggtcggggcgaatcggagggctgcgggccgcggtgagggctctgcggcgtccggacgctggggtcctagcgggcctggctggtgggcgccgggaactcgcagcctggattgccggctgacgctggggcatcgcacctctccgacctccttgctcgtccgccgttggtgaccctagcgtcctcccggcccggcggagttggctccggcactccaagcccccagacgctggggccgggttgaggcgagtccttttccgggggtgctgaggggaggctggaggtgccgcagtccccgggctgcggggggaagcgacttcacggccctggagttgtcttcacgcaactttccggctcctaggcccgcgggggaagcagtggcggcaactccgccagctccgagagtagggggtctggcgccgacacctgcccctgcagcggagagctccggcgccgcggccgcagtggccttggtggagggagaaaaggctttcttataggcttggcgccgcctgcctctcggcgcttccactaccttcggtcggcaggcgcctccagtcaatgcgagagatgtgtcagtctccaaaatagaccgcttctggggagtttgtcaactttatttcaaaaccggcgaggatgtacactgacgaacccgtgttaaagactatcgcctttacgcaagccattcattctcactttaaaattgtccacccccccgccccgacccccg

SEQ ID NO: 66255 - DNA, 616 bp, Homo sapiens
aaaaaagaatgtggactctggggccaggtgcagtggctcacgcctggaatcccaggactttgggaggctgaggtgggcagattaccttaggtcagaagtttgagaccagtctggccaaatagtgaaactgggcatggtggcacgttcctatagtcccagctacttgggagactgaggcaggagaattgcttgaacctgggcagtggaggttgcaagtgagctgagattgcaccactgcactacagcctgggcaacagagtgagactctgtctcaaaacaaacaaacaaagaatgtaagaatgtggactctggaatgactttatttaaaatcctgactctacagtactacctacagcattggcagtattggttctgtgagttcatgcagattccccacccctgctttttttttagaggtggagtttcgcccttgtcacccaggctggagtgcaatggcatgatctcggctcacggcaacctccacctccagggttcaagtgattcacctgcctcagcctcccgagtagctgggattacaggcatgtgtcagcatgctcagctaattttgtatttttagtagagatggggtttcaccacgttggtcaggctggtcttg

SEQ ID NO: 66256 - DNA, 531 bp, Homo sapiens
agctggaactacaagtgtgtgccaccacacccagctcattttttttttttttttttttttttagtagaggtggggtttcaccatgttggccaggctggtcttgaactcctgacctcaagtgatccacccgcctcagcctcccaaaatgctgtgattacactttcctgtgtctttcttgtaaggttgggcacaagagagattactgtaggagatttggagagtggccattttgttgtttacatacattgttgcttatctgttgagtcacctcacttctttgtagtgaagcagcttatgggactgcaactgtttaactctcccctagatctccttcccaatcttcttcagctctgctgactcctgggccaggtatatgtttagctgtttgacaaagaggtttggttctataggacatctataccatcaaggttagaggcaacaagaactaatacagagttcagtttgtcctgtggacttaagcttgtgtgtgtgatttctagctcgttgtttcttgctctctcctacttgttc

SEQ ID NO: 66257 - DNA, 785 bp, Homo sapiens
ttgtgctctccaagagcaacgacgcggtgcgccaggcagagagcctggggagtgtgcgtgtcttacctgtgtctgcatcgtgtgttccctctgtgtgtctctgagaatgcgttcttggcacgcgtcctgcgttaacaaggcgtttggtgtgtgcatgtctgtgtgacagtgcctgggtcctgtttgcggctgcttgttcgcattccagcttcccttgtgcccgcagtcaggctctacacgtgcgccagcctccgagcgcacgtccccgagtgacccgtgcgcggtgtgcagggacctcagggtcgtgtgcactaagggcgctcgtgcccgtctctctgcactaaggaacgcacctccacatgtctgagtgcacgtccctctccatgtgtgcacgttccgtgttcacgccgcccatgtctgtgcaggggcgcttcacgcgcgccctctccggcccgcgggcggccagggacccgcgctgggctccacgcttcccgtggggctgacccctccctcgcgccccgcagcgggccgcagcgattggccgccggcccccttccagccgtcacccctccctccctccgccacccgcgcgcccgcggtccccgctgtcccccgcggttccggcgaggccgcgccgcgctgcgctccgctcccattggctgcgcgcgcctttgtgtggcggcagctgcggccccagcgcctttgaatgtcgagaggggccgggaagggagcctttccatgggccatctgtctccccgccagccgccgccccaccgccgcccgcg

SEQ ID NO: 66258 - DNA, 470 bp, Homo sapiens
cgaaacagaggtatcgctttttcctttcggggtctgcttcggagcgtggatcgccgcaggcaccggggcgggggcgggcgccgcgggcggccgggggctcagggcacacccgcgaggacgcagggcgagcggtggcttccccccaccccattttagggggacccccgagggtgggggcggccgccctcgtgggagcttttgtagtgaagttagggtttggcgaatttgggtcccttcctccccagccccattttttattttttgcggcggacgtggttcccccaaatcacagccccttcccctaatacctagccctgtatgatcgaaaggagaaagatacatgaccgtgtgtgtgtgtgtgtgtgtgtgtgtgtgtgtgtgtgtgtgtgtgagagagagagagagcgcgcgcgcgagagcatgcttggttttctgtggtttgctttttttgaggtatatgtgtgttttgt

SEQ ID NO: 66259 - DNA, 1145 bp, Homo sapiens
tgacttgaataaactattctgagacctagattctggtccacaaacttccactgtgatcttgaacaggttagtttccttccatcaattctcagttttcccatcagtcaaatgggcacatcttatggcttgtgccttactggactcgtcacatgaagtaatgcataggaaacaagtcgagaagccagccaaaggcgacagtgaagatcatcactgacattcttcatagtggtggcactcagacaggccatgtgggacagtggaaatagtcctggcttcatggcctctctgccagtaactacccgtgtgaggtcttggccaagcctgagtactccgcgacttcactgcctatctgccaagggagagaattgactggattgcccctgcctgctctaaagcactgtgctttcctcgtgatgagaagagcttctattcctatcacctttttgctttttcattgggaagatagccacatgacctttaggactcagtaggcacgtgaacttccactggccaggtcataccatgcagtaggtgggaagggagcagtaattgcccctgcctggctagtagcccacccagggcatgggctaaacctggaagcacagacacagggctccttgaccccgagctcaaggctggcataagtctggtgctgctgctcttgttgggccactgagcgggacattcccccggatgctgctgcttcctcctgctgtcctttccttgaaacatgcctgggtgtgccgctgtgtgcagctgagccctccaggaagtcctccctgccagagaaggagggggacagtcacccacgttggcctcccctgacgacactgtatcccttagatctaagtgctggcctcactgcacctaggaaaggaagcggcggctgctgactcagcaccagcctgcaggtggagagggggtggaggagctctctgaggctgggaggaagtgagaattcagtggacacctgtctcaaggaagggcaggaagcgttggaacagctgctgtgccccctctgaagctgagtgggagggaaggggtggaggcgctctccatgtcttcccccttctccccccgcccccagctagcttgcttagctccagccttcctcccccatgccaccccctcctcaaaagctcagg

SEQ ID NO: 66260 - DNA, 1283 bp, Homo sapiens
cttcatcacggctgcttccctagcacctagaacaatgtctcacatgtagaaggcatgcaataaatatttgatgattgaataagtcaaattctgaatcaaatacaattatgtggaaagatagttacagacccagaaaagagctatcaactggctatatccatgctctgggctgtgagggcaggactgtgaaggggagaaagttagtttttctgtctcagtcttgccaagtcattcagcacctccgtggttttccattctctctggacagacagaaaatcttgcaagttcatccacactaggaaacaatagcgagttaatgtgttgccctcttttgggcatttgcacattgaaagtaaaagtgagagagagagcaatgcttaatccaaagcaatgattccctcctggagaatttttggctctagtgggaacgctattactggaccatgagtctttctgatgtccccgagttcaccccagaagtaggctgtcagccagggtgcttctgttgacaggctgcccttgggtggcctgttgctgggtgcccttgctactctcccctgcctggtattttactacagacggcactggagcttgatgggaagagggggacttgggaggtgcaggtgctctcagagtttgggaatatgtccagttcaaggaaatcattgagccatcctccgtagccagccctaggccagacctcagggagggtgaaaagcctctatactttgtaagacactttcaatgggggaggaggtgggggaacttcatagcattccccctgctaggtgggcaagcaagacacaacatgcttgttttgcagattggaaagctgaagtccagagacaggaagtgggtacccaagtcactcccctgagagcctgccgggactctcctctaggggagcaggcacaatctcggcctgaggggccttttgggtctagctggagtgaccgggtcaaagggctgctggcttgaaataactgcatgatattaagcaatgagcggagtgggcagcgcacagctggaccaggcctacctggggaaggccaacaggggtgggaggcagggcagtcacaaggcaggggcagccaaggggctgatggagcccctcgaggtaactggagacggacaggcctctgctgcttgttaggcatatgggatctggcagctccaagaagcctatagctctgcctttcccaggcatctcctccctccccccttcctctttgcatccttttgttatctctcttcccctgctctcctctaaccttctttctttc

SEQ ID NO: 66261 - DNA, 1475 bp, Homo sapiens
agaaaatatcgaggtttaaggccgattattgaaggcagggatccccaaacattaggttcctcgaagatgttaggaggcaagggtgggagaaggggccttttctcgtgacagacctgactaaacggtagcatcagccataagaagaggagagattcctaaacgcaacttcagctttcagaaaacagtcctccaccaagtgagtagcatgcagacttgtgaatagccacagacacgtacaccccggtgaaggtgcaagatcaaacgttgcttcccacatcggccctcactgcgaaccgggatgtcgggtccccatgtgcccctcctggagggcgccccgaccccccgcgccaggtgtgcggaccactggcagcactcaggagccggctcgccgcggcccaggcccgccgcccccgcgccgcccgcgtgccctccgccggcccgctcccctcccccgcgccctcggcgcccgttcgtccgcgggccggggctcagggctccgccaaccggccccagaggcacgagcaggcggcggccggcgacgttgcggtttccccacctcctctcccatcccctcccccgcggcctccgctctccactcccgcttaccctcaactcttcgaaatccgccattttataccacccgcgggcgccgccgccgctgccgccgcacccactcccgctgccgccaacgacgctgccgccaccacggccgccgccgcctccagcaccatcctgcactgggcgccgcttaagacgccgcggccgccgccgctacagccgggcccgtcacgtgaacggcgcgggagctccgcctccgacgcgccgaagccccgcccctagcggtgccccctgcccacccgcgcgaccgccttccgcccgcgccttcagtccgcgcggcgacagcgcccgcccgcgcctgccccggcgtgctgccccgcggcttggccccgctcggccccaggtcgtgccttccctccccggcggaggcccctgcggactgcctagagctgggtcgcaactgaggcgttatccgcgggcctggcctcgggaagtggcggggaggaagaagaggcggccgggacgcgtgacaggagcattcgggaagattcttacggtgcccttcacgcggtgcctatggacggagaaagccgccgcaaataaaaccatcccccagagtagttgtggcggaataatctaaatatgggtgttgggtaagctattgttcccatctaatggtgaggttgtgtgacacctctttgaattgctaatgtcctgcaagtaccaaccttgccgagtttttctgaccttgaagggcacctgaaggtcacggactgcagagttgggagagttaggcggtggggttgggggcggggagaagtgaaataagagcgctcagaagggccatgctaaaaagtcggggaaatctgatagctaggaaggagtcaaacgccaaggcagagtaagtagatagaagg

SEQ ID NO: 66262 - DNA, 2238 bp, Homo sapiens
aactcttccagtgactccccgctgacctctggataaagtctgaacaatgaacactggtggacagagtcctggtttaccctctccaacacatttgtctctactagcacccaagttccatggtactgcaggcggccaagagctctacactttgcctccctcgttgcgggacttttgtctgcaactactcgggcccctctacaccctcatctcctggccaatccctttagccctcagtctctgataaccatcacttcctctggcgtgcctcctctgggtccaactccttttctcccagagttaggctaggagccacctgtggtcctactacatttaccactgtcctggttaccagcccgcgcctctcctactaaactgttaagctctgtgcataagggactgtgttgcctttcccactgggttatttaggcgttcaataaagatcgtgaattaactcatgaatcccggtgtccacagctggaaggccccaacaacaaactctttcagcaccaactcaacttccatccccccatctcttggctgggaaggggcctcaagactggtcactgcactcggttctaaaccaagtaccagggccttaaaaacgccaaactgaccaggagggacgctagctccaaaatacagcccaagagcacgcttcgaggaatgactgacacactagcttcacgatccgccccgcagagacccacagcgcgcctcgcgcccagctatgcgcacgcgcggggccactgcaaagagggcggttccgacgcggaaaacagggaatgcgcacagagcaagagcgcacggcccggctcgagaggaggggcggcctgggggcgccactagtagttcccgaaccctgtcacaaaatctgcagcctcccggccccaattgcgcttcttcctcttcagtcctacagcggcttctcacccacactccgtacgccgtcctcaggaaaggcccccgctaatggcaaagccagccacccgcactggccgcgggtcctcagccgggatagacagccccgctgctgcccgacggacgccggaagttgggccctggccgcgccggaagccccggatttcccggctccgccccaccccttcgcccgggatttccgccgaggcggtgcagctaccgcgccgtgttgtcctctgtctgcaccgccgctgacggaaagctaggcccttctggagacccgctttcccaagggcgcggcctcctgggccgggatgcacgaggaaaaataatcccctgcctttcttcggtagctgttttccagtccacagcaccactgctgaaccgagcgttactgagtagcgttctttgccttcacccctcccttcctctaccacttgtccactctcgaggtttaactaagaagtcatactttactagacaacccaatctcagaagtcgtcatttcccccttagctacttgaatagtacctggcacctcttgcttcctccattaactactccctcgggcagcgacgtccctcctttccctcttctctcccgattagagccactacgggccgtgccttcctcttccacgggagctctatcttggtacacccagaaccacctccctccctaacccgctgccacactcgtgggggtctctacctgtctcctcttgatccaggtaagttatgtggacctgaataatagagtacagaaaagtcactcttatgcactcactatgaaaatgactgaacaactttctggagccgtgttgacataataggatactcactcgggttacaccttatacaagggttataccccttgataaaaccactgctctgtccttgactagggacccatatatgccacccgtatgccacaatctaacacccccactacccaaggctgcagtcagccctgttaggagctgtgacccattctgtcccttggactaggagccatctgcttttcctccccactggatctgaagtttttttgtcttactcatatatgctaagtttaagttttctgtgtgagggtctaattggttgaaggaaaaaggatttggtcctagtttccccttatgagccagctgtctttgaccagattaagacatcaccaaaggattttaagtgggtaatataagaagtgtatttttctaaatgcttcctctgcctgcagtatgaatagataggagagatgccagaatgggtgagaccagataagagacccactgcagggccacaagagagatacttgaactagaat

SEQ ID NO: 66263 - DNA, 1109 bp, Homo sapiens
ctgcctcagcctcccgcccggctaatttttgtatttccaccaccacgtccggctaatctttgtatttttagtagagacggggttttaccatgttggccaggctggtcccaaactcctgacatcatgatccgccggcctcggcctgccaaagtgctgggattacaggcgggagccaccgcgcccggccccacacccccaactcttagcccgaaactcagaccccgggttttcgactattaaaagtagtcacaggaccgcgacactgcacttcagcctgggcaaaagagcgagactccccctcaaaaaaaaaagtagtcacagaaaactgaattaaattactgacctgaagtaatcgcaagcagaggcgtccctgactgacttctatatccctccaccccaaccccctgggccctgcacagcgggtgtctgttgaatattctcccggctgttgagcccaaacctgatgagaggaaaggctcggcttccactccaagccgagccttccgctgttcttctgtcccggcccttggtgtcccctcacgcggccccattaggttacgcgcccccggggactccgccgccgccccagcccgcgccccgcggtcccactcactgttcttgaggaatcgctcctcgtgcagcactgcgatggcgttgacgcagagcagggctgcctgcagcagtgagtacagggtaaaggccatggccgtccgaggccgccccgaagtccaagcgatttctctcccgccgccgcaagggacgtggcgcctccacggccggcgccttcctacggaagccgatggggcccaaaacgaactctccgggaagccccgcctccatctggctaagaaccgcccctcgctgaagactgcaagtcctgccgcttgtctagaccggtgatgtgcaatcaatgctctgatgtggccagtgctgcaggtgcaaaatacacaccggatttcacacacttggaactggaacaaggatgaagaatatcccaataatttttttttttttgagatggagtctggccctgtcgcccaaactggagtgcagtggcacgatctcggctcactgcaagctccgactcccgggttcacgccattctcctg

SEQ ID NO: 66264 - DNA, 583 bp, Homo sapiens
ccttctgagatgtacaaagctctgcctttattctggccagggttccttaggtcttctacccctagttaaggcaaaacttcctccctcccaaaccaaggccactcttgccacaccctctacccagaccagaccagggctaacatggttcctgactctcaactcccatgcagcctcctgagggggctcagaagccaagtgcagagtgaacgaggagaaggaatgtgacctgccagggtttcccttccatatttggaccagaaccattctccatctcttgggagggaaggcagctgcacccagattccaaaaactcctcccagagcctttcctagggcttgtccagacaggaagtcggcccaggggttttccaattgcccaaaggtgctatgcaccccaccaccagaaggcggcgcccaggaatcagccactgcctgtgtctccactccgtggctcctaacaaagctcttaactcctaagtgcagaggctgaagcaggaaggacctcgagggagatcatccacgccagcctccttaaagttttgaaagtcacaggctcctttgagaaaccgatgaaaactactgac

SEQ ID NO: 66265 - DNA, 2283 bp, Homo sapiens
gcattctttttctgtttaggatcaaaaggacattttaaggataagtaaaagacaaaagtacctgacccaaagacaatatccccctccaagagaacaaagtaagttgcaattttaaaaaccaagtttgaaatacgagaaatcacttcgagggctttccaaaggcgtgtgataaaaactaataggctccacccgcagaacaactttcacaagtgagtgaaggatgatcacagagttatcagctgtgtgcgtgtttgtgagtacacacaagccatggaaaacccgagactaccactgttaacaaaggttacgagaccaaaaaaaaaaagtggaggcaaagtattacgcgtccctaacaaggcttccccacaactcctgaaacaagagctctggcccttcggctttaaaaatcagaaccacaaactatggagtgtgagagcagcgaggggaagggacgcaggcagcccccgcccccgtcagcctgggcggcagcgcagtgcaaccgagccccgtcccttcccggctctccggccccgaacccgcacgcccgggccggcgcacccacagcccccgaactcaccacaccccagcccccacccgcagcggccatgtgacacggcccatcgccccggccgcggacgcacgcaaacacttccctagctggaggcccgcgggcgcccaggctttacctgcaaggtggcgccaggtcccgccccgtcagatccggggggtccgggaccttttgttccttcctcttccgatgggatggagggggctgggaggggaagaggggaatgggcgattggaggcggaactgaaaacactcccggccgccgtcttcccgccccgcccccaggcccgggcccggccggcggcccgggcgcgcgggagggtaggggaagagaggggaggggaggggaggagagggaaggggaggggagggagcctggccgccgcccgcggggaaggagggggtgaggacgcgcgcgcccgcgctgcccctcctcccctcaggcgcgcgcccgcagccctaccggccgcccgcacggccgcgccctcccccgccagcccacctccgcttccgccctccgccctcggccgccggccgccgcggcgccacgcacccacctcccggcggctggcgggctgctggctggcgagctgcttctccgccgccgcggccgcgcgggtagacccgcctgccaccctgggccgcgggccccgccgattcgccggcgcagccccggggctggcaccctgccgcccgctgattggcgcctccagccgcccgttagggcgcgaggcacgccggccgaaagccgcgcggggcgggtatggaagacggagggagcggaggaggaaaggaacgaggccgagcaccgcgggaagggccggggggcgagcggggcgcggggagtcgccggccaccgcctccccacctccctttgcctacggcccgccccgcctcccggccggaccggcggcgcccgcagccaatcagcacgagggaagctcggggtgtgagccgcgcatcgggggcctcgaatcggaagggagacgtcgctcgctgattggtcccgcctccccagtctagcgtgaggcgaggcggggcgcggccgggcggggcgggacgcccgcggtttcgcttgagttgggcgccggcgcgctcccaccggggctcacgggcggagagggagaggcccgcgccttgccgcgcattaagacgattcccggtgaccgcccgatccctcgccagcgtcgtgggtggggcctgtaggggcctgccgcctcgtccaccgtccgtcgtgaggccggcagcggacacgtgctcatcccacggggaggccccgcgcagcgcggaggacgcgcctgagagagaaaaggggttcgggagaagcccgaggacccggcccgtgactgggcgcgccctatgcaaatgagcgggcggggccctcgtgttgctgaacgagggcgggttcgcgatgtaaataagcccagaggtggggtctttggagagcacttagggcccgggtaggggatgccaggtataagtgtttaacctaaattttggttccgtcttcagtaaaaatgatatcaataatccatgtcccgaagggtctttgtgaagtctaaaagaaacatctgtcacgatgtcccttaatggctgggatatcttcccttccccttttctccactgttgcgacgattaggccccaacttgcacatctgccctacaggaggcagcaaggccctaaacttacggctgcccagaacataactgcaccc

SEQ ID NO: 66266 - DNA, 1734 bp, Homo sapiens
tcagcagcagtgataactacccttttctgagcacgtcccacattccagacactacgcactggctcactgtagccctatgaagaaaacactattggtgtgattcccattttgcaaggaaactgaggcacacagagggaaagtaacttgcccaaggtgtctttccattaccaagtgtccaattcaagatttgaactcaatactagtgatttgttacacagatgcacaggccatgtgtgtggtgtgtgtgcatgtgtgtgtgtgtgtgtgtctggtgtgtggggagggaaacactggctgtttgagatccctgagctgaggaaggtgagcacagagtgagcagcagttgaaggtgccccacgctgcccagtttggggattccaagcaggagggcccgggagtagctgtcccactgacttgaatgcacttcaagccctctcttgtttccctagggccgagctctcttagcctcccagccccagtttcaggcctcctgggtggcatcctcagctcacctgctgactccttctcttcatctaggccacttcactccctctggcccctgctcagtgcctgggcctcggcctggtggcctctggcctggccaggggcatgcggatggcagtggcattccagcaagggtgagatcaccacccatcgccctggagaacaggctgccaggggaggtgtctgcgtcacttgtggccttgttggcagatcataaaagctggaaatgcctgatgaggtaattgtgccccagggccctgggggccagaccctgcgggctccctccatggctgccacttcccatcacctccctctggagaggcagagtgagcaggctgcttttctcttcttttgcttcactgtgggcccccttctggcccctgggaggagagggcagaacctccatcttcatgccagggagccccagctccccaagtctttgccaacaactctgagaccctgccctgtggggccctcctccaggagggtccaagtagctgttccgttgatacagaggggtgtggaagagtagggaaggggaagcaataaataaaataatgctgatgtaagaggcttggtttgagccaagctgcctgggagagacccagagtctagagctagtgttgctcactggcagggcttgtccatgccttttctgactctcagtttcctcatctgtgaaatgggtgtgttggcctagaaacgaggatcttaatctgctgggagtgcagatccctctgaggctagaggcaaaaccgtgagaacatgaattctagagcagaaggctgacgcctttccttggatgctaccgtcaggtccccagtgaagttgggtctttaaaatcctgccccacctaacaatctctgttgcttgaaggtcaccaggaaatgacacagaagcctttggagtggtgcccaaatgctcacgtaggcctgcaccctgcagctctgagggcccagcccctaggaaagggagggcagtagttccatgtgcttctcagaagagctggtgccaacagggtccctttgaagttcctgcttaggtcctgggccccaaaaggaatggcacaaaaagacagcccgtccccgtcctccttatagcctcatggtgcctggtgccataagatggagtgacgcaaatgttcaggctggggaggaagtgttgggtccagtgtctgaggtcagccacatcacagaggttcttgctctgctcaggctctggaaagaattt

SEQ ID NO: 66267 - DNA, 795 bp, Homo sapiens
cgggagtcgggtctctgccagcccagcgctcggaatggagctttgtggggctggggaagcaacctttgccaatgggaagggggtgtcacagcgcctcattccctcccagcttgcgctcctcggaataatctccaacagcgtgcctagaagcacagctgcttttgtttcgggcgtcggtgcttcccagaatcccggtgcccggacccagccgccgaaccgaccccgccccgccgcgggctttgttccctgcgctgcgcactgcgagcggcggccacgcgggggcgctgggccgggggcgggggccagggctgggggtggggcgcgcccccgggccacctcccccgcccctcccggctcctccccgctcctcctcccatgccccggcccccgcctcgcagctgggctcggactcaggcttagccgcagtctgtgagcctcctccccgcacctggccggccaggccagcccagcctacttgtctcgctgcgcccggctgctgcctccgctccaggggtcggcgccgggacctcctcctccgccgccggcccgcccgcgtctacaccgcacacccgtggcgcgccctccaggggcggtttttctcccggggtcctaagtctcactctacctgcttcacgcttagtggtcctgtagaaatacagacgcgtcgtaggcacttagtaaatgtctgttgaatgactgtgtgtaagcactcgtccgttctttaccacacctcatttttaaagttaatggacgttatttttttcaagcaattttagattcacaataaaattgagc

SEQ ID NO: 66268 - DNA, 453 bp, Homo sapiens
tattggtcaggcaggtctcgaactcctgaccttaagtgatccgcccgcctccgcgtcccaaagtgctgggattacaggcgtgagccatggcacctggcctgaaatcttttaaaggactttataggtgattgcaacatgtaatcaggtttaggaactgctggactaagcaccatttgatggtgaagagtccattcatagcagagcatagtccaggctgctcttgggtcatacaagccaaattccattacgataacttccaagaagcactggaattcacttctggtcctcaggtttggctacactgaacatgatgccacagaatggctaatgaccaggacttaggatgttctaatgaaaggatagttgtttttttttttgtgtgtaatgtttggtagtcttcaaactaggtgagttcccccatgccagttggctcaaatttgtctttgttaagag

SEQ ID NO: 66269 - DNA, 1190 bp, Homo sapiens
tagggggaagctctctccatcgtccttcccaggccagccccgcggccgctgcgcccgcctgcaggaactcaggcgctccagtgggtgacgccggcccgggcgcccgcgggagtggggacgcacggggtcagtccttttgcgccacccacaccgggccgtctccggagctgagagactatagctcgactcgcctgctcgggtgggagtgctccccatccactcacccccaggttggagtccagggaagagccccccacccacccagctcagcgcgcgatttgagcccagggacctgacagggctcccgccgcgcgcctagctggacttctgccaatcgctcctttaatttctgcccgtatcgccggccctcgacttttgccaagttgccatggcttttgtcccccctccctcccgtccccaagttttgcatctgactctcaggaggaccaagcattcttgggggagacaatttaaactaccaaggtacacccgcaactccctctcggagtgcccttacgttccttcggctggcccctcgccccaaaggagcccgctggcgtgggccggcggcaatggggcagtggcgagagttgctctctgcagagttccagatcctctctcctatttcggaagaggtgcgtggccccacgccccgcaggagctccggcgaggctgggggagttgaacgctttgcggacgccgccacccgcgccagccagagccgccccgcggccacccggccacagggtccccgcagcgcgtagcgagaatgcccgcagcgctctcccggccgcccggaagggcttcctcccccaccccctccccacggcccggccgctgggctccccagagccccgatcctagcccagaggcgggccgaggccgccgcagacccacctggccgccccggggacgccgcgctcgtgcccgggccgtgtcctgagcgccgccagggtcccgggctgggaatccacgcggccgcgctgctcgcgggagcctgccgcagccggcgggaggttgtcattgattcgtgctgggcgagttaagccattccaggagtggttttgagagagcactccctccccaccctccaaccagaagtatttggccgggagcccctttggtccacctgtactgttaagcgcaggacaggacgatctcaccactcgcgcgttacgcttcactttatg

SEQ ID NO: 66270 - DNA, 2631 bp, Homo sapiens
ttgatacatgaatagaacaaacaaatctacatttaacaaataggtatcataaagaatcattattcatgccacctacatttcttatttttccattgcatgagaaggagatcatggagctgggaggaggcaggaagcctggtgctgaggtgttcagagtcactgccctccacagatgatcagaggcaaagataaagtcttggtgcagtgatgaagtcagttagtgggaaaacgggatttggtttcgcaacttttccagagctgtctcttgcataagatgggacacacacttgaaaataatcacgatgagcccttattgagcacttagtgggtgtcaggcactgtgctaagcgctttgcaagtattatcttgtttacttctcatctggtggtttggacagcactataacttccatttcacaagggaggaaatgcaggcccagggatgttaagtcactgtccccaaagcacacagctgttgagtggaacaatgggtacccgaagccaggcagggtgggttcccagctggggcttctggtgcctgggcaagatatgccctttgagagcagtgatgttgggatgtcagaatcaaccccatctttgtcttccacaaaagggctggactctgaatatcaaaactctcctcttccctttgcctttaaaggcatagggaggcacatacagttgaaattatccaggctaattgttcattagatgttactgagcatctaatatgagccaggcaacatataaaaggctttatagtcattttcttaatttcaccattaccacaagcttttagggtgaggattagcatgcccattttacagatggggtactgaggtacaaggaagtttagaggatctgcctgaggtcagctaatagagggagaggagctagattgcacccactctctttctgtttctctgcctctccctgggtaattcagggcacaaaggtacaaggtacaaccttccttgttggggtctgcatgatgattagggcatgagaaagacccagggagcttcctgccatggtccaaagggaaaaagggaagcaaggaagaagggaagaaaagaaaacatggatgaaacatgggctatatatgtcaggcagtaccaagatgttgatgaatgatccaaaaatattgctacaatttcaaaagtcttacaaaagaggggcactggccactggccataggactgtgaattggtccaccctgagccacacactccaggatacactcagaggtatgactatatctttttggaatttggctgtgttctttgaggtcaaagctcctggcctcatgaaatgttcttgacaggttcgagtaaatatgggaatacacacactctgtgaaaatggtggttccctcagtccttcccctctcagggttttgaacttggttctggaagccccagggcctaggaggctgtaggaacagccagctctgaggaaagggtcaggaagtgactagtggacagggtgatggctgtggctcagggtcatggctgggaaactcggaaagggaggtctctgaaagctatgtcaagtccaaaggccacagctggatgcagagtctgagaggcctctggcagcagaacacactgcccatgtacccagtaagcaagcaggggttagggctgggcacaattctgggcttgcgaccctgtcacctggggtcctgacagacaggcgtgaccaggggtcaggaatcgatctgaatggccaggaggtcaatcaaggatctgaatggccaggaggtcaatcaaggcaggaggaagcagtctgaggatagaccccagctctcacagatgatccagagccttagggatacctgagcgggggaggagtgctctgcaggcaggggcacagccctgggactgttctctggcacaggacaaggcccgagctgtaaccagggagagcaggggaaccccagaggattgtagccattgactgtataccaaaagcaagaccaagcctatagctgccgttctttcatggcagtctccaaaatctgccctgttcaattctttaagggttccctctcccgacttaacagtccctttgggtctggcatttcctttcattttagaaaataaaactttgtgcttcttaagtcttgaaagcaatatagacaccttatggaaaacttgatgtgtctaggactctattataaaggcagtttttttaccctgtgttcttcactagccattttatagtgagcatcatcccataatgcactcgccctcaccctccatcccaacctttcccactgcctcatttgaagtctcacctgcaagtgcccctggctggcatctgtgtcctctgattaaatgagtcacactctgagctatattgccactgctaaatgctcaagtcctagtctctttatgggaattgtttaaaagatctgaagaagtcaagtctgcataataggaacccagagaaactctcaccagcaatgccaatcctcacccagtgctgcctcctagagccaccaaatgtgggaagagctggtgcataactgaattctcattagcagtcccttaccctatattctcatttgccatctggtcccatgtaggcttggaaactagaaaactaaatgttaaaattgtgcatgaaa

SEQ ID NO: 66271 - DNA, 1642 bp, Homo sapiens
aactcacagccttgggatgagtgagaagttgaactggccgcagggagagacacctgagagggcagtggcagtctgaggggggccaggtggccttcttgatgtgatatgagggatccctgaaaggcctcccctgtcccaaatatctgctccctatcccccaaatctggggtcctgcatctggaattccaccatttgagacaagttttttttttttttttttccagtgccgggggagcagtggggggtcgtctttgattgcagacaccttcaagcaaaacgcacacagccatgagaagggtgtggttcccacccttctaaggttgcctgggtcttccctgcctgccagcagaggcctggcagcttgtgggccctgggtgcttggggctggaggaggtgggggggacccagaagggaccctaaagggggctgtgggggagggagggcctcctgggctgactcaaggtctccttcaccaagacccagagggcctgggggacgggggcagggaaagagaaagagcacgtgcaagatttgagttctccaggagggctgggagtgggagagtccagggaaagagctggtgcctccctttggctaaccgatcccttggaagagccagctcagagaggggaggaagggagggcgggtcaggagacagggtggggccgggatgagaggaaactgtaaaaccaacggggcggattcacgaaaaattcccgagcgtggtgagggtagagggtgctgggcagcaccccagttcgccgggcccacgctcctccagttgcccggcctgttcagactggttcgcccacctttctctccctgccggccccactcgcctgacctctgagaaagcagaatccgggacatgaagcaaccacagccgctccgcccggccacaagcgccccggactccgtgcctgcccgcagcccccttcctgcagcgttcactcggctgcccggcccggcccggcccgggcgccccgccccagccccgccccgctccggaggcccctcctctatccccgccccttcccgggcgccccgccctctccctccactctgcgcccccgcggcctctctctcctcctgcgggagccatcgccctcctcccgggcgcccctccccgcggccgcagcctgtttcccgggcctctcctccgcattctcacatcgctccagctcgacctccccacccgcccgcctccccgggaggccgcggcccggcgcggcaccgcccctgcccacggttacccggttaccgcctgagaggccggcgcctgcccgggcgggcgggacccgcactgaccccgcagggggcgaggcggggctgagaggggcgaacgcagagccagaccccccgccgccgcaggccgcccacctccaggcagggcttcgtgccagacccggctgtagttatcagctgggtggagggcagtgccagctgcaggcgtccccgaggcgcaaacaccacccctggccccagcctccttccctgcagccttctaccttctaccggaaacagagccacggggagctaaaggaggatccagcaacagtggaggcagggactccacctcagaggcagggccgcactgaagcccagctcacctacctgctgggtgaccttgggcaagtgactt

SEQ ID NO: 66272 - DNA, 978 bp, Homo sapiens
tctgtacctactccccagctgctgagtgtggtacacagctttcactcatgacattctcgggtccttgctcttggttgaggtgatgccttggaagctgcaccaccagcaacactctgggggcagctgctgacaaataaggggacacacaagccctgccccctgcctccaagtcagacatcactgcagtgcagttgatgtggaccagacccagggagacctgccctgagaccacattcccactcagctcttgcttctttaccctgcttccctctctccttgacaagtgtttcctaagagctctccctggatacatcacatcccactgaaaactgactcaggctctgcttctaggaagcccaacctaagtcagtcaccagtggctcaaaatgaagccctccagcatcttttcagagggttgtcccaggagttggaagcacacgtgagccttcctccttgaaggcagcaccataaccaccttcctgccttgccgaagaccaccagtctgacataatacagcccacgaaagccagcaacagcaaaacatggacatccagaacagacagagttctgacaactggaccccgtggcgcagcacaatgatgactcttcttccccaggatgaataagcaggaggcaagggctgagccaaaaggacctgttgcataatctgagcaatgtccagttatgtgcagcggaaagtcagtgtggacgtcttaggcagctctaccacttactagcagagcaaactagagcaaatattgaatgattctgagcctcagtttcttcatctgcaaaatgggaatactggatagagcctttgtaaagcacctatgaggcagtaccttcaagagtgctgcaaattgctcatccaatgtgaatactggctgttgttatggagatttataactagctaccttctcctgcttgcttgggacaaatattaattaatcatcattaaataaatatatcccagctgcc

SEQ ID NO: 66273 - DNA, 1141 bp, Homo sapiens
acatgaaagcaggtgaaagaaggcaactggaaaaggctacatactgtctgattccaactatatgacattctggaaaaggcacgactatggaaacagtaaaaagatcagtggttgccaggggttgggtgaggaagggatcaatagacagagtacagaggatttttaaggcagtggaactattctgcatgatactgtaaaggtggatagatgacattatgcatttgtcaaaacccataaaatggtacaacgtggaccgtgaactccagtgtaaacggttgatgatggactttattttattgtttgagatggagtcttgctttgtcacccaggctggagtgcagtggtgcgatcttggctcactgcaaccaccatctcccgggttcaagtgattctcctgcctcagcctccaagtagctgggactatagcccgtggcaccacgcctggctaatttttgtctttttagtagagatggggtttcgccatgttggccaggctggtcatgaactctggacctcaggtgatctgcctgccttggcatcccaaagtgccgggattataggcgtgagccactgaacccagtggatgatggactttagttcataacaatgtgtcaatattgtgtcatcgattataacaaatgtgccacactaatgccagatggtaataataggagaaacaaggcgagggagggtattgcaaagggatgtgttgtaaggactctctgtactttctgcttaatttctctataaatttaaaactgctctaaataataaagtttcttaattaaaaaaaaatcaaccatttcaaaacacaacgctcggtgccaataagtatggggcatcactgagtccccactggactcccaggccccacgctggggacttggaggaggactgtgagacctgcacgatcctcccaacttgaagtgcaaccatgtctggccaaaatgttagagactgtgtgagaaagtcaagtggggaggccagcagggcctccagctggtgatgcaaacagggctgtgcaccccagcaacccgggcacctccggctattaggcaatgattctactcttaattcactctttctgagaatacaccccgggccaggcacactctccctgacttccagagggaaggtctat

SEQ ID NO: 66274 - DNA, 717 bp, Homo sapiens
cccatgaacaacattcattaaggggttactgtgtattaagcactgtagagcacattgtaaattgtcaatattagttatggtgataaactctaaataaattatctgagaattgggatcaaatttttacctatttcccgaggatgttgaaagactgattcaagaaaaaagaggggaattaacatttacagagctctttctagattagaacttacggtttccattgctatatgtttctcatgacaactgtatgcaatatattttgttgtaaccgttttatagatgaaaaatctgatatcaatagtggtggtaatggccatgttgccaccgctgggtagtgtcaggggcagcatttggatccaggttcgtgagttcagaagttcacgagcatcctcccctgcgatgctgcctctagaggagaaagagggaagaggctttgaataaatcagagcagaagagaaattcaaggaaatcatggtgtgtattacctaccataaggcagactgggtgaagtgccttcctggaaaaggtagcactggactcagtccctaagtttgcatgatattttttattttttcttagttcgttttttaatttttattttgaaataatttcagatttacagaaaagttacaaagataatataaagaattgtcatatatcttcacccagaatctccatgtgccaacatttgcccatgtttgctttaccctgctgttt

SEQ ID NO: 66275 - DNA, 1485 bp, Homo sapiens
actctattctactctaaccaggttgctcccctgggtcagggaaaacatttccccagataggaccaaggcaagaacgcaggggtactgggggcatgtggtcaccgagaagccagccagtttgtattgcccgtgtcctgtgaaatcaaagacttagatctatgacaaagaactacatactgagaaggttaagaggtactcaatgaagacataaaaagtcgacagtcaggaaggagctggggacttcagcagcaactcagagtccactgccaggtcaggaccacctgtgccggctgctgcctaatctgatatatatacaacagcacggtctacattcattgtcagccatcctcacacaaacgtcatccacaggagagggtcttggccagagcagaaatcaacaagactatgacttggaaattctagggggaggggaggcctctagcctcaggaattttgtcacccaggtcagggtctgtataatagccttcttaagagacaaaaagggcactcacagagatttggaccagggctggcctccatccagctttctacattatcttgagctcacttggtgagataacatagctagcagcttctgcattccttcctggaatgcctgtgatgtttggagccctgccacatggctcaggcattaatcatcaaccagtggataaatgttgactgagcatactctgttaggtccctggtgtgcctaagaagaggggtaccctttccctttggaaggttgcagaagatatatacccattaaaagactatttaaaatcttgactagttagtgataacttccttaagagtataggtgctaatgaatttcagaagagaatgatatccctttggggtggaatggttcagggagacatcttgagaaatacaatatgggcattaaggggtcagtgggattgtaaatgtcctaggggaagaggtgtcaagactgggaggtcactaaggacctgaatgagcaagctgtgctggggacagaactaagacctgctggctgaagagggtcctgagcaagggggaaaaagagacagaaacttaactaataactatttatgcatgtttacacttttcaccccaagcagagagctggctcctgaaggtcagctttgtaccaggaagtactcctttcttgcacagaattttgaaattgctagttatcttttttttcccttgcattgttcatcttaattccattgttaagatgtcttaattaccacaaataatatcagatatctttctcagacatctctttcttggagccttccactcctgctctattctgacccactgagttctgggtgtgttgcctgaggtttgctttcttgactctcctaggttggatatgcaacaatgcaatacacacttttctccaggcaagctccgttggacaacttccccagaaaagaggcttggccaaagccaaaatcagccagattgtgacaaggaaattccaggagagggcag

SEQ ID NO: 66276 - DNA, 3695 bp, Homo sapiens
gctcagttttaaccaaaacattggtgatctggttaagtcattactgaattatccactacgttgaattctcccaaccaccccgtcccagcccttagcttggccgaaggaaaattaattggttgcaaagtgcgtatctaattacaacagccagcccccgacacagagatgctcaaatgttaattataacatatgcatctcaataaccgacggtggcatttagtgcagcattaatcacgccacttgggccccccagtgcatacacaaagctccttttcatctgccattagcacagactttgcactttcggcacggacgttctcatccttaaagcctttcggactctaaaaccaacgtttccctgtaagcctggactgcgcctaagcccccagttctcccaccgcagaggcccccacccagggctgcgccagcgccgtggggtcgctgggcggcgggttttggcgtcgctagactgggctgtcttggcagctaaggcgacatcccgagcgtcctggggccaccctgctctccagggcccgccatcctggaaaagaaaggcgaactacattacccagcaggcctccagccgccctctttcctttcaagtctttgcacgtggccggaggggagggcggggcctgaacgtcactctcctacattctctttccctgtgtcagatcagggatcattttttttccttcctctactccctcccccctacccgcccctccctccctgtttcccttccctccctccctcccctctctgctgggtctgtgcgctggggcgcccgatcccctccgcagctgggacgctccgaactcgaggcaggagtcggctctccggagcctcgtccctcccttccccttccctgcccccttcccccacccccgactcgggcttggcgcggcggccagaggaaccccgaggtgagcatctcctcgcccgtcctcctcttatagtcatctcagcttgctgatcgattcggggacccgggaggagggctgcgtgacgtgggcgtgcttatagataaatccgggaaaaccgccccaaacaatcagcccccttccccccatccctgctcctgggccagcggggtgtccgcacccatctaccatcccctcctccccctcggtggggaactgcactccacagtgtcgccccctccctgggtttgtcccattccctgccgggttccccgccccgcggggtgtcgtggccctggagctccggcgccaaggggggctcttgggggacgcacggctggagcccggctcgctttggagctgcgcggtgtagccgctgtcatgtgccgggttccgacctgggaggaggaaaagagcgagcgcgattcctctcccttttgttttgaagcccgcatttgctgcatcgagcagttggtttagtatcagccaaacttgcagctgttcagaccgcgctccgccgaggtagggagcccgtctcggggtggcgtttgggggccgggggctgcggcactcggggctgcgggagggaccccgagagtgtgtcgccacgccgcccctcccttccccggtgactgattgtgtctgtggcagcgggcgtgtgtgagtgtgcgcgcccgtccccgcgggctcggggatgtctgtggatggctgtcgtctagacagggcgcagccccctccctgcgtccccggtgagcccgcgggccgcggggggagcgggggatgggagcagaggaagaaaccaaatcggtggacccgttgcggtctcccctttggttattcccaacggttgtggttctgttggctttttttattattcctgtcgctgcggtgcaatcgggcctggggaatagatacgcccggcggagaggggttcacttgacaggctctgaaaagccacctctgggtggcgagtgacccgagaggccgtggggtgggctccggctcgggttcatcaggacgacgagcaggtaactgtcccgggcgccggtcatgggggagggcgggcgggggggcgatggcttgggctgcggcgaaggtctggggcctcggagggccgcgtgccggtgcctggatgtggccggagggggcgtccgggacaccgcgcgcctgagccgagtgtttctctattgatggtaaaagacaatcgggaggggggtggtccgagcccgttatctgggcggcgttggctctgtttggttccgcggagttttcagggttggggctggggggtgtgagcaccgcggggtgtgcggcgtgtagaggggagggctgactggcggcgccgcgtgcgtctccaccccgaggagtgaggcgtcgcctcccccgcccggctgtttgtgtgtacacacggctccggtgtgtgtggggggcggggaccgcagaccgcggcgtagtggggacaagcgtgggccccgatcctccgcgcgacctgtcccgccagccccctccttgtctaagtcggggtcgtgtgtccccgcgcgcgcgcgcccgagttacttggagaggggaccgtgcggctgtgggccggggaagaccgtagggtcgcgtgtgctggtcttcggtgcaggagtcccaggtccgctgtgcggccggagtcacacagcccctccctccgcgtccgcgacgccccgtgacccggcagactgggggtccacccggcggcgcggggggttggtttggctgcgccgcccccagtccacgctggggtgaccccgcaccgaggcgttctatgggtgtgcgtgcccgcgctcgccgccgctgccttcgcagaccggggagagagtcagcgactgccaaccgcagccccggctcttcagtctggggacagtgggagcccaagcccagcgcgccccagcccggcccaggccgccgcccgcccggcgctgtgtctctgcggcccgaggattatcccccagtccaggggcccgcgcgaccaaggaggaagccgctggagccgccggctcggccgcggctagagcctccgtagggcgaaagtgacacagcgcgagagagcgccgccgctgctggagccagggccgagaggaaggagccgcccagagcgcagggaggggccgccggctgtccgttcccagttcctcctgcccagggcccgatctgggctgaaaacctcaggaatccaggctcctagcaggctcgggctgcgcgaggagatggcctggctttcaagaaaacccaattatacgtgaacagaatgcaccgaacagacgctagaggatggccaggacacgctcaggttgtctggggaaactcctgagtgtttgacacaggattcgatttacacacagatcacctcatctgtgtcaagtatctgtcctggataatggatgctcagaggcagcaattttgtaacacattctagggcacagtgtcatcagtgattaacagcttgctagaataataatatgtttgtatgaccttacagggcaggttttcttcccccagaacctcccccctcccccgccagatatcatagcatttattaagagggtcctgtgaggtaggagagtattagccccattttacggatgaacacactgaggctcaaaaatgtggcttgcataaggcctctgggtgggggaagggccacattcccccttttctcagcttatggcatttaattaatagtggccactttttttctgagtatggattcttgacacctcaggaaatactgaagctaaaaaatagagt

SEQ ID NO: 66277 - DNA, 1794 bp, Homo sapiens
ctgcttgtggccgggagtttattgccttggaggcagcgccttcccttatgttatagctggaaaggccttgtactgagctctggccaccctcctcgctggccattttcacccatggcccctgcagctgttgtgagagatggtttctagacctttcaccatcctgcttgcttctgctggaagggcctccatttgtcaagctgagattctgtgagaatccagccaacttctgtcctaacttacttcacacagaggcagcttttgaagatagatgtgagggtagctgagccggctgcataggcgcagtctgtgatgggggagttctgagaagctttggctcggtgcttttcggatgatcatgagagaggcagcagcacctgctgcaagttccttcctccgacgcccagaatacatttcagcttataagtaagtaacttgggaatcccatgcagggagctgtgtggaatttattgagtgcagggagtttattgagtgcctgttaaatgccaggcacaatgctgggcgctctctgtgtgcctcgctaaatgaaagtaacctctctgagggagacagagaggcagagatatggtaatgcctaactgtagttatgacaattgagccctgaagggattcagaaagaatgtgtgtggttccatccagagtgggtggagctgacacattccccatgctgttcccttatagggccttcccctggggtaggcagtatcatgatctcaccagtagctgggaacacacaggcctgtcccacactcttggggcatttgctgagatacttacacgtttgaaccatgagatcaagaaagtgacctgctagagaattcacatcttggcatgtcaccaaacaggctggtgtttacaagcaaagtattttttacagcatgcggtttatctgtctccggtatctacctacagtaccctgggcactctcaggaagcaaaatgtctttctgttcctccatctccttgatgcttggcatctgtgtgggtcacatattcagcagattgggtaataaagagcatgcgttgcctttgcagcaaggttgcatcagatggctggacgtgcctggatgtgctctgccactggcatgaaggaccctgtgcagacaaggccaatagtgaaggtcagggattccgagaaagcacccagtttctcctcttctccctctaaaaatggtttcttctgcccacattctattgatttgccttaatccttttagctgttaacctttgcctcagtttagtggacacacatggtatctgcagtgggtctggctctaggagtgaggtgagatgaattgaggtaagcctggcagggtccctgctgcccatctgcccatcttgctggggaagacagaatagccttgcgctagtgtaaggtggtaagtatggggtcaggagaatgaaaagggtgccaaggcagccagaagtcggatgactgtgaattttttttttttccaatggataatcatgctgggacacagatataaactgaggttgtcctgggtaggtgagggcttatggacacatgggccagggagggcgtatgcatgtgggtcatacctgacactattatcagacactgttatcagtcatttatactgcagggtgcacataggggtgatgggggaggtgctcgtgcacaagaggaattggcagctgtttccttcctttgcttagaggacgtaggggaaagcattatctgtggggactgaactcagaattcagatggggctcagtttacagccacagggttctatcttatatctcaccatgatct

SEQ ID NO: 66278 - DNA, 429 bp, Homo sapiens
tgtgctgtcttcattagccattacagcttctgtttcatagatgagaaaatgagggcacttcttccaacggggacatttaagcaagaaaagccagtgacttggccaaagttgcataccaggcttgccagtgagaagacaaactgaggacgggttctctgaactgtgccctcttggctctctagaaagaactgtgtggaaatttctggattcctgtgtcttagtccatttgggctgctatagcaaaataccatagactgagtagcttatgaacaggagaaacttatttcttgggctaggaagttcaagatcaaggtgccagcagattcagtgtctggtgaaggctcaatttttcatagattgcaccgtctcactgcttcttttcatgatggaatgggtgaggacgttctctggggtgtcctttatgagggc

SEQ ID NO: 66279 - DNA, 650 bp, Homo sapiens
tccttctataatacagggattaggagggagaatccctgagatgtttttgacatttgcctacacctgagggaacagttgcacatcttcctgatacggccagttggaagtgtggtttggccattcattccttccctacaaaattacctctttgcacaaggtagaaatgatccccaccttgtgccaggtttgttctaggcttttgatggtgtgggctttgagtgacgtccacaaaagcgtgtggggagagggttgctggtgaagtgatgtcactgtgatttcctcctctaggtgaaacaaaaacgtggttgcctgcagcctcattcgcaccagagagaagccagccacgggcgtggcaagccttggaggcccaagttgagccaaagacctctgtgtctttccctccatcctgtttccgtttgcctttaggcccaggtggctggcagatgacggtgaggagcgggtgatggggtaattcccggaatgcagactgtaaccagggcagtcagaacaaggattgttaacctgcagccgcccagctcctggctcatcccacgaggcgttcgtgattttactcacctcattagaaaagtttacttaatgtatctgtcgtagattttagaactggaaaagaggttgagtgactttctttt

SEQ ID NO: 66280 - DNA, 1547 bp, Homo sapiens
actgtgccctcttgcctctctagaatgaactgtgtggaaatttctgggttcctgtgtctccctcaggaactggctccaggctgcccctgtacccagcggcccttgtctgtctcctcccaggccgaggcaggcactgcgatggaggcaccctcttcactgtgtttgccagtgcactgcagtggagaggttatgcctttgtagggttgtggggatagggctgaaagccccctgaaggcaggatccacgatggaggagcattatcgtactctggtgggctgggaacatggcccctttcccaagttctcctctctgtcagcctaacaccagcttttcggagagaaagaatcttccaggtttcctgagatttgcctgaggtccctgaggctctccttcccacttcaatctagaagatgggagaggctctaaatgacttaatcacagatctgaaagcccagaaggacctgagagaggcttggcctcctgcaggcatctgccttgtagcctcccgggaattggaagcttacagctttgcagcccaggccattacttggcagcccgggcctaaagacattatcttagaccaaggtgtgcctcccagtagccctggctgtgatctgagaggcacacagaacgcatatcccattctccttccagggtgaccaagtattcagagtgccaaatcttcttttggaggtaagctctcttcccttaaggtttctctggataaggtgtccaaacctctcctggcttcccttctctgtacatctcttttatcaatgcttctcctaaaatggggacacggaatggaatacggtgttcgaggtgtgacctgagtggtgcaggaatcatgctgctgtcacctccctccatctggacactatatttctgttaatgtagcccatgactgtgtaatttttcttcatgggcagcttctagatatggggattcccattccttcacagctcctgccaaaataatctgtggcaaagatctgtttccccagcctggactgttcacagccctgatgagtagcccaggccacctcatctgagtcccctttgagtggcccagggagctaaggtcaagggtgttcagaagctggtgagattattgaggcctgacccactttgcagaggaaggctggagctttctgcccaaagtgactgtgatggggattggggtggatgggcttccaggcctggagaaggtggggatgtttcatgcaggctcctacccctgaaaatctggccacccactcaccactgggaaccagctcctgtgtcttagcactgccacctccccctgggcctgccagcctctggcttcatttcttttttgctcaggaagcagagataaggtttggtgctcacctttgcccagttgcatagagaccctgtgacatggacatattggatgacttccctggctgagccatggaggaaactgtgtttcaactgaagacattcttgtggtgtctgcccccagggaagtctcttggtatgtgtgtgtgacacagggctcagtttggggcactgggcatggggaat

SEQ ID NO: 66281 - DNA, 450 bp, Homo sapiens
catagcctggggggcatttaggagctttagcatagcacccgcctcttgggcaggtgggagcctggggctgcagaccggccctttcttaggatgctccctgtttgcagattagtgacttgattggcccctcctccacccccaccattcccataagggactggttagtctgcagggatgacacccagcctcctccacccttggggatgtaaactgtactaggagcaggaaaggctggggtgactcactttcctgccagtgaaaagctgacctcaatcttggtagtggtttgaaggtgacttttgtattcatctctctgggatcttgggagacagtttcaactatggtatctactcagtttccctatgggaccccactctggcctgcagctcctctgccctgtacagaagggtctcctgttctaaggttttttttgttttgttttgttttgtt

SEQ ID NO: 66282 - DNA, 2061 bp, Homo sapiens
aacaagttctgccagcccattgtacagtccccggctggctgcagtgtctgggcattctgcttctcagccttgccccactcactactttctcagtgagtgtcagtgagtaaacacgcacgcaaaagaataaaaccatcaacaagagaaagtgtggtgtgtaagggaaagggagtcattcattcattcattcattcagccagtgttgactacagtgtgccaagtcctgttctagctgctggggtgcagtggcgatcagggcaggccctgccctcatggagcttacagacaagaccatgacacaggtgcatgctatgaaaatgagtgagtgggacatactgggcctccccaaagttggtggggaagagagagaaggtaaaacccaaaataggttctgtgactggccagcacctcaggggaggcctttcgaggggcaagggtggagattttcatggctaagtcctgttgtctaggggggattgcccttacagggggtctgcatgacattagtcatgaatccaaggtcctgtggtggcatcagggctggcaccaaccacagcttgctgccgatgtccctcccatgctctgggtacctgtcatatttgacacctctgttgcagaggtgacagctagaaaagcatccattgcctttggggtgggggttcccatttgttgtctcatgggaaggaagggatgctttggaaaggctgtggaaacccctttgggctctgggtggataacatgagtggggccattggaaggggtaaagaatgctgagtcatgtctaaatgacagcacttcctgggcactcctacatgacttgcaataccccacaggcagggcccttcatctcagcctgtctaacagactgtggatttggattttcattcaaccattaaatttttaaaaaattctgtgaagctaatagtcaaagggttagtagtctcatttattcaccagatatttttcagcaacaacttatgtacctggcttttttctaggagttggggatatagcaggtgaacagaagagacaataaatcttgccctcatagtctagccttatgatagcagaagtctttctttaaagaaagatccctggaatctttaaatattaactcctggagttcacgtaggcatcgtgacagaggcacagggacagtggggttagctgggatgtccagggacagaaggaaacagaagcagtgtcactggtgaccagtcagatgggtggacgtccagcaccctcatgatgtggcagaagtcagggaagaacgatattctgtttaaaaagttgagcttataaatagccatattggaacatgtttattatgttgaggaggtaacttatacttgactggtcttctaatagagcagcaaatgtcattgagtattttctttgtgcctgggtacatggtgcccatggaaagatgtgttctttgccccagggacgacgatagttgagtaattagcaaataaaacaagggcaagtctattgagagccactttctatggcagggcctgagatcactatggaaataactcagtaagagcagtcagagaaggcttcctggaggaggtgtctccatgctagtcagaaagaagtggggaacgtgttctcagggagttagtaacaggggagcatggcttgtgctcatgggacagagtgactgctctgtcacagtggggttggcaatgaggggctagaggttagagggcaggggacagtggagaccagtggggggcttgacacactctgcagctgtgagccattgaaggttttgcagcagagcagtaccctggtgctggttgtacttagggtgtcagcgaggtggagcgagctgggagggcaggtatagcaagtgatgctggagagaacagctgaatgtggctctagagaaacaggctcctgcctggcaagtcacagggttgtgaataaatcactcatgctttctgagcctcagttcacctcatctacaaaatgaaaataagatttcaaatcctatttcatagattctttgtgagtcttaactttaagaatatatgtgacaatgctttaggaaaa

SEQ ID NO: 66283 - DNA, 2678 bp, Homo sapiens
tgagcatccagccacacactgggaagtgtggcgactatctcgtcccctaggagtgtggtgtgaaatgctgggacactcgatcaatgttagctctttcattagacacagccctggactgtcagagacccagctcttgaggtaggtgacttcctgtgtgacctggcccaagactcactccctctctgaatctttaaaatggggagaatagaaatatgggctagccacatgtctacctcaaggggctgcttggagggccaaatgagataaagagtaatagtgatgacaggtgttgggaactgggtatgaccaggttttcagaattttgctccttggagctcccagttccagacacagggagccccgcctctgccaggactcctgggggcagggtccagggtgcaggggaaaggtcccagcttccccttttgaggtggccaagcaggccgccgtcaggtcagcacgtaggccttgagtccagccacttttgttgagtgtttaaaatttaccagggactttacatcttttacatcttttctcatgtaccctcaaaacagttctgtaatgcaggtgatgctttgccccccgacagctgttctatggcaacacggccgagtaacagaaccagaactccatcttcaacccactgggatccagaccccgtgcctttttcccacaaagctggccagtgacagagactcttggcaaaataccagaattttccttactgtgaacactgccgactttaattagattaattttcgattttcttttgccttcaggggtttaaagctgacccagctggattacagcagcgcactgtgagtggaacagagttgcggtgtcaggacctccaagccctgcaacccccagcacaggctttatttatctatgcacccccattgagaggctccctcaccctctgaggggatggaaggtccgtggagatgcagctttgctctcccgggagggtctctgccctcaggctcagaccggggccgtcctaaagcctccctgccccggatgccttttgatgaaggctgctttgtgcacacacatgtgctgggctgtggccgcaaccccaagccctagttatccacagtaaacacagaacagcaaccaccccgtgcagccttctctctccaaggtaaactgttggagtaagggcttttgcctggacgaaggcctagtcaatgagagtgctttgctgactctaactcttgcttttcaccctggggagccaaccacaaacatttgtggagacccacacatgccaggcagggcctgtgctgcagaaacgtgcactgtggaacaatcggcctcagagagccgccgaagaacaatgcaggcttgtggattgtccctcccggtcctcgggcagcggcgcctgtgtacagagcacccaggtgtgcccccttgccctggcccgagaggcgccgaggatggggcctgtgttttgggggtgtatggtcacttgcactgaggctgcccggggcagggttgacctttggaagatcaaatatgtggccttctgggctttgcccaggccagctgctgacccaagggaggaacactcagtgtcgcgtgatgtgttcccctgtcctctggcctggccattgtcattgcaaagctgaagagatagaagaatttgcggtagctggggaagggaggcggggtactggtgccagtgaagtcccttcttgagatggccttttggttcatctgcggaccttgctgtctgcccatttaggcgctgccctcaccctgggtcccacttgccactctgctcacgttgagagtcctctttctatgcggttctctgcttcagccaacacaaacagcagaaataagccgggagaagccacctctgaatggaggttctttttccagattcgctgtgccagccggggcgtaaccgtttaattgctgacactaagtctctccgtaataccaaatgaaacaaggttccatggtgccctgagtacaggatttgagtatgacactaagaaagcagagaataaaaggacgcagggaggattcggtctgctcaaatgcacttttaaaattctcctatttacaccgtaattccctattctcctccattaacttgttttggtggtttagggcttgtcttttgtgtggttttggttttctgggcttcgccactgaggagagaacattctagaagggtgaaattgttaattattcttaaaactttgagagctgcttatgtggaatatgtcctatgagagcaccttgatattgcaagtcgtggcctccattcccctgggatgatctgcggggacagggtctgcccagagccctggtgtcagggtgtgatactgactgagtttcacaggctggcctgggggagccaggacttgaggttggagacgtgaggagaaaatcacaaacagaaattgtggctctagacaaatgctgcctcatccacctgaggcggggagtttgggtagattggaatctgacctgtgtttccgccccaggaccaggtggtagcaacggtatttaggtttttaaggtgggtgatgtcaaaagccatgtccagaagaaaatagtcttgttggccctattctttcaccctaagagatttaatccagagacggtgtgtaggatcctgctgctgagatgcgccgttccttccccggcttctctcacacctg

SEQ ID NO: 66284 - DNA, 1292 bp, Homo sapiens
cctcctcccatcctgaggagttctttcttggaattttggctcccccgccctgcagcttggtttccactcccacctcaaggattagagttctgacctgaacctcagaggaggacaagtcccctgcctggcaggatgtggattcaccagggccgggggcacgggattggatatcaactattccactagctgcaggcatcgcggccccacccagctgacactgctttcgcatgtattgctttccagagatgagagcattctgcagtactgcccgggggctgtcttctctccatttagcaatgcgatgccacaattttgctgtgccattacacatttttccttcagcgtcattccagcatcagctctctaatatccctttttatagattttccatttcacagtgagagaaggtgagacagcaaatactgttttcgcaaatgcaggggctgatgactgagtttgatgtttttttttgtttttgtttttttttgggttttttttgttgttgttgttagattcctgagacgtaccacgtcccagcatgaattgtgtaacttatctgccctgtgtcgaaaattagactttgctcctgtattttcagaaataattcttgacaccctcttaggttttcaggctgtgttttggctctgccctcatcttatctctgggttccaagagcttttttcccatttctctttttttccatggcccatgcctgagttgggttggcaggttctcctcttcttgctgtgtccctgcagagtctctttctggcactgccttaaccactgcacttcatctgaggggagagagaggaagagccacttggctagggaagcgagtgctttctctgctggtaaagatgtctgggagaagggtccccccacccctgtccagtgtgccccaggggtcgggcagccagtgaccccttccacctcatttctttctttttgttgcctgcacaggactggagagctagcatgagtatctgtcctgcaagagcttattaagccctgcttatacacgtggcaccagggaggtgttattatcggtcatagcaaggcagggagggacagcagacgggaaggagttaaagttctccacaaggaaaagtgtgattaagtggcaaagggaatggtttggaaataagtgctgggggctttcaggggaaggggaggtcatatgggccaaagcggggcagaccttctgtctgaggagagtgagtagacccagaaggatgatgggtttggagttgggtggagagggacccttattggacagggaggatgtcactg

SEQ ID NO: 66285 - DNA, 1865 bp, Homo sapiens
cctagggtggggcagagccacctcacggaagcatcacttttattctttcactttttgtcattttcccctttggaaactaagcttgttcgtgctctgggacgtgcggtcatgcgtccctcactgctgggttgagctggtaggcctgcccctgctttcctttacaggcgagtgcctcgtgctgctgtttttctgattgctctggaagttcattgttgctctggccctcctgacctgtgtctggcctttgcccatgtgcagagtttgtggatcagcatttcaggggtgcgggggcgtggtggtatgcgagtccatagccgtggaagtttgggacccaagcctcatgaggcagaagcctggctctggggctccatatttagtctggaatccagcctcagctgctgctctggggccacactggatgccagaaagggcagaacactggcccggagccagagctaggacagcagggcctgctgtgcagcgcagctggtgcccaaggggcatggaccttgctgggcctgcccggaactggcctgcccctgcctttgtgtcaaccaggaggcctgtgggaaagggggctgggaagaaagtgagcaaacacctcagaattggaaggatcagaactggacagggcctcggagtgacatagtccagtgcaccctttctgcagagaagaaagactggggtggcccagggcggtgacttgcccaaggtcacacagttaatggcagagccactagatttgggcttctggacatcaaatcctttgcccttccctggaaccatgctgcccaggaggccaggccgttatcagggtgggactccctccaggcaccaccttcgccagagaccagaagaggatggccacaccctcgggagcacgcaaattgggaaaaagcagacatccatttcggatgacttcctgcccctctttctgtgctacttcccaggctccactggcttctgccactcctcaccctccaccccgcccccaccactgagacctgcttattatgttagtcatttaccccatagtgtgaatatcagtcctctcccagaggaacttggacaacagccatggagtgagagttggagtcagccagacacagccagacacagcattacgggacatgttgcaaggtgcatatggactgaaacaggcagatctcagaaatggaggaagcccctgggacctgctctctcaggaagggaaggccagggagagctatttccaaaccaacctgggaagtgtgggaagatgctcctagcacgtctcagctcctgtctagtgactgatccatctcccttgtccatggagactggctgacccatctcatgttctatagctcagatctactcaggaggcagtccgatggcctcactcattataattaccctgactcttctaaggcagtcttcccatcaccccaccttgtgggtcccaggctggctgtggatgggccaccctctgatgtggtacccaccgctccaggcaatggctgcccacaaggacagaacaggctggcctggagctctgagcaggacacatgggagaagacagactcagcatcaagaaaaggtcaacaccagcctggcaggtccctggccccacgtccagtatgtgcccttacctgctgtgtgaccttggtgtctgaacctttctgagcctcagtttcctcatttctagggatccattcttcagattagaggcagaactgaagagagtgcagctaaaggcttagctcccagtagccactcacatagctatcattgtggtgcgcatttcctcatgcaaccctggcaggtaggcagggccagtacttgtaaccccattttacagacttggaaattgatagttagagtaa

SEQ ID NO: 66286 - DNA, 552 bp, Homo sapiens
tctaacacggaatggaaagaagaatgtaaaatatctcattaacaacttttcatattgattacctgttgaagtgataatattttgatgtattagattaaatataatatattatttcatttaattttacctgtttcttttaaaaatttggctactagaaaatttaaaattccgcctgtggtttctgtgtgtggctctcattttgtttcagttggatagtgctgctctagggtacacttctacccagcctatgtcaacaacattgtaagaataacatccatcctggacaaaggtcatacccttgagccatgctcaggagggcatgtccagccaaggttttagaaagccaggactgcactggcacacactcacagctctgaccatgtcatcaaacatacagagactgggcttccctctgctttttcttttttttctttttctttttctttttctttctttttttttttttttttttgaggctcactctgtcacccaagagcattgtgcattggcacgaccacagctcactgcaaccttaaattcctgggcttaagc

SEQ ID NO: 66287 - DNA, 1071 bp, Homo sapiens
catacagactagactatgcagtgtagacatatagacaccataaagacatatatagacaggtataaagtgtgatgcctggtgcagggttaaataaagtcaatgcaaaaggggttagaaaggagagcactttacaggttgaaccatctgggaaaggcttcaggagggagacttccctgggcagctccagtctctcctgtgtgccccgggagcacatagctggtgacgtcagtggggacactgaggcctggggagatcgaagcgatggtgctgccttattgactacaggtgcccaatggggcctgcatgttgaaggcaagcttgccaaagtgtctcaccagtccccagagatgaactaacttcctagcaaaaaagcgatgaataactatgaaggagaggaattccccttatgccgagggactttgtcccttctgaagccagagtaaccagccacacctgtgtcaccagctgtgggcctaaattcctcggccagtctcactttctcaccaggagcctccagatttgctgagagtcacctggggtctcccatggatatctggctcactagccaaagcctgtcactcccaggttcccagggagtctgagtgcagtgtctgtggccacctcatggccagaccaggaactgtgacccccttagagtcctgctgtagtggggacacactccatgcgccagccactgcagccttcctgggatgcaggtaccactcagttgccaaggctccctgcagcctgtgtttccatggagggacagaaatcagagaaggctgttgccttggaaaccctgttggcagcagtgactcagctggtctgtagccaccttcagccctccaaacctgcaggcctctggggagatctgagccctgacgagggcaggcctcgtgggacagcagccctccctgcaggcctccacctgcccacccccaggggcgctgaggcgagaacagaaagctgtgtttggagtgtgctaggctggtgcccagcgtgtgcttggagctcagtgcatgcgagagagtcctgaggtgtgttttacccacaggagacactggggaggtg

SEQ ID NO: 66288 - DNA, 2079 bp, Homo sapiens
cactgagacacacacttgggctcagactgcagttctaggggacccccaaattccatccacaaggctggtgtcctggtagcatttttggcatctctatcacaggagtggaggggttggccaggctaccactctgtcagtgttgtgggcagcccaggcccatcattaacagtcctgctctgagtgtggccccagtgttgaggactgctggagtggaggcctcgccaggatcggtggctgtatggtggtgtgctcccactagagggcaccagcgcaccactctgcaggctccagcctggtgcttgctgtgggaagtcccctggtcccagcgccagcagccaaaggcgtcttcaccggccatgcctcctggtcagcgctgcacatgcacactgtcctgaaaatgaccccactcaatgcccaggcccttcctccctgcagcaagtgggaggatggcgaggtgcaagaggcagccacactaaggtgtagggaagctcctgttgggccacatgtcccctgctaggccaaggcatgacactcctccagagggcccgcccctccctgggacccctgggaacacactgcttccaggagggcagcagcacggggctgcaggggaacacccactggggtggggctgggggagttacaaagtgttggcttccgcccttggaaggatgggggctggctaagtggggagatggagccgcataatctgtaatccatagtctaagccgagttaatttactaagttctgaattaacttgactaagttccaagttaacttgaccaagttccatgtgaaggcaagggatgaaatccgaattgcatatccttcacctcatctctggtctgagaccaccccccggcaccccctcccccaggacccctttactctgaggtgtgacttggggagcaatttctccatgtgtgtgaagtcggcgcgaccagtgtgagaaagacggtctaacgggcatgttgtccctgtgccctagatggcccctaggtgagcattagatttcctcaggttcccgggcacagggccctcggcgccctgcggaaatgccacctccttatatcacacagtggcctggtgcttttgtgtcatatacaataccccattgaaagacgttgtttgttgaattatccagtgtcctgcccagggctttctatcaggacgtattttggtcattatccttgaattctcccagacaaacattatgtctgctgtctttggtctgacagtaggaactacataacccactgacttctcgttttgcctttctcttaggaaattttgaaaccaaattctgtgtctgttggccgttaatcattagatggctcagacctagcagggccggctcccctgcccccacattgctggccttgtccagagcgtgtgactcaggagccctttgctgtgaaaggggcttagtgcccacacaacagtggacgccacccggtcaagtgggatttctggccttagggatgtgcccaaagcattccccattgagggtccccagaaggctcaggggacggaaagtggctttctggcctcctgagcctgtgtccaagtccagccttcacacgggagatggctaaaggaagggacagttccttcctcgttcttctgcttggccctggatgataacagagagatcctccccactacctctctaaagaatccgagggacaaatgagctttcaaaatgaaaatcatggctccatgaaatgacactcaggtgtccctcactcctggaggagtgaaaatggtggccgataaggaatggcctggcagccccagcaggtggcgctgctgctatttagtaatgggggtcctgggcgggaggccggggccgcggctggggctgccccacactggggttgaagcctctgtagccgggttcccagacctccagatgagaaggagtaactttattgttccctagggctgtgttagctgttgccaagtcttctggaaacttctaggacatgctaactcacaggcgtgaggattagtaaagtgccccgagacacccaggagcagagtcctgaaaaccatgccccacctcgcctccccaggcc

SEQ ID NO: 66289 - DNA, 2435 bp, Homo sapiens
gctgggctgtctcagccactctcccaggcttccctcctgccggtccgcacacaagaggcagcgtgctggggagccagtggaataagggccccacaggggcaagatggccagaggccatttcagcatgaccagcatttatggatctccttctgtgtacctagcagggcagagtgcaggggtagggcttaaggaggggggcgtgctgatagcctcaggaggcccatctgtccctccctctctccctggactcctctgtcatcccatcccctcctagctggcatgatttttcctgtactcagatcgcaaaagactagcaagccaatatgtttgctgggggagtcacagaaggcgaagacccccccatccctgccttcacggagcttctggctttgtgagcccccctcttcttgttgtcaggctcccaaatgaccccaaagggtttgcttgcaaaagtttgtcctctggactttgtgtttttccccatctgctctaccctcctagtgcctcctggctccggccccagcgccagcccctgtctgtccctgcaaacacaagtcagctgtgtgtgcagacaaagccgtgcgccgcagcgggggccgggcctgcagaagggacatttccagggaactctgggggcggcggctgggagggcagaggcgactgtctgattagcagagactcggcgtcacagtctagggcaaagagggtgcgggggatttggccgggccccaggggccagtggctgtgggtggtgaccaggggaggcagccaggctggaagaaatctgctgtttgagaagtggaggaaacgggctggagaggagagataacagcccgttctctgtgtatctgcatgcgtctgccggcgagggtggctggagccgggcggtctgaggccatatctagcgagatttttgttctgggttgtgaaagtgacctatggagccagcagcagggttcagggcctgggagagaagacacgtggccctcccctctcctccccttgtcttgtgttagtctcccctcctctcccccttgtcaaacagtagaaaagggagggggcatgggggcaggagaggaagcattcttagtgcggtaaaaggcctgggtttcggtctggattgtaccactaatttgacatatgaacttggatacttcccctaatatttctggctgtctctgtctcattggctgtaaaatggggattatttataactgctctgcatagcacgcatgaaataaggacgtgaaaatagtttgtaaactgtaaagtgccacgtaaatgttaaagagttgtactgattcaaactgctttgaagcaggggctggggctgctgattaaagacctgccttagatgaactaggtgctgagtggtgggcaggagggtggggtgggtaggatcaagacttagggacccagaagtttccatggaggcaggggtgggtcacgggcccagccaagtgagccctgccagaaccaggacccagggcaggcgtggagggtgaagtccaagagctctctgggtgggggtgtttggtcatgggcttgcagattcaagtagaaggtggcctgggttgggcatggacttctccagggagacaggggaagccatatgaagccccttgcccatcaagctccagggcccctgcctggcctggagcataaagtcccactgattgcagagggatgggggcagcactctgttttcctctcctgagcctctgccacccaaggaagccaggtccccctgtccccccacccgctccccatcctgacctggaaatcagccctctctgatgtggaaactcaggcaggagctggcaggggtgacaagactgtgagcgggagagaagctgagctatttaaagcgtgcagcgcccaggggacatgaatgccacccacccacaaggccttctcagcattcgctttcccctccttggcccagatcccaggccctcagtgcacccacagggccacaggtcaggtgcccgaggctctgggaagctgcaggcggacaggtcctggggctggcatgagatgtggttcagtccaacctcggcttgggttccctcctctgggcctccgggctgagttggcggggccacacagactccttggctcctgtgccttataaacagggctgagtgtgagtgtggagcttagaagaggaatgcccacgcctgtggcccggggcagctgccaccacccacccccactccactggctaccaagccaccagactcagagagcccatggggcaggagtgggaagtggggagcttcgcctgtagacccttctcccctgcccaggcctggcttcccagaacaccccagattacagatgtttttctccttcatctccaattaacatttacctgtcctgggtcctaacctttagtgaatgacagggtgtactgtccctcccttcctatctgg

SEQ ID NO: 66290 - DNA, 2592 bp, Homo sapiens
cagcccatcacattccccaccctcagtcccctgatgtcagtagccacctactgttctccctcctgtctgcagagataccttccctcttgctgactccaacacccaccatacactggccaaggtgtgggaggtcagccaggctaccccataacacctggcatggataaccccccacacacccatgtccttggtaagaccaaagaagcaggaggagcaggcatctgcggaggtgctcccctggccaggcattttcatcatcacggtgtttagccgtgtttcccttttctgggtggggaacgtgagacggtagaagacctggggcttgcccaggtccaagggctgagtgggagtcggaccagagtgcctcacccaggcctgtctggcattcaaacccattgtgcatatcttgacacactagtgattttcatgtatttttagcagaagagttgtttttccaaactcaatctcaggcgtgtcctcaaccacatgaaacagacctggcaaagggcctctgcctgggatccaggagctttgagtctgcccactcaactgcccttcacccatccccacaggtggcccaagcctccttgggaacaacacaaggggcccatctagtcttcagaccggatctcagaacgaatggagaaggtctgagcacttccttcagggccacccccacccccggcactgctcagaacagacctcactgagtccagtggggcagaaccacacagaatggcacactgtgagagaggggcccattcagacagagcccggtgcaaacagctgccatccacgtctgcagaaatggcaggcacaacagtcacttcctggtctataaccccatatggtctccagaggcaggcacaggccaggatcaccatttcacagacgcaaacgttggtctcccccaagctccctagactttgtgtccttctctatcctggctccctccgcctccggctgttcctcaactgttgtccagtagacattttgggatacggcttagataaaggatgtgtgcactcccattgcagcttccttgagggataatgccacataaatgttaacatgacttttaaagaccatctgtggcaaagttcaaagttgtgggtggatgtgagcttcaggccgagtcattctggaatccccattataggtcaaatctttttgtgagcatttcaaggggttttctcaaattctataaatagcttagtaacgcctgtgtattcatctatttttaaagccagtcttccggacaatttcagaagtaattgggccactcattgaaagtagggtttcaaaagtcatttcttcagcttccaactgcttccagagcagagggatcccagatgccatttctgcctagggttggggacccaaccttcttagtagaacctggtccaggcagaaaccgtggagaagactctaggaatctccaaaaagctggataagctgaattctggccccagctcccagttcctcccacaggaaaccttggatacaacattcatccaacttatgcttcagtttctcacatagcagaatatgggcacagtcaccctttgctgattaggaagggttattacacctgtttgcgtcactctgtcacctgggtgcaggtcaaaggtctctttcattttatagataaggatgcagaggcacggtgactggcctgacagtcacatggtgactttccattttatagatggggacacagagtcacagcagttggccagtcttgctgtccttttattttgcggttggcctgctcctcaggctgaggcctcagtgagcacagccccactctgtttccacagagagcttcatgtcatggataagacctaccacctgtgcccgggcctaggcctggcaaacacctgtctccaagccctcggcctctctcctgggcaggatggcagccaggcagggaatatccgaattctgcagagacaacaactcagccctctcctctgaggacctggagggaagtgtaaggcaggggtgggtggctgtcatgtctgcatgatgaccttttcaaacttgatgccttggggggtccaaagagcaccaggcccaggatcagagacctgggttccagctctgtcaacctcagaaggtaggcagatcaaggagcctcatcctccagtgagctgctgtgtggggcagagccaggaaagctgcaggaagtgcctagaaaggcagagtgctgtgtagaggtatggcgagacagtgacatgaacatcaggcaggcggcagagaagatcagggcgccagcacgggcaccagctactaagtgtgtaatcactgagggctgcccttgagcctgggaacttcagccccctcacgccccttgacctgacaagtggtactaacgtcctccctgaggctgagtccagtgacaccttgctttgaggaattcctgcttgtcccactggtattcttcatctgtcagacaatccagccttctctctctgctcaggctgaaaggaaaacttccagcctcttctgagggcttttcaaggccacagccacagcaggtgctggctcccttgcctgagaataaggcttcgcgcctgcctaagtgtgaga

SEQ ID NO: 66291 - DNA, 777 bp, Homo sapiens
taggaacaagggcaagcttggggaaaaaagccagtaaagacatgagctccatcagctgatgacccacggttaaatgtgcccaattgctagggtaccgggagctggggtcaaaggcgagtgaggacgggtctccaccggctctcatctctgtgaggcacttggataatgaagtgatattcctctgccaaagtccaacagggccacgggcctatcagccccctcctccatggtccagcagagcagaaggctgaggacggagaagttggggaggaagggcgcctgggcaggcacggccgcctcctgcaggctccctgtgccaatcaggggcaaatgaagggcagaaatgtggacacagacagcttgcacctggcaacctgggagcgcaaacatcaccacgcctcgctaacgccaggtccagggtcctccctcctcaggacccaggcgccaccaacggttgcctcatcctgtctctccctccacaacggacatctcaaaggttaacagcacccatcccctgctcccaaccctgtcaggaaattggctgttctgatatcaacaagccctcttcagggacaagcctaagataaaaggggactccagtgccaatccatcccatctattctcacgccaaaccatcataattcacaaggacccttgctggtctcttgttttcaataggcgaatccctcccccaaatagagacgcgtaaaacttgctgagatatctgggctaactttaaggggctgtctctaatccaccatgctcacagcctcatcc

SEQ ID NO: 66292 - DNA, 2522 bp, Homo sapiens
gtcccacaccacctcccaaaaccccccaagcatctgagtctgaagcccccaacctggggatgaatgctcctaagagcatttatctcgccatggagaatgtaattgagggtggcacggggcaggggaggaaagccacacaaatcaaaagctcttgtctgtctcgccagtcaggctgacgcggcttcctgtgccccagcattcagccatgcaaattacagcgtgtacccagctgcctgcagccactgctgtctgaggaggcccactctgcccaggctcctctgagagaggcctcagaggaagggtggggactcccgacccagccaactccattcataatattgacagtaaagggcctctctggctgctgtttagtgtgcatgcagtcgaatcatttctcgagttcaaatttccagatacttcccctccatggtacaccaaccaggttcccactgttaccccccaagtaactcagagcagctctcttcagaaagggggttcacatattagcaggcacagaagccctcagccctgcatggcattgtctgctcagctgccttccctctgggcatgaccctggcacccccaggaagacacaagggctgggacaagcatggaacagaaagtctgtcgtgtccaagagaaactaccaagtcaagtctcttacctcacccacctacccacctgccaccctgagagtgtaggagattccccaaattccctatctggattcccaactgggcagctggcactgaatgctgattcattctctctctctctctctcaatctctttctctctttctctctctctctctctctcactcacacacacacacacacacacacacgttaaagcatcatgaaaatcttaatacaaaccactgcatcattaagccaattttccaaaaggacaaaacccctagaaggacaggacagtttttccctggttttgcaggtggtgggggggctctgtgtgtgcaagaaaccaagctacttttgctgtgggcctcgttttaataaagccccaggctaccaggacccctagtccttggaaggcatcacaggacccaaaggcagacccttctcccaccctatcccccacagatccaactccactccagtttctagagggtaggaaaactgtccgaagacatggaaaaatacagtgagaaacaaaagtccttttcattcctcccctcccccggctccccttgttccataacaattatgaaaactgttggatgggatggcattttgaacatttactgcattccggccaataaattccaatgcaggatccgatggaaaagctccttcttctcctgcgagctccctccctggcccccctccccgtgcactcccagccctcattccatctctcactttacaacccaataccagggcctggccaggccagggccgcactgtacttagagggaaaaacaacagtacgacagcctggagacagcgtgcagactggaaaagttaatcattacttctgtctgcctccgtaatctaatctctcccgcttggacacactcactgttcagccatcccagccctttcacccctaaagcacccaggacctcccagacccaagcccccactccctctggcgggtcctcccactcctaacctccagttaggaggtcaagggaataaaagaagaatgaaagggtcccccacccagaagctgctgtcacaaggccctggagtccaacatacacggccagctgctctgtgctgggtgccccacctttcagagcctccaggcctcccataaacatgggctcccataaatgtgagctccaatctggctggtgactgcagcagcccagcactgcccctcccccaccgcgcagggacagactgtcccctccccgctttctcactccctctgccccaggattcgccctcaagcccaccccggtgggtagggctcccccaccgcatgcgatcggtgtgtgccgacacatgaggcacaagtcaaggaggccctaccgttggcgatgccttaaaaaattaaacacagaatgacagtgtaatttagcaattccacctctgggtatatacccagaagaactgaaagcggcgactccagtggtatttgcacatccatgttcacagcagcattattcacaatagccaaaaggtagaagcaagccaagtgtccatcaagcaataaatcaaccagacatggaatattcatacaataaaatattattcagccttaaaaaagaaggaaattctgacatacgctagagtatggatgaaccctgagggcattatgttaagtgaaataagccgatcacaaaaggacaaacactgtctgattccactattctatgaagtacctagaggaggaggcaaattcatagacagaaagaatggtgggtgccaagtgctgggggaggggagaagggaagttagtgtttcatgggaacaaagtttcagctagggaagatgaaaaagttctggatgtggacggtggggataatagcacaatatgaatgtacttaatgcc

SEQ ID NO: 66293 - DNA, 4319 bp, Homo sapiens
gcctgggcgacagagcgagactttgtcaaaaaagaaaaaaaaaaaaaagcccacccatctcctgagggcttcacaggtcacatggcacgggcgggtgaggaggcactcaggctggtatctcagcctggtgtcgtcatttcctccggcaggggagacagacaagatgttatcaagaagacaaaccttccgaaaggaccctttcaaaagctgccacttcccttgcttatttcatgtggtttggaggggccggggctcctccctgcacattcagggtttaaaaaataaaaccatctaacaacatcctgagcgtgttattctgctgagaccctttcctctcattggccttctttctttcaagaactctctcagccttagaaagcagaaaagatgcagttcacacactgctgccttttctccctcctcaactcctctgtccactcccaccgtactgcctgaagccccctcccttctctaggtccctctttttcctgctcaattctcattagaagctttgagtaaacaataccctcagtctcagataacagagtatatattgcattgaaatgaaaacaaacaagggtctccctaaagacgttctcagcaagctcagttcctgaagaggagagccggggagggagccgtccgggaatgaactttgcctgagccagccatggaagacacaccaccaagtagtcagagcaggtaccccacaaaaaagggtgcccctcacacaagaggatacaccacaacagggcacagcttctattcgagctgctaccacgtgatcctacaggcaaggaaatgccaaatgcccaaaactctgctggaatttctgtttttaaggtcgttttccctcttgcttcagccagttcttagaaaatctagtgatgacatggtggggatggaaaaacaggtagaaataggatttcttcagaacaacatgaaatgcgtcccatgtacataaccagtgagtttctctaagtactgccctcttttcgcatcctcaggaacaacaatgctctggctaccccgtgcctgtcagccagccccgtgaccccccagcactggcattccaggccttcacgcatacctgtgagccctgaggaaaacctgccccgctagggaacaattacagctcctactgttggcagtgctcccaccctggtgctcccagccccagacatgtgctgcaaaatcctgcagcaggctgggctgggaatcagaacttgggagggaagcctcagatctactctgaaatcccatcgtatgcttgggatctgtcttcaacaagttccctaaaggtgggtccattccctttacatcccccatgcgcaaagagcaaaagcaaaaaaagagctcaaatgcatgagttaatgacaccaaagtcaccaagctgaagccccccaagccaggagctgcttaaaaataaccgggcaacacttcacacaccaaagcaatccccagctcgctcttgtctccccgtccacggaacggatccagtgtccagagcgtaaaggactgcaggatgaggagctgaagggcaccacaatgtcaccaccgatgcatccaacttaaggcatataaaaatgagaatgaagtccagaccagctggggtggcagaaggccacccccattcctccagtctttagcaatttcaaaaaaggttggaattgccaggaaaataagagaaagcatcttacctgaaagccccccaggggccagataattcgttccccctgtttcagcggaggaaggcacagcatctggacagtctgctgtggatttgaaaaggggagagaaagaaataaatacacaaataaaaacaccaagatccatctttaagcacgctctaaacagcatgaaagacaaaccacacattccaaaaggctgactcgcggccttgatgctgattattaatggtctgctcaggcttcactgcccatcgtaagacagaccacagcaccttgtcacccgtctgggctccgggcagccagttaatcattactcgagtcaggctcaatgagactggctggaatttctcttgcattaccagtcccccattacggataccaggtggttcccaaggtcaaaggaggtttgggttggactttctcaaccctggttgctctgtcatccctcatcaagggcagaaggctctctccttggagcccatgtcctctctgccttcatccttttaaagacaggtttcccagttcttgaaaacattctcaagattgatgttgggctgccgggacttctttccccttttttaattgaggactaacttaagtagagcaaagtatacaaaatcccaagtagacgcaatgaatgttactcatgtatacatctgtgtaaccaccaccagatcaagacagagaacattctcagcaaggctccgagccggaggggaaatgttctacctctcccaggctagtccaaacccctcatctctggaaaccttcccaggcaaccccagacctgctaaggctctctgccctcagttcctataaaacatttggcacccaacactcggagtttcctcactgatttttacctttagattgcatctgcccttaactagacttctcttcaacttctgtcaccctcaggtactctgcacagtgacctcaccgttaatgaggataatgacaattccagctgagaaacagtctccacaaccgccctccaagcaattaaagcaaaacctaatgtccatgaaccacaactcattagtcccatgaaacacaaatacacaagaccctgtaagcttgtcatgcaccactggcagcgccaaactccctgaagtcctagcggagagcccggctaaggaaaggtgctgcccaggtccgcagcaaacacaacaggttggatcgtgcagacaccaggcctcctaccccaggccaccaggacaatgtccctgtgggtttccagttggaaccacttggccatgctggcaaataggaaagccaaaaaaaaagagcagacgggcaagtagcccatgggaatcctttagtggcctacacatagccccaaaccatctctgggtttctgctgtctgccctcttaatgctaagtttctctctctaactcagggtcactccctctcccacattctcaaggctggaaggacaacttttcaagaactctcctaagcgggcgaggggcagaagtggaggcaggcgtgggggtgaggtggctgcggtgggtagggggaaagaagactgtgtgtgtaatctcattttatcagggtaaagtctaattcctaacaggaatatacagttttacaggatacacttaatcaaacagaaaacaatagaggcaggcaggaaatggagttacttgttaaatggtgtataccctgcactttctaaaccattttgatggccttcatcattttctagagataggcttctcaaccctctcctccacccactcctcccagatggaagacacccccacattaaacataatgacttatccacagccactccccgccacctttggctggcagaatcccaggggcaaggtgtgtttcaaaggaaaagccgggcatctcagagcagagctgagaccacattcagggtgtcagcccatctcagatcaaaggtaagccagctccacacaggcaaccacaagcatttttgtgaaatggtgctctgcccttctgcagtggctttgatctcaagagggatttacaaacgttaattaagcctccctaccacccctgtgaagaagcaaagtatacctgttccataggcagccaggtaaactgaggcgtcactgactagctcaaagggccacccagtgagctgggctattcccaagagtccagccctatcccatggctctcactccccaggcaggctatggagtccctaccctctttcctggaggtggccaggccatccagactggcctcaaggttaaaggagccatacctccatctctcacccacagaaaagctccgcatagacagatctctgaagtcagggtctcaccttaggcctgtgtcgcctgttccccagagcccaggctggctggcagacagaagctctaggccactcctgactcacgcaacactaagtgttatcaagcacttggtaagcactaggttctgcgagagaaaaagactcattcctttctccgagcagctccaacagagtctttgaaaacccaaccctggggagcagccaaggagcgaactattgagaatgagtacaaggtaaaggagctgggagtcccacgatagtctcagcaactgcgttctgagcttcctaagtactgttaaagacagaggagcccctactcaccactgtacc

SEQ ID NO: 66294 - DNA, 7792 bp, Homo sapiens
acaatgaaacacgggaagcagagcccacacagctatccccgagatccagctttaaacagcaaattctgacttcttgtgggatgtggaggtgggggtgtctttctgacttctgacagccacaagtcacaactggcctcccctaggttcagtcatgtgaacactctttcaaagaaggctctcctggttggaccacacagtacctaggtgtctaaagtccaggcctcccagatgctgagtggagtggcttaaattatagcaaaatggagttcctagctttgagccctctgtgtctccaaaggctgcagggtaccaggccccagccccattcccaccaccttttcctaagatggagacttcacaggatgtattcctttagttgtgcaactggttaagattttaacagttgtccactgtaaaactttgtgcctgtttcatctagtaacccaagaccaaaaattcaacctaagggacatagaaactgaagaatgtaaatggtccatgtagattcccgggccaaacattctcccatacgcaaaatggggatgaagacctgggtcagcgcccatctgtggtctgacctcaatgcccccggccacagcagctggcaaaaccagccccagacctgtgaggggggcggggggggtgtgctccagctccagacctggctgtcctccaatgtggcaggacaattcccttcgtgggggctttgtctattactgatgctaaattcttacacagcagcgccttttctcatttctttttttgttctattttcaacaaaacgttttgggtgagtaaccagctgtcttagtttccgattggcaggttaatcacttcctattggctgatctggagaacttttctcccccttggaaatggcacattcctgtctttgtggcttctctgtttacacacattttgctacctaatgtcaacacttgctaatgaataaatatatcactccactcaccgaaaatgaggccctggcctggcagaatgactgcttaaatcctgagaacagatttatcccagtgtctctgcaggaaacccaagggaacatggcctttcttttctatggtttttggaggtttctgggaacatttacccctgctggtctttatccctggggctaaggtcactgttctctctcttttaaggaaaacctccaaatttgaagaatatggaaggacaaaaaaaacaggtcagaggtggccccttggaaaatgaacttcataaaagaattcttgattctttaagccaaaacccagtcaagttacagtctttaggaaaacagagcttggtaattccagttaacgtttgttacaaatacagagagctgggtatctccttattaataaccatttatctggtgttttgtaaatcgaaagcaaaatatcacatgctttgcgggccacttattagaccggcaccaggcaagcaggaacgccttcccaacttgagggagctggtagagtcccaggaggactggctgcagagtatgggcttcggttacacgttcattaaagtatttaatttatgacaacgccccagcaaaacttttaattagtggggggaaaggcccaacagccaaaacgcaggaggcggaaggacttgcagaattccaggagctaaatggtgcccaacccttcacttttccttctcccagaaccttggcaaaataaaaatgtcccaagtattaatgtttttttcaggcaccagtatacaggcacaaaaaccaaggttacatacaacctgtacttttagcaaacagatctatctcctactgtaagagggagctccaggaatttgggtttgtccttgttgtcacccccaagttcattttgctgaccctgtccccagcactgtgatgtccagaggatggacccctgtgctgctgccggccagaagttgaatgcagacaaccacaacagggctggtgccagtctcaaatgggcttctgccatggcttcatgccagccagtgacaaagcagcagacaggcagagctatgcttcaaactttgatagtccctatggcgaatactgagaaaaccccgggagaggactgacttgcaggtgactggagcaggaggaacctaccccccccccccttttactggctgttgcctatacttctgaaaagttctagtgtctactccagaccaaagtcttctttgcacctttttaaaccgtcttcccatctatcgaatcaccctttccattattcccactgatgctcctggcactcactaagtctccgagttatccccatcaaccagtcctatttggttcccaagacacttctctctggactaaagcttccacgtgttaaagctgagcccaccggctacacagcacaaatacatgaaaaaggaacaaaatgtaaagcatatcaagggaacgtctttgcaaaaacagcaaaaaacccagccacaacagaaaaattcaccaaacttccaacagaggaaacctagaaccaacgtgaagcccagcacctccccaagcctttgcctacacacaaaaagccacgttctagaggctctatttctaacttaagataagcaggatattttaaaaatcatctactcaccagttggtttgagaaaatccatcgggtatctggagtaaggaggggggggagactctgaaattaaaaaagcaagagaaaataaaggcccagccatgagaagagagatagaaacttatgataacagaggcattcttttagcccaactgtttgtcttagctgtgggggttggaggcagggccgcgaggcggtgattgccttgatatttagctgtcagataaacaaaagaggccgcctggcgccagcctcggcgctccgctcctccacgtctgcggccgcagccgccgcgctcggctggcccggctggaaaccaccggctcggccggagccgcgcacttcacagttcacagggcggggggcgaccatgccccctccccgtcctcggactccagacccagctcccagcaacctcggctccccgccccggcccgccccccaggcgtgcaattcacctctgcccccgccggtccgctcggcactcgcgcgggggacacggggctgcccattcctagcgcactcgggagatgcatcccaagcgtgctggggaacgtgggggatctgcgggcgcccggggtgaaccctcacatcacactctgtgtacagagacgtagagtaaaggaaggaatggagaaagctgagaggataaaaggaaaggagtttcagggtctcagccgagaagcccaggccccagcgcagtaagaggcgacaacgtcactgaggcgccggggccccactaatctacagacttatctgtgcggaaggaaggaaaaagtaggggacacccaacttctcctgcctgtttgttcctctgcaccctggggctggcagagttgaaaggagacagatacccagttcggccttccatccaactctctttgccccaaaactccaaaggtgcgcggccacgacagtatctgggccactggtgttcgacgtgattctccgtatttactaaaggagtaaatacggagaccttccagcctttatagcacgcctctcccagccttccttggcgggcctggaccaaatccaactcggccacacacctcaacgtctttccgggtgcggggaggcgtgacccccccacctccctctgcacccccttgttgatccggaaatgaaggcgtctaatttttaaccgcagactgcaggagcagtgcccgtagaccccttcggggcaacacaggagaaaacctggaagggaacccccagggaatgccctttgagtttccccttgtcccttctctactttcagcccccagtctcttcccaggagggtatgcacactctcccaggagggtatgcacactctcccaggagggtatgcacactccccctggagggatggctgcacaaacgcactgccctaggggcttttcttccagcactggcgctccggaaaatgttgggggtagggggacaacttctcacctagttcgcagagtcggctaaggtgatgggggttgcagcacaccagctcggggttgatcttcccgtaagattcacagcaacacagcctcttgacttccgaggaatgcctgagatccggccacctgaacactttgcacagcaggagggggagcgagtaggacgagggcggctgcgcaggctgcgcgccggcgggcgcccccgggcccagcctgcagtccaggcggccgggcagcaggaggcacgcggtgcgcgtcccgccgcgggactccacggcctggagcagcagctccagctgccgctccttcagtttcttgagcaccgagtgcgtgagcgccttcagatccgcctcggcgcccccggccgcgccggcgcccgcggctggcgggtggggatggtggtgacctttggcacctcgcaccgccttgcccaggcagcatccagccctgcccgggccgccgccaccggccccatgcgctcggctgtccgtcgccccttctccccgcagctcgcctcctcctccacctccccctgcgccctcctcctcgtcctcgccgccgggcgcacggctcctccagagacgccggacgagcgcagatcgtttggtcctgaacatgcggggcgaggaggcgaggagaaaagtcgtttgcctgctaaggagcgaacatgacctccgcacaccatgaagaagtcgggcgccgagttggggcagcaggcgcaggcgacagcagcagcagcaggggcccgggcaggagcggcggcggcccgaggggcgctccgtggcatgcgccagtctcccggaggccggggcgcgcgcgggggcccgggggcgcccgccggggatcgggggcctgcgctccggctgccccaccccgcgcggcccgcgccctgcgcggctctccggccccggcgcgccccggaggaacccggccgccgcttccctggggacggccgagcctgcccccgtcggcgcctccccaaaaagaggcccccccgcagtggctcccgaatgtcgggctcgccagcctcggcttcctacatggaaggtccgcgggggcaaaaaacgaaaggcgttcggctgggctgttggaagaaggaaaaagcctctttcccccttgctaagcaacttaatttgggggtggggagaagcaggcaattaaaaaaaaaaaagcaagcgatttatttttttcctctatatccttagtaaccggatctcctcgaattccgcgcacacgaagactcaggggagggggccgagtggacttcaccccgcatgagacgtctggcaaaataagaaggctctcgcaaaacctaacaaccaaatatgcaaagccccaaatgaaaaccaccacctcctcgaacctcagaggtctgggggcgtccggctggaactggggtttaaaaaaagaaaatgtttacaaagtataacaagatgtttgatgggtggaaaaatgtatccacgagttacatccccccgtttccttgcaaagccccgctggtcttcctctccttttcttctgccaaaaaaaaaaaaaaaaatcgtgtatttttttaatccacagaaagctttggctagaccgcttcaatcctgcgcatctgggtggtttaggggagtctctggtctttccccctgcgctcctgggggcccaggtcctcggcggggacttcctcgaggctggcgcgggcgcaggggcagaagatgctgcggcggcggctgagcccggcggggctgacagcgcgggggagggtggcgcggcggcggcggagggccccagacgggtcgcgcgttctcgccccccccgggcacaagctgcttgctagtgcaggggccgccgatgtcccttcccctggccgcggctggccgccgaggctccccgcatgggctgctcgcctcgacccagctgcggcggcaggaggccccggtgtcctctcggcgcctcctcctccgagactctcctcgtcgcgcccgggagcctccttgtccccggtccgccctctcctggcgctccggtccttctgccgccgccaggggctcgccgcgccgcactcaggggctcaggggccgggcgctcggcggctcggcgccgacggactggctctgtctcgggcagctctctcccgcgcggcgagcggaccgagcacggcgcccggctggctcggctggcgcggctcggggacaggatcttccgtgcgccgagcagcaagcgagtgtgcccggggctcaccgcctcccgcaaggcctcccgcccccgcccccttccctcccccttcctcccccttccctcccccgcccccagccgccgcagccgcgccgcctcctccccgcccccccgcaccccccctccggccctctgctcggctggttccactgcgcagtggcgcgcccggctccggcctcgtcacgtggccgtctagacaccctgtcgctttaaaaaaaaaaaaaaagcgattgtgtttcgcaaacaacagatcgggtttctaaaagctatttctccccccaaccccccgccaccgccaccccctcccgggtctgtagagggggtaccgatggaggggagagagataggtggggggcagagaagctcccagaatggattgagccccggccggagccatggagaaattggaaaagcagggagcaccgagcgggcttcgccgcgagttttggagctgagcgagcgggtcggtggcccgatttcgacccggctgggtttcgcggtggccatctcgcgcgcgctcgccctagcgcttcattcattggttttgttttaaaggccctggcggtggatcccttggccgcgcccgagggcaaggggaggagagcgctgtctcggtttaaaagacatttataccggactggaccgaggccctgggaagtgtgcgctgaggggaacagccgccgagggcggggaggcggcgtgaatatgacctcagcggcggccgcgcgctccctcccgccctctcagctccgggctccggtttctaggactgcctggagaagtgtgtcttgtgcacagctctggaatgcatttggccggctgacgagctgtgaggggcagcatcccggcgggagaaggggagcgggggtgggggctcgcctgcgcgccgcgggcaggtttcctcccgggcccggaagacctccgccacccgccaccctgcctcccggcgcgggaaggttacccagcgagcagacctgcctagggcattcatttgcatgcaggccctgtttctgggcctcgtagctttcaaggtgcttagagtcagagagtttattccttgaccccaggtcccgaagaaacatatacccaagctggcgggttactgcatagaaacgggcatggcattgctagggcataaacgcatttacagcgtgaaagctgatggctccgagaaacgtaatgatttaaatacacacacatcagtattgatgaggccactagttggcatggtgatctaacctcacttcatattcagtgaaatacgatttttttaaaaagccattgagaattgtgagatcaggccagcagtgaaactcgttgggggctttaaagaatctttttttctttctttctttctttttttttttttttttagagtctcactcttcacccgggctagagtccagtggctcgatttcggctcactgcagcctctgcctccccagatcaaacgattctcccacctcagcctccggagtagctgggactacaggcgcgcgccaccacatctggctaatttttgtattttttggtagtgacgcggtttaaccatgttggcca

SEQ ID NO: 66295 - DNA, 2032 bp, Homo sapiens
gccgcggccactctcctaacacgggcagagggggcagcgacgtgccccggtcgctcagccagctggtggcagggctgtgacggcaacccaggcccccagacgcctctccgcgtctaggcgcttcccataatggaaggcttcgctccattaaaagttattttagggaatccacaagcccaccgccatcccccccaaagtggaaattttatgtaaacgagtcaaaataaagcaacagtttcttaataagtatgtttggagttacactctggactaagacgagccgaatcgggcgaggggatgcggacttaaaggttccagtgttcttctccatacggcaagactatttttaaaaatttaaggacgtcttccagtccacagtccacaccgcctacacccccgcaggtcagacaggcgcgagttcagcccggtgaccccgccatcctcgcggcccccaccctggggccagggaagagggcgtggccgaccccagccccctcaccgaaaccgggcctgtcccctcccccatcgcggtcccgcacggcggcggaggggccgaggggtggcggcaccgggatcccgccgccaccccggcgcgcacggaggcagggttgggggaaacacgattcctggggagattggaggaggcgatgccgccgaggctgcgggggagttctcccggagaactcgggggccgggtgggaatgcgacctccagggcagctatcgctgctcccccgtaactgccgcagggaccctcccggggtgggggtggggacgcggggcttccgtcccttccgggccgcggaggtgcaggcccgaggggcccgtgcagtcagacgtgcagtgtgcgcggcccgtgactcagccgggtggcgacgcgaggccggggaggcagggggaaggggcgggcgggccgggcgcgcaaccgggaccccgcggcctcgggagaagcgaggtgcgcgcgcccaggagtggggggcggggcggcgggcgcgcgcgcagcggaggcgccgggcggcggcgagggccgggccgtatgccgtcttcccggcgccgcgctcccagagctcgcgccgcctcccggggcgccgcgcgggtggcgcaggtagaggccgggcgggggtggcagccaccccggggctcaggttccagccgccaggcttggccctcagcgggcgctgtcagagggcgggcccgcgggagcggggcggcggcggcggcggcagaggagcgcagggcgggcggagaccgtcggggtcacctctccagccccccgcggtggccgagccacccgcagttgcgctcgaggcgccgaggcggggtggccgagcgagacccgggccgggcgcggctcgggccgcacagccgcggcggcggctgcagacctgtaaaccttaatgacagcaatcttgcccgtctgcgcctctgactcacgtggtgacccagcctccagtcacccggcggccgccctccggcctcagtttcccccgccgccgaacaatgaagccactgtgtcgccgttcatttctgagcgccgtttcacacgcggagcgccgccgcctccctggggaagggaccgaggcgtccggcttttaattatccccggtgggcgggcgtggggaggccgcgctctgctggataattgaaccctgggactattccctcgtcagcccaagctctttatcttaagccgtcctttcctcttcatcgtatttaaattttaccccttcctctccacgctggtgggactgcttgaaaaacaatgaaatgggccggttaggtggctcacgcctgtaatcgcagcactttgggaggcccaggctgggggatcacctgaggttaggagttcaagaccagcctggcaaacatggtgaaaccctgtctctattaaaaatacaaaaaaaaaagggggggggggaaagaaattggccgtgcatgtggcgcatgcctgtaatcccagctacttgagaggctgaggcacgagaatcagtagaacccgggagaaggaggttgtagtgagccgagatggcgcc

SEQ ID NO: 66296 - DNA, 764 bp, Homo sapiens
gagcctccccgcctgtccacatatgtgttcagctggtctcctactcaccctcctgcaccctctgcctgccacactgctcacccagaccctacctgtccccatcccaggtccagtctgagccacgaggcttagcagagacactgctgccttgaggcttttggggtttttgtgtgtgtgcgagaaggggtgtccacacccatgctgtgggctccctggtagcaaagggctgcacacccacactctcccctcagtgagcttccaagagggggcagggcacacaggccatgctcggtatgtgtcaccattagtgagtcatggcagtgtttggaaagtccacaggagcaggcctctggagtccgggattctagaactgaccagaccaccaggtgctgcgcgaccctgtgaaggtcgcctcacctctggtctgtggcatcctcagtcctaccccaggaggagattaggtcagtctgtccctgcagaacctgttatgaaggaggccagggagagctcggcatgtcacatcagggtcacgccactccgggagttcatcccaggaatgatgggaggggtgctggggccaccctgccctgaggctggatgggattctgacctggtctccagacaggacctcttcattcctaattcccagaagcagaactctcgcctggcctccaagagctctcctccaggaaggagggaccacactgactcgggccctcccccaattcctcctgagccccaaccctgccaagcctgggaccctc

SEQ ID NO: 66297 - DNA, 1453 bp, Homo sapiens
tggcctacaacagaatgccctgctagtcagattttgttttacaaaatgaaatgattcagtacgtcagaatattttagataatttagcctagttccattccttaaacatatgaactagattacatactttgtaataatttaaccttcacttatccaaacattctctgtgccatacaactacatgtttctctttatttttgttccttctagtttcacgaagtttaaacaatgatctctggtctaagttacaaagctatgctgccaataaggtgattcgtgtcatgtttaaaggatttcatttttgaagtggaaaaaatcactcctgtgaaactgacactgtagtttgaaagacgaaaatgccaacataaaaaaaaaatcccattcaaaagggatgggatttgatatctatgaaagtagcccccagactcactccctggccacctcccactccaacctttcccctgtggagttctcaaacccttgtattgactgtggttcccacaaagacaagaagtagtgaacagcaaaatagagtaaatgcttttcctgaactttggaagaaaccagatttcgtcagtgaggtttggcaacgtgagaaaccctgtaaccaatttcatttcctgataaatgaatggtccacaggggaaagtccaccagtgagtttcggaacgtttgagagctgagactttatgaaaggctccttgaaggagtcagcctgtctttgcttatcattgctgagacagacagcgccgtgcaaataggagagctgccagactccatttagagcccttgctgaagcacaactgatagggcttcacaaacatgtgatatccctttaagaaaggacattgctatcgtgtgccccttccattagactaggctcttaaacctgcagggctggaaacatatgcctattaaaattatttcagaagagcaggtttaatagtcttctcatttaaatgtaactcccctcgtccaaccaaaaacaaaatatccttggcattcagttttgatttagagttgggaaaatgtaatgtataaaaatgaacacatacgtggataaataagagtaaaacatagtgactcaatctcagggaagttatgacaaatagaaagtgcctcaaagtattgaaacaagttcatctgaaatgtgaatagcctcattcgtcacaagatcatttacattttaaacttgaaatgagtatctttatgtttaagtaaactaaaaggcaattctcataactctatatgtgctatatttatgcctaaaaatttaaaaatatcttaacacttttcaagttaattcagaattggccaaagtacaaatatgtttactgaattaaggtaaacttttgtcaaaggttaacttgacagattaaaaaatatgtaattttggtttgcttagaaaacacaaacaataccacctccccccacccccataaaatagtcaaatg

SEQ ID NO: 66298 - DNA, 712 bp, Homo sapiens
attaaaacttggacacagtgtttttatatgcatttttcccaactaaaaaattgtttgcatctcaaaaacatttaatcgtgctaaatgtattttatcagaacttaaattatcaaccagctaatttggcattttcatatcaaacaagctaaatgttcatttatcatttgagaaaagttaattgtgtaatgaaatcttcatgaaaccattataaaactgcacataaacagaaaaacagcctacaaagcagcacagaaatcattaactctgttatggtgaaataaagcatggtgacaaaggttaactcctggaaactaaaggctcttcagaatacctgaaaaactccaaggtaggaggagactgctatgtttattttaaatcgtgaagttcacattattccaatgtcagtcaactagatgatctctcaagtacaaacccaaaaaacaatctaatagaatgtattaagaccagacataaattaaatagtgagtcaatgcaaaatatcctgtactaaattctgaagataaacagacaacttaattttgagtaagttaaaaatgagcccaggtcaatcaatggctaaccaatgaagagaatgtgagatcagcatttaaaagtgatacggagttgttatcaccaccaatgactgctaaacaaaactgaatggtcaaaaccacatgcccagactgaggcaggaggatcccttgagcccagg

SEQ ID NO: 66299 - DNA, 2019 bp, Homo sapiens
ctaaaataaaacttcaaagcaggataatcactccagaaatccatatattcataaatttcatcctctgcaacaaccattcacccattcctatagattctcttcccttccacctcgttcttctcttgagccctcaactcatcagcctaagcacctgagttcctctggtggacgctacattcctctccacggcctccaccctccaggttttcatccttcagcacatcacccttgctctacacacccctctctccaacttcccctctcctctttcaaggaactcactccatctgtgccccctaatcagtctatcctgggtacccgctttgctggccgattacaatcatcccatcacttctctacccctgttcagtagagaacagctttatccaatcagctttaccacaccaataccctcaaaccccactactgcccccagttcacaaacacccaccctttcacttttcagtcaaaacacaattgctcaggcaaatccacggcgactgaaagtagatcaatagtgtaggggagagaaggaggagtgactgctaatgggtacgagcttctttggggcggggggggcggtgattaaaaatgctctggagttaagggtggtgatggctgctcaaccctgtgaatatactaaaaaccactgagttgtacttttaaagggttaattttctgatatgttagttatacctcgataaactatgaatgtaaaaagaagaaagaaaaacccaacagctattgctcaccctgcccatcacacgcccatttgtcagaccaacaccgccccatctccggaagcaccgacttggccttcggtatcccccaactcccaacagcggactcggacagaggtccgtccgctgtcagcacagcccctccgggtggcccaggcgcccgcgggcagggaagggagggtcccttcgccgccgccccggggcgctggccgggttgcggagggtggcccctgaccccctctgacaggaggccggggacagccaggctttcgggcccggccgcgctgaggggggcggcgctacagcccacctgtctcagccggctgggggatctgctccagctccacggacccgcggacggatgggagggtggcagaggggtcaggagaagtcgctgtcgccgccgcagcccaggtggcgcacaccggctcaggcctccatgtttccacgtctcagcgggtacagatccggctccggtccggcctgcagctcggccccggctcggctccagcccgggccgcgtcggtgcggaggccaggaggcggcgagagaagagggaagcgaccgagaacgcggctagggaccagacccccaggcgcgcgcgccagccaggtggtcacgtggcacgcggcgcgcgcgggcttctggaaactgtagtcctttgggtgttattcgtgcctccgccctcctagtacctcctgggctaccgcaaagccacgtggcgaaatcgagaagcgcaaaaacagccgtgcgcggtggctcacgcctgtaatcccagcactttaggaggccgaggtggacggatcacgaggtcaggagatcgagaccatcctggccagcatggtgaaaccccgtctccactaaaaatacaaaaagtagctgtttgagacaggataatcgtttgaacccgagaggcggagattgcagtgagtcaaaaagtagctgtctgaggcaggagaatcgtttgaacccgagaggcggagattgcagtgagtcgagatcgggccactgcactccagccttgcgacagagctcgactcttctcaaaaaaaaaaaaagagagagagagagaagcgcaaaaacctcacctgccgggtgctagagtcaacctcacctgccaggtgctagagtcctcgctcatgctacaccgctcgttctggcggcttaaccttattaaggcctctgttaattgcagctgaataaccatcccaaagtcaagcaatattgtgtgggattctggagaattgagaaatagcaaaataatttttgatggaggcag

SEQ ID NO: 66300 - DNA, 1544 bp, Homo sapiens
accattatttccagttctggttttcctcaatgctcttgccttttcctcttccaaaaacacaatggtcatgtttttaccaaacttttaccaaactttccaaaccaacgaaaccccttcaaaacaactgacaatgctaccagtactagtttagtgactgacaggccctccatcataaagattcatttttacttctgcaattgtgttttaagtaagttcgcacacagtacgatgtacataaactctcgaggacaaatactactaatcacttacgccacaattacggcttttaagagactttttagctctcttcggaatgaagcctatttgtatcttatcttttaatcttcataataatacttcggtaagatattttacttcacacatatggaaactgggtcagaaaagtctagaaggtggctacgagatattattattttaattattcgctccaagccaacaaagcgagcaaaacggattaaagctgttgcagaggaatcttctttcactcaacttaagtccagacaacagagtagacagttaaagtctgaggctccatccgaaatagggaaggcataacagggaaagtcaccttcctccaagtcatccagttgagcatgtcatcttagtggagacagagggagcggggacaggttgagtcaatgacaatgattgaaaagagacgagaacagaggcctaacggtgaaggtcatagaaaggatgtgaaaccgatacttggccacggaaaagaacaaaatcaatataaagtatcggagaggcaaatgcaagctccgagggcgccggtggtggacaaagaatacagacagaggggaggggagggcggggcggagggcggaggagcgcgctcgcggaaggaaggtaccctgagagcgaaggcaggcaccgcggaggccggcgggccgcgaccgccgaggagggaggaggcaggaggccgcgcaccgcctaggactctgcgagcgcggcccgggctgggcctgcggagcagctacaaagcccaacccaggccgctagcccgggcacactcacccgcgaccgcggaaacgcagctgacaatgtccgcacttccggagggagggacgatccgcagccgagccaatgggcgccttcaacggggacgacaaaggcgcgcttgcgtcaacccggggtcgcacagcacgcagcagtgttgcccaaggggcgcggcgaggcttccggctctgcggcctgcaggtagcgcgaaagtcctgcgcgtcccagatgcccaactaaaagcttcgctgcgggaagaaagcctgacctgactacacccagacccagaacgcaggatctcggtaaaggatgatgcctgtgcaaacggcgcggcacccacacggaaggtggcagctaggccgttgaggcaactgtggataagctattagttttgctggtttcttaaattcaagggcagagcaaactaacattaaggccaactttacaaacgtcagttgcttaaaagaagcagttacatcactttataaacgaaaagtactgacgctcgctaggatgtc

SEQ ID NO: 66301 - DNA, 1386 bp, Homo sapiens
gaatcgcataccttaaagtgaacacgaagattggaacctcttgatttgcatgctagaaaataaaacgttttggttaatttttggtatcttatgccaagccccaagtaggaaatgggtatctacctcctgtccacttacatttcgtggggttctccgggtcaagtgaatagcgaaccattttcacagatcacctagaggaaagtacagtgtaattctgtcaatacgtacttacagtaactcattcagtataaatatcagatgattcgaacagctgctcagagagtagttgttttcattattaatccaaaggtgtcctaagaaatgccatcatcgcagccatactttcccccaccaagggcttgctttcccttttatcttccagtaactacagcactgcttccacagaagtagccacacgggcctcaccaatccagtcaaccctttggaagaaaatacagcctgtttcaatccaatgctggatcttccaggcgtaaaatgactcgacgcatccgcagggcacaactcaaccgtaaccctctacacctcctccctcccgctctacagaaacccctttgctgtcagggctgcaggtagtgagtgccgtctctctcaacaccttcgggctatgacccactttaagagccctcctgtacgcaacactcttgtagtaacgtgttacgcctccacccgacttttctttcccccaaaactttttcctcgttgcggccaccactcaccactagacaccggacctccggagtccgcacggaccccaggcggcccgcaccccacggcgggccggcgcccccaccagtggaggagcccggtagtccccattcccgcccatcacgtccctctgcggacctcagaggccgactgaccccggctcccaaagtcaggccctccgccacgtcctcccgcataagaagccaccgcctccagcgaggatttagtagccctaggagttctcctcccgggggcctggaggccggcgcccccgaagccaggatggcggcgatggcaggaggattgggccctcggagcaacgcaggagaaacactcacctcaggctgcttagggaaagaggaagagcggtggattttgggagaactcatgagaacttgacttctcgcgagattcgtagccgaagaaacgagatctgaggaggcaggaaggcggaaagcgaagggagtgtagaatatgttttaagaacgtgtgaaaacgaattgcctacttagggactgtctcaaagttctcttttttgtatacagaaataaaaattcagggttttaaatgtcagtcaattaaaaacagggttgtagttctaggacaggctacgtattattagatatgaaagaaacattttatttattcgtcaacattagt

SEQ ID NO: 66302 - DNA, 886 bp, Homo sapiens
aaaaccccatctctactaaaaatgcaaaaattagccgggtgttgtagctggcacctgtaatcccagctactcgggaggctgagacagggagaattgcttgaacctgggaggcagaagttgcaatgagctgagatggtgccactgcactccagcctgggcaacagagtgagacttcatctcaaaaaaaaaaaaaaaaaaaaaaaaaaaaaaaagcagagggtctggatttctagataatatgaagggaggacattgcaaaacccagcagcagcggaaagaaatatcctggaggaagttgaactttaccctgcttgggaatctatccaggtctgaagcccctctaccgaggtccccagaatgttccccgctttccccactgagtctgctggggagtaaagtccaagatgacagctcagttgttcccacgtggcagtgtcctctgagggatccaaataaacctggagttttattatcctgactgtgccgataaggagactggccgacctaggcagagaaagtggaggccactgtccggtatctcttggcaggtcacactcattccttttctgttcacatcagctgggcttgtaacagctcccagtgatagcgtatccaggctggtcacccgacggtggagtcttgtccatttggaaggcccagaccaatgactgaagtaaactactcaccccacaatttactgctcctagaacaaattgcttgtcttggtgataattctcttgtgtatggctgaaactatcagctctgggataatgtgcataactttgcatggattgataaagctccatttatttatttggctaaacagagttattacactattacttcttctatgagtttctgacataaagtcagacaaactcaaatg

SEQ ID NO: 66303 - DNA, 368 bp, Homo sapiens
cctttgatgtgtaaatgtggtaaactatgtgtgtagatttccttgtactgagccctgctcagtacaattgaaaaagtttaaatagcttcagaatttatcatgcatttattcaacaagtatttattaagtactggcactggaaatacagcaatgatcaaaatagacaagaatgcctttcatcttagcaggggaaggcagactgtaaacaaagaaatagttaagatatataatatgtcaggtggtggtaagtgttctagagaaaataaagcagaggaaggagacagaggtgctaggaggcagggcaggggttgccattttaaatggggaggccagacatggtgactcatgcctgtaatcccagcactttg

SEQ ID NO: 66304 - DNA, 4558 bp, Homo sapiens
aaaggtcaattggccaaattgaacctagagcagagaagagagacctggttgtcttgagactttcttcaaatctgcagcctgtccccatgactcagttttcccatctgtaaaatggagataacattagacctatgtctgtatagtttcctcatgaagagagagacagagtgggaacaacatatccgggggtgatatttaccatcgcacacagaccattgagttctatactaaaaaactaaagcccgcctgagtcttgttaatgaatgatagcacacgggagggacaaagcgtgctctgctggcagctggagtaacaaaagtaatgaggcgaggtcggaacaggatctgctggctccggctcggtttcctcgcacaggtctctccagctggatcctcgacgctagggaggaaggggcgcgggactgctgtgggggttttccctccccaggcaggggcaggacctgttccgggcgactgcagggttaagggtatcgtcttaaagagccggatcctcccggctggagcgaggctggatggcgggacgcagcctctcagcctctcgtacccgccctgcgtccgcagtggttgttggcgcagccgccccgtcggtgttccgggctcagtccccgctccccagcgccagacgcagactccgggccaagttctccctccgctcgctgctttctgccgcaggacccggatcaataaagggaaggagagccgggaggaaatgatggagaacagagagaaaggagatgcttgatttcactcgccaaggagtgagtgctcatcggcagacactgggctctggccacgcgtcttagactccaaatctcggctcactggtccctttgaggaggtcgcctggtgttcccgtagccctccaccccaccgtaggagagcgcctgccacgagctccgcgcctcgctaagtgctttgctacgtgaactcttagttttcccaacatccctaagccgccgatacattatcacccacgtattgcggacgagagaaccgcctcggagaagctggctggctcgcttggagttttgcagctagtggcggagcgagcattccgagcaggtactgtgcgatcctccagcgccggccgcagctcacagccccttagctccgccgggttattgtgcggccgcgccttctgcacctgttgcggccctcgctaggcgggaagggagggagaagaggaggacaaaggggatgaccaggtggctctcccccgacggactcccggcccagggagcggatagaccactcccagagagagtgtggctttgagccttggagaggatgctctccttctccagggatcgcctccccagcggacgcagagtttcagggaaatgtccgcctccgccacttgggatggcagtggggagaggaggatctgggtgtccggaggagggcagtgggagaaagctggagctgctggagtcgcagctgcctgcggagcgggcccgggaggaagcggggccgagcgtgcggcgtccacgcggtgagtgtgcagcgctttcattcaaactttctccagtctcggttccggcgtcagcaaggtgtgaccaatcagagcccagagacgggaataaattatgcaaatcaccatctggcgatgggtcagatgactcccatacttttaaaaactacctctataggagcgtgacagcagcgagtccttgcctcccggcggctcaggacgagggcagatctcgttctggggcaagccgttgacactcgctccctgccaccgcccgggctccgtgccgccaagttttcattttccaccttctctgcctccagtcccccagcccctggccgagagaagggtcttaccggccgggattgctggaaacaccaagaggtggtttttgttttttaaaacttctgtttcttgggagggggtgtggcggggcaggatgagcaactccgttcctctgctctgtttctggagcctctgctattgctttgctgcggggagccccgtaccttttggtccagagggacggctggaaggtaacgtgaatttgtttttattccccccagccacttctctgtgctgggtcccctctgtcttgctgattcttcaaaccctccttgttcctatgaaattcttcctttcccactgcgctgcccattctctcctccaatccaccttggagtccacctgtctctctgctggtctgatgggggcattcccggcaagtcatgcaaaaggcaaaggctggcagggtgcgctggctcttgccagccctcccacccccacctccttcccttatacggctccctaagccagtgctggtgctgtccagccagccgagcggcctggcagcagctctgaaaccttgtcctcatgcctgaacctggaggtttgagaggcaagaaggctgtcagagctgtgtctcctggagctgccttttaatcttggtgtaggtgtcttgaaagttcaggtggcagggtagctggctttggtttgattcgtgcttgcagggagcgtctggtgggtcgcttgtgcttagaagctgccgggcctattcccccaggttgccagccttttcctcttcaacactcttgtgctcccccgactcttcctcttcccactcctcctccctttcctcctcctggcttttagcttctcttcctcttgggttctgtatggcagcctttgccagtggaggcagcttgccctgggggagccagagtcagtcagctctgggggagtcagaatcagagtgagaactaagtcagctgataagcagtggagggctggggagcctctaaactgaaccccatcatctcatcttctagtctgctgaggttgtgccaaatggtctgtgtgggcttgtgtatgtgtgggagggttactgtgaatgaatggaaagccttgctttactcaacatgtttccaactctggtgctaactagaagcattgcctagggcaggtctcatctctggctcctcacctgtaaaatgctaaagttccttctaacttctgtgttctgggcctctgagtatgtgtgagtcatttccttcattgcaaaaagtatttactgcatacctacttagtgtcagacactattctgggagcaggggagagagcagtggacaaaatagatggcaatctgtgcccttgtgacacttacatttcagtggtgggaagacagacagtgcactgattaaagtatcagtggtgctcagtattatggagaaaaatcaagcagaggaggaaggtggggcatgttggtgggggaaggtggtgcgattttatgatgtggtcagggaaggcctttctggagaagttgaccattgagcaaagagctgaagggggtgagagaaggagccatgaggacatctgggtgaggaacaatcagaaagtcccagaggctgaagtgacccaggccaaaagtagtaggaatgtacctagagaactttggggtcagagcaggtcagactctaagaggaagagtctttgtccatatgtgggtttatccgcagatctgtctcaggaatccaggagacttcttttctcctaggtttccccatctggcctctgcatgagtggctatctgggtagaaggtggggagttgtcgaactcattatgtccgtggttcaaatttctgctggttggggcttttgttcattactttcatgacggttaacctgacttccgctcatgtgcattcagcagcattttctggaaccttatccctcttacatctgctgcattcttccccctctctccctcctttcccctccgccctctccaccactatatctctttccttttggtatcttcttccttttgcttcttaactctgagataaattaactccaagatggtcatttggcatctttccctgctgggtgataggagagtttgatactctcactttctagccagttatccagtgatgcatcccaggatggctgaaagagtgctgggtggggtccatttatgactttctgaaacggtgtcatgatgacagcacctacttagtgttaagccacagtggccatcagtgacatgagctgcactttgggagcagggccgtctcctaggtggcactgtgcatgagcagtgaagctggaaggggggatttttgttgcttttaggagtttctccatggctttagtcatttacttaacaaaccagatgaatgcctggcacatgccatcactagaaagggcactgaggatgcctgagtttccctagatgggaacactaggggaagcctattttccagcaggtcaacagcctcttgcctccaattccaaaatccacaaactctcaaaattggaaaatgtgtttggtaacttgtttggcagcaagacctggccttacctgatctgaacttatttggcagcaaaaacctggcctgagataacaggaggctattggttatctttatatttgccctcaaatgtgagtggttatgtattctctgcagaaatattaggatgtttgatccagggggaatagcccaggccccactggcagcattatataatatatggtgtatgctccatgatgcctttctaaaatctg

SEQ ID NO: 66305 - DNA, 1040 bp, Homo sapiens
atcggctataaaattgtaaagtaaggactggctttgaaggaaatcactgagctgttttctgctttctctgttgctgctatacttcaatttcaactgtgcttgtgtcccaagtgccaatattgcctcaatctggttccaactcctgttccttagtaacttggctggcagagaagcttcagaaagagaatggcataggtgaaaccattctggtaaattcctgctaagatatatatgactaagagttatttaatatgtgggatacagagaggaagtcagttaccttatggaacaatttaatgagctcattgcagtagcttttattttgttttaggtgggcagatgttctggatgcttcttaattgacatcacttgaggtcagtgcatttcaaactttaatgtacacatgagtcacctggggacctagttaaacttgattctgattcagtaagtctggggtggggcctgggactctacatttctaacaagctcccatgggtgctaactctgtctgctgctaggggactgtccttagagcagaggcccgggtgaccatcaacccaccttcagtgatactgatgcactcaggaaggaatgagttgcttttctctttcttgaagccctttgacactctgcacatgtatccattggagcactttgtgttgtaatgatttgtgcggggcccatcttctctatgaggctgaaggctcttatacacagtagctgcatcttatttatctccatttgctcttgacttccacctctcctcactttaacactgtggttggcacaaaaaaggcacttaatgtatgatgaggaacaggcccagacaggcctgatggtgatcgggtgagctcataaatgatgtgggctgttacgtggcatctctgttcctgcgtggccagatggcataaaccagtgatttccaaccctgactacagatcaggggaatttaaaaaaatactgatcccaggcccactccagtgttctgatttaattgaactgttttgaagcccaagtatgaatgactttaatagccctcc

SEQ ID NO: 66306 - DNA, 908 bp, Homo sapiens
aattattttttctcctcttaaaggccctgccacgtgtgactcagacccagggttgttcctgagcgagacctcagtggtaaatcacaaggactgggctccagcccacacagatgctatcctctttcttctgtgactgtgtcttagcttaagtagaaaaaaacagagaaacaaaggcactgtctcattctgcgcagctgttgtgcccaggggtactggtctaagcctcactcttcaaatccctttgcagcagaaggtagaagaatttaggcaaatagaagctccaaagaaaataaggtcatggtttaatgaccccaggcttgtcttgaatgagccagtgggtgacggatttccacattacctctggcaggtgaggttcatgggcaaacacattaaacaggaatgagaatagcattcagatttccatcattaaatatccataatatttgatcttgtgaaaataaacaacaaagtgctagaagagaggtcctatggaatagcgaaagttgattcatctgggccaaaggtgaccagctagtgtggccaagagcgtgacagcaggaattcaggctgcacgatgcttctctgggagtgaatctagtttgcccagtctgtgttctgggcccagagtgtgtccttagagggcggcccgtggcctgaacaagagcattgcggatttgcctgcaacctcacctaaatccagcaattctgaactcggaatagggaaacacggcatccgattcccaggggagcttgtgaaacacacacacacacacacacacacacacacacacacacacacacacatttccctacccatgtggttgtgtcttggtaggactgtagtgtggcctgagaatctgcatgtttactgaactcaccaggtgattctgccacatagccaggtacag

SEQ ID NO: 66307 - DNA, 3873 bp, Homo sapiens
tctgattaagacggcctggctcaggcccctcttataccctgttgctctcagcatttacatatcatggccatgactttgcaggttgacaggaaaccaaagcttcatgtgagcacattctatcatcccagttagatcaaagagggcaggagatgcaccctgcactcactagtgccctgcacactggcagaagtccagctgcttggctaactggttactcctggtgagacatttcctggcttcctgggaggcactgaaggcagtttccaccagaggcttggtctccaggaaagccaacgcaaagaagagctagctctcttggtgggaagaattcctgggcttataaaggaagcatttcaatgaccaaagcactctgtttactcattcatttattctttcattcattaattcctagtaggcctactcagtgccaatctaggtaatacacagtccctgggagcttaccatcttgttgggaagatgagacttgaaacaatgggacaaggcaaataagattaaatgccccagatacttgatttgaatcatggattgaggaggtaagagaagaatggtggggctataggagagggtaggtgctctctaggaagcaagcggtttcccagccctggaagaaagggtaggatttagacatgtagatgagaacatggaagaccttccagacacaagaaatgagcaaaacctcggtgttttgcagtgagagcagagggcattctggggcagtggagggagcttgaagaaatcagtgtgggttctgtgctgctgccctggatgcagcaggccggtgggccatgctggccattccaagccttgtctgggaattgctctggtaaccaagaatgcactgagagtgacggacgtgctgaggctgcactcccctcttcccatgccctatgagcaggcccaggcggggccgaggccccatccaaaccactcttgtcttggttccggcccagaagtagcaagagaagctggaaaggcaaagcttcttgatttccactgctttctgagctggccaggtggaaggcagccagggaggagcagctggcgacagcccgcctgactgcctcggatggcaggcagctactcaagggaacaattgggcagaagcagggggcaggggggtcagggaacatggaccagtggaattctgaacaaggtcaaagtccaatttggtacagtgcttgattaccaatttaaatctcatctttccttccagagtggctgccccctgcaggagaggccagggctgccacaggggaaatttgcattttaggattccaagtgcagggtgccctggcagggctgtactcagccggcggtccaacgggtgctcgcccttgcacctggcagtcgcatgttgaatatgctcctattttccctacttctggctgcctgtatgcttgggaaacaaacacaaaacgaaaaactcttcttacctcttgcagtcaggggaggatcccaaagcatgcagggtgggaggtggtggggtctagacagtgggtagtgatcgtaggtttttcacacctgaggctggaagaaagtgctaagggattggcagtcaaatgggcagcagggcacttaagggggtgatgtggaatggagcccatagaaagaggcaggaatctggggtgcagtggtggctcaagggtgggttctacagaaatggttgatcgattgattccaggcatgtaattcggtttgaaaacaagctcctctttgagactcttcccttggggcagttggttctcagtctttgacttcacctgggatgcttttgaaaatattaatgcctaattgttaatggcctggaaattctttcctactttattttattcatccattcattctcatcaagaaagcaaacctatgctttttaaaatttttaatttttgctcctaaaaaagcaaacccaaacctgcaaattctgatttagcaaatccacaacttctgtctcttcccatcaacaccagtacctctaccaccattaccaccatcccaaggtaaggtgtggaaagctcctctgccctggcatgtcctacagaactccctggggtgggtctttttgttacccctttaccattaaatcaacacacatttattgggtacctaagtgttggtgagaatggctgcacagcctaaagtctaggctgcttttggtgtttggtttctttcagctgtataggactttctgtgagaagagggagtatgtggtgcaatttgttcatgacatcagagttcatggggacaatgacctgcttgcagagagtttgcttgctggcatatccaaaggcaatgcctgttgcaatcttttagctgctgtggggctgggcatcaggactggattacccaacaccctgtgaccaggagccttgtgggtacacacacacacacacacacacacacccccacacccttccttacctgaggcacctgaagatacattttgtgcatcctgcagttaagttgatggtcaaccaggcctagctggcccagactccatctgagtaatcctgggactcatggagtgcacttagatttattgtgggccccaggggttcatcactctccccttttcaggtgacaatggggacagaagctgccgtgatggggaccctctgttatcttttcttgtctgactggaaggagaaaggaatgcctgaaatcagcctattgcagaggacagtgggctccctcaggactcagagtcctcaggctctcactggtgtccatggctggcaggatgtctgggaggctactcagagatggccactagataaccaggctacatatgatatttgctgggacacgttccccacgtggaaactccagccccacccagtcccatttgccactcaccttggaagtgttaggagcttttgtgggggcacatttaggccccactgcagatcagaaatcctcagtagctccaggggcccacagcgtaaagcccagaggccttcgggtgccatccaggacattttgtcatctcctcccaactgtcctctccagccccttctgcctttcctctcccttggatcttctgctcagactggccccctctctgcccacctcacccctgactcacctaggatgttccccaggcctttgaccccatgtgccgttagtaccgaaggtgggggagcactcgctttctccctggatgcccaccaaatcccgccacacattctaggaccagttctaggaaacctgcctccactgggagtgatttctgggcgtttctccagggtggtgccttgtattaatcacctctgcatctgcagtggttggtatggtgtgaagaagactctcaagaagccctggctggatcaacactcgcacacgaatgatctctgtccttcctgcagcactctgccttaggtgtgcttgtttgcatgtgcgtgtatcatcttaaccacctcatgagctcacggaaggcacagccatgcatttcactcctctacgacctcacaggcagccggacctcttgtgcatgcaagtgttctgtgatagatgtgttctgatgataaggaagacagacattgaaagtagctttctttctgctccctgatttggaccctgggctccagccaagcctgtttcttcactgtccctgtcacatgctccctgctcccctgggcgatcacatttgctcattctgtactctagtccctacttttgtccccagtcctggttattgtccccaaggtcagactgaaccccacctcatccataatccccacctccagatctcttgggaccggaagactgcaaagatgctcagttcaccaactggagtacccaagcaataccatagttcttccttttctgtaaaatggctcaatgctgacttcacat

SEQ ID NO: 66308 - DNA, 3688 bp, Homo sapiens
aatggcctaacacatttgtttttttctaaggaccaactaaacagaacactcactggctgactttcatgaaagcagatgggggattgagaccagagtctaacaggatcagacagtgattggcccatggcagactctgggccatattaggggtgccaccatgtacccccatgctcagacagtgcttggcccatggcagatctcctgcagaggcatttgtgaaggactggatgctggcttacctgtcaggcattattccttgtgggtattacttcaagtaattcttacaagagtgttgtaagttttatattgttattatttattttctacagaagaattggaaagcagtgctcagggcctctaggagttgacctgaggctgttaagtgagatctatttacaggacttgtggctaataggagtttagaaacttcttttgggctctacacagcctgactgtcaaaggtgtatttttcactgtccaaagtctgaaagtcaggctctgttgaaggacatgcttgtgacatcaagtgggaaacaatggtggtcattcttgggggcagagtggtgttgagaaaggagctccgaattggaagtccaaaatctgagaaacaagtgtgggacagcccttagcatctgttccacactctgctcctgatggctgtcgggagccttatctcagtccaggcttccctaccagagggatttgtgacctgggcaagtccttttatcttttaggcaattgtccagcacttcctccctgcctctagaccaatggaaactgaatttctaggaggagtccacgtctatgtttttaaaagtccccaggagattctagtgctcacagggttgagaaccaatggaaaggggaggaatctggaggcctcgagtgctgagatgggaagggaacccccaaggaaatctcagggaagacaggggaaggcttcaggggatacaggctgactgcacccagttgtaattatgccctgggtagggactgggttggggatggggataccacactttgtagcaggaaagaacattcccagagacttgtcatggacctctgcgacctggcacgcctcccaagcctaccttctttgccctgctccccagctgcacccagttctcagctgggccccccagtgggaggcctgggcaggcctcaccatctgctagaagcctccctgcgtgtaggccctgctggtcttcctggaggctgacctcccctgcaggcgttgggaccatttagtgtgacaccttatccttggtattacccacattctaattgtcctatccacctgtatctgtctcttgtgtgttttttttgtccttgagatctgggacagagtcctgcagtgcaaacagcatgggccttggaggcccccacacctgcacgtgcattgtcacttattagcagtgtcactttcagcaaatgattaaccaaagcctcctgccctcatccttaaaatgggaacaatgctgtcttcctttgaggttgttgtgaagataacacgaagcaatgtacataatgtccttggcacacagtaggtgatcgatacatacatgttgattaaccaagcatttggataatcattgccgtaattataaccaacattggggaacattttgcctgtcttttcacagaataaacctgtgagtttttattagtcttgttttgtacacatgggaaacggggttcagataaattagaaggactcaaggcacactacgcaggagatgcaggactgggggtgcacccagttcttatcccctcagatcctctgccttctctaccctattgctccctgggtggacatgataggtgtagggtcagctgtcgctgctttggctctgtgagagcaccacctgtggttcccagctccccacctggtccttccagcagaactcaagcttgggaagcttggccagtgcgcacagctgcagggggcatggggaagggccctgtcatgtttgccgcagcctctggtcatgttctgatgttttctgctgtgttatggatgcacgccactcctgttcacgtcgctgagcagggatggggcactgtaagccctttccttctcggtgctatccaagcctcacatctgagctgccagcgtggtttgaatcatcacgtttttagtgacggtgctgttctcttaaaggcaagggtggagatgaggagggtgagggaggctggaagagggaggaggaggagaatgatggtgttggggcctttctggaaaggaactgaggaaacaggaacctcctgttcttctgctccggctggcccaaggccaccgtgatgagaggctgatgagatccaactctgagtcagcagaacccagaaaggtccctgtgggtcccctgctgactcaccatgccccttcctcacaggctctgaccagcagtgcatggagtggccaagctgcagtgtccaggccgggtcctgacttcctgggccatggggaggaagctgaggaattgaaggacactcaggattcactgaaggggcttcccagattttggtcatagccgcagcaatgatctcatgggattttttcctctttacattttatccagaacagaaaagattgctccacccttacaatcctgcctccattgccaacctttttcctccccctgccctggctgtgccacctggtacagcagcgtctgttgcaaagagggtgccctcacattggggtaggtggctctcagcagctcagctcacaaagatctcaggcctcacccagggaagcagagggaagctccccagtgctcccagacccctttctatgccactagcccctttgttctcaagacaggctgtagcccaaagagctgcccctggaagcatgctggcgggaagctgtgcatcatgggagctgagaaaggggaaaacagcctggcctgggcttgaaggaggggtgagaggagccagcaggtgaatggagctaaggatcatgaaatatccccgagggcaccccagcaccaggcttgtcttcctcttcctccaggaggggcaagttataggggggtccattgagagacagacagttctcttcctctcctatcctctgcttggtcagtggggccggcattcctggggaggtgggtgtggctggggctcctccgggtctcctcgtgctgcggcagcagagtgtgatttgagggcagggccagagtgaagctggttttgcctggacctccactcagtgggaactgaaggcccccagcttcagggggcttctttgaataggaaaggggaatgccaaggggcagaagaagaggaaagaaaagagggcagtttgatctggtgatgtgatttgtatcttggggacagctgtacagaaatacacaggaaatgggaccctgcctcgaacctttctgtgttcagaaaggtcagtagtgacctacatgtaggcaggtgaccaggtagctgcccacaccagcagctatgtttgaagtgagaggaaagctagttattagttggagtaaataaatgttaaattttttgattggagggaaaaatggaggagtgtgtgtgttttggggtggtcttggggaagaacctcagtgggctcagccagtgtcaaagaggacaagtgtcactacatatgttgtggggcgggagtattaagctcatagaatgtggcaggagagggcaccttcctatgcccaggtctagc

SEQ ID NO: 66309 - DNA, 1735 bp, Homo sapiens
tggaccaggtgacaaaagtgtggccatgccccagactttttcactagggaccctgcatgagccagcaggtgcccagagagagcccccgccctgccctcaaggcttggctgagggcttcctggaggaggagtttggctcaatgctgagctgaaccaactgcagtttttggagtctgcacgcatcattcacaatcccgtggagtattgtataagagccacatcgtaactttgtgactcgctgctgccagggccccaaggaagtgctcttcctgggcacgaacccaggaccttttagcatggcccagacatgagtgccctttgaggaagtgaacatggtctgggactggctgggcattggagggcctgtgctaacccctccccaagagcactgtcttagctgggactggggtgctgggactggcgtgctcagtgagaggtgagtggtgcccgattctggggcttttccagaacctctgtggaaagcctgaggtcttctcctttcactgctttgtccacaatctgtgttctctgctattcctggctcccagagaacacaacctcactcctgctgagcttcctgccaagcagcaagaacagcttcttgggatcttagtgtcccctctgccggcaggtgcggcggctgggggttcggctgggggtgggagtggcccggctggggcagtagtgggcgcgaatggctttggcaggcctgatgccagaggtccaggtggaggggctcctgcatctctctccccgtaacccacaggaaaacagggctaataggcagtgaccaagtgagttgaccaagtgagttggggctgctgccgcggctatggaaatgagtgcccctggggcctggcatgggacacattcaaggcctccaagtcactcttgggcaagcagataacaacacaccctggactgaagccagaggtcctcctgggctccctgcttgccgggaaacatacccttcgatctgttgaactgtcttccaacctgctgtggcagttttgccccactcctgtttgccgtgctgagtcctgctttcctcaccttccctgagcattgccctttctgtgggagggaatcagcagaaggtgcactgttgcacttcagatgcttctacctcgtcgtttcctcggaagtctctattcaatggggagctccctagactggctgctaaggtcgcatttgctttttcagaggaaataccttgtcaggaaccctacccatccttatagaacagctgccttcagctaacccctttcctcataggggccaggacaaagcatgggacaagaaattcagagtgaccttctcatgagaggctgaggctggctcaaagaattcggtgcggcagagtgaaagtcagaagacctggattttcatcccagctttgcgacttgtgagctttatgatggtcaaattgatgaagactaggcttcaggctgctcctctgtaaacgggggctgtctccctcctggggtttgtgtgaaggcaacggagacaacacttgaaagtgtcttggccgggcgcggtggctcatgcctgtaatcccagcactttgggaggccgaggcaggtgaatcatgaggtcaggagatggagaccatcgtggccaacatggtgaaaccccatctctactaaaatacacacacaaaaaattagccaggtgtggtggcgtgtgcctgtagtcccagctacttgggtggctgaggcagggaaattgcttgaacc

SEQ ID NO: 66310 - DNA, 896 bp, Homo sapiens
agtctccaactgtccatttctgaagtgagtacctttgtgcagaggctcaccaaccacatccgaggtggaggtgacctccacgaaccagctgggcaaattcttgggctactgactggctcgagactctccagatgtgtgtggctgtcatttggaattgtcccacagaacagacaggctgcaaagcagggagcctgaggctgactcagatggcctgccagagtccacagcagctgggctgcgtgatcaagactgatcactttctggaccatgtgtttttctctggaaactcaggtttatgatgcttatcataggggctatcggtgggagtgaggaactgatggagaaatgctttgaaaagagtaagtgtcagcaaactgggtgggctggcagcctctgctcattttgctgttttgctttcatgaggtgacttagccacaggcagagataaggcctgtcacctccggccaagagccatcctgtaagtcaaaggtttgttgtcaaacttaacaacgtggaccagggctgtcccattggaattgaaatccctgggcactgggggaagtaggttaaaagttctgatcagggccaattggcctacagggcaggacactgggacacggtttatctcaggtcctggctggtatggctcctgctgggagactgatgactgcagagaaggatgtgggttgggtgggagtgatttcagggacatagggaaaaatataccccccagtatgggtgtcctgtgagccttgatacgctttggaaatgttcacttacaaatgcaattcttaactccattaaagcttaaatccctttggaagttgtgaccccgaatgctagtgtgagtcacatacatttcaacattagtgagtatattagttcattttcatact

SEQ ID NO: 66311 - DNA, 601 bp, Homo sapiens
ccatccatccatccatccttccatccatctgctctccagcagatatttgtttaagcactactgtgtgtgctggacacagctatagccacggtggaggcagtggccaggagaaaatttatgcctggctgttcccaagtggctgatgggctctcccgattgcccatttaccagcaggctgtggactctggttcctgtaaactttgataccaagaaagctgactctgtataaaatttaaaaattgtgaaacaagggaggttctgaatgtttacattctggccttttggctcaactccaggaagagatacatgtgcagggtgcaagatataatcaattcaccagttcccaccaggaagtcttgctcatgttagggacaaagaaagctgtctccacaccaagactgactgcctggaactggagcaacagggactaaaactttagaaaggcaaataggaaatacctttttgtttctaaagattacccatgggataagattcagggtcagacacagaaacttcctattgttttatcaattagtcatgagcacctatcatgcccacaatctctactgagtagaggacacaaggagagaaataggaattt

SEQ ID NO: 66312 - DNA, 975 bp, Homo sapiens
cctggtgcttgttggagatttaacacagttactattatttactctggcaatggtaccatcctatttcactcacacagtttctccttgtttgctaagataataactaagtctgtttcctcggctggacaggggcggaactgggcacagggcaggcccctgccgacccttacagatcagcagaaagaacctcttacttggcccatggtttggagtaataatcaaaatccgtgcttgggatccaagaactgggctgagccctgggctggagccgacctaccatgagggagatgacaatacagtgaccaatgtcccagtttacacaggactgaggggtttcccgggacgtgggcctttcggtcctcaaaccagaacatttctggaaatggctggccacatgacagcagcaagtcggggccagggtgaatacccttgggcctcggtagtgcgaggagtggcttccagaagagagtttggggcatcccagtggcagtgtctggggccaccctggagagttatttcctggtaaaggtgaagggctttggagcaatgaaggaattcctgggaaaagaagcccatgggccttaaactcctgtggggcagggaagccaggccgctcttgggcccctagagcactgagttctgatattgagggtcccaggattggggtgctgcagagacttgggtgaacaatgtcatgaagagggggaggccaaatggcctccactgggcctttggtggcaacattctcctctcagcatagattctgggaaaggtgaggctttctggcgccccctagggcccaaaggctggagcaagcccgatggggaaaaggcactgcagttgctctgggccttggatgagacttcctctcatgggcctccattcccctatctgtgagacgcctaaattactcagggacacatctagctgagacagtgggtgaggcaaagcaaagacattgatactactttctct

SEQ ID NO: 66313 - DNA, 686 bp, Homo sapiens
ggtacccaaggccactgtgactgtgtctagagtcacccttgccaggccctgtccactttaccaggagtcatgggtggcttgatttagaattcacatcttcctgcctctccccctactacgagttttttcttgaatttgcaaggatggattaattctctaggagcatcttgggcctccttgcctgcattatattttatgatgtttaatctagtgaaatgggattaaaatagtgtgaccctacaccccgacttgcctgagacgggcctaccttatgcctgttgtcctggcttaattattaatagttcccctttgactctcaaaagtatccagcttgagcaataaccgatagggtcaccctggctcaaagaattatcaaaaactgcctaaaagaggaacaaagtcagcttgggtgttctgggtggagggagctttgtcctaaactgggccttggtctggcggatgggccaggctgaggtctctgggcctcctgtccttcgtggcaagagctgggccctcttctggatcctgaccttgccacctcccagagcccctgctgcccacctggtctcttgtcacagagcagctctgaccctctgtcccctctgactttgaatgcactgcagtctgtgtgagggcacaggccggaaagaccccacccactcctagaaacaatgtcttcctttctg
